United States Patent Application Publication US 2026/0227408 A1 - sequence listing, part 2

SEQ ID NO: 4136 - protein, 3124 aa, Homo sapiens
LGTQGYALSGDGAGETFRLETRPGPDGTPVPELVVTGELDRENRSHYMLQLEAYDGGSPPRRAQALLDVTLLDINDHAPAFNQSRYHAVVSESLAPGSPVLQVFASDADAGVNGAVTYEINRRQSEGDGPFSIDAHTGLLQLERPLDFEQRRVHELVVQARDGGAHPELGSAFVTVHVRDANDNQPSMTVIFLSADGSPQVSEAAPPGQLVARISVSDPDDGDFAHVNVSLEGGEGHFALSTQDSVIYLVCVARRLDREERDAYNLRVTATDSGSPPLRAEAAFVLHVTDVNDNAPAFDRQLYRPEPLPEVALPGSFVVRVTARDPDQGTNGQVTYSLAPGAHTHWFSIDPTSGIITTAASLDYELEPQPQLIVVATDGGLPPLASSATVSVALQDVNDNEPQFQRTFYNASLPEGTQPGTCFLQVTATDADSGPFGLLSYSLGAGLGSSGSPPFRIDAHSGDVCTTRTLDRDQGPSSFDFTVTAVDGGGLKSMVYVKVFLSDENDNPPQFYPREYAASISAQSPPGTAVLRLRAHDPDQGSHGRLSYHILAGNSPPLFTLDEQSGLLTVAWPLARRANSVVQLEIGAEDGGGLQAEPSARVDISIVPGTPTPPIFEQLQYVFSVPEDVAPGTSVGIVQAHNPPGRLAPVTLSLSGGDPRGLFSLDAVSGLLQTLRPLDRELLGPVLELEVRAGSGVPPAFAVARVRVLLDDVNDNSPAFPAPEDTVLLPPNTAPGTPIYTLRALDPDSGVNSRVTFTLLAGGGGAFTVDPTTGHVRLMRPLGPSGGPAHELELEARDGGSPPRTSHFRLRVVVQDVGTRGLAPRFNSPTYRVDLPSGTTAGTQVLQVQAQAPDGGPITYHLAAEGASSPFGLEPQSGWLWVRAALDREAQELYILKVMAVSGSKAELGQQTGTATVRVSILNQNEHSPRLSEDPTFLAVAENQPPGTSVGRVFATDRDSGPNGRLTYSLQQLSEDSKAFRIHPQTGEVTTLQTLDREQQSSYQLLVQVQDGGSPPRSTTGTVHVAVLDLNDNSPTFLQASGAAGGGLPIQVPDRVPPGTLVTTLQAKDPDEGENGTILYTLTGPGSELFSLHPHSGELLTAAPLIRAERPHYVLTLSAHDQGSPPRSASLQLLVQVLPSARLAEPPPDLAERDPAAPVPVVLTVTAAEGLRPGSLLGSVAAPEPAGVGALTYTLVGGADPEGTFALDAASGRLYLARPLDFEAGPPWRALTVRAEGPGGAGARLLRVQVQVQDENEHAPAFARDPLALALPENPEPGAALYTFRASDADGPGPNSDVRYRLLRQEPPVPALRLDARTGALSAPRGLDRETTPALLLLVEATDRPANASRRRAARVSARVFVTDENDNAPVFASPSRVRLPEDQPPGPAALHVVARDPDLGEAARVSYRLASGGDGHFRLHSSTGALSVVRPLDREQRAEHVLTVVASDHGSPPRSATQVLTVSVADVNDEAPTFQQQEYSVLLRENNPPGTSLLTLRATDPDVGANGQVTYGGVSSESFSLDPDTGVLTTLRALDREEQEEINLTVYAQDRGSPPQLTHVTVRVAVEDENDHAPTFGSAHLSLEVPEGQDPQTLTMLRASDPDVGANGQLQYRILDGDPSGAFVLDLASGEFGTMRPLDREVEPAFQLRIEARDGGQPALSATLLLTVTVLDANDHAPAFPVPAYSVEVPEDVPAGTLLLQLQAHDPDAGANGHVTYYLGAGTAGAFLLEPSSGELRTAAALDREQCPSYTFSVSAVDGAAAGPLSTTVSVTITVRDVNDHAPTFPTSPLRLRLPRPGPSFSTPTLALATLRAEDRDAGANASILYRLAGTPPPGTTVDSYTGEIRVARSPVALGPRDRVLFIVATDLGRPARSATGVIIVGLQGEAERGPRFPRASSEATIRENAPPGTPIVSPRAVHAGGTNGPITYSILSGNEKGTFSIQPSTGAITVRSAEGLDFEVSPRLRLVLQAESGGAFAFTVLTLTLQDANDNAPRFLRPHYVAFLPESRPLEGPLLQVEADDLDQGSGGQISYSLAASQPARGLFHVDPTTGTITTTAILDREIWAETRLVLMATDRGSPALVGSATLTVMVIDTNDNRPTIPQPWELRVSEDALLGSEIAQVTGNDVDSGPVLWYVLSPSGPQDPFSVGRYGGRVSLTGPLDFEQCDRYQLQLLAHDGPHEGRANLTVLVEDVNDNAPAFSQSLYQVMLLEHTPPGSAILSVSATDRDSGANGHISYHLASPADGFSVDPNNGTLFTIVGTVALGHDGSGAVDVVLEARDHGAPGRAARATVHVQLQDQNDHAPSFTLSHYRVAVTEDLPPGSTLLTLEATDADGSRSHAAVDYSIISGNWGRVFQLEPRLAEAGESAGPGPRALGCLVLLEPLDFESLTQYNLTVAAADRGQPPQSSVVPVTVTVLDVNDNPPVFTRASYRVTVPEDTPVGAELLHVEASDADPGPHGLVRFTVSSGDPSGLFELDESSGTLRLAHALDCETQARHQLVVQAADPAGAHFALAPVTIEVQDVNDHGPAFPLNLLSTSVAENQPPGTLVTTLHAIDGDAGAFGRLRYSLLEAGPGPEGREAFALNSSTGELRARVPFDYEHTESFRLLVGAADAGNLSASVTVSVLVTGEDEYDPVFLAPAFHFQVPEGARRGHSLGHVQATDEDGGADGLVLYSLATSSPYFGINQTTGALYLRVDSRAPGSGTATSGGGGRTRREAPRELRLEVIARGPLPGSRSATVPVTVDITHTALGLAPDLNLLLVGAVAASLGVVVVLALAALVLGLVRARSRKAEAAPGPMSQAAPLASDSLQKLGREPPSPPPSEHLYHQTLPSYGGPGAGGPYPRGGSLDPSHSSGRGSAEAAEDDEIRMINEFPRVASVASSLAARGPDSGIQQDADGLSDTSCEPPAPDTWYKGRKAGLLLPGAGATLYREEGPPATATAFLGGCGLSPAPTGDYGFPADGKPCVAGALTAIVAGEEELRGSYNWDYLLSWCPQFQPLASVFTEIARLKDEARPCPPAPRIDPPPLITAVAHPGAKSVPPKPANTAAARAIFPPASHRSPISHEGSLSSAAMSPSFSPSLSPLAARSPVVSPFGVAQGPSASALSAESGLEPPDDTELHI

SEQ ID NO: 4137 - protein, 484 aa, Homo sapiens
LGFAGVLFGWPSLVFVFKNEDYFKDLCGPDAGPIGNATGQAGRLGCMGDLFSTPDCKAQDERFSLIFTLGSFMNNFMTFPTGYIFDRFKTTVARLIAIFFYTTATLIIAFTSAGSAVLLFLAMPMLTIGGILFLITNLQIGNLFGQHRSTIITLYNGAFDSSSAVFLIIKLLYEKGISLRASFIFISVCSTWHVARTFLLMPRGHIPYPLPPNYSYGLCPGNGTTKEEKETAEHENRELQSKEFLSAKEETPGAGQKQELRSFWSYAFSRRFAWHLVWLSVIQLWHYLFIGTLNSLLTNMAGGDMARVSTYTNAFAFTQFGVLCAPWNGLLMDRLKQKYQKEARKTGSSTLAVALCSTVPSLALTSLLCLGFALCASVPILPLQYLTFILQVISRSFLYGSNAAFLTLAFPSEHFGKLFGLVMALSAVVSLLQFPIFTLIKGSLQNDPFYVNVMFMLAILLTFFHPFLVYRECRTWKESPSAIA

SEQ ID NO: 4138 - protein, 54 aa, Homo sapiens
IALGFLRGRGEGVRDKSPSFLCFFFSFAFSSFIFLFVCIFFPLLVEVRFPPTRP

SEQ ID NO: 4139 - protein, 468 aa, Homo sapiens
VWFGAAGAILCSSPGSQETFLRSSPLPLASPSPRDPKVSAPPSILEPASPLNSPGTEGSWLFSTCGASGRHGPTQTQCDGAYAGTSVVVTVGAAGQLRGVQLWRVPGPGQYLISAYGAAGGKGAKNHLSRAHGVFVSAIFSLGLGESLYILVGQQGEDACPGGSPESQLVCLGESRAVEEHAAMDGSEGVPGSRRWAGGGGGGGGATYVFRVRAGELEPLLVAAGGGGRAYLRPRDRGRTQASPEKLENRSEAPGSGGRGGAAGGGGGWTSRAPSPQAGRSLQEGAEGGQGCSEAWATLGWAAAGGFGGGGGACTAGGGGGGYRGGDASETDNLWADGEDGVSFIHPSSELFLQPLAVTENHGEVEIRRHLNCSHCPLRDCQWQAELQLAECLCPEGMELAVDNVTCMDLHKPPGPLVLMVAVVATSTLSLLMVCGVLILGTKRLAGTVDSRLLLSSELGWVSAGSRG

SEQ ID NO: 4140 - protein, 640 aa, Homo sapiens
LEPLLVAAGGGGRAYLRPRDRGRTQASPEKLENRSEAPGSGGRGGAAGGGGGWTSRAPSPQAGRSLQEGAEGGQGCSEAWATLGWAAAGGFGGGGGACTAGGGGGGYRGGDASETDNLWADGEDGVSFIHPSSELFLQPLAVTENHGEVEIRRHLNCSHCPLRDCQWQAELQLAECLCPEGMELAVDNVTCMDLHKPPGPLVLMVAVVATSTLSLLMVCGVLILVKQKKWQGLQEMRLPSPELELSKLRTSAIRTAPNPYYCQVGLGPAQSWPLPPGVTEVSPANVTLLRALGHGAFGEVYEGLVIGLPGDSSPLQVAIKTLPELCSPQDELDFLMEALIISKFRHQNIVRCVGLSLRATPRLILLELMSGGDMKSFLRHSRPHLGQPSPLVMRDLLQLAQDIAQGCHYLEENHFIHRDIAARNCLLSCAGPSRVAKIGDFGMARDIYRASYYRRGDRALLPVKWMPPEAFLEGIFTSKTDSWSFGVLLWEIFSLGYMPYPGRTNQEVLDFVVGGGRMDPPRGCPGPVYRIMTQCWQHEPELRPSFASILERLQYCTQDPDVLNSLLPMELGPTPEEEGTSGLGNRSLECLRPPQPQELSPEKLKSWGGSPLGPWLSSGLKPLKSRGLQPQNLWNPTYRS

SEQ ID NO: 4141 - protein, 453 aa, Homo sapiens
IYILEAAPRQRIELTFDEHYYIEPSFECRFDHLEVRDGPFGFSPLIDRYCGVKSPPLIRSTGRFMWIKFSSDEELEGLGFRAKYSFIPDPDFTYLGGILNPIPDCQFELSGADGIVRSSQVEQEEKTKPGQAVDCIWTIKATPKAKIYLRFLDYQMEHSNECKRNFVAVYDGSSSIENLKAKFCSTVANDVMLKTGIGVIRMWADEGSRLSRFRMLFTSFVEPPCTSSTFFCHSNMCINNSLVCNGVQNCAYPWDENHCKEKKKAGVFEQITKTHGTIIGITSGIVLVLLIISILVQVKQPRKKVMACKTAFNKTGFQEVFDPPHYELFSLRDKEISADLADLSEELDNYQKMRRSSTASRCIHDHHCGSQASSVKQSRTNLSSMELPFRNDFAQPQPMKTFNSTFKKSSYTFKQGHECPEQALEDRVMEEIPCEIYVRGREDSAQASISIDF

SEQ ID NO: 4142 - protein, 54 aa, Homo sapiens
LASGLILITGGIVATAGRFTQWYFGAYSIVAGVFVCLLEYPRGKRKKGSTMERW

SEQ ID NO: 4143 - protein, 122 aa, Homo sapiens
ILLSSLLLGDIILSFAKFLIKGALVPCSWKLIQSPVTNKKHSESLVPEAERMEPSLCLITALNRKQLIFFLLSNITTGLINLMVDTLHSSTLWALFVVNLYMFSNCLIVYVLYLQDKTVQFW

SEQ ID NO: 4144 - protein, 535 aa, Homo sapiens
IENRMLPITDRLLHLLGLEKTAFRIYAVSTLLLFLLFFLFRLLLRFLRLCRSFYITCRRLRCFPQPPRRNWLLGHLGMYLPNEAGLQDEKKVLDNMHHVLLVWMGPVLPLLVLVHPDYIKPLLGASAAIAPKDDLFYGFLKPWLGDGLLLSKGDKWSRHRRLLTPAFHFDILKPYMKIFNQSADIMHAKWRHLAEGSAVSLDMFEHISLMTLDSLQKCVFSYNSNCQEKMSDYISAIIELSALSVRRQYRLHHYLDFIYYRSADGRRFRQACDMVHHFTTEVIQERRRALRQQGAEAWLKAKQGKTLDFIDVLLLARDEDGKELSDEDIRAEADTFMFEGHDTTSSGISWMLFNLAKYPEYQEKCREEIQEVMKGRELEELEWDDLTQLPFTTMCIKESLRQYPPVTLVSRQCTEDIKLPDGRIIPKGIICLVSIYGTHHNPTVWPDSKVYNPYRFDPDNPQQRSPLAYVPFSAGPRNCIGQSFAMAELRVVVALTLLRFRLSVDRTRKVRRKPELILRTENGLWLKVEPLPPRA

SEQ ID NO: 4145 - protein, 187 aa, Homo sapiens
LLLTLAVIAILLFILLWHLCWPKEKADPYPYPGLVCGVPNTHTPSSSHLSSPGALETGDTWKEASLLPLLSRELSSLASQPLSRLLDELEVLEELIVLLDPEPGPGGGMAHGTTRHLAARYGLPAAWSTFAYSLRPSRSPLRALIEMVVAREPSASLGQLGTHLAQLGRADALRVLSKLGSSGVCWA

SEQ ID NO: 4146 - protein, 41 aa, Homo sapiens
IFRVNGMHINYFFFLKLFLSLQNLILALDLRRESLTRDETQ

SEQ ID NO: 4147 - protein, 522 aa, Homo sapiens
LFLLRALGFLIGLVGRAALVLGGPKFASKTPRPVTEPLLLLSGMQLAKLIRQRKVKCIDVVQAYINRIKDVNPMINGIVKYRFEEAMKEAHAVDQKLAEKQEDEATLENKWPFLGVPLTVKEAFQLQGMPNSSGLMNRRDAIAKTDATVVALLKGAGAIPLGITNCSELCMWYESSNKIYGRSNNPYDLQHIVGGSSGGEGCTLAAACSVIGVGSDIGGSIRMPAFFNGIFGHKPSPGVVPNKGQFPLAVGAQELFLCTGPMCRYAEDLAPMLKVMAGPGIKRLKLDTKVHLKDLKFYWMEHDGGSFLMSKVDQDLIMTQKKVVVHLETILGASVQHVKLKKMKYSFQLWIAMMSAKGHDGKEPVKFVDLLGDHGKHVSPLWELIKWCLGLSVYTIPSIGLALLEEKLRYSNEKYQKFKAVEESLRKELVDMLGDDGVFLYPSHPTVAPKHHVPLTRPFNFAYTGVFSALGLPVTQCPLGLNAKGLPLGIQVVAGPFNDHLTLAVAQYLEKTFGGWVCPGKF

SEQ ID NO: 4148 - protein, 89 aa, Homo sapiens
KALPVNVKWLLCGCLCCCCTLGCSLWPVICLNKRTRRSIQKLIEWENNRLYHKLALHWKLTKRKCETSNMMEYVILIEFLPKYPIFRPD

SEQ ID NO: 4149 - protein, 472 aa, Homo sapiens
MLTIGGILFLITNLQIGNLFGQHRSTIITLYNGAFDSSSAVFLIIKLLYEKGISLRASFIFISVCSTWHVARTFLLMPRGHIPYPLPPNYSYGLCPGNGTTKEEKETAEHENRELQSKEFLSAKEETPGAGQKQELRSFWSYAFSRRFAWHLVWLSVIQLWHYLFIGTLNSLLTNMAGGDMARVSTYTNAFAFTQFGVLCAPWNGLLMDRLKQKYQKEARKTGSFNIRGPHSLCFPNHHLPHATYRDKAKMKLPLLLALLFGAVSALHLRSETSTFETPLGAKTLPEDEETPEQEMEETPCRELEEEEEWGSGSEDASKKDGAVESISVPDMVDKNLTCPEEEDTVKVVGIPGCQTCRYLLVRSLQTFSQAWFTCRRCYRGNLVSIHNFNINYRIQCSVSALNQGQVWIGGRITGSGRCRRFQWVDGSRWNFAYWAAHQPWSRGGHCVALCTRGGHWRRAHCLRRLPFICSY

SEQ ID NO: 4150 - protein, 181 aa, Homo sapiens [sequence omitted]

SEQ ID NO: 4151 - protein, 49 aa, Homo sapiens
IGALIGLSVAAVVLLAFIVTACVLCYLFISSKPHTKLDLGLSLQTAGGS

SEQ ID NO: 4152 - protein, 43 aa, Homo sapiens
MKIYGKSMTNMEKRDLRIIKVASMKAGTIIVMILVFMMMILKS

SEQ ID NO: 4153 - protein, 459 aa, Homo sapiens
VVCQLVALFAAFWFRIYLRPGTTSSDVRHAVATIFGIYFVIFCFGWYSVHLFVLVLMCYAIMVTASVSNIHRYSFFVAMGYLTICHISRIYIFHYGILTTDFSGPLMIVTQKITTLAFQVHDGLGRRAEDLSAEQHRLAIKVKPSFLEYLSYLLNFMSVIAGPCNNFKDYIAFIEGKHIHMKLLEVNWKRKGFHSLPEPSPTGAVIHKLGITLVSLLLFLTLTKTFPVTCLVDDWFVHKASFPARLCYLYVVMQASKPKYYFAWTLADAVNNAAGFGFSGVDKNGNFCWDLLSNLNIWKIETATSFKMYLENWNIQTATWLKCVCYQRVPWYPTVLTFILSALWHGVYPGYYFTFLTGILVTLAARAVRNNYRHYFLSSRALKAVYDAGTWAVTQLAVSYTVAPFVMLAVEPTISLYKSMYFYLHIISLLIILFLPMKPQAHTQRRPQTLNSINKRKTD

SEQ ID NO: 4154 - protein, 394 aa, Homo sapiens
IVKDKALPGCLRAKSGTMRGQRSLLLGPARLCLRLLLLLGYRRRCPPLLRGLVQRWRYGKVCLRSLLYNSFGGSDTAVDAAFEPVYWLVDNVIRWFGVVFVVLVIVLTGSIVAIAYLCVLPLILRTYSVPRLCWHFFYSHWNLILIVFHYYQAITTPPGYPPQGRNDIATVSICKKCIYPKPARTHHCSICNRCVLKMDHHCPWLNNCVGHYNHRYFFSFCFFMTLGCVYCSYGSWDLFREAYAAIEKMKQLDKNKLQAVANQTYHQTPPPTFSFRERMTHKSLVYLWFLCSSVALALGALTVWHAVLISRGETSIERHINKKERRRLQAKGRVFRNPYNYGCLDNWKVFLGVDTGRHWLTRVLLPSSHLPHGNGMSWEPPPWVTAHSASVMAV

SEQ ID NO: 4155 - protein, 147 aa, Homo sapiens
VTLTYFGAHFAVIRRASLEKNPYQAVHQWGTQQRLIQHPESGSEGQSLLGPLRAFSAGLSLVGLLTLGAVLSAAATVREAQGLMAGGFLCFSLAFCAQVQVVFWRLHSPTQVEDAMLDTYDLVYEQAMKVSVLWEEVSFQPSGEHRG

SEQ ID NO: 4156 - protein, 44 aa, Homo sapiens
LSPVFKLYKLCFLIFPSALFWGGGYSSFGITFPPPMCFPSFEIF

SEQ ID NO: 4157 - protein, 51 aa, Homo sapiens
VAAVLASLLVLLALLLAALLYVKCRLNVLLWYQDAYGEVEINATAPRTASS

SEQ ID NO: 4158 - protein, 34 aa, Homo sapiens
TSIFFESMPYKLNVSALGCGEGLLALVVVLPWRS

SEQ ID NO: 4159 - protein, 292 aa, Homo sapiens
MTSPLATTMGSALVKAARGPLSFPQLQGFFRRSIQKNMVYTCHRDKNCIINKVTRNRCQYCRLQKCFEVGMSKEAVRNDRNKKKKEVKEEGSPDSYELSPQLEELITKVSKAHQETFPSLCQLGKYTTNSSADHRVQLDLGLWDKFSELATKCIIKIVEFAKRLPGFTGLSIADQITLLKAACLDILMLRICTRYTPEQDTMTFSDGLTLNRTQMHNAGFGPLTDLVFAFAGQLLPLEMDDTETGLLSAICLICGGAGAPPGVCSVLSLLSHHSMRNLSGRGRGGPSGLFCW

SEQ ID NO: 4160 - protein, 39 aa, Homo sapiens
KSPSFLCFFFSFAFSSFIFLFVCIFFPLLVEVRFPPTRP

SEQ ID NO: 4161 - protein, 1121 aa, Homo sapiens
ISSLTWFTTIVPLVLVITMTAVKDATDDYFRHKSDNQVNNRQSEVLINSKLQNEKWMNVKVGDIIKLENNQFVAADLLLLSSSEPHGLCYVETAELDGETNLKVRHALSVTSELGADISRLAGFDGIVVCEVPNNKLDKFMGILSWKDSKHSLNNEKIILRGCILRNTSWCFGMVIFAGPDTKLMQNSGKTKFKRTSIDRLMNTLVLWIFGFLICLGIILAIGNSIWESQTGDQFRTFLFWNEGEKSSVFSGFLTFWSYIIILNTVVPISLYVSVEVIRLGHSYFINWDRKMYYSRKAIPAVARTTTLNEELGQIEYIFSDKTGTLTQNIMTFKRCSINGRIYGEVHDDLDQKTEITQEKEPVDFSVKSQADREFQFFDHHLMESIKMGDPKVHEFLRLLALCHTVMSEENSAGELIYQVQSPDEGALVTAARNFGFIFKSRTPETITIEELGTLVTYQLLAFLDFNNTRKRMSVIVRNPEGQIKLYSKGADTILFEKLHPSNEVLLSLTSDHLSEFAGEGLRTLAIAYRDLDDKYFKEWHKMLEDANAATEERDERIAGLYEEIERDLMLLGATAVEDKLQEGVIETVTSLSLANIKIWVLTGDKQETAINIGYACNMLTDDMNDVFVIAGNNAVEVREELRKAKQNLFGQNRNFSNGHVVCEKKQQLELDSIVEETITGDYALIINGHSLAHALESDVKNDLLELACMCKTVICCRVTPLQKAQVVELVKKYRNAVTLAIGDGANDVSMIKSAHIGVGISGQEGLQAVLASDYSFAQFRYLQRLLLVHGRWSYFRMCKFLCYFFYKNFAFTLVHFWFGFFCGFSAQTVYDQWFITLFNIVYTSLPVLAMGIFDQDVSDQNSVDCPQLYKPGQLNLLFNKRKFFICVLHGIYTSLVLFFIPYGAFYNVAGEDGQHIADYQSFAVTMATSLVIVVSVQIALDTSYWTFINHVFIWGSIAIYFSILFTMHSNGIFGIFPNQFPFVGNARHSLTQKCIWLVILLTTVASVMPVVAFRFLKVDLYPTLSDQIRRWQKAQKKARPPSSRRPRTRRSSSRRSGYAFAHQEGYGELITSGKNMRAKNPPPTSGLEKTHYNSTSWIENLCKKTTDTVSSFSQDKTVKL

SEQ ID NO: 4162 - protein, 45 aa, Homo sapiens
LTSAAIAGVYRAAGKEMIPFEALTLGTGQTFCVLVVSFLRILATL

SEQ ID NO: 4163 - protein, 657 aa, Homo sapiens
LCSYEVLNLLTAQQYEIFSRSFHKNRELFVHGLPGLGKTIMAMKIMEKIRNVFHCEAHRILYICESQFLRNFIRKEFLRGNGLAAGKMNISIDLDTNYAELVLNVGRVTLGENNRKKMKDCQLRKQQNENVSRAVCALLNSGGGVIKAEVENKGYSYKKDGIGLDLENSFSNMLPFVPNFLDFMQNGNYFHIFVKSWSLETSGPQIATLSSSLYKRDVTSAKVMNASAALEFLKDMEKTGGRAYLRPEFPAKRACVDVQEESNMEALAADFFNRTELGYKEKLTFTESTHVEIKNFSTEKLLQRITEILPQYVSAFANTDGGYLFVGLNEDKEVIGFKAEKSYLTKLEEVTKNSIGKLPVHHFCVEKGTINYLCKFLGVYDKGRLCGYVYALRVERFCCAVFAKKPDSWHVKDNRVKQLTEKEWIQFMVDSEPVCEELPSPASTSSPVSQSYPLREYINFKIQPLRYHLPGLSEKITCAPKTFCRNLFSQHEGLKQLICEEMGSVNKGSLIFSRSWSLDLGLQENHKVLCDALLISQDKPPVLYTFHMVQDEEFKDYSTQTAQTLKQKLAKIGGYTKKVCVMTKIFYLSPEGKTSCQYDLNSQVIYPESYYWTTAQTMKDLEKALSNILPKENQIFLFVCLFRFCLFVCWFVCFFLR

SEQ ID NO: 4164 - protein, 155 aa, Homo sapiens [sequence omitted]

SEQ ID NO: 4165 - protein, 272 aa, Homo sapiens
MRNLFRQMTYYLLDQWVFGTVMCKVVSGFYYIGFYSSMFFITLMSVDRYLAVVHAVYALKVRTIRMGTTLCLAVWLTAIMATIPLLVFYQVASEDGVLQCYSFYNQQTLKWKIFTNFKMNILGLLIPFTIFMFCYIKILHQLKRCQNHNKTKAIRLVLIVVIASLLFWVPFNVVLFLTSLHSMHILDGCSISQQLTYATHVTEIISFTHCCVNPVIYAFVGEKFKKHLSEIFQKSCSQIFNYLGRQMPRESCEKSSSCQQHSSRSSSVDYIL

SEQ ID NO: 4166 - protein, 343 aa, Homo sapiens
RSQAPVFTAESMLWLFQSLLFVFCFGPGNVVSQSSLTPLMVNGILGESVTLPLEFPAGEKVNFITWLFNETSLAFIVPHETKSPEIHVTNPKQGKRLNFTQSYSLQLSNLKMEDTGSYRAQISTKTSAKLSSYTLRILRQLRNIQVTNHSQLFQNMTCELHLTCSVEDADDNVSFRWEALGNTLSSQPNLTVSWDPRISSEQDYTCIAENAVSNLSFSVSAQKLCEDVKIQYTDTKMILFMVSGICIVFGFIILLLLVLRKRRDSLSLSTQRTQGPAESARNLEYVSVSPTNNTVYASVTHSNRETEIWTPRENDTITIYSTINHSKESKPTFSRATALDNVV

SEQ ID NO: 4167 - protein, 229 aa, Homo sapiens
LESECSAPGEQPKFLGIREQRVTGLMIFILMGSSVFMTSILKFIPMPVLYGVFLYMGASSLKGIQFFDRIKLFWMPAKHQPDFIYLRHVPLRKVHLFTIIQMSCLGLLWIIKVSRAAIVFPMMVLALVFVRKLMDLLFTKRELSWLDDLMPESKKKKLEDAEKEEEQSMLAMEDEGTVQLPLEGHYRDDPSVINISDEMSKTALWRNLLITADNSKDKESSFPSKSSPS

SEQ ID NO: 4168 - protein, 765 aa, Homo sapiens
KDGWQDIVIGAPQYFDRDGEVGGAVYVYMNQQGRWNNVKPIRLNGTKDSMFGIAVKNIGDINQDGYPDIAVGAPYDDLGKVFIYHGSANGINTKPTQVLKGISPYFGYSIAGNMDLDRNSYPDVAVGSLSDSVTIFRSRPVINIQKTITVTPNRIDLRQKTACGAPSGICLQVKSCFEYTANPAGYNPSISIVGTLEAEKERRKSGLSSRVQFRNQGSEPKYTQELTLKRQKQKVCMEETLWLQDNIRDKLRPIPITASVEIQEPSSRRRVNSLPEVLPILNSDEPKTAHIDVHFLKEGCGDDNVCNSNLKLEYKFCTREGNQDKFSYLPIQKGVPELVLKDQKDIALEITVTNSPSNPRNPTKDGDDAHEAKLIATFPDTLTYSAYRELRAFPEKQLSCVANQNGSQADCELGNPFKRNSNVTFYLVLSTTEVTFDTPDLDINLKLETTSNQDNLAPITAKAKVVIELLLSVSGVAKPSQVYFGGTVVGEQAMKSEDEVGSLIEYEFRVINLGKPLTNLGTATLNIQWPKEISNGKWLLYLVKVESKGLEKVTCEPQKEINSLNLTESHNSRKKREITEKQIDDNRKFSLFAERKYQTLNCSVNVNCVNIRCPLRGLDSKASLILRSRLWNSTFLEEYSKLNYLDILMRAFIDVTAAAENIRLPNAGTQVRVTVFPSKTVAQYSGVPWWIILVAILAGILMLALLVFILWKCGFFKRSRYDDSVPRYHAVRIRKEEREIKDEKYIDNLEKKQWITKWNENESYS

SEQ ID NO: 4169 - protein, 25 aa, Homo sapiens
LTNIVQFLLLVGFLSCVSLVFVKFN

SEQ ID NO: 4170 - protein, 201 aa, Homo sapiens
IVTWGLAVLAALPEFIFYETEELFEETLCSALYPEDTVYSWRHFHTLRMTIFCLVLPLLVMAICYTGIIKTLLRCPSKKKYKAIRLIFVIMAVFFIFWTPYNVAILLSSYQSILFGNDCERSKHLDLVMLVTEVIAYSHCCMNPVIYAFVGERFRKYLRHFFHRHLLMHLGRYIPFLPSEKLERTSSVSPSTAEPELSIVF

SEQ ID NO: 4171 - protein, 52 aa, Homo sapiens
MEYILNLEPKKMKGLFLLTTNVSVPGLLPGSSVLPKILMRTLWRETSELLFL

SEQ ID NO: 4172 - protein, 423 aa, Homo sapiens
MKYGVHVKQVTNVFITKTYPNHYTLVTGLFAENHGIVANDMFDPIRNKSFSLDHMNIYDSKFWEEATPIWITNQRAGHTSGAAMWPGTDVKIHKRFPTHYMPYNESVSFEDRVAKIIEWFTSKEPINLGLLYWEDPDDMGHHLGPDSPLMGPVISDIDKKLGYLIQMLKKAKLWNTLNLIITSDHGMTQCSEERLIELDQYLDKDHYTLIDQSPVAAILPKEGKFDEVYEALTHAHPNLTVYKKEDVPERWHYKYNSRIQPIIAVADEGWHILQNKSDDFLLGNHGYDNALADMHPIFLAHGPAFRKNFSKEAMNSTDLYPLLCHLLNITAMPHNGSFWNVQDLLNSAMPRVVPYTQSTILLPGSVKPAEYDQEGSYPYFIGVSLGSIIVIVFFVIFIKHLIHSQIPALQDMHAEIAQPLLQA

SEQ ID NO: 4173 - protein, 553 aa, Homo sapiens
TSSLGSQVRYACREGFFSVPEDTVSSCTGLGTWESPKLHCQEINCGNPPEMRHAILVGNHSSRLGGVARYVCQEGFESPGGKITSVCTEKGTWRESTLTCTEILTKINDVSLFNDTCVRWQINSRRINPKISYVISIKGQRLDPMESVREETVNLTTDSRTPEVCLALYPGTNYTVNISTAPPRRSMPAVIGFQTAEVDLLEDDGSFNISIFNETCLKLNRRSRKVGSEHMYQFTVLGQRWYLANFSHATSFNFTTREQVPVVCLDLYPTTDYTVNVTLLRSPKRHSVQITIATPPAVKQTISNISGFNETCLRWRSIKTADMEEMYLFHIWGQRWYQKEFAQEMTFNISSSSRDPEVCLDLRPGTNYNVSLRALSSELPVVISLTTQITEPPLPEVEFFTVHRGPLPRLRLRKAKEKNGPISSYQVLVLPLALQSTFSCDSEGASSFFSNASDADGYVAAELLAKDVPDDAMEIPIGDRLYYGEYYNAPLKRGSDYCIILRITSEWNKVRRHSCAVWAQVKDSSLMLLQMAGVGLGSLAVVIILTFLSFSAV

SEQ ID NO: 4174 - protein, 187 aa, Homo sapiens
RTETDMEQGKGLAVLILAIILLQGTLAQSIKGNHLVKVYDYQEDGSVLLTCDAEAKNITWFKDGKMIGFLTEDKKKWNLGSNAKDPRGMYQCKGSQNKSKPLQVYYRMCQNCIELNAATISGFLFAEIVSIFVLAVGVYFIAGQDGVRQSRASDKQTLLPNDQLYQPLKDREDDQYSHLQGNQLRRN

SEQ ID NO: 4175 - protein, 40 aa, Homo sapiens
IFERWECTTYWYIFVFCSALPAVTEMALFVTVFGLKKKPF

SEQ ID NO: 4176 - protein, 875 aa, Homo sapiens
VDSAFFSGFLSFWSYIIILNTVVPISLYVSVEVIRLGHSYFINWDKKMFCMKKRTPAEARTTTLNEELGQVEYIFSDKTGTLTQNIMVFNKCSINGHSYGDVFDVLGHKAELGERPEPVDFSFNPLADKKFLFWDPSLLEAVKIGDPHTHEFFRLLSLCHTVMSEEKNEGELYYKAQSPDEGALVTAARNFGFVFRSRTPKTITVHEMGTAITYQLLAILDFNNIRKRMSVIVRNPEGKIRLYCKGADTILLDRLHHSTQELLNTTMDHLNEYAGEGLRTLVLAYKDLDEEYYEEWAERRLQASLAQDSREDRLASIYEEVENNMMLLGATAIEDKLQQGVPETIALLTLANIKIWVLTGDKQETAVNIGYSCKMLTDDMTEVFIVTGHTVLEVREELRKAREKMMDSSRSVGNGFTYQDKLSSSKLTSVLEAVAGEYALVINGHSLAHALEADMELEFLETACACKAVICCRVTPLQKAQVVELVKKYKKAVTLAIGDGANDVSMIKTAHIGVGISGQEGIQAVLASDYSFSQFKFLQRLLLVHGRWSYLRMCKFLCYFFYKNFAFTMVHFWFGFFCGFSAQTVYDQYFITLYNIVYTSLPVLAMGVFDQDVPEQRSMEYPKLYEPGQLNLLFNKREFFICIAQGIYTSVLMFFIPYGVFADATRDDGTQLADYQSFAVTVATSLVIVVSVQIGLDTGYWTAINHFFIWGSLAVYFAILFAMHSNGLFDMFPNQFRFVGNAQNTLAQPTVWLTIVLTTVVCIMPVVAFRFLRLNLKPDLSDTVRYTQLVRKKQKAQHRCMRRVGRTGSRRSGYAFSHQEGFGELIMSGKNMRLSSLALSSFTTRSSSSWIESLRRKKSDSASSPSGGADKPLKG

SEQ ID NO: 4177 - protein, 72 aa, Homo sapiens
IDPEPCPDSDFLLWILAAVSSGLFFYSFLLTAVSLSKMLKKRSPLTTGVYVKMPPTEPECEKQFQPYFIPIN

SEQ ID NO: 4178 - protein, 61 aa, Homo sapiens
IYFPPLQKVFQTESLSILDLLFLLGLTSSVCIVAEIIKKVERSREKIQKHVSSTSSSFLEV

SEQ ID NO: 4179 - protein, 41 aa, Homo sapiens
VTVFLTEYAGPLFIYLLFYFRVPFIYGHKYDFTSSRHTVVQ

SEQ ID NO: 4180 - protein, 241 aa, Homo sapiens [sequence omitted]

SEQ ID NO: 4181 - protein, 274 aa, Homo sapiens
MGTWLLACICICTCVCLGVSVTGEGQGPRSRTFTCLTNNILRIDCHWSAPELGQGSSPWLLFTRLLAAHISASCGAVSAPSCCHLRQCSCHLTISPSLSTTACLGGSRSAWWTRSTCPGDTSNISSGHCILTWSISPALEPMTTLLSYELAFKKQEEAWEQAQHRDHIVGVTWLILEAFELDPGFIHEARLRVQMATLEDDVVEEERYTGQWSEWSQPVCFQAPQRQGPLIPPWGWPGNTLVAVSIFLLLTGPTYLLFKLSPRLGWGPTGPVCC

SEQ ID NO: 4182 - protein, 50 aa, Homo sapiens
LILLTFLIVITLYVISKHRARNYYTDTSQKEAFHLEAREVYSVDPYNPAS

SEQ ID NO: 4183 - protein, 379 aa, Homo sapiens
MIHDQESKSEVQIPYPLSENNQVQSGRAFHHGRFIMSLRKAAMAEPNAKFIEGVVLQLLEEDDVVMGVQYKDKETGDIKELHAPLTVVADGLFSKFRKSLVSNKVSVSSHFVGFLMKNAPQFKANHAELILANPSPVLIYQISSSETRVLVDIRGEMPRNLREYMVEKIYPQIPDHLKEPFLEATDNSHLRSMPASFLPPSSVKKRGVLLLGDAYNMRHPLTGGGMTVAFKDIKLWRKLLKGIPDLYDDAAIFEAKKSFYWARKTSHSFVVNILAQALYELFSATDDSLHQLRKACFLYFKLGGECVAGPVGLLSVLSPNPLVLIGHFFAVAIYAVYFCFKSEPWITKPRALLSSGAVLYKACSVIFPLIYSEMKYMVH

SEQ ID NO: 4184 - protein, 571 aa, Homo sapiens
IDCGTPPEVPDGYIIGNYTSSLGSQVRYACREGFFSVPEDTVSSCTGLGTWESPKLHCQEINCGNPPEMRHAILVGNHSSRLGGVARYVCQEGFESPGGKITSVCTEKGTWRESTLTCTEILTKINDVSLFNDTCVRWQINSRRINPKISYVISIKGQRLDPMESVREETVNLTTDSRTPEVCLALYPGTNYTVNISTAPPRRSMPAVIGFQTAEVDLLEDDGSFNISIFNETCLKLNRRSRKVGSEHMYQFTVLGQRWYLANFSHATSFNFTTREQVPVVCLDLYPTTDYTVNVTLLRSPKRHSVQITIATPPAVKQTISNISGFNETCLRWRSIKTADMEEMYLFHIWGQRWYQKEFAQEMTFNISSSSRDPEVCLDLRPGTNYNVSLRALSSELPVVISLTTQITEPPLPEVEFFTVHRGPLPRLRLRKAKEKNGPISSYQVLVLPLALQSTFSCDSEGASSFFSNASDADGYVAAELLAKDVPDDAMEIPIGDRLYYGEYYNAPLKRGSDYCIILRITSEWNKVRRHSCAVWAQVKDSSLMLLQMAGVGLGSLAVVIILTFLSFSAV

SEQ ID NO: 4185 - protein, 66 aa, Homo sapiens
LLVIAVAIATVIVISLVMLRKRQYGTISHGIVEVDPMLTPEERHLNKMQNHGYENPTYKYLEQMQI

SEQ ID NO: 4186 - protein, 47 aa, Homo sapiens
LASLLVLLALLLAALLYVKCRLNVLLWYQDAYGEVEINATAPRTASS

SEQ ID NO: 4187 - protein, 286 aa, Homo sapiens
IFFLNMFASGFLLSAISLDRCLQVVRPVWAQNHRTVAAAHKVCLVLWALAVLNTVPYFVFRDTISRLDGRIMCYYNVLLLNPGPDRDATCNSRQVALAVSKFLLAFLVPLAIIASSHAAVSLRLQHRGRRRPGRFVRLVAAVVAAFALCWGPYHVFSLLEARAHANPGLRPLVWRGLPFVTSLAFFNSVANPVLYVLTCPDMLRKLRRSLRTVLESVLVDDSELGGAGSSRRRRTSSTARSASPLALCSRPEEPRGPARLLGWLLGSCAASPQTGPLNRALSSTSS

SEQ ID NO: 4188 - protein, 28 aa, Homo sapiens
KIDDKDELVFYIHFYSLGLCFSMLDLRY

SEQ ID NO: 4189 - protein, 2883 aa, Homo sapiens
RQNGIEDESHEYRPRTSNKSKSDEQQRDYLMERRDLAIDFIFSLVLIEVLKQIPLHPVIDSLIHDVINLAFKHFKYKEGYLGPNTGNMHIVADLYAEVIGVLAQAKFPAVKKKFMAELKELRHKEQNPYVVQSIISLIMGMKFFRIKMYPVEDFEASLQFMQECAHYFLEVKDKDIKHALAGLFVEILVPVAAAVKNEVNVPCLRNFVESLYDTTLELSSRKKHSLALYPLVTCLLCVSQKQLFLNRWHIFLNNCLSNLKNKDPKMARVALESLYRLLWVYMIRIKCESNTATQSRLITIITTLFPKGSRGVVPRDMPLNIFVKIIQFIAQERLDFAMKEIIFDFLCVGKPAKAFSLNPERMNIGLRAFLVIADSLQQKDGEPPMPVTGAVLPSGNTLRVKKTYLSKTLTEEEAKMIGMSLYYSQVRKAVDNILRHLDKEVGRCMMLTNVQMLNKEPEDMITGERKPKIDLFRTCVAAIPRLLPDGMSKLELIDLLARLSIHMDDELRHIAQNSLQGLLVDFSDWREDVLFGFTNFLLREVNDMHHTLLDSSLKLLLQLLTQWKLVIQTQGKVYEQANKIRNSELIANGSSHRIQSERGPHCSVLHAVEGFALVLLCSFQVATRKLSVLILKEIRALFIALGQPEDDDRPMIDVMDQLSSSILESFIHVAVSDSATLPLTHNVDLQWLVEWNAVLVNSHYDVKSPSHVWIFAQSVKDPWVLCLFSFLRQENLPKHCPTALSYAWPYAFTRLQSVMPLVDPNSPINAKKTSTAGSGDNYVTLWRNYLILCFGVAKPSIMSPGHLRASTPEIMATTPDGTVSYDNKAIGTPSVGVLLKQLVPLMRLESIEITESLVLGFGRTNSLVFRELVEELHPLMKEALERRPENKKRRERRDLLRLQLLRIFELLADAGVISDSTNGALERDTLALGALFLEYVDLTRMLLEAENDKEVEILKDIRAHFSAMVANLIQCVPVHHRRFLFPQQSLRHHLFILFSQWAGPFSIMFTPLDRYSDRNHQITRYQYCALKAMSAVLCCGPVFDNVGLSPDGYLYKWLDNILACQDLRVHQLGCEVVVLLLELNPDQINLFNWAIDRCYTGSYQLASGCFKAIATVCGSRNYPFDIVTLLNLVLFKASDTNREIYEISMQLMQILEAKLFVYSKKVAEQRPGSILYGTHGPLPPLYSVSLALLSCELARMYPELTLPLFSEVSQRFPTTHPNGRQIMLTYLLPWLHNIELVDSRLLLPGSSPSSPEDEVKDREGDVTASHGLRGNGWGSPEATSLVLNNLMYMTAKYGDEVPGPEMENAWNALANNEKWSNNLRITLQFLISLCGVSSDTVLLPYIKKVAIYLCRNNTIQTMEELLFELQQTEPVNPIVQHCDNPPFYRFTASSKASAAASGTTSSSNTVVAGQENFPDAEENKILKESDERFSNVIRAHTRLESRYSNSSGGSYDEDKNDPISPYTGWLLTITETKQPQPLPMPCTGGCWAPLVDYLPETITPRGPLHRCNIAVIFMTEMVVDHSVREDWALHLPLLLHAVFLGLDHYRPEVFEHSKKLLLHLLIALSCNSNFHSIASVLLQTREMGEAKTLTVQPAYQPEYLYTGGFDFLREDQSSPVPDSGLSSSSTSSSISLGGSSGNLPQMTQEVEDVDTAAETDEKANKLIEFLTTRAFGPLWCHEDITPKNQNSKSAEQLTNFLRHVVSVFKDSKSGFHLEHQLSEVALQTALASSSRHYAGRSFQIFRALKQPLSAHALSDLLSRLVEVIGEHGDEIQGYVMEALLTLEAAVDNLSDCLKNSDLLTVLSRSSSPDLSSSSKLTASRKSTGQLNMNPGTTSGNTATAERSRHQRSFSVPKKFGVIDRSSDPPRSATLDRIQACTQQGLSSKTRSSSSLKDSLTDPSHINHPTNLLATIFWVTVALMESDFEFEYLMALRLLSRLLAHMPLDKAENREKLEKLQAQLKWADFSGLQQLLLKGFTSLTTTDLTLQLFSLLTPVSKISMVDASHAIGFPLNVLCLLPQLIQHFENPNQFCKDIAERIAQVCLEEKNPKLSNLAHVMTLYKTHSYTRDCATWVNVVCRYLHEAYADITLNMVTYLAELLEKGLPSVQQPLLQVIYSLLSYMDLSVVPVKQFNVEVLKTIEKYVQSVHWREALNILKLVVSRSASLVLPSYQHSDLSKIEIHRVWTSASKELPGKTLDFHFDISETPIIGRRYDELQNSSGRDGKPRAMAVTRSTSSTSSGSNSNVLVPVSWKRPQYSQKRTKEKLVHVLSLCGQEVGLSKNPSVIFSSCGDLDLLEHQTSLVSSEDGAREQENMDDTNSEQQFRVFRDFDFLDVELEDGEELQGESMDNFNWGVRRRSLDSLDKCDMQILEERQLSGSTPSLNKMHHEDSDESSEEEDLTASQILEHSDLIMTLSPSEETNPMELLTTACDSTPAEPHSFNTRMSSFDASLPDMNNLQISEGSKAEAVREEEDTTVHEDDLSSSINELPAAFECSDSFSLDMTEGEEKGNRALDQFTLASFGEGDRGVSPPPSPFFSAILAAFQPAACDDAEEAWRSHINQLMCDSDGSCAVYTFHVFSSLFKNIQKRFCFLTCDAASYLGDNLRGIGSKFVSSSQMLTSCSECPTLFVDAETLLSCGLLDKLKFSVLELQEYLDTYNNRKEATLSWLANCKATFAGGSRDGVITCQPGDSEEKQLELCQRLYKLHFQLLLLFQSYCKLIGQVHEVSSMPELLNMSRELSDLKKHLKEASAVIAADPLYSDGAWSEPTFTSTEAAIQSMLECLKNNELGKALRQIRECRSLWPNDIFGSSSDDEVQTLLNIYFRHQTLGQTGTYALVGSNQSLTEICTKLMELNMEIRDMIRRAQSYRVLTTFLPDSSVSGTSL

SEQ ID NO: 4190 - protein, 31 aa, Homo sapiens
KTWGEIISLSRPCYAVYLGVLYVLLPMPSLK

SEQ ID NO: 4191 - protein, 426 aa, Homo sapiens
KAVSVFFKELIQEFGIGYSDTAWISSILLAMLYGTGPLCSVCVNRFGCRPVMLVGGLFASLGMVAASFCRSIIQVYLTTGVITGLGLALNFQPSLIMLNRYFSKRRPMANGLAAAGSPVFLCALSPLGQLLQDRYGWRGGFLILGGLLLNCCVCAALMRPLVVTAQPGSGPPRPSRRLLDLSVFRDRGFVLYAVAASVMVLGLFVPPVFVVSYAKDLGVPDTKAAFLLTILGFIDIFARPAAGFVAGLGKVRPYSVYLFSFSMFFNGLADLAGSTAGDYGGLVVFCIFFGISYGMVGALQFEVLMAIVGTHKFSSAIGLVLLMEAVAVLVGPPSGGKLLDATHVYMYVFILAGAEVLTSSLILLLGNFFCIRKKPKEPQPEVAAAEEEKLHKPPADSGVDLREVEHFLKAEPEKNGEVVHTPETSV

SEQ ID NO: 4192 - protein, 612 aa, Homo sapiens
LDSCEYIWEAGVGFAHSPQPNYIHDMNRMELLKLLLTCFSEAMYLPPAPESGSTNPWVQFFCSTENRHALPLFTSLLNTVCAYDPVGYGIPYNHLLFSDYREPLVEEAAQVLIVTLDHDSASSASPTVDGTTTGTAMDDADPPGPENLFVNYLSRIHREEDFQFILKGIARLLSNPLLQTYLPNSTKKIQFHQELLVLFWKLCDFNKKFLFFVLKSSDVLDILVPILFFLNDARADQSRVGLMHIGVFILLLLSGERNFGVRLNKPYSIRVPMDIPVFTGTHADLLIVVFHKIITSGHQRLQPLFDCLLTIVVNVSPYLKSLSMVTANKLLHLLEAFSTTWFLFSAAQNHHLVFFLLEVFNNIIQYQFDGNSNLVYAIIRKRSIFHQLANLPTDPPTIHKALQRRRRTPEPLSRTGSQEGTSMEGSRPAAPAEPGTLKTSLVATPGIDKLTEKSQVSEDGTLRSLEPEPQQSLEDGSPAKGEPSQAWREQRRPSTSSASGQWSPTPEWVLSWKSKLPLQTIMRLLQVLVPQVEKICIDKGLTDESEILRFLQHGTLVGLLPVPHPILIRKYQANSGTAMWFRTYMWGVIYLRNVDPPVWYDTDVKLFEIQRV

SEQ ID NO: 4193 - protein, 686 aa, Homo sapiens
IVLQAPSTLEALLQSLVIVLLGFRSLLSDLCSYEVLNLLTAQQYEIFSRSFHKNRELFVHGLPGLGKTIMAMKIMEKIRNVFHCEAHRILYICESQFLRNFIRKEFLRGNGLAAGKMNISIDLDTNYAELVLNVGRVTLGENNRKKMKDCQLRKQQNENVSRAVCALLNSGGGVIKAEVENKGYSYKKDGIGLDLENSFSNMLPFVPNFLDFMQNGNYFHIFVKSWSLETSGPQIATLSSSLYKRDVTSAKVMNASAALEFLKDMEKTGGRAYLRPEFPAKRACVDVQEESNMEALAADFFNRTELGYKEKLTFTESTHVEIKNFSTEKLLQRITEILPQYVSAFANTDGGYLFVGLNEDKEVIGFKAEKSYLTKLEEVTKNSIGKLPVHHFCVEKGTINYLCKFLGVYDKGRLCGYVYALRVERFCCAVFAKKPDSWHVKDNRVKQLTEKEWIQFMVDSEPVCEELPSPASTSSPVSQSYPLREYINFKIQPLRYHLPGLSEKITCAPKTFCRNLFSQHEGLKQLICEEMGSVNKGSLIFSRSWSLDLGLQENHKVLCDALLISQDKPPVLYTFHMVQDEEFKDYSTQTAQTLKQKLAKIGGYTKKVCVMTKIFYLSPEGKTSCQYDLNSQVIYPESYYWTTAQTMKDLEKALSNILPKENQIFLFVCLFRFCLFVCWFVCFFLR

SEQ ID NO: 4194 - protein, 424 aa, Homo sapiens
VYWTPERVELAPLPSWQPVGKNLTLRCQVEGGAPRANLTVVLLRGEKELKREPAVGEPAEVTTTVLVRRDHHGANFSCRTELDLRPQGLELFENTSAPYQLQTFVLPATPPQLVSPRVLEVDTQGTVVCSLDGLFPVSEAQVHLALGDQRLNPTVTYGNDSFSAKASVSVTAEDEGTQRLTCAVILGNQSQETLQTVTIYSFPAPNVILTKPEVSEGTEVTVKCEAHPRAKVTLNGVPAQPLGPRAQLLLKATPEDNGRSFSCSATLEVAGQLIHKNQTRELRVLYGPRLDERDCPGNWTWPENSQQTPMCQAWGNPLPELKCLKDGTFPLPIGESVTVTRDLEGTYLCRARSTQGEVTRKVTVNVLSPRYEIVIITVVAAAVIMGTAGLSTYLYNRQRKIKKYRLQQAQKGTPMKPNTQATPP

SEQ ID NO: 4195 - protein, 2117 aa, Homo sapiens
LWPLFLFFILVAVRHSHPPLEHHECHFPNKPLPSAGTVPWLQGLICNVNNTCFPQLTPGEEPGRLSNFNDSLVSRLLADARTVLGGASAHRTLAGLGKLIATLRAARSTAQPQPTKQSPLEPPMLDVAELLTSLLRTESLGLALGQAQEPLHSLLEAAEDLAQELLALRSLVELRALLQRPRGTSGPLELLSEALCSVRGPSSTVGPSLNWYEASDLMELVGQEPESALPDSSLSPACSELIGALDSHPLSRLLWRRLKPLILGKLLFAPDTPFTRKLMAQVNRTFEELTLLRDVREVWEMLGPRIFTFMNDSSNVAMLQRLLQMQDEGRRQPRPGGRDHMEALRSFLDPGSGGYSWQDAHADVGHLVGTLGRVTECLSLDKLEAAPSEAALVSRALQLLAEHRFWAGVVFLGPEDSSDPTEHPTPDLGPGHVRIKIRMDIDVVTRTNKIRDRFWDPGPAADPLTDLRYVWGGFVYLQDLVERAAVRVLSGANPRAGLYLQQMPYPCYVDDVFLRVLSRSLPLFLTLAWIYSVTLTVKAVVREKETRLRDTMRAMGLSRAVLWLGWFLSCLGPFLLSAALLVLVLKLGDILPYSHPGVVFLFLAAFAVATVTQSFLLSAFFSRANLAAACGGLAYFSLYLPYVLCVAWRDRLPAGGRVAASLLSPVAFGFGCESLALLEEQGEGAQWHNVGTRPTADVFSLAQVSGLLLLDAALYGLATWYLEAVCPGQYGIPEPWNFPFRRSYWCGPRPPKSPAPCPTPLDPKVLVEEAPPGLSPGVSVRSLEKRFPGSPQPALRGLSLDFYQGHITAFLGHNGAGKTTTLSILSGLFPPSGGSAFILGHDVRSSMAAIRPHLGVCPQYNVLFDMLTVDEHVWFYGRLKGLSAAVVGPEQDRLLQDVGLVSKQSVQTRHLSGGMQRKLSVAIAFVGGSQVVILDEPTAGVDPASRRGIWELLLKYREGRTLILSTHHLDEAELLGDRVAVVAGGRLCCCGSPLFLRRHLGSGYYLTLVKARLPLTTNEKADTDMEGSVDTRQEKKNGSQGSRVGTPQLLALVQHWVPGARLVEELPHELVLVLPYTGAHDGSFATLFRELDTRLAELRLTGYGISDTSLEEIFLKVVEECAADTDMEDGSCGQHLCTGIAGLDVTLRLKMPPQETALENGEPAGSAPETDQGSGPDAVGRVQGWALTRQQLQALLLKRFLLARRSRRGLFAQIVLPALFVGLALVFSLIVPPFGHYPALRLSPTMYGAQVSFFSEDAPGDPGRARLLEALLQEAGLEEPPVQHSSHRFSAPEVPAEVAKVLASGNWTPESPSPACQCSRPGARRLLPDCPAAAGGPPPPQAVTGSGEVVQNLTGRNLSDFLVKTYPRLVRQGLKTKKWVNEVRYGGFSLGGRDPGLPSGQELGRSVEELWALLSPLPGGALDRVLKNLTAWAHSLDAQDSLKIWFNNKGWHSMVAFVNRASNAILRAHLPPGPARHAHSITTLNHPLNLTKEQLSEGALMASSVDVLVSICVVFAMSFVPASFTLVLIEERVTRAKHLQLMGGLSPTLYWLGNFLWDMCNYLVPACIVVLIFLAFQQRAYVAPANLPALLLLLLLYGWSITPLMYPASFFFSVPSTAYVVLTCINLFIGINGSMATFVLELFSDQKLQEVSRILKQVFLIFPHFCLGRGLIDMVRNQAMADAFERLGDRQFQSPLRWEVVGKNLLAMVIQGPLFLLFTLLLQHRSQLLPQPRVRSLPLLGEEDEDVARERERVVQGATQGDVLVLRNLTKVYRGQRMPAVDRLCLGIPPGECFGLLGVNGAGKTSTFRMVTGDTLASRGEAVLAGHSVAREPSAAHLSMGYCPQSDAIFELLTGREHLELLARLRGVPEAQVAQTAGSGLARLGLSWYADRPAGTYSGGNKRKLATALALVGDPAVVFLDEPTTGMDPSARRFLWNSLLAVVREGRSVMLTSHSMEECEALCSRLAIMVNGRFRCLGSPQHLKGRFAAGHTLTLRVPAARSQPAAAFVAAEFPGAELREAHGGRLRFQLPPGGRCALARVFGELAVHGAEHGVEDFSVSQTMLEEVFLYFSKDQGKDEDTEEQKEAGVGVDPAPGLQHPKRVSQFLDDPSTAETVL

SEQ ID NO: 4196 - protein, 625 aa, Homo sapiens
MRNGSGNWLADQIRRNRVVEGPGTPSKGQRWCTLHTEFLWYDGSLKSVPPPDFGTPTLHYFEDWGVVTYGSALPAEINRSFLSFKSGKLGGRAIYDIVHRNKYKDWIKGWRNFNAGHEHPDQNSFTFAPNGVPFITEALYGPKYTFFNNVLMFSPAVSKSCFSPWVGQVTEDCSSKWSKYKHDLAASCQGRVVAAEEKNGVVFIRGEGVGAYNPQLNLKNVQRNLILLHPQLLLLVDQIHLGEESPLETAASFFHNVDVPFEETVVDGVHGAFIRQRDGLYKMYWMDDTGYSEKATFASVTYPRGYPYNGTNYVNVTMHLRSPITRAAYLFIGPSIDVQSFTVHGDSQQLDVFIATSKHAYATYLWTGEATGQSAFAQVIADRHKILFDRNSAIKSSIVPEVKDYAAIVEQNLQHFKPVFQLLEKQILSRVRNTASFRKTAERLLRFSDKRQTEEAIDRIFAISQQQQQQSKSKKNRRAGKRYKFVDAVPDIFAQIEVNEKKIRQKAQILAQKELPIDEDEEMKDLLDFADVTYEKHKNGGLIKGRFGQARMVTTTHSRAPSLSASYTRLFLILNIAIFFVMLAMQLTYFQRAQSLHGQRCLYAVLLIDSCILLWLYSSCSQSQC

SEQ ID NO: 4197 - protein, 51 aa, Homo sapiens
VAIMQLPQGLAYALLAGLPPVFGLYSSFYPVFIYFLFGTSRHISVGKWRQA

SEQ ID NO: 4198 - protein, 356 aa, Homo sapiens
IFFPDAEVGVMAPRSLLLLLSGALALTDTWAGSHSLRYFSTAVSRPGRGEPRYIAVEYVDDTQFLRFDSDAAIPRMEPREPWVEQEGPQYWEWTTGYAKANAQTDRVALRNLLRRYNQSEAGSHTLQGMNGCDMGPDGRLLRGYHQHAYDGKDYISLNEDLRSWTAADTVAQITQRFYEAEEYAEEFRTYLEGECLELLRRYLENGKETLQRADPPKAHVAHHPISDHEATLRCWALGFYPAEITLTWQRDGEEQTQDTELVETRPAGDGTFQKWAAVVVPPGEEQRYTCHVQHEGLPQPLILRWEQSPQPTIPIVGIVAGLVVLGAVVTGAVVAAVMWRKKSSDRNRGSYSQAAV

SEQ ID NO: 4199 - protein, 122 aa, Homo sapiens
IFTFDPLPEPAAAPAGRPSASRGHRKRSRRVLYPRVVRRQLPVEEPNPAKRLLFLLLTIVFCQILMAEEGVPAPLPPEDAPNAASLAPTPVSAVLEPFNLTSEPSDYALDLSTFLQQHPAAF

SEQ ID NO: 4200 - protein, 65 aa, Homo sapiens
IIQLFSFILLRATDSTEMETIRRLSIHLNKYLALTPPRRNSLMLWLIPWSMTSFMAKMVFFLHMV

SEQ ID NO: 4201 - protein, 88 aa, Homo sapiens
TIIPRPQDHGTNLICQVTFPGAGVTTERTIQLSVSWKSGTVEEVVVLAVGVVAVKILLLCLCLIILSFHKKKAVRAVEVEENVYAVMG

SEQ ID NO: 4202 - protein, 48 aa, Homo sapiens
TDRLLLAFLLTLYLGLAHGLDQQDLRYLRAQLQRKLHLLSRPQDGEAE

SEQ ID NO: 4203 - protein, 50 aa, Homo sapiens
LVKGILPLVGMAMVPALLGLIGYHLYRKANRPKVSKKKLKEEKRNKSKKK

SEQ ID NO: 4204 - protein, 350 aa, Homo sapiens
LVFIRTDTMAEHDYHEDYGFSSFNDSSQEEHQDFLQFSKVFLPCMYLVVFVCGLVGNSLVLVISIFYHKLQSLTDVFLVNLPLADLVFVCTLPFWAYAGIHEWVFGQVMCKSLLGIYTINFYTSMLILTCITVDRFIVVVKATKAYNQQAKRMTWGKVTSLLIWVISLLVSLPQIIYGNVFNLDKLICGYHDEAISTVVLATQMTLGFFLPLLTMIVCYSVIIKTLLHAGGFQKHRSLKIIFLVMAVFLLTQMPFNLMKFIRSTHWEYYAMTSFHYTIMVTEAIAYLRACLNPVLYAFVSLKFRKNFWKLVKDIGCLPYLGVSHQWKSSEDNSKTFSASHNVEATSMFQL

SEQ ID NO: 4205 - protein, 628 aa, Homo sapiens
KVKLACHILTGEMVAIKIMDKNTLGSDLPRIKTEIEALKNLRHQHICQLYHVLETANKIFMVLEYCPGGELFDYIISQDRLSEEETRVVFRQIVSAVAYVHSQGYAHRDLKPENLLFDEYHKLKLIDFGLCAKPKGNKDYHLQTCCGSLAYAAPELIQGKSYLGSEADVWSMGILLYVLMCGFLPFDDDNVMALYKKIMRGKYDVPKWLSPSSILLLQQMLQVDPKKRISMKNLLNHPWIMQDYNYPVEWQSKNPFIHLDDDCVTELSVHHRNNRQTMEDLISLWQYDHLTATYLLLLAKKARGKPVRLRLSSFSCGQASATPFTDIKSNNWSLEDVTASDKNYVAGLIDYDWCEDDLSTGAATPRTSQFTKYWTESNGVESKSLTPALCRTPANKLKNKENVYTPKSAVKNEEYFMFPEPKTPVNKNQHKREILTTPNRYTTPSKARNQCLKETPIKIPVNSTGTDKLMTGVISPERRCRSVELDLNQAHMEETPKRKGAKVFGSLERGLDKVITVLTRSKRKGSARDGPRRLKLHYNVTTTRLVNPDQLLNEIMSILPKKHVDFVQKGYTLKCQTQSDFGKVTMQFELEVCQLQKPDVVGIRRQRLKGDAWVYKRLVEDILSSCKV

SEQ ID NO: 4206 - protein, 187 aa, Homo sapiens
VSVAMTDQTYCDRLVQDTPFLTGHGRLSEQQVDRIILQLNRYYPQILTNKEAEKFRNPKASLRVRLCDLLSHLQRSGERDCQEFYRALYIHAQPLHSRLPSRHALQNSDCTELDSGSQSGELSNRGPMSFLAGLGLAVGLALLLYCYPPDPKGLPGTRRVLGFSPVIIDRHVSRYLLAFLADDLGGL

SEQ ID NO: 4207 - protein, 261 aa, Homo sapiens
MPESVTVQEGLCIFVHCSVFYLEYGWKDSTPAYGHWFREGVSVDQETPVATNNSTQKVQKETQGRFHLLGDPSRNNCSLSIRDARRRDNGSYFFWVARGRTKFSYKYSPLSVYVTALTHRPDILIPEFLKSGHPSNLTCSVPWVCEQGTPPIFSWMSAAPTSLGPRTLHSSVLTIIPRPQDHGTNLICQVTFPGAGVTTERTIQLSVSWKSGTVEEVVVLAVGVVAVKILLLCLCLIILSFHKKKAVRAVEVEENVYAVMG

SEQ ID NO: 4208 - protein, 91 aa, Homo sapiens
MCKNCKHAFCWYCLESLDDDFLLIHYDKGPCRNKLGHSRASVIWHRTQVVGIFAGFGLLLLVASPFLLLATPFVLCCKCKCSKGDDDPLPT

SEQ ID NO: 4209 - protein, 155 aa, Homo sapiens
MPAKHQPDFIYLRHVPLRKVHLFTIIQMSCLGLLWIIKVSRAAIVFPMMVLALVFVRKLMDLLFTKRELSWLDDLMPESKKKKLEDAEKEEEQSMLAMEDEGTVQLPLEGHYRDDPSVINISDEMSKTALWRNLLITADNSKDKESSFPSKSSPS

SEQ ID NO: 4210 - protein, 80 aa, Homo sapiens
LLVFNFLLILTILTIWLFKNHRFRFLHETGGAMVYDKPPKFAMSREQMSQSCSHTAHNASLLTDAGPLSCGESRASCLFL

SEQ ID NO: 4211 - protein, 53 aa, Homo sapiens
IFTCIKSKWKYVHIFSIWFPCICSSTVLTSAISREENWSVFLWFWFGCHSVLS

SEQ ID NO: 4212 - protein, 208 aa, Homo sapiens
MNLYFAQVVFKAKVKRRPEMSRGLLAVRGAFVGASLLFLLVNVLCAVLSHRRRAQPWALLLVRVLVSDSLFVICALSLAACLCLVARRAPSTSIYLEAKGTSVCQAAAMGGAMVLLYASRACYNLTALALAPQSRLDTFDYDWYNVSDQADLVNDLGNKGYLVFGLILFVWELLPTTLLVGFFRVHRPPQDLYVGQSRLWELVWCHRA

SEQ ID NO: 4213 - protein, 43 aa, Homo sapiens
IIAGILLLLALVAILWKLGFFKRKYEKMTKNPDEIDETTELSS

SEQ ID NO: 4214 - protein, 336 aa, Homo sapiens
KKGREREREESSEARGPSAMRRASRDYTKYLRGSEEMGGGPGAPHEGPLHAPPPPAPHQPPAASRSMFVALLGLGLGQVVCSVALFFYFRAQMDPNRISEDGTHCIYRILRLHENADFQDTTLESQDTKLIPDSCRRIKQAFQGAVQKELQHIVGSQHIRAEKAMVDGSWLDLAKRSKLEAQPFAHLTINATDIPSGSHKVSLSSWYHDRGWAKISNMTFSNGKLIVNQDGFYYLYANICFRHHETSGDLATEYLQLMVYVTKTSIKIPSSHTLMKGGSTKYWSGNSEFHFYSINVGGFFKLRSGEEISIEVSNPSLLDPDQDATYFGAFKVRDID

SEQ ID NO: 4215 - protein, 35 aa, Homo sapiens
IVFFFSRRGGKLSHYRGPAMLCIWACCMSCCRCLH

SEQ ID NO: 4216 - protein, 190 aa, Homo sapiens
TGTLLLGTCLLYCARSSMPICTVSMSQDFGWNKKEAGIVLSSFFWGYCLTQVVGGHLGDRIGGEKVILLSASAWGSITAVTPLLAHLSSAHLAFMTFSRILMGLLQGVYFPALTSLLSQKVRESERAFTYSIVGAGSQFGTLLTGAVGSLLLEWYGWQSIFYFSGGLTLLWVWYVYRYLLSEKGNAGRAG

SEQ ID NO: 4217 - protein, 444 aa, Homo sapiens
MDDTYAVYTQSDVYDQLIFAVNQYLQLYNVSVGNHAYENKGTKQSAMAICQHFYKRGNIYPGNDTFDIDPEIETECFFVEPDEPFHIGTPAENKLNLTLDFHRLLTVELQFKLKAINLQTVRHQELPDCYDFTLTITFDNKAHSGRIKISLDNDISIRECKDWHVSGSIQKNTHYMMIFDAFVILTCLVSLILCIRSVIRGLQLQQEFVNFFLLHYKKEVSVSDQMEFVNGWYIMIIISDILTIIGSILKMEIQAKSLTSYDVCSILLGTSTMLVWLGVIRYLGFFAKYNLLILTLQAALPNVIRFCCCAAMIYLGYCFCGWIVLGPYHDKFRSLNMVSECLFSLINGDDMFATFAKMQQKSYLVWLFSRIYLYSFISLFIYMILSLFIALITDTYETIKQYQQDGFPETELRTFISECKDLPNSGKYRLEDDPPVSLFCCCKK

SEQ ID NO: 4218 - protein, 46 aa, Homo sapiens
MKRGHSRWLPALSAECLSIRGEEWPLEALCPLLVSLCLLLASLAEH

SEQ ID NO: 4219 - protein, 30 aa, Homo sapiens
KRMKMKNKWLSFNDACGMCVCAQAIILLRM

SEQ ID NO: 4220 - protein, 57 aa, Homo sapiens
LALVIFYLTLIIFTCKFARLQSIFPDFSKAGMERAFLPVTSPNKHLGLVTPHKTELV

SEQ ID NO: 4221 - protein, 220 aa, Homo sapiens
TARGRRSLELVDRAADRGADARRGRPLGTAGGAVSVAMTDQTYCDRLVQDTPFLTGHGRLSEQQVDRIILQLNRYYPQILTNKEAEKFRNPKASLRVRLCDLLSHLQRSGERDCQEFYRALYIHAQPLHSRLPSRHALQNSDCTELDSGSQSGELSNRGPMSFLAGLGLAVGLALLLYCYPPDPKGLPGTRRVLGFSPVIIDRHVSRYLLAFLADDLGGL

SEQ ID NO: 4222 - protein, 360 aa, Homo sapiens
KMPAHLLQDDISSSYTTTTTITAPPSRVLQNGGDKLETMPLYLEDDIRPDIKDDIYDPTYKDKEGPSPKVEYVWRNIILMSLLHLGALYGITLIPTCKFYTWLWGVFYYFVSALGITAGAHRLWSHRSYKARLPLRLFLIIANTMAFQNDVYEWARDHRAHHKFSETHADPHNSRRGFFFSHVGWLLVRKHPAVKEKGSTLDLSDLEAEKLVMFQRRYYKPGLLMMCFILPTLVPWYFWGETFQNSVFVATFLRYAVVLNATWLVNSAAHLFGYRPYDKNISPRENILVSLGAVGEGFHNYHHSFPYDYSASEYRWHINFTTFFIDCMAALGLAYDRKKVSKAAILARIKRTGDGNYKSG

SEQ ID NO: 4223 - protein, 633 aa, Homo sapiens
LLPDMNQVTIQWDAVIALYILFSWCHGGITNINCSGHIWVEPATIFKMGMNISIYCQAAIKNCQPRKLHFYKNGIKERFQITRINKTTARLWYKNFLEPHASMYCTAECPKHFQETLICGKDISSGYPPDIPDEVTCVIYEYSGNMTCTWNAGKLTYIDTKYVVHVKSLETEEEQQYLTSSYINISTDSLQGGKKYLVWVQAANALGMEESKQLQIHLDDIVIPSAAVISRAETINATVPKTIIYWDSQTTIEKVSCEMRYKATTNQTWNVKEFDTNFTYVQQSEFYLEPNIKYVFQVRCQETGKRYWQPWSSLFFHKTPETVPQVTSKAFQHDTWNSGLTVASISTGHLTSDNRGDIGLLLGMIVFAVMLSILSLIGIFNRSFRTGIKRRILLLIPKWLYEDIPNMKNSNVVKMLQENSELMNNNSSEQVLYVDPMITEIKEIFIPEHKPTDYKKENTGPLETRDYPQNSLFDNTTVVYIPDLNTGYKPQISNFLPEGSHLSNNNEITSLTLKPPVDSLDSGNNPRLQKHPNFAFSVSSVNSLSNTIFLGELSLILNQGECSSPDIQNSVEEETTMLLENDSPSETIPEQTLLPDEFVSCLGIVNEELPSINTYFPQNILESHFNRISLLEK

SEQ ID NO: 4224 - protein, 41 aa, Homo sapiens
ILVWLLFLICEFIGLVFCFLGSRLVEKKKGRIHSHDLYSRP

SEQ ID NO: 4225 - protein, 872 aa, Homo sapiens
KNILEVPSARTTRIMGDHLDLLLGVVLMAGPVFGIPSCSFDGRIAFYRFCNLTQVPQVLNTTERLLLSFNYIRTVTASSFPFLEQLQLLELGSQYTPLTIDKEAFRNLPNLRILDLGSSKIYFLHPDAFQGLFHLFELRLYFCGLSDAVLKDGYFRNLKALTRLDLSKNQIRSLYLHPSFGKLNSLKSIDFSSNQIFLVCEHELEPLQGKTLSFFSLAANSLYSRVSVDWGKCMNPFRNMVLEILDVSGNGWTVDITGNFSNAISKSQAFSLILAHHIMGAGFGFHNIKDPDQNTFAGLARSSVRHLDLSHGFVFSLNSRVFETLKDLKVLNLAYNKINKIADEAFYGLDNLQVLNLSYNLLGELYSSNFYGLPKVAYIDLQKNHIAIIQDQTFKFLEKLQTLDLRDNALTTIHFIPSIPDIFLSGNKLVTLPKINLTANLIHLSENRLENLDILYFLLRVPHLQILILNQNRFSSCSGDQTPSENPSLEQLFLGENMLQLAWETELCWDVFEGLSHLQVLYLNHNYLNSLPPGVFSHLTALRGLSLNSNRLTVLSHNDLPANLEILDISRNQLLAPNPDVFVSLSVLDITHNKFICECELSTFINWLNHTNVTIAGPPADIYCVYPDSFSGVSLFSLSTEGCDEEEVLKSLKFSLFIVCTVTLTLFLMTILTVTKFRGFCFICYKTAQRLVFKDHPQGTEPDMYKYDAYLCFSSKDFTWVQNALLKHLDTQYSDQNRFNLCFEERDFVPGENRIANIQDAIWNSRKIVCLVSRHFLRDGWCLEAFSYAQGRCLSDLNSALIMVVVGSLSQYQLMKHQSIRGFVQKQQYLRWPEDLQDVGWFLHKLSQQILKKEKEKKKDNNIPLQTVATIS

SEQ ID NO: 4226 - protein, 330 aa, Homo sapiens
VQALAAGVTHSTREAKAACRTMNGTYNTCGSSDLTWPPAIKLGFYAYLGVLLVLGLLLNSLALWVFCCRMQQWTETRIYMTNLAVADLCLLCTLPFVLHSLRDTSDTPLCQLSQGIYLTNRYMSISLVTAIAVDRYVAVRHPLRARGLRSPRQAAAVCAVLWVLVIGSLVARWLLGIQEGGFCFRSTRHNFNSMAFPLLGFYLPLAVVVFCSLKVVTALAQRPPTDVGQAEATRKAARMVWANLLVFVVCFLPLHVGLTVRLAVGWNACALLETIRRALYITSKLSDANCCLDAICYYYMAKEFQEASALAVAPSAKAHKSQDSLCVTLA

SEQ ID NO: 4227 - protein, 528 aa, Homo sapiens
VEPSEAAAQRASGEKSWKMYTSHEDIGYDFEDGPKDKKTLKPHPNIDGGWAWMMVLSSFFVHILIMGSQMALGVLNVEWLEEFHQSRGLTAWVSSLSMGITLIVGPFIGLFINTCGCRQTAIIGGLVNSLGWVLSAYAANVHYLFITFGVAAGLGSGMAYLPAVVMVGRYFQKRRALAQGLSTTGTGFGTFLMTVLLKYLCAEYGWRNAMLIQGAVSLNLCVCGALMRPLSPGKNPNDPGEKDVRGLPAHSTESVKSTGQQGRTEEKDGGLGNEETLCDLQAQECPDQAGHRKNMCALRILKTVSWLTMRVRKGFEDWYSGYFGTASLFTNRMFVAFIFWALFAYSSFVIPFIHLPEIVNLYNLSEQNDVFPLTSIIAIVHIFGKVILGVIADLPCISVWNVFLLANFTLVLSIFILPLMHTYAGLAVICALIGFSSGYFSLMPVVTEDLVGIEHLANAYGIIICANGISALLGPPFAGWIYDITQKYDFSFYICGLLYMIGILFLLIQPCIRIIEQSRRKYMDGAHV

SEQ ID NO: 4228 - protein, 833 aa, Homo sapiens
LNCGVSIALLGVLLLGAARLPRGAEAFEIALPRESNITVLIKLGTPTLLAKPCYIVISKRHITMLSIKSGERIVFTFSCQSPENHFVIEIQKNIDCMSGPCPFGEVQLQPSTSLLPTLNRTFIWDVKAHKSIGLELQFSIPRLRQIGPGESCPDGVTHSISGRIDATVVRIGTFCSNGTVSRIKMQEGVKMALHLPWFHPRNVSGFSIANRSSIKRLCIIESVFEGEGSATLMSANYPEGFPEDELMTWQFVVPAHLRASVSFLNFNLSNCERKEERVEYYIPGSTTNPEVFKLEDKQPGNMAGNFNLSLQGCDQDAQSPGILRLQFQVLVQHPQNESNKIYVVDLSNERAMSLTIEPRPVKQSRKFVPGCFVCLESRTCSSNLTLTSGSKHKISFLCDDLTRLWMNVEKTISCTDHRYCQRKSYSLQVPSDILHLPVELHDFSWKLLVPKDRLSLVLVPAQKLQQHTHEKPCNTSFSYLVASAIPSQDLYFGSFCPGGSIKQIQVKQNISVTLRTFAPSFQQEASRQGLTVSFIPYFKEEGVFTVTPDTKSKVYLRTPNWDRGLPSLTSVSWNISVPRDQVACLTFFKERSGVVCQTGRAFMIIQEQRTRAEEIFSLDEDVLPKPSFHHHSFWVNISNCSPTSGKQLDLLFSVTLTPRTVDLTVILIAAVGGGVLLLSALGLIICCVKKKKKKTNKGPAVGIYNDNINTEMPRQPKKFQKGRKDNDSHVYAVIEDTMVYGHLLQDSSGSFLQPEVDTYRPFQGTMGVCPPSPPTICSRAPTAKLATEEPPPRSPPESESEPYTFSHPNNGDVSSKDTDIPLLNTQEPMEPAE

SEQ ID NO: 4229 - protein, 434 aa, Homo sapiens
KHGIQKTTKNLSFNFIWNSTVFLAPWTRLTCWLFPLAALSRGALRLLTPSVKSCCSVAQAGVQWQDLSSLQSPSLRFKQFSCLSLPSRWDYRTFGSRASELLWMASALWTVLPSRMSLRSLKWSLLLLSLLSFFVMWYLSLPHYNVIERVNWMYFYEYEPIYRQDFHFTLREHSNCSHQNPFLVILVTSHPSDVKARQAIRVTWGEKKSWWGYEVLTFFLLGQEAEKEDKMLALSLEDEHLLYGDIIRQDFLDTYNNLTLKTIMAFRWVTEFCPNAKYVMKTDTDVFINTGNLVKYLLNLNHSEKFFTGYPLIDNYSYRGFYQKTHISYQEYPFKVFPPYCSGLGYIMSRDLVPRIYEMMGHVKPIKFEDVYVGICLNLLKVNIHIPEDTNLFFLYRIHLDVCQLRRVIAAHGFSSKEIITFWQVMLRNTTCHY

SEQ ID NO: 4230 - protein, 314 aa, Homo sapiens
IPVLYCMVFIAGILLNGVSGWIFFYVPSSKSFIIYLKNIVIADFVMSLTFPFKILGDSGLGPWQLNVFVCRVSAVLFYVNMYVSIVFFGLISFDRYYKIVKPLWTSFIQSVSYSKLLSVIVWMLMLLLAVPNIILTNQSVREVTQIKCIELKSELGRKWHKASNYIFVAIFWIVFLLLIVFYTAITKKIFKSHLKSSRNSTSVKKKSSRNIFSIVFVFFVCFVPYHIARIPYTKSQTEAHYSCQSKEILRYMKEFTLLLSAANVCLDPIIYFFLCQPFREILCKKLHIPLKAQNDLDISRIKRGNTTLESTDTL

SEQ ID NO: 4231 - protein, 1171 aa, Homo sapiens
LPLLLVLALSQGILNCCLAYNVGLPEAKIFSGPSSEQFGYAVQQFINPKGNWLLVGSPWSGFPENRMGDVYKCPVDLSTATCEKLNLQTSTSIPNVTEMKTNMSLGLILTRNMGTGGFLTCGPLWAQQCGNQYYTTGVCSDISPDFQLSASFSPATQPCPSLIDVVVVCDESNSIYPWDAVKNFLEKFVQGLDIGPTKTQVGLIQYANNPRVVFNLNTYKTKEEMIVATSQTSQYGGDLTNTFGAIQYARKYAYSAASGGRRSATKVMVVVTDGESHDGSMLKAVIDQCNHDNILRFGIAVLGYLNRNALDTKNLIKEIKAIASIPTERYFFNVSDEAALLEKAGTLGEQIFSIEGTVQGGDNFQMEMSQVGFSADYSSQNDILMLGAVGAFGWSGTIVQKTSHGHLIFPKQAFDQILQDRNHSSYLGYSVAAISTGESTHFVAGAPRANYTGQIVLYSVNENGNITVIQAHRGDQIGSYFGSVLCSVDVDKDTITDVLLVGAPMYMSDLKKEEGRVYLFTIKEGILGQHQFLEGPEGIENTRFGSAIAALSDINMDGFNDVIVGSPLENQNSGAVYIYNGHQGTIRTKYSQKILGSDGAFRSHLQYFGRSLDGYGDLNGDSITDVSIGAFGQVVQLWSQSIADVAIEASFTPEKITLVNKNAQIILKLCFSAKFRPTKQNNQVAIVYNITLDADGFSSRVTSRGLFKENNERCLQKNMVVNQAQSCPEHIIYIQEPSDVVNSLDLRVDISLENPGTSPALEAYSETAKVFSIPFHKDCGEDGLCISDLVLDVRQIPAAQEQPFIVSNQNKRLTFSVTLKNKRESAYNTGIVVDFSENLFFASFSLPVDGTEVTCQVAASQKSVACDVGYPALKREQQVTFTINFDFNLQNLQNQASLSFQALSESQEENKADNLVNLKIPLLYDAEIHLTRSTNINFYEISSDGNVPSIVHSFEDVGPKFIFSLKVTTGSVPVSMATVIIHIPQYTKEKNPLMYLTGVQTDKAGDISCNADINPLKIGQTSSSVSFKSENFRHTKELNCRTASCSNVTCWLKDVHMKGEYFVNVTTRIWNGTFASSTFQTVQLTAAAEINTYNPEIYVIEDNTVTIPLMIMKPDEKAEVPTGVIIGSIIAGILLLLALVAILWKLGFFKRKYEKMTKNPDEIDETTELSS

SEQ ID NO: 4232 - protein, 481 aa, Homo sapiens
LAADMTPEDPEETQPLLGPPGGSAPRGRRVFLAAFAAALGPLSFGFALGYSSPAIPSLQRAAPPAPRLDDAAASWFGAVVTLGAAAGGVLGGWLVDRAGRKLSLLLCSVPFVAGFAVITAAQDVWMLLGGRLLTGLACGVASLVAPVYISEIAYPAVRGLLGSCVQLMVVVGILLAYLAGWVLEWRWLAVLGCVPPSLMLLLMCFMPETPRFLLTQHRRQEAMAALRFLWGSEQGWEDPPIGAEQSFHLALLRQPGIYKPFIIGVSLMAFQQLSGVNAVMFYAETIFEEAKFKDSSLASVVVGVIQVLFTAVAALIMDRAGRRLLLVLSGVVMVFSTSAFGAYFKLTQGGPGNSSHVAISAPVSAQPVDASVGLAWLAVGSMCLFIAGFAVGWGPIPWLLMSEIFPLHVKGVATGICVLTNWLMAFLVTKEFSSLMEVLRPYGAFWLASAFCIFSVLFTLFCVPETKGKTLEQITAHFEGR

SEQ ID NO: 4233 - protein, 223 aa, Homo sapiens
IQASLPDMESNLSGLVPAAGLVPALPPAVTLGLTAAYTTLYALLFFSVYAQLWLVLLYGHKRLSYQTVFLALCLLWAALRTTLFSFYFRDTPRANRLGPLPFWLLYCCPVCLQFFTLTLMNLYFAQVVFKAKVKRRPEMSRGLLAVRGAFVGASLLFLLVNVLCAVLSHRRRAQPWALLLVRVLVSDSLFVICALSLAACLCLVARRAPSTSIYLEAKVGLQH

SEQ ID NO: 4234 - protein, 60 aa, Homo sapiens
VLCYPQEPRDGLESAYIPEQESLPMKIGGIFCLFVLFCLLFVVCFFATNFSIHSALLDKS

SEQ ID NO: 4235 - protein, 705 aa, Homo sapiens
LTVASSGPRSPALASAPAPGPQPSSQPRPPAAAMSKEERPGREEILECQVMWEPDSKKNTQMDRFRAAVGAACGLALESYDDLYHWSVESYSDFWAEFWKFSGIVFSRVYDEVVDTSKGIADVPEWFKGSRLNYAENLLRHKENDRVALYIAREGKEEIVKVTFEELRQEVALFAAAMRKMGVKKGDRVVGYLPNSEHAVEAMLAAASIGAIWSSTSPDFGVNGVLDRFSQIQPKLIFSVEAVVYNGKEHNHMEKLQQVVKGLPDLKKVVVIPYVSSRENIDLSKIPNSVFLDDFLATGTSEQAPQLEFEQLPFSHPLFIMFSSGTTGAPKCMVHSAGGTLIQHLKEHLLHGNMTSSDILLCYTTVGWMMWNWMVSLLATGAAMVLYDGSPLVPTPNVLWDLVDRIGITVLVTGAKWLSVLEEKAMKPVETHSLQMLHTILSTGSPLKAQSYEYVYRCIKSSILLGSISGGTDIISCFMGHNFSLPVYKGEIQARNLGMAVEAWNEEGKAVWGESGELVCTKPIPCQPTHFWNDENGNKYRKAYFSKFPGIWAHGDYCRINPKTGGIVMLGRSDGTLNPNGVRFGSSEIYNIVESFEEVEDSLCVPQYNKYREERVILFLKMASGHAFQPDLVKRIRDAIRMGLSARHVPSLILETKGIPYTLNGKKVEVAVKQIIAGKAVEQGGAFSNPETLDLYRDIPELQGF

SEQ ID NO: 4236 - protein, 438 aa, Homo sapiens
VCILCGPSREGDSPVAMGMTRMLLECSLSDKLCVIQEKQYEVIIVPTLLVTIFLILLGVILWLFIREQRTQQQRSGPQGIAPVPPPRDLSWEAGHGGNVALPLKETSVENFLGATTPALAKLQVPREQLSEVLEQICSGSCGPIFRANMNTGDPSKPKSVILKALKEPAGLHEVQDFLGRIQFHQYLGKHKNLVQLEGCCTEKLPLYMVLEDVAQGDLLSFLWTCRRDVMTMDGLLYDLTEKQVYHIGKQVLLALEFLQEKHLFHGDVAARNILMQSDLTAKLCGLGLAYEVYTRGAISSTQTIPLKWLAPERLLLRPASIRADVWSFGILLYEMVTLGAPPYPEVPPTSILEHLQRRKIMKRPSSCTHTMYSIMKSCWRWREADRPSPRELRLRLEAAIKTADDEAVLQVPELVVPELYAAVAGIRVESLFYNYSML

SEQ ID NO: 4237 - protein, 1161 aa, Homo sapiens
RTRAALLLFTALATSLGFNLDTEELTAFRVDSAGFGDSVVQYANSWVVVGAPQKITAANQTGGLYQCGYSTGACEPIGLQVPPEAVNMSLGLSLASTTSPSQLLACGPTVHHECGRNMYLTGLCFLLGPTQLTQRLPVSRQECPRQEQDIVFLIDGSGSISSRNFATMMNFVRAVISQFQRPSTQFSLMQFSNKFQTHFTFEEFRRSSNPLSLLASVHQLQGFTYTATAIQNVVHRLFHASYGARRDAAKILIVITDGKKEGDSLDYKDVIPMADAAGIIRYAIGVGLAFQNRNSWKELNDIASKPSQEHIFKVEDFDALKDIQNQLKEKIFAIEGTETTSSSSFELEMAQEGFSAVFTPDGPVLGAVGSFTWSGGAFLYPPNMSPTFINMSQENVDMRDSYLGYSTELALWKGVQSLVLGAPRYQHTGKAVIFTQVSRQWRMKAEVTGTQIGSYFGASLCSVDVDSDGSTDLVLIGAPHYYEQTRGGQVSVCPLPRGWRRWWCDAVLYGEQGHPWGRFGAALTVLGDVNGDKLTDVVIGAPGEEENRGAVYLFHGVLGPSISPSHSQRIAGSQLSSRLQYFGQALSGGQDLTQDGLVDLAVGARGQVLLLRTRPVLWVGVSMQFIPAEIPRSAFECREQVVSEQTLVQSNICLYIDKRSKNLLGSRDLQSSVTLDLALDPGRLSPRATFQETKNRSLSRVRVLGLKAHCENFNLLLPSCVEDSVTPITLRLNFTLVGKPLLAFRNLRPMLAADAQRYFTASLPFEKNCGADHICQDNLGISFSFPGLKSLLVGSNLELNAEVMVWNDGEDSYGTTITFSHPAGLSYRYVAEGQKQGQLRSLHLTCDSAPVGSQGTWSTSCRINHLIFRGGAQITFLATFDVSPKAVLGDRLLLTANVSSENNTPRTSKTTFQLELPVKYAVYTVVSSHEQFTKYLNFSESEEKESHVAMHRYQVNNLGQRDLPVSINFWVPVELNQEAVWMDVEVSHPQNPSLRCSSEKIAPPASDFLAHIQKNPVLDCSIAGCLRFRCDVPSFSVQEELDFTLKGNLSFGWVRQILQKKVSVVSVAEITFDTSVYSQLPGQEAFMRAQTTTVLEKYKVHNPTPLIVGSSIGGLLLLALITAVLYKVGFFKRQYKEMMEEANGQIAPENGTQTPSPPSEK

SEQ ID NO: 4238 - protein, 516 aa, Homo sapiens
LQAGMAGGMSAECPEPGPGGLQGQSPGPGRQCPPPITPTSWSLPPWRAYVAAAVLCYINLLNYMNWFIIAGVLLDIQEVFQISDNHAGLLQTVFVSCLLLSAPVFGYLGDRHSRKATMSFGILLWSGAGLSSSFISPRYSWLFFLSRGIVGTGSASYSTIAPTVLGDLFVRDQRTRVLAVFYIFIPVGSGLGYVLGSAVTMLTGNWRWALRVMPCLEAVALILLILLVPDPPRGAAETQGEGAVGGFRSSWCEDVRYLGKNWSFVWSTLGVTAMAFVTGALGFWAPKFLLEARVVHGLQPPCFQEPCSNPDSLIFGALTIMTGVIGVILGAEAARRYKKVIPGAEPLICASSLLATAPCLYLALVLAPTTLLASYVFLGLGELLLSCNWAVVADILLSVVVPRCRGTAEALQITVGHILGDAGSPYLTGLISSVLRARRPDSYLQRFRSLQQSFLCCAFVIALGGGCFLLTALYLERDETRAWQPVTGTPDSNDVDSNDLERQGLLSGAGASTEEP

SEQ ID NO: 4239 - protein, 606 aa, Homo sapiens
LFALLLLCALLARLQVALQIAPPCTSEKHYEHLGRCCNKCEPGKYMSSKCTTTSDSVCLPCGPDEYLDSWNEEDKCLLHKVCDTGKALVAVVAGNSTTPRRCACTAGYHWSQDCECCRRNTECAPGLGAQHPLQLNKDTVCKPCLAGYFSDAFSSTDKCRPWTNCTFLGKRVEHHGTEKSDAVCSSSLPARKPPNEPHVYLPGLIILLLFASVALVAAIIFGVCYRKKGKALTANLWHWINEACGRLSGDKESSGDSCVSTHTANFGQQGACEGVLLLTLEEKTFPEDMCYPDQGGVCQGTCVGGGPYAQGEDARMLSLVSKTEIEEDSFRQMPTEDEYMDRPSQPTDQLLFLTEPGSKSTPPFSEPLEVGENDSLSQCFTGTQSTVGSESCNCTEPLCRTDWTPMSSENYLQKEVDSGHCPHWAASPSPNWADVCTGCRNPPGEDCEPLVGSPKRGPLPQCAYGMGLPPEEEASRTEARDQPEDGADGRLPSSARAGAGSGSSPGGQSPASGNVTGNSNSTFISSGQVMNFKGDIIVVYVSQTSQEGAAAAAEPMGRPVQEETLARRDSFAGNGPRFPDPCGGPEGLREPEKASRPVQEQGGAKA

SEQ ID NO: 4240 - protein, 550 aa, Homo sapiens
ITENTSKEEDSEPKRIENRMLPITDRLLHLLGLEKTAFRIYAVSTLLLFLLFFLFRLLLRFLRLCRSFYITCRRLRCFPQPPRRNWLLGHLGMYLPNEAGLQDEKKVLDNMHHVLLVWMGPVLPLLVLVHPDYIKPLLGASAAIAPKDDLFYGFLKPWLGDGLLLSKGDKWSRHRRLLTPAFHFDILKPYMKIFNQSADIMHAKWRHLAEGSAVSLDMFEHISLMTLDSLQKCVFSYNSNCQEKMSDYISAIIELSALSVRRQYRLHHYLDFIYYRSADGRRFRQACDMVHHFTTEVIQERRRALRQQGAEAWLKAKQGKTLDFIDVLLLARDEDGKELSDEDIRAEADTFMFEGHDTTSSGISWMLFNLAKYPEYQEKCREEIQEVMKGRELEELEWDDLTQLPFTTMCIKESLRQYPPVTLVSRQCTEDIKLPDGRIIPKGIICLVSIYGTHHNPTVWPDSKVYNPYRFDPDNPQQRSPLAYVPFSAGPRNCIGQSFAMAELRVVVALTLLRFRLSVDRTRKVRRKPELILRTENGLWLKVEPLPPRA

SEQ ID NO: 4241 - protein, 226 aa, Homo sapiens
VHCSVFYLEYGWKDSTPAYGHWFREGVSVDQETPVATNNSTQKVQKETQGRFHLLGDPSRNNCSLSIRDARRRDNGSYFFWVARGRTKFSYKYSPLSVYVTALTHRPDILIPEFLKSGHPSNLTCSVPWVCEQGTPPIFSWMSAAPTSLGPRTLHSSVLTIIPRPQDHGTNLICQVTFPGAGVTTERTIQLSVSWKSGTVEEVVVLAVGVVAVKILLLCLCLIILR

SEQ ID NO: 4242 - protein, 314 aa, Homo sapiens
LPQTELRTPGRGLGPRLHRMGLPVSWAPPALWVLGCCALLLSLWALCTACRRPEDAVAPRKRARRQRARLQGSATAAEASLLRRTHLCSLSKSDTRLHELHRGPRSSRALRPASMDLLRPHWLEVSRDITGPQAAPSAFPHQELPRALPAAAATAGCAGLEATYSNVGLAALPGVSLAASPVVAEYARVQKRKGTHRSPQEPQQGKTEVTPAAQVDVLYSRVCKPKRRDPGPTTDPLDPKGQGAILALAGDLAYQTLPLRALDVDSGPLENVYESIRELGDPAGRSSTCGAGTPPASSCPSLGRGWRPLPASLP

SEQ ID NO: 4243 - protein, 45 aa, Homo sapiens
KRGHSRWLPALSAECLSIRGEEWPLEALCPLLVSLCLLLASLAEH

SEQ ID NO: 4244 - protein, 600 aa, Homo sapiens
LRRVCGSRWAHAVVMSRESDVEAQQSHGSSACSQPHGSVTQSQGSSSQSQGISSSSTSTMPNSSQSSHSSSGTLSSLETVSTQELYSIPEDQEPEDQEPEEPTPAPWARLWALQDGFANLETESGHVTQSDLELLLSSDPPASASQSAGIRGVRHHPRPVCSLKCVNDNYWFGRDKSCEYCFDEPLLKRTDKYRTYSKKHFRIFREVGPKNSYIAYIEDHSGNGTFVNTELVGKGKRRPLNNNSEIALSLSRNKVFVFFDLTVDDQSVYPKALRDEYIMSKTLGSGACGEVKLAFERKTCKKVAIKIISKRKFAIGSAREADPALNVETEIEILKKLNHPCIIKIKNFFDAEDYYIVLELMEGGELFDKVVGNKRLKEATCKLYFYQMLLAVQYLHENGIIHRDLKPENVLLSSQEEDCLIKITDFGHSKILGETSLMRTLCGTPTYLAPEVLVSVGTAGYNRAVDCWSLGVILFICLSGYPPFSEHRTQVSLKDQITSGKYNFIPEVWAEVSEKALDLVKKLLVVDPKARFTTEEALRHPWLQDEDMKRKFQDLLSEENESTALPQVLAQPSTSRKRPREGEAEGAETTKRPAVCAAVL

SEQ ID NO: 4245 - protein, 151 aa, Homo sapiens
TMSLMSSCECKNCTETARMVTPRPMPAENPILSGSSRRTLPTSGTWTKRLGSPRLLKISLLHIRPIMASLTMAHLVLPQMLKMSMLGLQRNLHKKKPRNPLMPERREKKERLSQDGFMLKKTEIQMYTCLVCLQILQWMNLYNLCPSLALL

SEQ ID NO: 4246 - protein, 626 aa, Homo sapiens
RFATALWMPWQAFRRFGQKLVRRRTLESGMAETRLARCLSTLDLVALGVGSTLGAGVYVLAGEVAKDKAGPSIVICFLVAALSSVLAGLCYAEFGARVPRSGSAYLYSYVTVGELWAFTTGWNLILSYVIGTASVARAWSSAFDNLIGNHISKTLQGSIALHVPHVLAEYPDFFALGLVLLLTGLLALGASESALVTKVFTGVNLLVLGFVMISGFVKGDVHNWKLTEEDYELAMAELNDTYSLGPLGSGGFVPFGFEGILRGAATCFYAFVGFDCIATTGEEAQNPQRSIPMGIVISLSVCFLAYFAVSSALTLMMPYYQLQPESPLPEAFLYIGWAPARYVVAVGSLCALSTSLLGSMFPMPRVIYAMAEDGLLFRVLARIHTGTRTPIIATVVSGIIAAFMAFLFKLTDLVDLMSIGTLLAYSLVSICVLILRYQPDQETKTGEEVELQEEAITTESEKLTLWGLFFPLNSIPTPLSGQIVYVCSSLLAVLLTALCLVLAQWSVPLLSGDLLWTAVVVLLLLLIIGIIVVIWRQPQSSTPLHFKVPALPLLPLMSIFVNIYLMMQMTAGTWARFGVWMLIGFAIYFGYGIQHSLEEIKSNQPSRKSRAKTVDLDPGTLYVHSV

SEQ ID NO: 4247 - protein, 147 aa, Homo sapiens
VAIFWIVFLLLIVFYTAITKKIFKSHLKSSRNSTSVKKKSSRNIFSIVFVFFVCFVPYHIARIPYTKSQTEAHYSCQSKEILRYMKEFTLLLSAANVCLDPIIYFFLCQPFREILCKKLHIPLKAQNDLDISRIKRGNTTLESTDTL

SEQ ID NO: 4248 - protein, 146 aa, Homo sapiens
KLKGIDANEPTEGSILLKSSEKKLQETPTEANHVQRLRQMLACPPHGLLDRVITNGMLLAGFLIRNIPVINDNVQIKHKWSSSLRSIALSIILVRAGLGLDSKALKKLKGVCVRLSMGPCIVEACTSALLAHYLLGLPWQWGFILG

SEQ ID NO: 4249 - protein, 621 aa, Homo sapiens
KIMMNFSNIMNYMKLLGQSDLPRIKTEIEALKNLRHQHICQLYHVLETANKIFMVLEYCPGGELFDYIISQDRLSEEETRVVFRQIVSAVAYVHSQGYAHRDLKPENLLFDEYHKLKLIDFGLCAKPKGNKDYHLQTCCGSLAYAAPELIQGKSYLGSEADVWSMGILLYVLMCGFLPFDDDNVMALYKKIMRGKYDVPKWLSPSSILLLQQMLQVDPKKRISMKNLLNHPWIMQDYNYPVEWQSKNPFIHLDDDCVTELSVHHRNNRQTMEDLISLWQYDHLTATYLLLLAKKARGKPVRLRLSSFSCGQASATPFTDIKSNNWSLEDVTASDKNYVAGLIDYDWCEDDLSTGAATPRTSQFTKYWTESNGVESKSLTPALCRTPANKLKNKENVYTPKSAVKNEEYFMFPEPKTPVNKNQHKREILTTPNRYTTPSKARNQCLKETPIKIPVNSTGTDKLMTGVISPERRCRSVELDLNQAHMEETPKRKGAKVFGSLERGLDKVITVLTRSKRKGSARDGPRRLKLHYNVTTTRLVNPDQLLNEIMSILPKKHVDFVQKGYTLKCQTQSDFGKVTMQFELEVCQLQKPDVVGIRRQRLKGDAWVYKRLVEDILSSCKV

SEQ ID NO: 4250 - protein, 588 aa, Homo sapiens
LGLLFLGALRAFPQDRPFEDTCHGNPSHYYDKAVRRCCYRCPMGLFPTQQCPQRPTDCRKQCEPDYYLDEADRCTACVTCSRDDLVEKTPCAWNSSRVCECRPGMFCSTSAVNSCARCFFHSVCPAGMIVKFPGTAQKNTVCEPASPGVSPACASPENCKEPSSGTIPQAKPTPVSPATSSASTMPVRGGTRLAQEAASKLTRAPDSPSSVGRPSSDPGLSPTQPCPEGSGDCRKQCEPDYYLDEAGRCTACVSCSRDDLVEKTPCAWNSSRTCECRPGMICATSATNSCARCVPYPICAAETVTKPQDMAEKDTTFEAPPLGTQPDCNPTPENGEAPASTSPTQSLLVDSQASKTLPIPTSAPVALSSTGKPVLDAGPVLFWVILVLVVVVGSSAFLLCHRRACRKRIRQKLHLCYPVQTSQPKLELVDSRPRRSSTQLRSGASVTEPVAEERGLMSQPLMETCHSVGAAYLESLPLQDASPAGGPSSPRDLPEPRVSTEHTNNKIEKIYIMKADTVIVGTVKAELPEGRGLAGPAEPELEEELEADHTPHYPEQETEPPLGSCSDVMLSVEEEGKEDPLPTAASGK

SEQ ID NO: 4251 - protein, 414 aa, Homo sapiens
LGLTVASFLGLLVFLTPIAFILLPPILWRDELEPCGTICEGLFISMAFKLLILLIGTWALFFRKRRADMPRVFVFRALLLVLIFLFVVSYWLFYGVRILDSRDRNYQGIVQYAVSLVDALLFIHYLAIVLLELRQLQPMFTLQVVRSTDGESRFYSLGHLSIQRAALVVLENYYKDFTIYNPNLLTASKFRAAKHMAGLKVYNVDGPSNNATGQSRAMIAAAARRRDSSHNELYYEEAEHERRVKKRKARLVVAVEEAFIHIQRLQAEEQQKAPGEVMDPREAAQAIFPSMARALQKYLRITRQQNYHSMESILQHLAFCITNGMTPKAFLERYLSAGPTLQYDKDRWLSTQWRLVSDEAVTNGLRDGIVFVLKCLDFSLVVNVKKIPFIILSEEFIDPKSHKFVLRLQSETSV

SEQ ID NO: 4252 - protein, 870 aa, Homo sapiens
ILEVPSARTTRIMGDHLDLLLGVVLMAGPVFGIPSCSFDGRIAFYRFCNLTQVPQVLNTTERLLLSFNYIRTVTASSFPFLEQLQLLELGSQYTPLTIDKEAFRNLPNLRILDLGSSKIYFLHPDAFQGLFHLFELRLYFCGLSDAVLKDGYFRNLKALTRLDLSKNQIRSLYLHPSFGKLNSLKSIDFSSNQIFLVCEHELEPLQGKTLSFFSLAANSLYSRVSVDWGKCMNPFRNMVLEILDVSGNGWTVDITGNFSNAISKSQAFSLILAHHIMGAGFGFHNIKDPDQNTFAGLARSSVRHLDLSHGFVFSLNSRVFETLKDLKVLNLAYNKINKIADEAFYGLDNLQVLNLSYNLLGELYSSNFYGLPKVAYIDLQKNHIAIIQDQTFKFLEKLQTLDLRDNALTTIHFIPSIPDIFLSGNKLVTLPKINLTANLIHLSENRLENLDILYFLLRVPHLQILILNQNRFSSCSGDQTPSENPSLEQLFLGENMLQLAWETELCWDVFEGLSHLQVLYLNHNYLNSLPPGVFSHLTALRGLSLNSNRLTVLSHNDLPANLEILDISRNQLLAPNPDVFVSLSVLDITHNKFICECELSTFINWLNHTNVTIAGPPADIYCVYPDSFSGVSLFSLSTEGCDEEEVLKSLKFSLFIVCTVTLTLFLMTILTVTKFRGFCFICYKTAQRLVFKDHPQGTEPDMYKYDAYLCFSSKDFTWVQNALLKHLDTQYSDQNRFNLCFEERDFVPGENRIANIQDAIWNSRKIVCLVSRHFLRDGWCLEAFSYAQGRCLSDLNSALIMVVVGSLSQYQLMKHQSIRGFVQKQQYLRWPEDLQDVGWFLHKLSQQILKKEKEKKKDNNIPLQTVATIS

SEQ ID NO: 4253 - protein, 100 aa, Homo sapiens
LVLFALAFLTCVVFLVVYKVYKYDRACPDGFVLKNTQCIPEGLESYYAEQDSSAREKFYTVINHYNLAKQSITRSVSPWMSVLSEEKLSEQETEAAEKSA

SEQ ID NO: 4254 - protein, 534 aa, Homo sapiens
KEVFAKDSKGSALDAGRDPKRPALPETLCESGWASNTAPTAPPQPGWCLCGKDFKSSCQTPGREKERRLATMHGSCSFLMLLLPLLLLLVATTGPVGALTDEEKRLMVELHNLYRAQVSPTASDMLHMRWDEELAAFAKAYARQCVWGHNKERGRRGENLFAITDEGMDVPLAMEEWHHEREHYNLSAATCSPGQMCGHYTQVVWAKTERIGCGSHFCEKLQGVEETNIELLVCNYEPPGNVKGKRPYQEGTPCSQCPSGYHCKNSLCEPIGSPEDAQDLPYLVTEAPSFRATEASDSRKMGTPSSLATGIPAFLVTEVSGSLATKALPAVETQAPTSLATKDPPSMATEAPPCVTTEVPSILAAHSLPSLDEEPVTFPKSTHVPIPKSADKVTDKTKVPSRSPENSLDPKMSLTGARELLPHAQEEAEAEAELPPSSEVLASVFPAQDKPGELQATLDHTGHTSSKSLPNFPNTSATANATGGRALALQSSLPGAEGPDKPSVVSGLNSGPGHVWGPLLGLLLLPPLVLAGIF

SEQ ID NO: 4255 - protein, 432 aa, Homo sapiens
LQEAEVRGPERAQPARGRMTKARLFRLWLVLGSVFMILLIIVYWDSAGAAHFYLHTSFSRPHTGPPLPTPGPDRDRELTADSDVDEFLDKFLSAGVKQSDLPRKETEQPPAPGSMEESVRGYDWSPRDARRSPDQGRQQAERRSVLRGFCANSSLAFPTKERAFDDIPNSELSHLIVDDRHGAIYCYVPKVACTNWKRVMIVLSGSLLHRGAPYRDPLRIPREHVHNASAHLTFNKFWRRYGKLSRHLMKVKLKKYTKFLFVRDPFVRLISAFRSKFELENEEFYRKFAVPMLRLYANHTSLPASAREAFRAGLKVSFANFIQYLLDPHTEKLAPFNEHWRQVYRLCHPCQIDYDFVGKLETLDEDAAQLLQLLQVDRQLRFPPSYRNRTASSWEEDWFAKIPLAWRQQLYKLYEADFVLFGYPKPENLLRD

SEQ ID NO: 4256 - protein, 820 aa, Homo sapiens
LIRTMESRVLLRTFCLIFGLGAVWGLGVDPSLQIDVLTELELGESTTGVRQVPGLHNGTKAFLFQDTPRSIKASTATAEQFFQKLRNKHEFTILVTLKQTHLNSGVILSIHHLDHRYLELESSGHRNEVRLHYRSGSHRPHTEVFPYILADDKWHKLSLAISASHLILHIDCNKIYERVVEKPSTDLPLGTTFWLGQRNNAHGYFKGIMQDVQLLVMPQGFIAQCPDLNRTCPTCNDFHGLVQKIMELQDILAKTSAKLSRAEQRMNRLDQCYCERTCTMKGTTYREFESWIDGCKNCTCLNGTIQCETLICPNPDCPLKSALAYVDGKCCKECKSICQFQGRTYFEGERNTVYSSSGVCVLYECKDQTMKLVESSGCPALDCPESHQITLSHSCCKVCKGYDFCSERHNCMENSICRNLNDRAVCSCRDGFRALREDNAYCEDIDECAEGRHYCRENTMCVNTPGSFMCICKTGYIRIDDYSCTEHDECITNQHNCDENALCFNTVGGHNCVCKPGYTGNGTTCKAFCKDGCRNGGACIAANVCACPQGFTGPSCETDIDECSDGFVQCDSRANCINLPGWYHCECRDGYHDNGMFSPSGESCEDIDECGTGRHSCANDTICFNLDGGYDCRCPHGKNCTGDCIHDGKVKHNGQIWVLENDRCSVCSCQNGFVMCRRMVCDCENPTVDLFCCPECDPRLSSQCLHQNGETLYNSGDTWVQNCQQCRCLQGEVDCWPLPCPDVECEFSILPENECCPRCVTDPCQADTIRNDITKTCLDEMNVVRFTGSSWIKHGTECTLCQCKNGHICCSVDPQCLQEL

SEQ ID NO: 4257 - protein, 192 aa, Homo sapiens
RRDNGSYFFWVARGRTKFSYKYSPLSVYVTALTHRPDILIPEFLKSGHPSNLTCSVPWVCEQGTPPIFSWMSAAPTSLGPRTLHSSVLTIIPRPQDHGTNLICQVTFPGAGVTTERTIQLSVSYPLMNPVIEASLEDGTGKSGTVEEVVVLAVGVVAVKILLLCLCLIILSFHKKKAVRAVEVEENVYAVMG

SEQ ID NO: 4258 - protein, 549 aa, Homo sapiens
LRGRGASRLPGPKRRGPRVMAKGEGAESGSAAGLLPTSILQSTERPAQVKKEPKKKKQQLSVCNKLCYALGGAPYQVTGCALGFFLQIYLLDVAQVGPFSASIILFVGRAWDAITDPLVGLCISKSPWTCLGRLMPWIIFSTPLAVIAYFLIWFVPDFPHGQTYWYLLFYCLFETMVTCFHVPYSALTMFISTEQTERDSATAYRMTVEVLGTVLGTAIQGQIVGQADTPCFQDLNSSTVASQSANHTHGTTSHRETQKAYLLAAGVIVCIYIICAVILILGVREQREPYEAQQSEPIAYFRGLRLVMSHGPYIKLITGFLFTSLAFMLVEGNFVLFCTYTLGFRNEFQNLLLAIMLSATLTIPIWQWFLTRFGKKTAVYVGISSAVPFLILVALMESNLIITYAVAVAAGISVAAAFLLPWSMLPDVIDDFHLKQPHFHGTEPIFFSFYVFFTKFASGVSLGISTLSLDFAGYQTRGCSQPERVKFTLNMLVTMAPIVLILLGLLLFKMYPIDEERRRQNKKALQALRDEASSSGCSETDSTELASIL

SEQ ID NO: 4259 - protein, 838 aa, Homo sapiens
IPSCSFDGRIAFYRFCNLTQVPQVLNTTERLLLSFNYIRTVTASSFPFLEQLQLLELGSQYTPLTIDKEAFRNLPNLRILDLGSSKIYFLHPDAFQGLFHLFELRLYFCGLSDAVLKDGYFRNLKALTRLDLSKNQIRSLYLHPSFGKLNSLKSIDFSSNQIFLVCEHELEPLQGKTLSFFSLAANSLYSRVSVDWGKCMNPFRNMVLEILDVSGNGWTVDITGNFSNAISKSQAFSLILAHHIMGAGFGFHNIKDPDQNTFAGLARSSVRHLDLSHGFVFSLNSRVFETLKDLKVLNLAYNKINKIADEAFYGLDNLQVLNLSYNLLGELYSSNFYGLPKVAYIDLQKNHIAIIQDQTFKFLEKLQTLDLRDNALTTIHFIPSIPDIFLSGNKLVTLPKINLTANLIHLSENRLENLDILYFLLRVPHLQILILNQNRFSSCSGDQTPSENPSLEQLFLGENMLQLAWETELCWDVFEGLSHLQVLYLNHNYLNSLPPGVFSHLTALRGLSLNSNRLTVLSHNDLPANLEILDISRNQLLAPNPDVFVSLSVLDITHNKFICECELSTFINWLNHTNVTIAGPPADIYCVYPDSFSGVSLFSLSTEGCDEEEVLKSLKFSLFIVCTVTLTLFLMTILTVTKFRGFCFICYKTAQRLVFKDHPQGTEPDMYKYDAYLCFSSKDFTWVQNALLKHLDTQYSDQNRFNLCFEERDFVPGENRIANIQDAIWNSRKIVCLVSRHFLRDGWCLEAFSYAQGRCLSDLNSALIMVVVGSLSQYQLMKHQSIRGFVQKQQYLRWPEDLQDVGWFLHKLSQQILKKEKEKKKDNNIPLQTVATIS

SEQ ID NO: 4260 - protein, 431 aa, Homo sapiens
IQKTTKNLSFNFIWNSTVFLAPWTRLTCWLFPLAALSRGALRLLTPSVKSCCSVAQAGVQWQDLSSLQSPSLRFKQFSCLSLPSRWDYRTFGSRASELLWMASALWTVLPSRMSLRSLKWSLLLLSLLSFFVMWYLSLPHYNVIERVNWMYFYEYEPIYRQDFHFTLREHSNCSHQNPFLVILVTSHPSDVKARQAIRVTWGEKKSWWGYEVLTFFLLGQEAEKEDKMLALSLEDEHLLYGDIIRQDFLDTYNNLTLKTIMAFRWVTEFCPNAKYVMKTDTDVFINTGNLVKYLLNLNHSEKFFTGYPLIDNYSYRGFYQKTHISYQEYPFKVFPPYCSGLGYIMSRDLVPRIYEMMGHVKPIKFEDVYVGICLNLLKVNIHIPEDTNLFFLYRIHLDVCQLRRVIAAHGFSSKEIITFWQVMLRNTTCHY

SEQ ID NO: 4261 - protein, 111 aa, Homo sapiens
KESQEDWGMERQSRVMSEKDEYQFQHQGAVELLVFNFLLILTILTIWLFKNHRFRFLHETGGAMVYDKPPKFAMSREQMSQSCSHTAHNASLLTDAGPLSCGESRASCLFL

SEQ ID NO: 4262 - protein, 653 aa, Homo sapiens
KESQEDWGMERQSRVMSEKDEYQFQHQGAVELLVFNFLLILTILTIWLFKNHRFRFLHETGGAMVYGLIMGLILRYATAPTDIESGTVYDCVKLTFSPSTLLVNITDQVYEYKYKREISQHNINPHQGNAILEKMTFDPEIFFNVLLPPIIFHAGYSLKKRHFFQNLGSILTYAFLGTAISCIVIGLIMYGFVKAMIHAGQLKNGDFHFTDCLFFGSLMSATDPVTVLAIFHELHVDPDLYTLLFGESVLNDAVAIVLTYSISIYSPKENPNAFDAAAFFQSVGNFLGIFAGSFAMGSAYAIITALLTKFTKLCEFPMLETGLFFLLSWSAFLSAEAAGLTGIVAVLFCGVTQAHYTYNNLSSDSKIRTKQLFEFMNFLAENVIFCYMGLALFTFQNHIFNALFILGAFLAIFVARACNIYPLSFLLNLGRKQKIPWNFQHMMMFSGLRGAIAFALAIRNTESQPKQMMFTTTLLLVFFTVWVFGGGTTPMLTWLQIRVGVDLDENLKEDPSSQHQEANNLDKNMTKAESARLFRMWYSFDHKYLKPILTHSGPPLTTTLPEWCGPISRLLTSPQAYGEQLKEDDVECIVNQDELAINYQEQASSPCSPPARLGLDQKASPQTPGKENIYEGDLGLGGYELKLEQTLGQSQLN

SEQ ID NO: 4263 - protein, 160 aa, Homo sapiens
TPSMHQEAQEETVMKLKGIDANEPTEGSILLKSSEKKLQETPTEANHVQRLRQMLACPPHGLLDRVITNGMLLAGFLIRNIPVINDNVQIKHKWSSSLRSIALSIILVRAGLGLDSKALKKLKGVCVRLSMGPCIVEACTSALLAHYLLGLPWQWGFILG

SEQ ID NO: 4264 - protein, 469 aa, Homo sapiens
LSWEATSSQFRPEDTDYQQALLLLGAAALACLALDLLFLLFYSFWLCCRRRKSEEHLDADCCCTAWCVIIATLVCSAGIAVGFYGNGETSDGIHRATYSLRHANRTVAGVQDRVWDTAVGLNHTAEPSLQTLERQLAGRPEPLRAVQRLQGLLETLLGYTAAIPFWRNTAVSLEVLAEQVDLYDWYRVCLLGVLALVISWGALGLELAVSVGSSDFCVDPDAYVTKMVEEYSVLSGDILQYYLACSPRAANPFQQKLSGSHKALVEMQDVVAELLRTVPWEQPATKDPLLRVQEVLNGTEVNLQHLTALVDCRSLHLDYVQALTGFCYDGVEGLIYLALFSFVTALMFSSIVCSVPHTWQQKRGPDEDGEEEAAPGPRQAHDSLYRVHMPSLYSCGSSYGSETSIPAAAHTVSNAPVTEYMSQNANFQNPRCENTPLIGRESPPPSYTSSMRAKYLATSQPRPDSSGSH

SEQ ID NO: 4265 - protein, 154 aa, Homo sapiens
LALCLLWAALRTTLFSFYFRDTPRANRLGPLPFWLLYCCPVCLQFFTLTLMNLYFAQVVFKAKVKRRPEMSRGLLAVRGAFVGASLLFLLVNVLCAVLSHRRRAQPWALLLVRVLVSDSLFVICALSLAACLCLVARRAPSTSIYLEAKVGLQH

SEQ ID NO: 4266 - protein, 591 aa, Homo sapiens
RPGSPPPGPRGGPSQAPFEPRRRPGLGRTMRLRLRLLALLLLLLAPPARAPKPSAQDVSLGVDWLTRYGYLPPPHPAQAQLQSPEKLRDAIKVMQRFAGLPETGRMDPGTVATMRKPRCSLPDVLGVAGLVRRRRRYALSGSVWKKRTLTWRVRSFPQSSQLSQETVRVLMSYALMAWGMESGLTFHEVDSPQGQEPDILIDFARAFHQDSYPFDGLGGTLAHAFFPGEHPISGDTHFDDEETWTFGSKDGEGTDLFAVAVHEFGHALGLGHSSAPNSIMRPFYQGPVGDPDKYRLSQDDRDGLQQLYGKAPQTPYDKPTRKPLAPPPQPPASPTHSPSFPIPDRCEGNFDAIANIRGETFFFKGPWFWRLQPSGQLVSPRPARLHRFWEGLPAQVRVVQAAYARHRDGRILLFSGPQFWVFQDRQLEGGARPLTELGLPPGEEVDAVFSWPQNGKTYLVRGRQYWRYDEAAARPDPGYPRDLSLWEGAPPSPDDVTVSNAGDTYFFKGAHYWRFPKNSIKTEPDAPQPMGPNWLDCPAPSSGPRAPRPPKATPVSETCDCQCELNQAAGRWPAPIPLLLLPLLVGGVASR

SEQ ID NO: 4267 - protein, 198 aa, Homo sapiens
LLYWKDTRTSGVVFTGLMVSLLCLLHFSIVSVAAHLALLLLCGTISLRVYRKVLQAVHRGDGANPFQAYLDVDLTLTREQTERLSHQITSRVVSAATQLRHFFLVEDLVDSLKLALLFYILTFVGAIFNGLTLLILGVIGLFTIPLLYRQHQAQIDQYVGLVTNQLSHIKAKIRAKIPGTGALASAAAAVSGSKAKAE

SEQ ID NO: 4268 - protein, 87 aa, Homo sapiens
LSPGPRLHRMGLPVSWAPPALWVLGCCALLLSLWALCTACRRPEDAVAPRKRARRQRARLQGSATAAEAQVGHQTARAAPGPAQQQG

SEQ ID NO: 4269 - protein, 630 aa, Homo sapiens
TRAAENRRDRTWAPRASPASQVGAGRQATSRPAPGMRVLLAALGLLFLGALRAFPQDRPFEDTCHGNPSHYYDKAVRRCCYRCPMGLFPTQQCPQRPTDCRKQCEPDYYLDEADRCTACVTCSRDDLVEKTPCAWNSSRVCECRPGMFCSTSAVNSCARCFFHSVCPAGMIVKFPGTAQKNTVCEPASPGVSPACASPENCKEPSSGTIPQAKPTPVSPATSSASTMPVRGGTRLAQEAASKLTRAPDSPSSVGRPSSDPGLSPTQPCPEGSGDCRKQCEPDYYLDEAGRCTACVSCSRDDLVEKTPCAWNSSRTCECRPGMICATSATNSCARCVPYPICAAETVTKPQDMAEKDTTFEAPPLGTQPDCNPTPENGEAPASTSPTQSLLVDSQASKTLPIPTSAPVALSSTGKPVLDAGPVLFWVILVLVVVVGSSAFLLCHRRACRKRIRQKLHLCYPVQTSQPKLELVDSRPRRSSTQLRSGASVTEPVAEERGLMSQPLMETCHSVGAAYLESLPLQDASPAGGPSSPRDLPEPRVSTEHTNNKIEKIYIMKADTVIVGTVKAELPEGRGLAGPAEPELEEELEADHTPHYPEQETEPPLGSCSDVMLSVEEEGKEDPLPTAASGK

SEQ ID NO: 4270 - protein, 1016 aa, Homo sapiens
LGLLLLLARSGTRALVCLPCDESKCEEPRNCPGSIVQGVCGCCYTCASQRNESCGGTFGIYGTCDRGLRCVIRPPLNGDSLTEYEAGVCEDENWTDDQLLGFKPCNENLIAGCNIINGKCECNTIRTCSNPFEFPSQDMCLSALKRIEEEKPDCSKARCEVQFSPRCPEDSVLIEGYAPPGECCPLPSRCVCNPAGCLRKVCQPGNLNILVSKASGKPGECCDLYECKPVFGVDCRTVECPPVQQTACPPDSYETQVRLTADGCCTLPTRCECLSGLCGFPVCEVGSTPRIVSRGDGTPGKCCDVFECVNDTKPACVFNNVEYYDGDMFRMDNCRFCRCQGGVAICFTAQCGEINCERYYVPEGECCPVCEDPVYPFNNPAGCYANGLILAHGDRWREDDCTFCQCVNGERHCVATVCGQTCTNPVKVPGECCPVCEEPTIITVDPPACGELSNCTLTGKDCINGFKRDHNGCRTCQCINTEELCSERKQGCTLNCPFGFLTDAQNCEICECRPRPKKCRPIICDKYCPLGLLKNKHGCDICRCKKCPELSCSKICPLGFQQDSHGCLICKCREASASAGPPILSGTCLTVDGHHHKNEESWHDGCRECYCLNGREMCALITCPVPACGNPTIHPGQCCPSCADDFVVQKPELSTPSICHAPGGEYFVEGETWNIDSCTQCTCHSGRVLCETEVCPPLLCQNPSRTQDSCCPQCTDQPFRPSLSRNNSVPNYCKNDEGDIFLAAESWKPDVCTSCICIDSVISCFSESCPSVSCERPVLRKGQCCPYCIEDTIPKKVVCHFSGKAYADEERWDLDSCTHCYCLQGQTLCSTVSCPPLPCVEPINVEGSCCPMCPEMYVPEPTNIPIEKTNHRGEVDLEVPLWPTPSENDIVHLPRDMGHLQVDYRDNRLHPSEDSSLDSIASVVVPIIICLSIIIAFLFINQKKQWIPLLCWYRTPTKPSSLNNQLVSVDCKKGTRVQVDSSQRMLRIAEPDARFSGFYSMQKQNHLQADNFYQTV

SEQ ID NO: 4271 - protein, 90 aa, Homo sapiens
MLLAGFLIRNIPVINDNVQIKHKWSSSLRSIALSIILVRAGLGLDSKALKKLKGVCVRLSMGPCIVEACTSALLAHYLLGLPWQWGFILG

SEQ ID NO: 4272 - protein, 293 aa, Homo sapiens
IFGSKAKAAPKDCFIEVNSKGDRFGNCGFSGNEYKKCATGNALCGKLQCENVQEIPVFGIVPAIIQTPSRGTKCWGVDFQLGSDVPDPGMVNEGTKCGAGKICRNFQCVDASVLNYDCDVQKKCHGHGVCNSNKNCHCENGWAPPNCETKGYGGSVDSGPTYNEMNTALRDGLLVFFFLIVPLIVCAIFIFIKRDQLWRSYFRKKRSQTYESDGKNQANPSRQPGSVPRHVSPVTPPREVPIYANRFAVPTYAAKQPQQFPSRPPPPQPKVSSQGNLIPARPAPAPPLYSSLT

SEQ ID NO: 4273 - protein, 620 aa, Homo sapiens
IMMNFSNIMNYMKLLGQSDLPRIKTEIEALKNLRHQHICQLYHVLETANKIFMVLEYCPGGELFDYIISQDRLSEEETRVVFRQIVSAVAYVHSQGYAHRDLKPENLLFDEYHKLKLIDFGLCAKPKGNKDYHLQTCCGSLAYAAPELIQGKSYLGSEADVWSMGILLYVLMCGFLPFDDDNVMALYKKIMRGKYDVPKWLSPSSILLLQQMLQVDPKKRISMKNLLNHPWIMQDYNYPVEWQSKNPFIHLDDDCVTELSVHHRNNRQTMEDLISLWQYDHLTATYLLLLAKKARGKPVRLRLSSFSCGQASATPFTDIKSNNWSLEDVTASDKNYVAGLIDYDWCEDDLSTGAATPRTSQFTKYWTESNGVESKSLTPALCRTPANKLKNKENVYTPKSAVKNEEYFMFPEPKTPVNKNQHKREILTTPNRYTTPSKARNQCLKETPIKIPVNSTGTDKLMTGVISPERRCRSVELDLNQAHMEETPKRKGAKVFGSLERGLDKVITVLTRSKRKGSARDGPRRLKLHYNVTTTRLVNPDQLLNEIMSILPKKHVDFVQKGYTLKCQTQSDFGKVTMQFELEVCQLQKPDVVGIRRQRLKGDAWVYKRLVEDILSSCKV

SEQ ID NO: 4274 - protein, 547 aa, Homo sapiens
ISVVMSRESDVEAQQSHGSSACSQPHGSVTQSQGSSSQSQGISSSSTSTMPNSSQSSHSSSGTLSSLETVSTQELYSIPEDQEPEDQEPEEPTPAPWARLWALQDGFANLECVNDNYWFGRDKSCEYCFDEPLLKRTDKYRTYSKKHFRIFREVGPKNSYIAYIEDHSGNGTFVNTELVGKGKRRPLNNNSEIALSLSRNKVFVFFDLTVDDQSVYPKALRDEYIMSKTLGSGACGEVKLAFERKTCKKVAIKIISKRKFAIGSAREADPALNVETEIEILKKLNHPCIIKIKNFFDAEDYYIVLELMEGGELFDKVVGNKRLKEATCKLYFYQMLLAVQYLHENGIIHRDLKPENVLLSSQEEDCLIKITDFGHSKILGETSLMRTLCGTPTYLAPEVLVSVGTAGYNRAVDCWSLGVILFICLSGYPPFSEHRTQVSLKDQITSGKYNFIPEVWAEVSEKALDLVKKLLVVDPKARFTTEEALRHPWLQDEDMKRKFQDLLSEENESTALPQVLAQPSTSRKRPREGEAEGAETTKRPAVCAAVL

SEQ ID NO: 4275 - protein, 126 aa, Homo sapiens
VFGLSNKFDTEFPSVLTGKVAPEEFKTSIGRVNACLKKALPVNVKWLLCGCLCCCCTLGCSLWPVICLNKRTRRSIQKLIEWENNRLYHKLALHWKLTKRKCETSNMMEYVILIEFLPKYPIFRPD

SEQ ID NO: 4276 - protein, 177 aa, Homo sapiens
VAPNTQLFSKLVGSAFTIAVVGFAIAISLGKIFALRHGYRVDSNQELVALGLSNLIGGIFQCFPVSCSMSRSLVQESTGGNSQVAGAISSLFILLIIVKLGELFHDLPKAVLAAIIIVNLKGMLRQLSDMRSLWKANRADLLIWLVTFTATILLNLDLGLVVAVIFSLLLVVVRTQM

SEQ ID NO: 4277 - protein, 297 aa, Homo sapiens
IHWSLPRALVPATGTRASGSQKRQRPPKGQEALWSRPHSRHSAERAGGSHSDPGRLSAPLGLGLPSGRGRLTAMPGRAPLRTVPGALGAWLLGGLWAWTLCGLCSLGAVGAPRPCQAPQQWEGRQVMYQQSSGRNSRALLSYDGLNQRVRVLDERKALIPCKRLFEYILLYKDGVMFQIDQATKQCSKMTLTQPWDPLDIPQNSTFEDQYSIGGPQEQITVQEWSDRKSARSYETWIGIYTVKDCYPVQETFTINYSVILSTRFFDIQLGIKDPSVFTPPSTCQMAQLEKMSEDCSW

SEQ ID NO: 4278 - protein, 160 aa, Homo sapiens
LAFIVLFLLWPFAWLQVAGLSEEQLQEPITGWRKTVCHNGVLGLSRLLFFLLGFLRIRVRGQRASRLQAPVLVAAPHSTFFDPIVLLPCDLPKVVSRAENLSVPVIGALLRFNQAILVSRHDPASRRRVVEEVRRRATSGGKWPQVGKGLKTIFSLSMCS

SEQ ID NO: 4279 - protein, 164 aa, Homo sapiens
VTALTHRPDILIPEFLKSGHPSNLTCSVPWVCEQGTPPIFSWMSAAPTSLGPRTLHSSVLTIIPRPQDHGTNLICQVTFPGAGVTTERTIQLSVSYPLMNPVIEASLEDGTGKSGTVEEVVVLAVGVVAVKILLLCLCLIILSFHKKKAVRAVEVEENVYAVMG

SEQ ID NO: 4280 - protein, 459 aa, Homo sapiens
MTAEEMKATESGAQSAPLPMEGVDISPKQDEGVLKVIKREGTGTEMPMIGDRVFVHYTGWLLDGTKFDSSLDRKDKFSFDLGKGEVIKAWDIAIATMKVGEVCHITCKPEYAYGSAGSPPKIPPNATLVFEVELFEFKGEDLTEEEDGGIIRRIQTRGEGYAKPNEGAIVEVALEGYYKDKLFDQRELRFEIGEGENLDLPYGLERAIQRMEKGEHSIVYLKPSYAFGSVGKEKFQIPPNAELKYELHLKSFEKAKESWEMNSEEKLEQSTIVKERGTVYFKEGKYKQALLQYKKIVSWLEYESSFSNEEAQKAQALRLASHLNLAMCHLKLQAFSAAIESCNKALELDSNNEKGLFRRGEAHLAVNDFELARADFQKVLQLYPNNKAAKTQLAVCQQRIRRQLAREKKLYANMFERLAEEENKAKAEASSGDHPTDTEMKEEQKSNTAGSQSQVETEA

SEQ ID NO: 4281 - protein, 748 aa, Homo sapiens
MVARSTDSLDGPGEGSVQPLPTAGGPSVKGKPGKRLSAPRGPFPRLADCAHFHYENVDFGHIQLLLSPDREGPSLSGENELVFGVQVTCQGRSWPVLRSYDDFRSLDAHLHRCIFDRRFSCLPELPPPPEGARAAQMLVPLLLQYLETLSGLVDSNLNCGPVLTWMELDNHGRRLLLSEEASLNIPAVAAAHVIKRYTAQAPDELSFEVGDIVSVIDMPPTEDRSWWRGKRGFQVGFFPSECVELFTERPGPGLKADADGPPCGIPAPQGISSLTSAVPRPRGKLAGLLRTFMRSRPSRQRLRQRGILRQRVFGCDLGEHLSNSGQDVPQVLRCCSEFIEAHGVVDGIYRLSGVSSNIQRLRHEFDSERIPELSGPAFLQDIHSVSSLCKLYFRELPNPLLTYQLYGKFSEAMSVPGEEERLVRVHDVIQQLPPPHYRTLEYLLRHLARMARHSANTSMHARNLAIVWAPNLLRSMELESVGMGGAAAFREVRVQSVVVEFLLTHVDVLFSDTFTSAGLDPAGRCLLPRPKSLAGSCPSTRLLTLEEAQARTQGRLGTPTEPTTPKAPASPAERRKGERGEKQRKPGGSSWKTFFALGRGPSVPRKKPLPWLGGTRAPPQPSGSRPDTVTLRSAKSEESLSSQASGAGLQRLHRLRRPHSSSDAFPVGPAPAGSCESLSSSSSSESSSSESSSSSSESSAAGLGALSGSPSHRTSAWLDDGDELDFSPPRYPTPSWSLHSEGQTRSYC

SEQ ID NO: 4282 - protein, 264 aa, Homo sapiens
MENYGIEWHSVRDSEGQKLLIGVGPEGISICKDDFSPINRIAYPVVQMATQSGKNVYLTVTKESGNSIVLLFKMISTRAASGLYRAITETHAFYRCDTVTSAVMMQYSRDLKGHLASLFLNENINLGKKYVFDIKRTSKEVYDHARRALYNAGVVDLVSRNNQSPSHSPLKSSESSMNCSSCEGLSCQQTRVLQEKLRKLKEAMLCMVCCEEEINSTFCPCGHTVCCESCAAQLQSCPVCRSRVEHVQHVYLPTHTSLLNLTVI

SEQ ID NO: 4283 - protein, 119 aa, Homo sapiens [sequence omitted]

SEQ ID NO: 4284 - protein, 177 aa, Homo sapiens
MVLLSTLGIVFQGEGPPISSCDTGTMANCERTFIAIKPDGVQRGLVGEIIKRFEQKGFRLVGLKFMQASEDLLKEHYVDLKDRPFFAGLVKYMHSGPVVAMVWEGLNVVKTGRVMLGETNPADSKPGTIRGDFCIQVGRNIIHGSDSVESAEKEIGLWFHPEELVDYTSCAQNWIYE

SEQ ID NO: 4285 - protein, 325 aa, Homo sapiens
MAHFVQGTSRMIAAESSTEHKECAEPSTRKNLMNSLEQKIRCLEKQRKELLEVNQQWDQQFRSMKELYERKVAELKTKLDAAERFLSTREKDPHQRQRKDDRQREDDRQRDLTRDRLQREEKEKERLNEELHELKEENKLLKGKNTLANKEKEHYECEIKRLNKALQDALNIKCSFSEDCLRKSRVEFCHEEMRTEMEVLKQQVQIYEEDFKKERSDRERLNQEKEELQQINETSQSQLNRLNSQIKACQMEKEKLEKQLKQMYCPPCNCGLVFHLQDPWVPTGPGAVQKQREHPPDYQWYALDQLPPDVQHKANGLSSVKKVHP

SEQ ID NO: 4286 - protein, 863 aa, Homo sapiens
MARRSSFQSCQIISLFTFAVGVNICLGFTAHRIKRAEGWEEGPPTVLSDSPWTNISGSCKGRCFELQEAGPPDCRCDNLCKSYTSCCHDFDELCLKTARGWECTKDRCGEVRNEENACHCSEDCLARGDCCTNYQVVCKGESHWVDDDCEEIKAAECPAGFVRPPLIIFSVDGFRASYMKKGSKVMPNIEKLRSCGTHSPYMRPVYPTKTFPNLYTLATGLYPESHGIVGNSMYDPVFDATFHLRGREKFNHRWWGGQPLWITATKQGVKAGTFFWSVVIPHERRILTILQWLTLPDHERPSVYAFYSEQPDFSGHKYGPFGPEMTNPLREIDKIVGQLMDGLKQLKLHRCVNVIFVGDHGMEDVTCDRTEFLSNYLTNVDDITLVPGTLGRIRSKFSNNAKYDPKAIIANLTCKKPDQHFKPYLKQHLPKRLHYANNRRIEDIHLLVERRWHVARKPLDVYKKPSGKCFFQGDHGFDNKVNSMQTVFVGYGSTFKYKTKVPPFENIELYNVMCDLLGLKPAPNNGTHGSLNHLLRTNTFRPTMPEEVTRPNYPGIMYLQSDFDLGCTCDDKVEPKNKLDELNKRLHTKGSTEERHLLYGRPAVLYRTRYDILYHTDFESGYSEIFLMPLWTSYTVSKQAEVSSVPDHLTSCVRPDVRVSPSFSQNCLAYKNDKQMSYGFLFPPYLSSSPEAKYDAFLVTNMVPMYPAFKRVWNYFQRVLVKKYASERNGVNVISGPIFDYDYDGLHDTEDKIKQYVEGSSIPVPTHYYSIITSCLDFTQPADKCDGPLSVSSFILPHRPDNEESCNSSEDESKWVEELMKMHTARVRDIEHLTSLDFFRKTSRSYPEILTLKTYLHTYESEI

SEQ ID NO: 4287 - protein, 189 aa, Homo sapiens
PQGVDIRHNKDRKVRRKEPKSQDIYLRLLVKLYRFLARRTNSTFNQVVLKRLFMSRTNRPPLSLSRMIRKMKLPGRENKTAVVVGTITDDVRVQEVPKLKVCALRVTSRARSRILRAGGKILTFDQLALDSPKGCGTVLLSGPRKGREVYRHFGKAPGTPHSHTKPYVRSKGRKFERARGRRASRGYKN

SEQ ID NO: 4288 - protein, 221 aa, Homo sapiens
MAAARPSLGRVLPGSSVLFLCDMQEKFRHNIAYFPQIVSVAARMLKVARLLEVPVMLTEQYPQGLGPTVPELGTEGLRPLAKTCFSMVPALQQELDSRPQLRSVLLCGIEAQACILDPRSYPGLALTSLYPQNTTLDLLDRGLQVHVVVDACSSRSQVDRLVALARMRQSGAFLSTSEGLILQLVGDAVHPQFKEIQKLIKEPAPDSGLLGLFQGQNSLLH

SEQ ID NO: 4289 - protein, 259 aa, Homo sapiens
MERKSPSGKKFRSKPQLARYLGGSMDLSTFDFRTGKMLMSKMNKSRQRVRYDSSNQVKGKPDLNTALPVRQTASIFKQPVTKITNHPSNKVKSDPQKAVDQPRQLFWEKKLSGLNAFDIAEELVKTMDLPKGLQGVGPGCTDETLLSAIASALHTSTMPITGQLSAAVEKNPGVWLNTTQPLCKAFMVTDEDIRKQEELVQQVRKRLEEALMADMLAHVEELARDGEAPLDKACAEDDDEEDEEEEEEEPDPDPEMEHV

SEQ ID NO: 4290 - protein, 665 aa, Homo sapiens
MAAGGSTQQRRREMAAASAAAISGAGRCRLSKIGATRRPPPARVRVAVRLRPFVDGTAGASDPPCVRGMDSCSLEIANWRNHQETLKYQFDAFYGERSTQQDIYAGSVQPILRHLLEGQNASVLAYGPTGAGKTHTMLGSPEQPGVIPRALMDLLQLTREEGAEGRPWALSVTMSYLEIYQEKVLDLLDPASGDLVIREDCRGNILIPGLSQKPISSFADFERHFLPASRNRTVGATRLNQRSSRSHAVLLVKVDQRERLAPFRQREGKLYLIDLAGSEDNRRTGNKGLRLKESGAINTSLFVLGKVVDALNQGLPRVPYRDSKLTRLLQDSLGGSAHSILIANIAPERRFYLDTVSALNFAARSKEVINRPFTNESLQPHALGPVKLSQKELLGPPEAKRARGPEEEEIGSPEPMAAPASASQKLSPLQKLSSMDPAMLERLLSLDRLLASQGSQGAPLLSTPKRERMVLMKTVEEKDLEIERLKTKQKELEAKMLAQKAEEKENHCPTMLRPLSHRTVTGAKPLKKAVVMPLQLIQEQAASPNAEIHILKNKGRKRKLESLDALEPEEKAEDCWELQISPELLAHGRQKILDLLNEGSARDLRSLQRIGPKKAQLIVGWRELHGPFSQVEDLERVEGITGKQMESFLKANILGLAAGQRCGAS

SEQ ID NO: 4291 - protein, 769 aa, Homo sapiens
MGCNMCVVQKPEEQYKVMLQVNGKELSKLSQEQTLQALRSSKEPLVIQVLRRSPRLRGDSSCHDLQLVDSGTQTDITFEHIMALGKLRPPTPPMVILEPPPISHEYYDPAEFMEGGPQEADRLDELEYEEVELYKSSHRDKLGLMVCYRTDDEEDLGIYVGEVNPNSIAAKDGRIREGDRIIQINGVDVQNREEAVAILSQEENTNISLLVARPESQLAKRWKDSDRDDFLDDFGSENEGELRARKLKSPPAQQPGNEEEKGAPDAGPGLSNSQELDSGVGRTDESTRNEESSEHDLLGDEPPSSTNTPGSLRKFGLQGDALQSRDFHFSMDSLLAEGAGLGGGDVPGLTDEEYERYRELLEIKCHLENGNQLGLLFPRASGGNSALDVNRNESLGHEMAMLEEELRHLEFKCRNILRAQKMQQLRERCMKAWLLEEESLYDLAASEPKKHELSDISELPEKSDKDSTSAYNTGESCRSTPLLVEPLPESPLRRAMAGNSNLNRTPPGPAVATPAKAAPPPGSPAKFRSLSRDPEAGRRQHAEERGRRNPKTGLTLERVGPESSPYLSRRHRGQGQEGEHYHSCVQLAPTRGLEELGHGPLSLAGGPRVGGVAAAATEAPRMEWKVKVRSDGTRYVAKRPVRDRLLKARALKIREERSGMTTDDDAVSEMKMGRYWSKEERKQHLIRAREQRKRREFMMQSRLECLREQQNGDSKPELNIIALSHRKTMKKRNKKILDNWITIQEMLAHGARSADGKRVYNPLLSVTTV

SEQ ID NO: 4292 - protein, 432 aa, Homo sapiens
MDEAVGDLKQALPCVAESPTVHVEVHQRGSSTAKKEDINLSVRKLLNRHNIVFGDYTWTEFDEPFLTRNVQSVSIIDTELKVKDSQPIDLSACTVALHIFQLNEDGPSSENLEEETENIIAANHWVLPAAEFHGLWDSLVYDVEVKSHLLDYVMTTLLFSDKNVNSNLITWNRVVLLHGPPGTGKTSLCKALAQKLTIRLSSRYRYGQLIEINSHSLFSKWFSESGKLVTKMFQKIQDLIDDKDALVFVLIDEVESLTAARNACRAGTEPSDAIRVVNAVLTQIDQIKRHSNVVILTTSNITEKIDVAFVDRADIKQYIGPPSAAAIFKIYLSCLEELMKCQIIYPRQQLLTLRELEMIGFIENNVSKLSLLLNDISRKSEGLSGRVLRKLPFLAHALYVQAPTVTIEGFLQALSLAVDKQFEERKKLAAYI

SEQ ID NO: 4293 - protein, 561 aa, Homo sapiens
MCGIWALFGSDDCLSVQCLSAMKIAHRGPDAFRFENVNGYTNCCFGFHRLAVVDPLFGMQPIRVKKYPYLWLCYNGEIYNHKKMQQHFEFEYQTKVDGEIILHLYDKGGIEQTICMLDGVFAFVLLDTANKKVFLGRDTYGVRPLFKAMTEDGFLAVCSEAKGLVTLKHSATPFLKVEPFLPGHYEVLDLKPNGKVASVEMVKYHHCRDVPLHALYDNVEKLFPGFEIETVKNNLRILFNNAVKKRLMTDRRIGCLLSGGLDSSLVAATLLKQLKEAQVQYPLQTFAIGMEDSPDLLAARKVADHIGSEHYEVLFNSEEGIQALDEVIFSLETYDITTVRASVGMYLISKYIRKNTDSVVIFSGEGSDELTQGYIYFHKAPSPEKAEEESERLLRELYLFDVLRADRTTAAHGLELRVPFLDHRFSSYYLSLPPEMRIPKNGIEKHLLRETFEDSNLIPKEILWRPKEAFSDGITSVKNSWFKILQEYVEHQVDDAMMANAAQKFPFNTPKTKEGYYYRQVFERHYPGRADWLSHYWMPKWINATDPSARTLTHYKSAVKA

SEQ ID NO: 4294 - protein, 306 aa, Homo sapiens
MSTWKARLTKRLKSPSRSMHPFPCSALLACFGNTRESASFNQSGVADTHSTVRVQPVAKAGRQPRHPSAEGAPEKRQDSSTHAERNGSANRNSSHRTAAQPAETPEDVPGSLDDGADCEAVVFHASIPRPSIIDTPKEEEFREEPKCLELEQKMTSDSPPEDIDHKDSYLITRSIMAEPDYIEDDNPELIRPQKLINPVKTSRNHQDLHRELLMNQKRGLAPQNKPELQKVMEKRKRDQVIKQKEEEAQKKKSDLEIELLKRQQKLEQLELEKQKLQEEQENAPEFVKVKGNLRRTGQEVAQAQES

SEQ ID NO: 4295 - protein, 709 aa, Homo sapiens
MSFPKAPLKRFNDPSGCAPSPGAYDVKTLEVLKGPVSFQKSQRFKQQKESKQNLNVDKDTTLPASARKVKSSESKIRVLLQERGAQDRRIQDLETELEKMEARLNAALREKTSLSANNATLEKQLIELTRTNELLKSKFSENGNQKNLRILSLELMKLRNKRETKMRGMMAKQEGMEMKLQVTQRSLEESQGKIAQLEGKLVSIEKEKIDEKSETEKLLEYIEEISCASDQVEKYKLDIAQLEENLKEKNDEILSLKQSLEENIVILSKQVEDLNVKCQLLEKEKEDHVNRNREHNENLNAEMQNLKQKFILEQQEREKLQQKELQIDSLLQQEKELSSSLHQKLCSFQEEMVKEKNLFEEELKQTLDELDKLQQKEEQAERLVKQLEEEAKSRAEELKLLEEKLKGKEAELEKSSAAHTQATLLLQEKYDSMVQSLEDVTAQFESYKALTASEIEDLKLENSSLQEKAAKAGKNAEDVQHQILATESSNQEYVRMLLDLQTKSALKETEIKEITVSFLQKITDLQNQLKQQEEDFRKQLEDEEGRKAEKENTTAELTEEINKWRLLYEELYNKTKPFQLQLDAFEVEKQALLNEHGAAQEQLNKIRDSYAKLLGHQNLKQKIKHVVKLKDENSQLKSEVSKLRCQLAKKKQSETKLQEELNKVLGIKHFDPSKAFHHESKENFALKTPLKEGNTNCYRAPMECQESWK

SEQ ID NO: 4296 - protein, 899 aa, Homo sapiens
MESCYNPGLDGIIEYDDFKLNSSIVEPKEPAPETADGPYLVIVEQPKQRGFRFRYGCEGPSHGGLPGASSEKGRKTYPTVKICNYEGPAKIEVDLVTHSDPPRAHAHSLVGKQCSELGICAVSVGPKDMTAQFNNLGVLHVTKKNMMGTMIQKLQRQRLRSRPQGLTEAEQRELEQEAKELKKVMDLSIVRLRFSAFLRASDGSFSLPLKPVISQPIHDSKSPGASNLKISRMDKTAGSVRGGDEVYLLCDKVQKDDIEVRFYEDDENGWQAFGDFSPTDVHKQYAIVFRTPPYHKMKIERPVTVFLQLKRKRGGDVSDSKQFTYYPLVEDKEEVQRKRRKALPTFSQPFGGGSHMGGGSGGAAGGYGGAGGGGSLGFFPSSLAYSPYQSGAGPMGCYPGGGGGAQMAATVPSRDSGEEAAEPSAPSRTPQCEPQAPEMLQRAREYNARLFGLAQRSARALLDYGVTADARALLAGQRHLLTAQDENGDTPLHLAIIHGQTSVIEQIVYVIHHAQDLGVVNLTNHLHQTPLHLAVITGQTSVVSFLLRVGADPALLDRHGDSAMHLALRAGAGAPELLRALLQSGAPAVPQLLHMPDFEGLYPVHLAVRARSPECLDLLVDSGAEVEATERQGGRTALHLATEMEELGLVTHLVTKLRANVNARTFAGNTPLHLAAGLGYPTLTRLLLKAGADIHAENEEPLCPLPSPPTSDSDSDSEGPEKDTRSSFRGHTPLDLTCSTKVKTLLLNAAQNTMEPPLTPPSPAGPGLSLGDTALQNLEQLLDGPEAQGSWAELAERLGLRSLVDTYRQTTSPSGSLLRSYELAGGDLAGLLEALSDMGLEEGVRLLRGPETRDKLPSTEVKEDSAYGSQSVEQEAEKLGPPPEPPGGLCHGHPQPQVH

SEQ ID NO: 4297 - protein, 204 aa, Homo sapiens [sequence omitted]

SEQ ID NO: 4298 - protein, 224 aa, Homo sapiens
MPGRAPLRTVPGALGAWLLGGLWAWTLCGLCSLGAVGAPRPCQAPQQWEGRQVMYQQSSGRNSRALLSYDGLNQRVRVLDERKALIPCKRLFEYILLYKDGVMFQIDQATKQCSKMTLTQPWDPLDIPQNSTFEDQYSIGGPQEQITVQEWSDRKSARSYETWIGIYTVKDCYPVQETFTINYSVILSTRFFDIQLGIKDPSVFTPPSTCQMAQLEKMSEDCSW

SEQ ID NO: 4299 - protein, 674 aa, Homo sapiens
MAPGQAPHQATPWRDAHPFFLLSPVMGLLSRAWSRLRGLGPLEPWLVEAVKGAALVEAGLEGEARTPLAIPHTPWGRRPEEEAEDSGGPGEDRETLGLKTSSSLPEAWGLLDDDDGMYGEREATSVPRGQGSQFADGQRAPLSPSLLIRTLQGSDKNPGEEKAEEEGVAEEEGVNKFSYPPSHRECCPAVEEEDDEEAVKKEAHRTSTSALSPGSKPSTWVSCPGEEENQATEDKRTERSKGARKTSVSPRSSGSDPRSWEYRSGEASEEKEEKAHKETGKGEAAPGPQSSAPAQRPQLKSWWCQPSDEEEGEVKALGAAEKDGEAECPPCIPPPSAFLKAWVYWPGEDTEEEEDEEEDEDSDSGSDEEEGEAEASSSTPATGVFLKSWVYQPGEDTEEEEDEDSDTGSAEDEREAETSASTPPASAFLKAWVYRPGEDTEEEEDEDVDSEDKEDDSEAALGEAESDPHPSHPDQRAHFRGWGYRPGKETEEEEAAEDWGEAEPCPFRVAIYVPGEKPPPPWAPPRLPLRLQRRLKRPETPTHDPDPETPLKARKVRFSEKVTVHFLAVWAGPAQAARQGPWEQLARDRSRFARRITQAQEELSPCLTPAARARAWARLRNPPLAPIPALTQTLPSSSVPSSPVQTTPLSQAVATPSRSSAAAAAALDLSGRRG

SEQ ID NO: 4300 - protein, 476 aa, Homo sapiens
MSGPTWLPPKQPEPARAPQGRAIPRGTPGPPPAHGAALQPHPRVNFCPLPSEQCYQAPGGPEDRGPAWVGSHGVLQHTQGLPADRGGLRPGSLDAEIDLLSSTLAELNGGRGHASRRPDRQAYEPPPPPAYRTGSLKPNPASPLPASPYGGPTPASYTTASTPAGPAFPVQVKVAQPVRGCGPPRRGASQASGPLPGPHFPLPGRGEVWGPGYRSQREPGPGAKEEAAGVSGPAGRGRGGEHGPQVPLSQPPEDELDRLTKKLVHDMNHPPSGEYFGQCGGCGEDVVGDGAGVVALDRVFHVGCFVCSTCRAQLRGQHFYAVERRAYCEGCYVATLEKCATCSQPILDRILRAMGKAYHPGCFTCVVCHRGLDGIPFTVDATSQIHCIEDFHRKFAPRCSVCGGAIMPEPGQEETVRIVALDRSFHIGCYKCEECGLLLSSEGECQGCYPLDGHILCKACSAWRIQELSATVTTDC

SEQ ID NO: 4301 - protein, 248 aa, Homo sapiens
ELGRQFRDWCLRTYGDSAKTKTVTRSKYQRIAEVLQGGGGTGAGSGPAAGEKGKFQFWVRSKGFRLGSGREPKMGQVVYVPVKTGSGADGLSEPEGISLKRVAVVEDFFDIIYSMHVESSAEPGKAPKHAGQKKTYRAIAETYAFLPREAVTRFLMSCTECQKRMHFNSNGLEPKENEPPSPLVSGIIDYNMPLTSTYLKQMKLRVMNSQEQCLPSGAEDIMSGGPTLEAAEFDDLIGKCLPDRPIAE

SEQ ID NO: 4302 - protein, 288 aa, Homo sapiens [sequence omitted]

SEQ ID NO: 4303 - protein, 234 aa, Homo sapiens
MSETSFNLISEKCDILSILRDHPENRIYRRKIEELSKRFTAIRKTKGDGNCFYRALGYSYLESLLGKSREIFKFKERVLQTPNDLLAAGFEEHKFRNFFNAFYSVVELVEKDGSVSSLLKVFNDQSASDHIVQFLRLLTSAFIRNRADFFRHFIDEEMDIKDFCTHEVEPMATECDHIQITALSQALSIALQVEYVDEMDTALNHHVFPEAATPSVYLLYKTSHYNILYAADKH

SEQ ID NO: 4304 - protein, 560 aa, Homo sapiens
MPQTRSQAQATISFPKRKLSRALNKAKNSSDAKLEPTNVQTVTCSPRVKALPLSPRKRLGDDNLCNTPHLPPCSPPKQGKKENGPPHSHTLKGRRLVFDNQLTIKSPSKRELAKVHQNKILSSVRKSQEITTNSEQRCPLKKESACVRLFKQEGTCYQQAKLVLNTAVPDRLPAREREMDVIRNFLREHICGKKAGSLYLSGAPGTGKTACLSRILQDLKKELKGFKTIMLNCMSLRTAQAVFPAIAQEICQEEVSRPAGKDMMRKLEKHMTAEKGPMIVLVLDEMDQLDSKGQDVLYTLFEWPWLSNSHLVLIGIANTLDLTDRILPRLQAREKCKPQLLNFPPYTRNQIVTILQDRLNQVSRDQVLDNAAVQFCARKVSAVSGDVRKALDVCRRAIEIVESDVKSQTILKPLSECKSPSEPLIPKRVGLIHISQVISEVDGNRMTLSQEGAQDSFPLQQKILVCSLMLLIRQLKIKEVTLGKLYEAYSKVCRKQQVAAVDQSECLSLSGLLEARGILGLKRNKETRLTKVFFKIEEKEIEHALKDKALIGNILATGLP

SEQ ID NO: 4305 - protein, 160 aa, Homo sapiens
MTLEELVACDNAAQKMQTVTAAVEELLVAAQRQDRLTVGVYESAKLMNVDPDSVVLCLLAIDEEEEDDIALQIHFTLIQSFCCDNDINIVRVSGMQRLAQLLGEPAETQGTTEARDLHCLLVTNPHTDAWKSHGLVEVASYCEESRGNNQWVPYISLQER

SEQ ID NO: 4306 - protein, 508 aa, Homo sapiens
MAKSNGENGPRAPAAGESLSGTRESLAQGPDAATTDELSSLGSDSEANGFAERRIDKFGFIVGSQGAEGALEEVPLEVLRQRESKWLDMLNNWDKWMAKKHKKIRLRCQKGIPPSLRGRAWQYLSGGKVKLQQNPGKFDELDMSPGDPKWLDVIERDLHRQFPFHEMFVSRGGHGQQDLFRVLKAYTLYRPEEGYCQAQAPIAAVLLMHMPAEQAFWCLVQICEKYLPGYYSEKLEAIQLDGEILFSLLQKVSPVAHKHLSRQKIDPLLYMTEWFMCAFSRTLPWSSVLRVWDMFFCEGVKIIFRVGLVLLKHALGSPEKVKACQGQYETIERLRSLSPKIMQEAFLVQEVVELPVTERQIEREHLIQLRRWQETRGELQCRSPPRLHGAKAILDAEPGPRPALQPSPSIRLPLDAPLPGSKAKPKPPKQAQKEQRKQMKGRGQLEKPPAPNQAMVVAAAGDACPPQHVPPKDSAPKDSAPQDLAPQVSAHHRSQESLTSQESEDTYL

SEQ ID NO: 4307 - protein, 311 aa, Homo sapiens
MPAPRAPRALAAAAPASGKAKLTHPGKAILAGGLAGGIEICITFPTEYVKTQLQLDERSHPPRYRGIGDCVRQTVRSHGVLGLYRGLSSLLYGSIPKAAVRFGMFEFLSNHMRDAQGRLDSTRGLLCGLGAGVAEAVVVVCPMETIKVKFIHDQTSPNPKYRGFFHGVREIVREQGLKGTYQGLTATVLKQGSNQAIRFFVMTSLRNWYRGDNPNKPMNPLITGVFGAIAGAASVFGNTPLDVIKTRMQGLEAHKYRNTWDCGLQILKKEGLKAFYKGTVPRLGRVCLDVAIVFVIYDEVVKLLNKVWKTD

SEQ ID NO: 4308 - protein, 135 aa, Homo sapiens
MACGLVASNLNLKPGECLRVRGEVAPDAKSFVLNLGKDSNNLCLHFNPRFNAHGDANTIVCNSKDGGAWGTEQREAVFPFQPGSVAEVCITFDQANLTVKLPDGYEFKFPNRLNLEAINYMAADGDFKIKCVAFD

SEQ ID NO: 4309 - protein, 180 aa, Homo sapiens
MSVLRPLDKLPGLNTATILLVGTEDALLQQLADSMLKEDCASELKVHLAKSLPLPSSVNRPRIDLIVFVVNLHSKYSLQNTEESLRHVDASFFLGKVCFLATGAGRESHCSIHRHTVVKLAHTYQSPLLYCDLEVEGFRATMAQRLVRVLQICAGHVPGVSALNLLSLLRSSEGPSLEDL

SEQ ID NO: 4310 - protein, 340 aa, Homo sapiens
MKEDQVVAEEPGFQDEEESLFQDIDLLQKHGINVADIKKLKSVGICTIKGIQMTTRRALCNVKGLSEAKVDKIKEAANKLIEPGFLTAFEYSEKRKMVFHITTGSQEFDKLLGGGIESMAITEAFGEFRTGKTQLSHTLCVTAQLPGAGGYPGGKIIFIDTENTFRPDRLRDIADRFNVDHDAVLDNVLYARAYTSEHQMELLDYVAAKFHEEAGIFKLLIIDSIMALFRVDFSGRGELAERQQKLAQMLSRLQKISEEYNVAVFVTNQMTADPGATMTFQADPKKPIGGHILAHASTTRISLRKGRGELRIAKIYDSPEMPENEATFAITAGGIGDAKE

SEQ ID NO: 4311 - protein, 182 aa, Homo sapiens
MALLTAETFRLQFNNKRRLRRPYYPRKALLCYQLTPQNGSTPTRGYFENKKKCHAEICFINEIKSMGLDETQCYQVTCYLTWSPCSSCAWELVDFIKAHDHLNLGIFASRLYYHWCKPQQKGLRLLCGSQVPVEVMGFPEFADCWENFVDHEKPLSFNPYKMLEELDKNSRAIKRRLERIKS

SEQ ID NO: 4312 - protein, 644 aa, Homo sapiens
MEAERGPERRPAERSSPGQTPEEGAQALAEFAALHGPALRASGVPERYWGRLLHKLEHEVFDAGEVFGIMQVEEVEEEEDEAAREVRKQQPNPGNELCYKVIVTRESGLQAAHPNSIFLIDHAWTCRVEHARQQLQQVPGLLHRMANLMGIEFHGELPSTEAVALVLEEMWKFNQTYQLAHGTAEEKMPVWYIMDEFGSRIQHADVPSFATAPFFYMPQQVAYTLLWPLRDLDTGEEVTRDFAYGETDPLIRKCMLLPWAPTDMLDLSSCTPEPPAEHYQAILEENKEKLPLDINPVVHPHGHIFKVYTDVQQVASSLTHPRFTLTQSEADADILFNFSHFKDYRKLSQERPGVLLNQFPCENLLTVKDCLASIARRAGGPEGPPWLPRTFNLRTELPQFVSYFQQRERWGEDNHWICKPWNLARSLDTHVTKSLHSIIRHRESTPKVVSKYIESPVLFLREDVGKVKFDIRYIVLLRSVRPLRLFVYDVFWLRFSNRAFALNDLDDYEKHFTVMNYDPDVVLKQVHCEEFIPEFEKQYPEFPWTDVQAEIFRAFTELFQVACAKPPPLGLCDYPSSRAMYAVDLMLKWDNGPDGRRVMQPQILEVNFNPDCERACRYHPTFFNDVFSTLFLDQPGGCHVTCLV

SEQ ID NO: 4313 - protein, 251 aa, Homo sapiens
MELSAIGEQVFAVESIRKKRVRKGKVEYLVKWKGWPPKYSTWEPEEHILDPRLVMAYEEKEERDRASGYRKRGPKPKRLLLQRLYSMDLRSSHKAKGKEKLCFSLTCPLGSGSPEGVVKAGAPELVDKGPLVPTLPFPLRKPRKAHKYLRLSRKKFPPRGPNLESHSHRRELFLQEPPAPDVLQAAGEWEPAAQPPEEEADADLAEGPPPWTPALPSSEVTVTDITANSITVTFREAQAAEGFFRDRSGKF

SEQ ID NO: 4314 - protein, 166 aa, Homo sapiens
MAQRLLLRRFLASVISRKPSQGQWPPLTSRALQTPQCSPGGLTVTPNPARTIYTTRISLTTFNIQDGPDFQDRVVNSETPVVVDFHAQWCGPCKILGPRLEKMVAKQHGKVVMAKVDIDDHTDLAIEYEVSAVPTVLAMKNGDVVDKFVGIKDEDQLEAFLKKLIG

SEQ ID NO: 4315 - protein, 357 aa, Homo sapiens
MDSVEKTTNRSEQKSRKFLKSLIRKQPQELLLVIGTGVSAAVAPGIPALCSWRSCIEAVIEAAEQLEVLHPGDVAEFRRKVTKDRDLLVVAHDLIRKMSPRTGDAKPSFFQDCLMEVFDDLEQHIRSPVVLQSILSLMDRGAMVLTTNYDNLLEAFGRRQNKPMESLDLKDKTKVLEWARGHMKYGVLHIHGLYTDPCGVVLDPSGYKDVTQDAEVMEVLQNLYRTKSFLFVGCGETLRDQIFQALFLYSVPNKVDLEHYMLVLKENEDHFFKHQADMLLHGIKVVSYGDCFDHFPGYVQDLATQICKQQSPDADRVDSTTLLGNACQDCAKRKLEENGIEVSKKRTQSDTDDAGGS

SEQ ID NO: 4316 - protein, 369 aa, Homo sapiens
MDPRKVNELRAFVKMCKQDPSVLHTEEMRFLREWVESMGGKVPPATQKAKSEENTKEEKPDSKKVEEDLKADEPSSEESDLEIDKEGVIEPDTDAPQEMGDENAEITEEMMDQANDKKVAAIEALNDGELQKAIDLFTDAIKLNPRLAILYAKRASVFVKLQKPNAAIRDCDRAIEINPDSAQPYKWRGKAHRLLGHWEEAAHDLALACKLDYDEDASAMLKEVQPRAQKIAEHRRKYERKREEREIKERIERVKKAREEHERAQREEEARRQSGAQYGSFPGGFPGGMPGNFPGGMPGMGGGMPGMAGMPGLNEILSDPEVLAAMQDPEVMVAFQDVAQNPANMSKYQSNPKVMNLISKLSAKFGGQA

SEQ ID NO: 4317 - protein, 576 aa, Homo sapiens
MRGPNSGTEKGRLVIPEKQGFDFLCMPVFHPRFKREFIQEPAKNRPGPQTRSDLLLSGRAFLLPLNQEDNTNLARVLTNHIHTGHHSSMFWMRVPLVAPEDLRDDIIENAPTTHTEEYSGEEKTWMWWHNFRTLCDYSKRIAVALEIGADLPSNHVIDRWLGEPIKAAILPTSIFLTNKKGFPVLSKMHQRLIFRLLKLEVQFIITGTNHHSEKEFCSYLQYLEYLSQNRPPPNAYELFAKGYEDYLQSPLQPLMDNLESQTYEVFEKDPIKYSQYQQAIYKCLLDRVPEEEKDTNVQVLMVLGAGRGPLVNASLRAAKQADRRIKLYAVEKNPNAVVTLENWQFEEWGSQVTVVSSDMREWVAPEKADIIVSELLGSFADNELSPECLDGAQHFLKDDGVSIPGEYTSFLAPISSSKLYNEVRACREKDRDPEAQFEMPYVVRLHNFHQLSAPQPCFTFSHPNRDPMIDNNRYCTLEFPVEVNTVLHGFAGYFETVLYQDITLSIRPETHSPGMFSWFPILFPIKQPITVREGQTICVRFWRCSNSKKVWYEWAVTAPVCSAIHNPTGRSYTIGL

SEQ ID NO: 4318 - protein, 527 aa, Homo sapiens
MAPERLRSRALSAFKLRGLLLRGEAIKYLTEALQSISELELEDKLEKIINAVEKQPLSSNMIERSVVEAAVQECSQSVDETIEHVFNIIGAFDIPRFVYNSERKKFLPLLMTNHPAPNLFGTPRDKAEMFRERYTILHQRTHRHELFTPPVIGSHPDESGSKFQLKTIETLLGSTTKIGDAIVLGMITQLKEGKFFLEDPTGTVQLDLSKAQFHSGLYTEACFVLAEGWFEDQVFHVNAFGFPPTEPSSTTRAYYGNINFFGGPSNTSVKTSAKLKQLEEENKDAMFVFLSDVWLDQVEVLEKLRIMFAGYSPAPPTCFILCGNFSSAPYGKNQVQALKDSLKTLADIICEYPDIHQSSRFVFVPGPEDPGFGSILPRPPLAESITNEFRQRVPFSVFTTNPCRIQYCTQEITVFREDLVNKMCRNCVRFPSSNLAIPNHFVKTILSQGHLTPLPLYVCPVYWAYDYALRVYPVPDLLVIADKYDPFTTTNTECLCINPGSFPRSGFSFKVFYPSNKTVEDSKLQGF

SEQ ID NO: 4319 - protein, 216 aa, Homo sapiens
MQAGKPILYSYFRSSCSWRVRIALALKGIDYETVPINLIKDGGQQFSKDFQALNPMKQVPTLKIDGITIHQSLAIIEYLEEMRPTPRLLPQDPKKRASVRMISDLIAGGIQPLQNLSVLKQVGEEMQLTWAQNAITCGFNALEQILQSTAGIYCVGDEVTMADLCLVPQVANAERFKVDLTPYPTISSINKRLLVLEAFQVSHPCRQPDTPTELRA

SEQ ID NO: 4320 - protein, 435 aa, Homo sapiens
MAESSSESDHFRCRDRLSPWAARSTHRGTRSLPTVEVTEKVNTITSTLQDTSRNLRQVDQMLGRYREYSNGQAGAIEHLKESLEQSIDQLRSQRLLRNSGGRSISVTSLSASDLDGGTGSELHHFPPTSPLKDYGDPQGIKRMRSRTGVRFVQETDDMTQLHGFHQSLRDLSSEQIRLGDDFNRELSRRSRSDAETKRALEELTEKLNEAQKQEVVSDRVERRLQELEREMRTERELVERRQDQLGLMSLQLQEALKKQEAKADEHEGAIKNKLRQTETEKNQLEQELELSRRLLNQSEGSRETLLHQVEELRTQLTKAEGDRKGLQHQVSQISKQQSNYQDEQGEDWRFRRGVEREKQDLEKQMSDLRVQLNFSAMASELEEVKRCMERKDKEKAHLASQVEHINRKCLLNLVQDLDCKDNEILTYSLQSPLHV

SEQ ID NO: 4321 - protein, 431 aa, Homo sapiens
MSVNVNRSVSDQFYRYKMPRLIAKVEGKGNGIKTVIVNMVDVAKALNRPPTYPTKYFGCELGAQTQFDVKNDRYIVNGSHEANKLQDMLDGFIKKFVLCPECENPETDLHVNPKKQTIGNSCKACGYRGMLDTHHKLCTFILKNPPENSDSGTGKKEKEKKNRKGKDKENGSVSSSETPPPPPPPNEINPPPHTMEEEEDDDWGEDTTEEAQRRRMDEISDHAKVLTLSDDLERTIEERVNILFDFVKKKKEEGVIDSSDKEIVAEAERLDVKAMGPLVLTEVLFNEKIREQIKKYRRHFLRFCHNNKKAQRYLLHGLECVVAMHQAQLISKIPHILKEMYDADLLEEEVIISWSEKASKKYVSKELAKEIRVKAEPFIKWLKEAEEESSGGEEEDEDENIEVVYSKAASVPKVETVKSDNKDDDIDIDAI

SEQ ID NO: 4322 - protein, 317 aa, Homo sapiens
MFQAAERPQEWAMEGPRDGLKKERLLDDRHDSGLDSMKDEEYEQMVKELQEIRLEPQEVPRGSEPWKQQLTEDGDSFLHLAIIHEEKALTMEVIRQVKGDLAFLNFQNNLQQTPLHLAVITNQPEIAEALLGAGCDPELRDFRGNTPLHLACEQGCLASVGVLTQSCTTPHLHSILKATNYNGHTCLHLASIHGYLGIVELLVSLGADVNAQEPCNGRTALHLAVDLQNPDLVSLLLKCGADVNRVTYQGYSPYQLTWGRPSTRIQQQLGQLTLENLQMLPESEDEESYDTESEFTEFTEDELPYDDCVFGGQRLTL

SEQ ID NO: 4323 - protein, 208 aa, Homo sapiens
MGEVEISALAYVKMCLHAARYPHAAVNGLFLAPAPRSGECLCLTDCVPLFHSHLALSVMLEVALNQVDVWGAQAGLVVAGYYHANAAVNDQSPGPLALKIAGRIAEFFPDAVLIMLDNQKLVPQPRVPPVIVLENQGLRWVPKDKNLVMWRDWEESRQMVGALLEDRAHQHLVDFDCHLDDIRQDWTNQRLNTQITQWVGPTNGNGNA

SEQ ID NO: 4324 - protein, 403 aa, Homo sapiens
MDRSKENCISGPVKATAPVGGPKRVLVTQQFPCQNPLPVNSGQAQRVLCPSNSSQRIPLQAQKLVSSHKPVQNQKQKQLQATSVPHPVSRPLNNTQKSKQPLPSAPENNPEEELASKQKNEESKKRQWALEDFEIGRPLGKGKFGNVYLAREKQSKFILALKVLFKAQLEKAGVEHQLRREVEIQSHLRHPNILRLYGYFHDATRVYLILEYAPLGTVYRELQKLSKFDEQRTATYITELANALSYCHSKRVIHRDIKPENLLLGSAGELKIADFGWSVHAPSSRRTTLCGTLDYLPPEMIEGRMHDEKVDLWSLGVLCYEFLVGKPPFEANTYQETYKRISRVEFTFPDFVTEGARDLISRLLKHNPSQRPMLREVLEHPWITANSSKPSNCQNKESASKQS

SEQ ID NO: 4325 - protein, 700 aa, Homo sapiens
MSRRTRCEDLDELHYQDTDSDVPEQRDSKCKVKWTHEEDEQLRALVRQFGQQDWKFLASHFPNRTDQQCQYRWLRVLNPDLVKGPWTKEEDQKVIELVKKYGTKQWTLIAKHLKGRLGKQCRERWHNHLNPEVKKSCWTEEEDRIICEAHKVLGNRWAEIAKMLPGRTDNAVKNHWNSTIKRKVDTGGFLSESKDCKPPVYLLLELEDKDGLQSAQPTEGQGSLLTNWPSVPPTIKEEENSEEELAAATTSKEQEPIGTDLDAVRTPEPLEEFPKREDQEGSPPETSLPYKWVVEAANLLIPAVGSSLSEALDLIESDPDAWCDLSKFDLPEEPSAEDSINNSLVQLQASHQQQVLPPRQPSALVPSVTEYRLDGHTISDLSRSSRGELIPISPSTEVGGSGIGTPPSVLKRQRKRRVALSPVTENSTSLSFLDSCNSLTPKSTPVKTLPFSPSQFLNFWNKQDTLELESPSLTSTPVCSQKVVVTTPLHRDKTPLHQKHAAFVTPDQKYSMDNTPHTPTPFKNALEKYGPLKPLPQTPHLEEDLKEVLRSEAGIELIIEDDIRPEKQKRKPGLRRSPIKKVRKSLALDIVDEDVKLMMSTLPKSLSLPTTAPSNSSSLTLSGIKEDNSLLNQGFLQAKPEKAAVAQKPRSHFTTPAPMSSAWKTVACGGTRDQLFMQEKARQLLGRLKPSHTSRTLILS

SEQ ID NO: 4326 - protein, 144 aa, Homo sapiens
MAAPPQLRALLVVVNALLRKRRYHAALAVLKGFRNGAVYGAKIRAPHALVMTFLFRNGRGTCVCAASRRSCGPYCRPHISTPGTWHGLCSPTRVSVPCSPTYKARPTQHTHSWRPSSGVSWCLEKTITSTARSTCTCCHASCLP

SEQ ID NO: 4327 - protein, 432 aa, Homo sapiens
MSDKLPYKVADIGLAAWGRKALDIAENEMPGLMRMRERYSASKPLKGARIAGCLHMTVETAVLIETLVTLGAEVQWSSCNIFSTQDHAAAAIAKAGIPVYAWKGETDEEYLWCIEQTLYFKDGPLNMILDDGGDLTNLIHTKYPQLLPGIRGISEETTTGVHNLYKMMANGILKVPAINVNDSVTKSKFDNLYGCRESLIDGIKRATDVMIAGKVAVVAGYGDVGKGCAQALRGFGARVIITEIDPINALQAAMEGYEVTTMDEACQEGNIFVTTTGCIDIILGRHFEQMKDDAIVCNIGHFDVEIDVKWLNENAVEKVNIKPQVDRYRLKNGRRIILLAEGRLVNLGCAMGHPSFVMSNSFTNQVMAQIELWTHPDKYPVGVHFLPKKLDEAVAEAHLGKLNVKLTKLTEKQAQYLGMSCDGPFKPDHYRY

SEQ ID NO: 4328 - protein, 260 aa, Homo sapiens
MAGSPLLWGPRAGGVGLLVLLLLGLFRPPPALCARPVKEPRGLSAASPPLAETGAPRRFRRSVPRGEAAGAVQELARALAHLLEAERQERARAEAQEAEDQQARVLAQLLRVWGAPRNSDPALGLDDDPDAPAAQLARALLRARLDPAALAAQLVPAPVPAAALRPRPPVYDDGPAGPDAEEAGDETPDVDPELLRYLLGRILAGSADSEGVAAPRRLRRAADHDVGSELPPEGVLGALLRVKRLETPAPQVPARRLLPP

SEQ ID NO: 4329 - protein, 252 aa, Homo sapiens
MGSELIGRLAPRLGLAEPDMLRKAEEYLRLSRVKCVGLSARTTETSSAVMCLDLAASWMKCPLDRAYLIKLSGLNKETYQSCLKSFECLLGLNSNIGIRDLAVQFSCIEAVNMASKILKSYESSLPQTQQVDLDLSRPLFTSAALLSACKILKLKVDKNKMVATSGVKKAIFDRLCKQLEKIGQQVDREPGDVATPPRKRKKIVVEAPAKEMEKVEEMPHKPQKDEDLTQDYEEWKRKILENAASAQKATAE

SEQ ID NO: 4330 - protein, 127 aa, Homo sapiens
MGDKPIWEQIGSSFIQHYYQLFDNDRTQLGAIYIDASCLTWEGQQFQGKAAIVEKLSSLPFQKIQHSITAQDHQPTPDSCIISMVVGQLKADEDPIMGFHQMFLLKNINDAWVCTNDMFRLALHNFG

SEQ ID NO: 4331 - protein, 229 aa, Homo sapiens
MAAQPLRHRSRCATPPRGDFCGGTERAIDQASFTTSMEWDTQVVKGSSPLGPAGLGAEEPAAGPQLPSWLQPERCAVFQCAQCHAVLADSVHLAWDLSRSLGAVVFSRVTNNVVLEAPFLVGIEGSLKGSTYNLLFCGSCGIPVGFHLYSTHAALAALRGHFCLSSDKMVCYLLKTKAIVNASEMDIQNVPLSEKIAELKEKIVLTHNRLKSLMKILSEVTPDQSKPEN

SEQ ID NO: 4332 - protein, 540 aa, Homo sapiens
MNGEAICSALPTIPYHKLADLRYLSRGASGTVSSARHADWRVQVAVKHLHIHTPLLDSERKDVLREAEILHKARFSYILPILGICNEPEFLGIVTEYMPNGSLNELLHRKTEYPDVAWPLRFRILHEIALGVNYLHNMTPPLLHHDLKTQNILLDNEFHVKIADFGLSKWRMMSLSQSRSSKSAPEGGTIIYMPPENYEPGQKSRASIKHDIYSYAVITWEVLSRKQPFEDVTNPLQIMYSVSQGHRPVINEESLPYDIPHRARMISLIESGWAQNPDERPSFLKCLIELEPVLRTFEEITFLEAVIQLKKTKLQSVSSAIHLCDKKKMELSLNIPVNHGPQEESCGSSQLHENSGSPETSRSLPAPQDNDFLSRKAQDCYFMKLHHCPGNHSWDSTISGSQRAAFCDHKTTPCSSAIINPLSTAGNSERLQPGIAQQWIQSKREDIVNQMTEACLNQSLDALLSRDLIMKEDYELVSTKPTRTSKVRQLLDTTDIQGEEFAKVIVQKLKDNKQMGLQPYPEILVVSRSPSLNLLQNKSM

SEQ ID NO: 4333 - protein, 445 aa, Homo sapiens
MAEYDLTTRIAHFLDRHLVFPLLEFLSVKEIYNEKELLQGKLDLLSDTNMVDFAMDVYKNLYSDDIPHALREKRTTVVAQLKQLQAETEPIVKMFEDPETTRQMQSTRDGRMLFDYLADKHGFRQEYLDTLYRYAKFQYECGNYSGAAEYLYFFRVLVPATDRNALSSLWGKLASEILMQNWDAAMEDLTRLKETIDNNSVSSPLQSLQQRTWLIHWSLFVFFNHPKGRDNIIDLFLYQPQYLNAIQTMCPHILRYLTTAVITNKDVRKRRQVLKDLVKVIQQESYTYKDPITEFVECLYVNFDFDGAQKKLRECESVLVNDFFLVACLEDFIENARLFIFETFCRIHQCISINMLADKLNMTPEEAERWIVNLIRNARLDAKIDSKLGHVVMGNNAVSPYQQVIEKTKSLSFRSQMLAMNIEKKLNQNSRSEAPNWATQDSGFY

SEQ ID NO: 4334 - protein, 1281 aa, Homo sapiens
MVRKKNPPLRNVASEGEGQILEPIGTESKVSGKNKEFSADQMSENTDQSDAAELNHKEEHSLHVQDPSSSSKKDLKSAVLSEKAGFNYESPSKGGNFPSFPHDEVTDRNMLAFSSPAAGGVCEPLKSPQRAEADDPQDMACTPSGDSLETKEDQKMSPKATEETGQAQSGQANCQGLSPVSVASKNPQVPSDGGVRLNKSKTDLLVNDNPDPAPLSPELQDFKCNICGYGYYGNDPTDLIKHFRKYHLGLHNRTRQDAELDSKILALHNMVQFSHSKDFQKVNRSVFSGVLQDINSSRPVLLNGTYDVQVTSGGTFIGIGRKTPDCQGNTKYFRCKFCNFTYMGNSSTELEQHFLQTHPNKIKASLPSSEVAKPSEKNSNKSIPALQSSDSGDLGKWQDKITVKAGDDTPVGYSVPIKPLDSSRQNGTEATSYYWCKFCSFSCESSSSLKLLEHYGKQHGAVQSGGLNPELNDKLSRGSVINQNDLAKSSEGETMTKTDKSSSGAKKKDFSSKGAEDNMVTSYNCQFCDFRYSKSHGPDVIVVGPLLRHYQQLHNIHKCTIKHCPFCPRGLCSPEKHLGEITYPFACRKSNCSHCALLLLHLSPGAAGSSRVKHQCHQCSFTTPDVDVLLFHYESVHESQASDVKQEANHLQGSDGQQSVKESKEHSCTKCDFITQVEEEISRHYRRAHSCYKCRQCSFTAADTQSLLEHFNTVHCQEQDITTANGEEDGHAISTIKEEPKIDFRVYNLLTPDSKMGEPVSESVVKREKLEEKDGLKEKVWTESSSDDLRNVTWRGADILRGSPSYTQASLGLLTPVSGTQEQTKTLRDSPNVEAAHLARPIYGLAVETKGFLQGAPAGGEKSGALPQQYPASGENKSKDESQSLLRRRRGSGVFCANCLTTKTSLWRKNANGGYVCNACGLYQKLHSTPRPLNIIKQNNGEQIIRRRTRKRLNPEALQAEQLNKQQRGSNEEQVNGSPLERRSEDHLTESHQREIPLPSLSKYEAQGSLTKSHSAQQPVLVSQTLDIHKRMQPLHIQIKSPQESTGDPGNSSSVSEGKGSSERGSPIEKYMRPAKHPNYSPPGSPIEKYQYPLFGLPFVHNDFQSEADWLRFWSKYKLSVPGNPHYLSHVPGLPNPCQNYVPYPTFNLPPHFSAVGSDNDIPLDLAIKHSRPGPTANGASKEKTKAPPNVKNEGPLNVVKTEKVDRSTQDELSTKCVHCGIVFLDEVMYALHMSCHGDSGPFQCSICQHLCTDKYDFTTHIQRGLHRNNAQVEKNGKPKE

SEQ ID NO: 4335 - protein, 259 aa, Homo sapiens
MATVTATTKVPEIRDVTRIERIGAHSHIRGLGLDDALEPRQASQGMVGQLAARRAAGVVLEMIREGKIAGRAVLIAGQPGTGKTAIAMGMAQALGPDTPFTAIAGSEIFSLEMSKTEALTQAFRRSIGVRIKEETEIIEGEVVEIQIDRPATGTGSKVGKLTLKTTEMETIYDLGTKMIESLTKDKGRDHHRQGDGQDLQAGPLLHTRPRLRRYGLPDQVRAVPRWGAPETQGGGAHRVPARDRRHQLSHPGLPGALLR

SEQ ID NO: 4336 - protein, 579 aa, Homo sapiens
MLRSGPASGPSVPTGRAMPSRRVARPPAAPELGALGSPDLSSLSLAVSRSTDELEIIDEYIKENGFGLDGGQPGPGEGLPRLVSRGAASLSTVTLGPVAPPATPPPWGCPLGRLVSPAPGPGPQPHLVITEQPKQRGMRFRYECEGRSAGSILGESSTEASKTLPAIELRDCGGLREVEVTACLVWKDWPHRVHPHSLVGKDCTDGICRVRLRPHVSPRHSFNNLGIQCVRKKEIEAAIERKIQLGIDPYNAGSLKNHQEVDMNVVRICFQASYRDQQGQMRRMDPVLSEPVYDKKSTNTSELRICRINKESGPCTGGEELYLLCDKVQKEDISVVFSRASWEGRADFSQADVHRQIAIVFKTPPYEDLEIVEPVTVNVFLQRLTDGVCSEPLPFTYLPRDHDSYGVDKKRKRGMPDVLGELNSSDPHGIESKRRKKKPAILDHFLPNHGSGPFLPPSALLPDPDFFSGTVSLPGLEPPGGPDLLDDGFAYDPTAPTLFTMLDLLPPAPPHASAVVCSGGAGAVVGETPGPEPLTLDSYQAPGPGDGGTASLVGSNMFPNHYREAAFGGGLLSPGPEAT

SEQ ID NO: 4337 - protein, 630 aa, Homo sapiens
MQGSSLWLSLTFRSARVLSRARFFEWQSPGLPNTAAMENGTGPYGEERPREVQETTVTEGAAKIAFPSANEVFYNPVQEFNRDLTCAVITEFARIQLGAKGIQIKVPGEKDTQKVVVDLSEQEEEKVELKESENLASGDQPRTAAVGEICEEGLHVLEGLAASGLRSIRFALEVPGLRSVVANDASTRAVDLIRRNVQLNDVAHLVQPSQADARMLMYQHQRVSERFDVIDLDPYGSPATFLDAAVQAVSEGGLLCVTCTDMAVLAGNSGETCYSKYGAMALKSRACHEMALRIVLHSLDLRANCYQRFVVPLLSISADFYVRVFVRVFTGQAKVKASARAKFSAACGPPVTPECEHCGQRHQLGGPMWAEPIHDLDFVGRVLEAVSANPGRFHTSERIRGVLSVITEELPDVPLYYTLDQLSSTIHCNTPSLLQLRSALLHADFRVSLSHACKNAVKTDAPASALWDIMRCWEKECPVKRERLSETSPAFRILSVEPRLQANFTIREDANPSSRQRGLKRFQANPEANWGPRPRARPGGKAADEAMEERRRLLQNKRKEPPEDVAQRAARLKTFPCKRFKEGTCQRGDQCCYSHSPPTPRVSADAAPDCPETSNQTPPGPGAAAGPGID

SEQ ID NO: 4338 - protein, 80 aa, Homo sapiens
WRRGSASFRRTNPQRVRRQRQPLKRIGAQEKANLEVGIRKKIEHDVVMKASSSLPKKLALLKAPAKKKGAAAATSSKTPS

SEQ ID NO: 4339 - protein, 321 aa, Homo sapiens
MKPGFSPRGGGFGGRGGFGDRGGRGGRGGFGGGRGRGGGFRGRGRGGGGGGGGGGGGGRGGGGFHSGGNRGRGRGGKRGNQSGKNVMVEPHRHEGVFICRGKEDALVTKNLVPGESVYGEKRVSISEGDDKIEYRAWNPFRSKLAAAILGGVDQIHIKPGAKVLYLGAASGTTVSHVSDIVGPDGLVYAVEFSHRSGRDLINLAKKRTNIIPVIEDARHPHKYRMLIAMVDVIFADVAQPDQTRIVALNAHTFLRNGGHFVISIKANCIDSTASAEAVFASEVKKMQQENMKPQEQLTLEPYERDHAVVVGVYRPPPKVKN

SEQ ID NO: 4340 - protein, 142 aa, Homo sapiens
MSLLPVPYTEAASLSTGSTVTIKGRPLACFLNEPYLQVDFHTEMKEESDIVFHFQVCFGRRVVMNSREYGAWKQQVESKNMPFQDGQEFELSISVLPDKYQVMVNGQSSYTFDHRIKPEAVKMVQVWRDISLTKFNVSYLKR

SEQ ID NO: 4341 - protein, 434 aa, Homo sapiens
MSADGAEADGSTQVTVEEPVQQPSVVDRVASMPLISSTCDMVSAAYASTKESYPHIKTVCDAAEKGVRTLTAAAVSGAQPILSKLEPQIASASEYAHRGLDKLEENLPILQQPTEKVLADTKELVSSKVSGAQEMVSSAKDTVATQLSEAVDATRGAVQSGVDKTKSVVTGGVQSVMGSRLGQMVLSGVDTVLGKSEEWADNHLPLTDAELARIATSLDGFDVASVQQQRQEQSYFVRLGSLSERLRQHAYEHSLGKLRATKQRAQEALLQLSQVLSLMETVKQGVDQKLVEGQEKLHQMWLSWNQKQLQGPEKEPPKPEQVESRALTMFRDIAQQLQATCTSLGSSIQGLPTNVKDQVQQARRQVEDLQATFSSIHSFQDLSSSILAQSRERVASAREALDHMVEYVAQNTPVTWLVGPFAPGITEKAPEEKK

SEQ ID NO: 4342 - protein, 71 aa, Homo sapiens
MTKIYGGRQRNGVMPSHFSRGSKSVARRVLQALEGLKMVEKDQDGGRKLTPQGQRDLDRIAGQVAAANKKH

SEQ ID NO: 4343 - protein, 219 aa, Homo sapiens
MASAGDTQAGPRDAADQNFDYMFKLLLIGNSSVGKTSFLFRYADDSFTPAFVSTVGIDFKVKTVYRHDKRIKLQIWDTAGQERYRTITTAYYRGAMGFLLMYDIANQESFAAVQDWATQIKTYSWDNAQVILVGNKCDLEDERVVPAEDGRRLADDLGFEFFEASAKENINVKQVFERLVDVICEKMNESLEPSSSSGSNGKGPAVGDAPAPQPSSCSC

SEQ ID NO: 4344 - protein, 491 aa, Homo sapiens [sequence omitted]

SEQ ID NO: 4345 - protein, 114 aa, Homo sapiens
MAGGKAGKDSGKAKAKAVSRSQRAGLQFPVGRIHRHLKTRTTSHGRVGATAAVYSAAILEYLTAEVLELAGNASKDLKVKRITPRHLQLAIRGDEELDSLIKATIAGGEKRRCS

SEQ ID NO: 4346 - protein, 320 aa, Homo sapiens
MPMYQVKPYHGGGAPLRVELPTCMYRLPNVHGRSYGPAPGAGHVQEESNLSLQALESRQDDILKRLYELKAAVDGLSKMIQTPDADLDVTNIIQADEPTTLTTNALDLNSVLGKDYGALKDIVINANPASPPLSLLVLHRLLCEHFRVLSTVHTHSSVKSVPENLLKCFGEQNKKQPRQDYQLGFTLIWKNVPKTQMKFSIQTMCPIEGEGNIARFLFSLFGQKHNAVNATLIDSWVDIAIFQLKEGSSKEKAAVFRSMNSALGKSPWLAGNELTVADVVLWSVLQQIGGCSVTVPANVQRWMRSCENLAPFNTALKLLK

SEQ ID NO: 4347 - protein, 707 aa, Homo sapiens
MGQTGKKSEKGPVCWRKRVKSEYMRLRQLKRFRRADEVKSMFSSNRQKILERTEILNQEWKQRRIQPVHILTSVSSLRGTREVEDETVLHNIPYMGDEVLDQDGTFIEELIKNYDGKVHGDRECGFINDEIFVELVNALGQYNDDDDDDDGDDPEEREEKQKDLEDHRDDKESRPPRKFPSDKIFEAISSMFPDKGTAEELKEKYKELTEQQLPGALPPECTPNIDGPNAKSVQREQSLHSFHTLFCRRCFKYDCFLHPFHATPNTYKRKNTETALDNKPCGPQCYQHLEGAKEFAAALTAERIKTPPKRPGGRRRGRLPNNSSRPSTPTINVLESKDTDSDREAGTETGGENNDKEEEEKKDETSSSSEANSRCQTPIKMKPNIEPPENVEWSGAEASMFRVLIGTYYDNFCAIARLIGTKTCRQVYEFRVKESSIIAPAPAEDVDTPPRKKKRKHRLWAAHCRKIQLKKDGSSNHVYNYQPCDHPRQPCDSSCPCVIAQNFCEKFCQCSSECQNRFPGCRCKAQCNTKQCPCYLAVRECDPDLCLTCGAADHWDSKNVSCKNCSIQRGSKKHLLLAPSDVAGWGIFIKDPVQKNEFISEYCGEIISQDEADRRGKVYDKYMCSFLFNLNNDFVVDATRKGNKIRFANHSVNPNCYAKVMMVNGDHRIGIFAKRAIQTGEELFFDYRYSQADALKYVGIEREMEIP

SEQ ID NO: 4348 - protein, 455 aa, Homo sapiens
MFSEQAAQRAHTLLSPPSANNATFARVPVATYTNSSQPFRLGERSFSRQYAHIYATRLIQMRPFLENRAQQHWGSGVGVKKLCELQPEEKCCVVGTLFKAMPLQPSILREVSEEHNLLPQPPRSKYIHPDDELVLEDELQRIKLKGTIDVSKLVTGTVLAVFGSVRDDGKFLVEDYCFADLAPQKPAPPLDTDRFVLLVSGLGLGGGGGESLLGTQLLVDVVTGQLGDEGEQCSAAHVSRVILAGNLLSHSTQSRDSINKAKYLTKKTQAASVEAVKMLDEILLQLSASVPVDVMPGEFDPTNYTLPQQPLHPCMFPLATAYSTLQLVTNPYQATIDGVRFLGTSGQNVSDIFRYSSMEDHLEILEWTLRVRHISPTAPDTLECPHVYFCGNTPSFGSKIIRGPEDQTVLLVTVPDFSATQTACLVNLRSLACQPISFSGFGAEDDDLGGLGLGP

SEQ ID NO: 4349 - protein, 466 aa, Homo sapiens
MSTRSVSSSSYRRMFGGPGTASRPSSSRSYVTTSTRTYSLGSALRPSTSRSLYASSPGGVYATRSSAVRLRSSVPGVRLLQDSVDFSLADAINTEFKNTRTNEKVELQELNDRFANYIDKVRFLEQQNKILLAELEQLKGQGKSRLGDLYEEEMRELRRQVDQLTNDKARVEVERDNLAEDIMRLREKLQEEMLQREEAENTLQSFRQDVDNASLARLDLERKVESLQEEIAFLKKLHEEEIQELQAQIQEQHVQIDVDVSKPDLTAALRDVRQQYESVAAKNLQEAEEWYKSKFADLSEAANRNNDALRQAKQESTEYRRQVQSLTCEVDALKGTNESLERQMREMEENFAVEAANYQDTIGRLQDEIQNMKEEMARHLREYQDLLNVKMALDIEIATYRKLLEGEESRISLPLPNFSSLNLRETNLDSLPLVDTHSKRTLLIKTVETRDGQVINETSQHHDDLE

SEQ ID NO: 4350 - protein, 198 aa, Homo sapiens
MDAILNYRSEDTEDYYTLLGCDELSSVEQILAEFKVRALECHPDKHPENPKAVETFQKLQKAKEILTNEESRARYDHWRRSQMSMPFQQWEALNDSVKTSMHWVVRGKKDLMLEESDKTHTTKMENEECNEQRERKKEELASTAEKTEQKEPKPLEKSVSPQNSDSSGFADVNGWHLRFRWSKDAPSELLRKFRNYEI

SEQ ID NO: 4351 - protein, 207 aa, Homo sapiens
MLALRCGSRWLGLLSVPRSVPLRLPAARACSKGSGDPSSSSSSGNPLVYLDVDANGKPLGRVVLELKADVVPKTAENFRALCTGEKGFGYKGSTFHRVIPSFMCQAGDFTNHNGTGGKSIYGSRFPDENFTLKHVGPGVLSMANAGPNTNGSQFFICTIKTDWLDGKHVVFGHVKEGMDVVKKIESFGSKSGRTSKKIVITDCGQLS

SEQ ID NO: 4352 - protein, 745 aa, Homo sapiens
MGVPFFSSLRCMVDLGPCWAGGLTAEMKLLLALAGLLAILATPQPSEGAAPAVLGEVDTSLVLSSMEEAKQLVDKAYKERRESIKQRLRSGSASPMELLSYFKQPVAATRTAVRAADYLHVALDLLERKLRSLWRRPFNVTDVLTPAQLNVLSKSSGCAYQDVGVTCPEQDKYRTITGMCNNRRSPTLGASNRAFVRWLPAEYEDGFSLPYGWTPGVKRNGFPVALARAVSNEIVRFPTDQLTPDQERSLMFMQWGQLLDHDLDFTPEPAARASFVTGVNCETSCVQQPPCFPLKIPPNDPRIKNQADCIPFFRSCPACPGSNITIRNQINALTSFVDASMVYGSEEPLARNLRNMSNQLGLLAVNQRFQDNGRALLPFDNLHDDPCLLTNRSARIPCFLAGDTRSSEMPELTSMHTLLLREHNRLATELKSLNPRWDGERLYQEARKIVGAMVQIITYRDYLPLVLGPTAMRKYLPTYRSYNDSVDPRIANVFTNAFRYGHTLIQPFMFRLDNRYQPMEPNPRVPLSRVFFASWRVVLEGGIDPILRGLMATPAKLNRQNQIAVDEIRERLFEQVMRIGLDLPALNMQRSRDHGLPGYNAWRRFCGLPQPETVGQLGTVLRNLKLARKLMEQYGTPNNIDIWMGGVSEPLKRKGRVGPLLACIIGTQFRKLRDGDRFWWENEGVFSMQQRQALAQISLPRIICDNTGITTVSKNNIFMSNSYPRDFVNCSTLPALNLASWREAS

SEQ ID NO: 4353 - protein, 196 aa, Homo sapiens [sequence omitted]

SEQ ID NO: 4354 - protein, 392 aa, Homo sapiens
MAALRQPQVAELLAEARRAFREEFGAEPELAVSAPGRVNLIGEHTDYNQGLVLPMALELMTVLVGSPRKDGLVSLLTTSEGADEPQRLQFPLPTAQRSLEPGTPRWANYVKGVIQYYPAAPLPGFSAVVVSSVPLGGGLSSSASLEVATYTFLQQLCPDSGTIAARAQVCQQAEHSFAGMPCGIMDQFISLMGQKGHALLIDCRSLETSLVPLSDPKLAVLITNSNVRHSLASSEYPVRRRQCEEVARALGKESLREVQLEELEAARDLVSKEGFRRARHVVGEIRRTAQAAAALRRGDYRAFGRLMVESHRSLRDDYEVSCPELDQLVEAALAVPGVYGSRMTGGGFGGCTVTLLEASAAPHAMRHIQEHYGGTATFYLSQAADGAKVLCL

SEQ ID NO: 4355 - protein, 148 aa, Homo sapiens
MASVVLALRTRTAVTSLLSPTPATALAVRYASKKSGGSSKNLGGKSSGRRQGIKKMEGHYVHAGNIIATQRHFRWHPGAHVGVGKNKCLYALEEGIVRYTKEVYVPHPRNTEAVDLITRLPKGAVLYKTFVHVVPAKPEGTFKLVAML

SEQ ID NO: 4356 - protein, 185 aa, Homo sapiens
MSGSFELSVQDLNDLLSDGSGCYSLPSQPCNEVTPRIYVGNASVAQDIPKLQKLGITHVLNAAEGRSFMHVNTNANFYKDSGITYLGIKANDTQEFNLSAYFERAADFIDQALAQKNGRVLVHCREGYSRSPTLVIAYLMMRQKMDVKSALSIVRQNREIGPNDGFLAQLCQLNDRLAKEGKLKP

SEQ ID NO: 4357 - protein, 151 aa, Homo sapiens
MSIPFSNTHYRIPQGFGNLLEGLTREILREQPDNIPAFAAAYFESLLEKREKTNFDPAEWGSKVEDRFYNNHAFEEQEPPEKSDPKQEESQISGKEEETSVTILDSSEEDKEKEEVAAVKIQAAFRGHIAREEAKKMKTNSLQNEEKEENK

SEQ ID NO: 4358 - protein, 241 aa, Homo sapiens
MATLKDQLIYNLLKEEQTPQNKITVVGVGAVGMACAISILMKDLADELALVDVIEDKLKGEMMDLQHGSLFLRTPKIVSGKDYNVTANSKLVIITAGARQQEGESRLNLVQRNVNIFKFIIPNVVKYSPNCKLLIVSNPVDILTYVAWKISGFPKNRVIGSGCNLDSARFRYLMGERLGVHPLSCHGWVLGEHGDSSVPVWSGMNVAGVSLKTLHPDLGTDKDKEQWKEVHKQVVERVFTE

SEQ ID NO: 4359 - protein, 646 aa, Homo sapiens
MSKGPAVGIDLGTTYSCVGVFQHGKVEIIANDQGNRTTPSYVAFTDTERLIGDAAKNQVAMNPTNTVFDAKRLIGRRFDDAVVQSDMKHWPFMVVNDAGRPKVQVEYKGETKSFYPEEVSSMVLTKMKEIAEAYLGKTVTNAVVTVPAYFNDSQRQATKDAGTIAGLNVLRIINEPTAAAIAYGLDKKVGAERNVLIFDLGGGTFDVSILTIEDGIFEVKSTAGDTHLGGEDFDNRMVNHFIAEFKRKHKKDISENKRAVRRLRTACERAKRTLSSSTQASIEIDSLYEGIDFYTSITRARFEELNADLFRGTLDPVEKALRDAKLDKSQIHDIVLVGGSTRIPKIQKLLQDFFNGKELNKSINPDEAVAYGAAVQAAILSGDKSENVQDLLLLDVTPLSLGIETAGGVMTVLIKRNTTIPTKQTQTFTTYSDNQPGVLIQVYEGERAMTKDNNLLGKFELTGIPPAPRGVPQIEVTFDIDANGILNVSAVDKSTGKENKITITNDKGRLSKEDIERMVQEAEKYKAEDEKQRDKVSSKNSLESYAFNMKATVEDEKLQGKINDEDKQKILDKCNEIINWLDKNQTAEKEEFEHQQKELEKVCNPIITKLYQSAGGMPGGMPGGFPGGGAPPSGGASSGPTIEEVD

SEQ ID NO: 4360 - protein, 481 aa, Homo sapiens
MAYNDTDRNQTEKLLKRVRELEQEVQRLKKEQAKNKEDSNIRENSAGAGKTKRAFDFSAHGRRHVALRIAYMGWGYQGFASQENTNNTIEEKLFEALTKTRLVESRQTSNYHRCGRTDKGVSAFGQVISLDLRSQFPRGRDSEDFNVKEEANAAAEEIRYTHILNRVLPPDIRILAWAPVEPSFSARFSCLERTYRYFFPRADLDIVTMDYAAQKYVGTHDFRNLCKMDVANGVINFQRTILSAQVQLVGQSPGEGRWQEPFQLCQFEVTGQAFLYHQVRCMMAILFLIGQGMEKPEIIDELLNIEKNPQKPQYSMAVEFPLVLYDCKFENVKWIYDQEAQEFNITHLQQLWANHAVKTHMLYSMLQGLDTVPVPCGIGPKMDGMTEWGNVKPSVIKQTSAFVEGVKMRTYKPLMDRPKCQGLESRIQHFVRRGRIEHPHLFHEEETKAKRDCNDTLEEENTNLETPTKRVCVDTEIKSII

SEQ ID NO: 4361 - protein, 295 aa, Homo sapiens
MEHQLLCCEVETIRRAYPDANLLNDRVLRAMLKAEETCAPSVSYFKCVQKEVLPSMRKIVATWMLEVCEEQKCEEEVFPLAMNYLDRFLSLEPVKKSRLQLLGATCMFVASKMKETIPLTAEKLCIYTDNSIRPEELLQMELLLVNKLKWNLAAMTPHDFIEHFLSKMPEAEENKQIIRKHAQTFVALCATDVKFISNPPSMVAAGSVVAAVQGLNLRSPNNFLSYYRLTRFLSRVIKCDPDCLRACQEQIEALLESSLRQAQQNMDPKAAEEEEEEEEEVDLACTPTDVRDVDI

SEQ ID NO: 4362 - protein, 360 aa, Homo sapiens
MDTPLRRSRRLGGLRPESPESLTSVSRTRRALVEFESNPEETREPGSPPSVQRAGLGSPERPPKTSPGSPRLQQGAGLESPQGQPEPGAASPQRQQDLHLESPQRQPEYSPESPRCQPKPSEEAPKCSQDQGVLASELAQNKEELTPGAPQHQLPPVPGSPEPYPGQQAPGPEPSQPLLELTPRAPGSPRGQHEPSKPPPAGETVTGGFGAKKRKGSSSQAPASKKLNKEELPVIPKGKPKSGRVWKDRSKKRFSQMLQDKPLRTSWQRKMKERQERKLAKDFARHLEEEKERRRQEKKQRRAENLKRRLENERKAEVVQVIRNPAKLKRAKKKQLRSIEKRDTLALLQKQPPQQPAAKI

SEQ ID NO: 4363 - protein, 148 aa, Homo sapiens
MGRMHAPGKGLSQSALPYRRSVPTWLKLTSDDVKEQIYKLAKKGLTPSQIGVILRDSHGVAQVRFVTGNKILRILKSKGLAPDLPEDLYHLIKKAVAVRKHLERNRKRAGFTVWLDIIRPSESSLPIGNMNHLQPLPWSHKFVCVLKQ

SEQ ID NO: 4364 - protein, 372 aa, Homo sapiens
MSEAGEATTTTTTTLPQAPTEAAAAAPQDPAPKSPVGSGAPQAAAPAPAAHVAGNPGGDAAPAATGTAAAASLATAAGSEDAEKKVLATKVLGTVKWFNVRNGYGFINRNDTKEDVFVHQTAIKKNNPRKYLRSVGDGETVEFDVVEGEKGAEAANVTGPDGVPVEGSRYAADRRRYRRGYYGRRRGPPRNYAGEEEEEGSGSSEGFDPPATDRQFSGARNQLRRPQYRPQYRQRRFPPYHVGQTFDRRSRVLPHPNRIQAGEIGEMKDGVPEGAQLQGPVHRNPTYRPRYRSRGPPRPRPAPAVGEAEDKENQQATSGPNQPSVRRGYRRPYNYRRRPRPPNAPSQDGKEAKAGEAPTENPAPPTQQSSAE

SEQ ID NO: 4365 - protein, 591 aa, Homo sapiens
MDDLDALLADLESTTSHISKRPVFLSEETPYSYPTGNHTYQEIAVPPPVPPPPSSEALNGTILDPLDQWQPSSSRFIHQQPQSSSPVYGSSAKTSSVSNPQDSVGSPCSRVGEEEHVYSFPNKQKSAEPSPTVMSTSLGSNLSELDRLLLELNAVQHNPPGFPADEANSSPPLPGALSPLYGVPETNSPLGGKAGPLTKEKPKRNGGRGLEDVRPSVESLLDELESSVPSPVPAITVNQGEMSSPQRVTSTQQQTRISASSATRELDELMASLSDFKIQGLEQRADGERCWAAGWPRDGGRSSPGGQDEGGFMAQGKTGSSSPPGGPPKPGSQLDSMLGSLQSDLNKLGVATVAKGVCGACKKPIAGQVVTAMGKTWHPEHFVCTHCQEEIGSRNFFERDGQPYCEKDYHNLFSPRCYYCNGPILDKVVTALDRTWHPEHFFCAQCGAFFGPEGFHEKDGKAYCRKDYFDMFAPKCGGCARAILENYISALNTLWHPECFVCRECFTPFVNGSFFEHDGQPYCEVHYHERRGSLCSGCQKPITGRCITAMAKKFHPEHFVCAFCLKQLNKGTFKEQNDKPYCQNCFLKLFC

SEQ ID NO: 4366 - protein, 1005 aa, Homo sapiens
MMSDASDMLAAALEQMDGIIAGSKALEYSNGIFDCQSPTSPFMGSLRALHLVEDLRGLLEMMETDEKEGLRCQIPDSTAETLVEWLQSQMTNGHLPGNGDVYQERLARLENDKESLVLQVSVLTDQVEAQGEKIRDLEFCLEEHREKVNATEEMLQQELLSRTSLETQKLDLMAEISNLKLKLTAVEKDRLDYEDKFRDTEGLIQEINDLRLKVSEMDSERLQYEKKLKSTKDELASLKEQLEEKESEVKRLQEKLVCKMKGEGVEIVDRDENFKKKLKEKNIEVQKMKKAVESLMAANEEKDRKIEDLRQCLNRYKKMQDTVVLAQGKKGKDGEYEELLNSSSISSLLDAQGFSDLEKSPSPTPVMGSPSCDPFNTSVPEEFHTTILQVSIPSLLPATVSMETSEKSKLTPKPETSFEENDGNIILGATVDTQLCDKLLTSSLQKSSSLGNLKKETSDGEKETIQKTSEDRAPAESRPFGTLPPRPPGQDTSMDDNPFGTRKVRSSFGRGFFKIKSNKRTASAPNLDRKRSASAPTLAETEKETAEHLDLAGASSRPKDSQRNSPFQIPPPSPDSKKKSRGIMKLFGKLRRSQSTTFNPDDMSEPEFKRGGTRATAGPRLGWSRDLGQSNSDLDMPFAKWTKEQVCNWLMEQGLGSYLNSGKHWIASGQTLLQASQQDLEKELGIKHSLHRKKLQLALQALGSEEETNHGKLDFNWVTRWLDDIGLPQYKTQFDEGRVDGRMLHYMTVDDLLSLKVVSVLHHLSIKRAIQVLRINNFEPNCLRRRPSDENTIAPSEVQKWTNHRVMEWLRSVDLAEYAPNLRGSGVHGGLMVLEPRFNVETMAQLLNIPPNKTLLRRHLATHFNLLIGAEAQHQKRDAMELPDYVLLTATAKVKPKKLAFSNFGNLRKKKQEDGEEYVCPMELGQASGSASKKGFKPGLDMRLYEEDDLDRLEQMEDSEGTVRQIGAFSEGINNLTHMLKEDDMFKDFAARSPSASITDEDSNV

SEQ ID NO: 4367 - protein, 396 aa, Homo sapiens
MLSEVLLVSAPGKVILHGEHAVVHGKVALAVSLNLRTFLRLQPHSNGKVDLSLPNIGIKRAWDVARLQSLDTSFLEQGDVTTPTSEQVEKLKEVAGLPDDCAVTERLAVLAFLYLYLSICRKQRALPSLDIVVWSELPPGAGLGSSAAYSVCLAAALLTVCEEIPNPLKDGDCVNRWTKEDLELINKWAFQGERMIHGNPSGVDNAVSTWGGALRYHQGKISSLKRSPALQILLTNTKVPRNTRALVAGVRNRLLKFPEIVAPLLTSIDAISLECERVLGEMGEAPAPEQYLVLEELIDMNQHHLNALGVGHASLDQLCQVTRARGLHSKLTGAGGGGCGITLLKPGLEQPEVEATKQALTSCGFDCLETSIGAPGVSIHSATSLDSRVQQALDGL

SEQ ID NO: 4368 - protein, 508 aa, Homo sapiens
MTQTLKYASRVFHRVRWAPELGASLGYREYHSARRSLADIPGPSTPSFLAELFCKGGLSRLHELQVQGAAHFGPVWLASFGTVRTVYVAAPALVEELLRQEGPRPERCSFSPWTEHRRCRQRACGLLTAEGEEWQRLRSLLAPLLLRPQAAARYAGTLNNVVCDLVRRLRRQRGRGTGPPALVRDVAGEFYKFGLEGIAAVLLGSRLGCLEAQVPPDTETFIRAVGSVFVSTLLTMAMPHWLRHLVPGPWGRLCRDWDQMFAFAQRHVERREAEAAMRNGGQPEKDLESGAHLTHFLFREELPAQSILGNVTELLLAGVDTVSNTLSWALYELSRHPEVQTALHSEITAALSPGSSAYPSATVLSQLPLLKAVVKEVLRLYPVVPGNSRVPDKDIHVGDYIIPKNTLVTLCHYATSRDPAQFPEPNSFRPARWLGEGPTPHPFASLPFGFGKRSCMGRRLAELELQMALAQILTHFEVQPEPGAAPVRPKTRTVLVPERSINLQFLDR

SEQ ID NO: 4369 - protein, 352 aa, Homo sapiens
MVRPVRHKKPVNYSQFDHSDSDDDFVSATVPLNKKSRTAPKELKQDKPKPNLNNLRKEEIPVQEKTPKKRLPEGTFSIPASAVPCTKMALDDKLYQRDLEVALALSVKELPTVTTNVQNSQDKSIEKHGSSKIETMNKSPHISNCSVASDYLDLDKITVEDDVGGVQGKRKAASKAAAQQRKILLEGSDGDSANDTEPDFAPGEDSEDDSDFCESEDNDEDFSMRKSKVKEIKKKEVKVKSPVEKKEKKSKSKCNALVTSVDSAPAAVKSESQSLPKKVSLSSDTTRKPLEIRSPSAESKKPKWVPPAASGGSRSSSSPLVVVSVKSPNQSLRLGLSRLARVKPLHPNATST

SEQ ID NO: 4370 - protein, 198 aa, Homo sapiens
MSNVRVSNGSPSLERMDARQAEHPKPSACRNLFGPVDHEELTRDLEKHCRDMEEASQRKWNFDFQNHKPLEGKYEWQEVEKGSLPEFYYRPPRPPKGACKVPAQESQDVSGSRPAAPLIGAPANSEDTHLVDPKTDPSDSQTGLAEQCAGIRKRPATDDSSTQNKRANRTEENVSDGSPNAGSVEQTPKKPGLRRRQT

SEQ ID NO: 4371 - protein, 494 aa, Homo sapiens
MEAMAASTSLPDPGDFDRNVPRICGVCGDRATGFHFNAMTCEGCKGFFRRSMKRKALFTCPFNGDCRITKDNRRHCQACRLKRCVDIGMMKEFILTDEEVQRKREMILKRKEEEALKDSLRPKLSEEQQRIIAILLDAHHKTYDPTYSDFCQFRPPVRVNDGGGSHPSRPNSRHTPSFSGDSSSSCSDHCITSSDMMDSSSFSNLDLSEEDSDDPSVTLELSQLSMLPHLADLVSYSIQKVIGFAKMIPGFRDLTSEDQIVLLKSSAIEVIMLRSNESFTMDDMSWTCGNQDYKYRVSDVTKAGHSLELIEPLIKFQVGLKKLNLHEEEHVLLMAICIVSPDRPGVQDAALIEAIQDRLSNTLQTYIRCRHPPPGSHLLYAKMIQKLADLRSLNEEHSKQYRCLSFQPECSMKLTPLVLEVFGNEISULGQPVAVPGWGCSSRATCQARGWRLLSSPPHPVWGSAPPLPPPLSTQPILSPVQPNPFPAGFSPVP

SEQ ID NO: 4372 - protein, 335 aa, Homo sapiens
MGKVKVGVNGFGRIGRLVTRAAFNSGKVDIVAINDPFIDLNYMVYMFQYDSTHGKFHGTVKAENGKLVINGNPITIFQERDPSKIKWGDAGAEYVVESTGVFTTMEKAGAHLQGGAKRVIISAPSADAPMFVMGVNHEKYDNSLKIISNASCTTNCLAPLAKVIHDNFGIVEGLMTTVHAITATQKTVDGPSGKLWRDGRGALQNIIPASTGAAKAVGKVIPELNGKLTGMAFRVPTANVSVVDLTCRLEKPAKYDDIKKVVKQASEGPLKGILGYTEHQVVSSDFNSDTHSSTFDAGAGIALNDHFVKLISWYDNEFGYSNRVVDLMAHMASKE

SEQ ID NO: 4373 - protein, 243 aa, Homo sapiens
MGSAKSVPVTPARPPPHNKHLARVADPRSPSAGILRTPIQVESSPQPGLPAGEQLEGLKHAQDSDPRSPTLGIARTPMKTSSGEPVLPPEAPLSSELDLPLGTQLSVEEQMPPWNQTEFPSKQVFSKEEARQPTETPVASQSSDKPSRDPETPRSSGSMRNRWKPNSSKVLGRSPLTILQDDNSPGTLTLRQGKRPSPLSENVSELKEGAILGTGRLLKTGGRAWEQGQDHDKENQHFPLVES

SEQ ID NO: 4374 - protein, 286 aa, Homo sapiens
MAEDGEEAEFHFAALYISGQWPRLRADTDLQRLGSSAMAPSRKFFVGGNWKMNGRKQSLGELIGTLNAAKVPADTEVVCAPPTAYIDFARQKLDPKIAVAAQNCYKVTNGAFTGEISPGMIKDCGATWVVLGHSERRHVFGESDELIGQKVAHALAEGLGVIACIGEKLDEREAGITEKVVFEQTKVIADNVKDWSKVVLAYEPVWAIGTGKTATPQQAQEVHEKLRGWLKSNVSDAVAQSTRIIYGGSVTGATCKELASQPDVDGFLVGGASLKPEFVDIINAKQ

SEQ ID NO: 4375 - protein, 447 aa, Homo sapiens
MSRRPCSCALRPPRCSCSASPSAVTAAGRPRPSDSCKEESSTLSVKMKCDFNCNHVHSGLKLVKPDDIGRLVSYTPAYLEGSCKDCIKDYERLSCIGSPIVSPRIVQLETESKRLHNKENQHVQQTLNSTNEIEALETSRLYEDSGYSSFSLQSGLSEHEEGSLLEENFGDSLQSCLLQIQSPDQYPNKNLLPVLHFEKVVCSTLKKNAKRNPKVDREMLKEIIARGNFRLQNIIGRKMGLECVDILSELFRRGLRHVLATILAQLSDMDLINVSKVSTTWKKILEDDKGAFQLYSKAIQRVTENNNKFSPHASTREYVMFRTPLASVQKSAAQTSLKKDAQTKLSNQGDQKGSTYSRHNEFSEVAKTLKKNESLKACIRCNSPAKYDCYLQRATCKREGCGFDYCTKCLCNYHTTKDCSDGKLLKASCKIGPLPGTKKSKKNLRRL

SEQ ID NO: 4376 - protein, 209 aa, Homo sapiens
MNPSMKQKQEEIKENIKNSSVPRRTLKMIQPSASGSLVGRENELSAGLSKRKHRNDHLTSTTSSPGVIVPESSENKNLGGVTQESFDLMIKENPSSQYWKEVAEKRRKALYEALKENEKLHKEIEQKDNEIARLKKENKELAEVAEHVQYMAELIERLNGEPLDNFESLDNQEFDSEEETVEDSLVEDSEIGTCAEGTVSSSTDAKPCI

SEQ ID NO: 4377 - protein, 437 aa, Homo sapiens
MPKFKAARGVGGQEKHAPLADQILAGNAVRAGVREKRRGRGTGEAEEEYVGPRLSRRILQQARQQQEELEAEHGTGDKPAAPRERTTRLGPRMPQDGSDDEDEEWPTLEKAATMTAAGHHAEVVVDPEDERAIEMFMNKNPPARRTLADIIMEKLTEKQTEVETVMSEVSGFPMPQLDPRVLEVYRGVREVLSKYRSGKLPKAFKIIPALSNWEQILYVTEPEAWTAAAMYQATRIFASNLKERMAQRFYNLVLLPRVRDDVAEYKRLNFHLYMALKKALFKPGAWFKGILIPLCESGTCTLREAIIVGSIITKCSIPVLHSSAAMLKIAEMEYSGANSIFLRLLLDKKYALPYRVLDALVFHFLGFRTEKRELPVLWHQCLLTLVQRYKADLATDQKEALLELLRLQPHPQLSPEIRRELQSAVPRDVEDVPITVE

SEQ ID NO: 4378 - protein, 856 aa, Homo sapiens
MESEDLSGRELTIDSIMNKVRDIKNKFKNEDLTDELSLNKISADTTDNSGTVNQIMMMANNPEDWLSLLLKLEKNSVPLSDALLNKLIGRYSQAIEALPPDKYGQNESFARIQVRFAELKAIQEPDDARDYFQMARANCKKFAFVHISFAQFELSQGNVKKSKQLLQKAVERGAVPLEMLEIALRNLNLQKKQLLSEEEKKNLSASTVLTAQESFSGSLGHLQNRNNSCDSRGQTTKARFLYGENMPPQDAEIGYRNSLRQTNKTKQSCPFGRVPVNLLNSPDCDVKTDDSVVPCFMKRQTSRSECRDLVVPGSKPSGNDSCELRNLKSVQNSHFKEPLVSDEKSSELIITDSITLKNKTESSLLAKLEETKEYQEPEVPESNQKQWQSKRKSECINQNPAASSNHWQIPELARKVNTEKHTTFEQPVFSVSKQSPPISTSKWFDPKSICKTPSSNTLDDYMSCFRTPVVKNDFPPACQLSTPYGQPACFQQQQHQILATPLQNLQVLASSSANECISVKGRIYSILKQIGSGGSSKVFQVLNEKKQIYAIKYVNLEEADNQTLDSYRNEIAYLNKLQQHSDKIIRLYDYEITDQYIYMVMECGNIDLNSWLKKKKSIDPWERKSYWKNMLEAVHTIHQHGIVHSDLKPANFLIVDGMLKLIDFGIANQMQPDTTSVVKDSQVGTVNYMPPEAIKDMSSSRENGKSKSKISPKSDVWSLGCILYYMTYGKTPFQQIINQISKLHAIIDPNHEIEFPDIPEKDLQDVLKCCLKRDPKQRISIPELLAHPYVQIQTHPVNQMAKGTTEEMKYVLGQLVGLNSPNSILKAAKTLYEHYSGGESHNSSSSKTFEKKRGKK

SEQ ID NO: 4379 - protein, 298 aa, Homo sapiens
MWGACKVKVHDSLATISITLRRYLRLGATMAKSKFEYVRDFEADDTCLAHCWVVVRLDGRNFHRFAEKHNFAKPNDSRALQLMTKCAQTVMEELEDIVIAYGQSDEYSFVFKRKTNWFKRRASKFMTHVASQFASSYVFYWRDYFEDQPLLYPPGFDGRVVVYPSNQTLKDYLSWRQADCHINNLYNTVFWALIQQSGLTPVQAQGRLQGTLAADKNEILFSEFNINYNNELPMYRKGTVLIWQKVDEVMTKEIKLPTEMEGKKMAVTRTRTKPVPLHCDIIGDAFWKEHPEILDEDS

SEQ ID NO: 4380 - protein, 660 aa, Homo sapiens
MDVLVSECSARLLQQEEEIKSLTAEIDRLKNCGCLGASPNLEQLQEENLKLKYRLNILRKSLQAERNKPTKNMINIISRLQEVFGHAIKAAYPDLENPPLLVTPSQQAKFGDYQCNSAMGISQMLKTKEQKVNPREIAENITKHLPDNECIEKVEIAGPGFINVHLRKDFVSEQLTSLLVNGVQLPALGENKKVIVDFSSPNIAKEMHVGHLRSTIIGESISRLFEFAGYDVLRLNHVGDWGTQFGMLIAHLQDKFPDYLTVSPPIGDLQVFYKESKKRFDTEEEFKKRAYQCVVLLQGKNPDITKAWKLICDVSRQELNKIYDALDVSLIERGESFYQDRMNDIVKEFEDRGFVQVDDGRKIVFVPGCSIPLTIVKSDGGYTYDTSDLAAIKQRLFEEKADMIIYVVDNGQSVHFQTIFAAAQMIGWYDPKVTRVFHAGFGVVLGEDKKKFKTRSGETVRLMDLLGEGLKRSMDKLKEKERDKVLTAEELNAAQTSVAYGCIKYADLSHNRLNDYIFSFDKMLDDRGNTAAYLLYAFTRIRSIARLANIDEEMLQKAARETKILLDHEKEWKLGRCILRFPEILQKILDDLFLHTLCDYIYELATAFTEFYDSCYCVEKDRQTGKILKVNMWRMLLCEAVAAVMAKGFDILGIKPVQRM

SEQ ID NO: 4381 - protein, 469 aa, Homo sapiens
MASPRELTQNPLKKIWMPYSNGRPALHACQRGVCMTNCPTLIVMVGLPARGKTYISKKLTRYLNWIGVPTREFNVGQYRRDVVKTYKSFEFFLPDNEEGLKIRKQCALAALRDVRRFLSEEGGHVAVFDATNTTRERRATIFNFGEQNGYKTFFVESICVDPEVIAANIVQVKLGSPDYVNRDSDEATEDFMRRIECYENSYESLDEDLDRDLSYIKIMDVGQSYVVNRVADHIQSRIVYYLMNIHVTPRSIYLCRHGESELNLKGRIGGDPGLSPRGREFAKSLAQFISDQNIKDLKVWTSQMKRTIQTAEALGVPYEQWKVLNEIDAGVCEEMTYEEIQDNYPLEFALRDQDKYRYRYPKGESYEDLVQRLEPVIMELERQENVLVICHQAVMRCLLAYFLDKAAEQLPYLKCPLHTVLKLTPVAYGCKVESIFLNVAAVNTHRDRPQNVDISRPPEEALVTVPAHQ

SEQ ID NO: 4382 - protein, 280 aa, Homo sapiens
MPADIMEKNSSSPVAATPASVNTTPDKPKTASEHRKSSKPIMEKRRRARINESLSQLKTLILDALKKDSSRHSKLEKADILEMTVKHLRNLQRAQMTAALSTDPSVLGKYRAGFSECMNEVTRFLSTCEGVNTEVRTRLLGHLANCMTQINAMTYPGQPHPALQAPPPPPPGPGGPQHAPFAPPPPLVPIPGGAAPPPGGAPCKLGSQAGEAAKVFGGFQVVPAPDGQFAFLIPNGAFAHSGPVIPVYTSNSGTSVGPNAVSPSSGPSLTADSMWRPWRN

SEQ ID NO: 4383 - protein, 883 aa, Homo sapiens
MAENSVLTSTTGRTSLADSSIFDSKVTEISKENLLIGSTSYVEEEMPQIETRVILVQEAGKQEELIKALKDIKVGFVKMESVEEFEGLDSPEFENVFVVTDFQDSVFNDLYKADCRVIGPPVVLNCSQKGEPLPFSCRPLYCTSMMNLVLCFTGFRKKEELVRLVTLVHHMGGVIRKDFNSKVTHLVANCTQGEKFRVAVSLGTPIMKPEWIYKAWERRNEQDFYAAVDDFRNEFKVPPFQDCILSFLGFSDEEKTNMEEMTEMQGGKYLPLGDERCTHLVVEENIVKDLPFEPSKKLYVVKQEWFWGSIQMDARAGETMYLYEKANTPELKKSVSMLSLNTPNSNRKRRRLKETLAQLSRETDVSPFPPRKRPSAEHSLSIGSLLDISNTPESSINYGDTPKSCTKSSKSSTPVPSKQSARWQVAKELYQTESNYVNILATIIQLFQVPLEEEGQRGGPILAPEEIKTIFGSIPDIFDVHTKIKDDLEDLIVNWDESKSIGDIFLKYSKDLVKTYPPFVNFFEMSKETIIKCEKQKPRFHAFLKINQAKPECGRQSLVELLIRPVQRLPSVALLLNDLKKHTADENPDKSTLEKAIGSLKEVMTHINEDKRKTEAQKQIFDVVYEVDGCPANLLSSHRSLVQRVETISLGEHPCDRGEQVTLFLFNDCLEIARKRHKVIGTFRSPHGQTRPPASLKHIHLMPLSQIKKVLDIRETEDCHNAFALLVRPPTEQANVLLSFQMTSDELPKENWLKMLCRHVANTICKADAENLIYTADPESFEVNTKDMDSTLSRASRAIKKTSKKVTRAFSFSKTPKRALRRALMTSHGSVEGRSPSSNDKHVMSRLSSTSSLAGIPSPSLVSLPSFFERRSHTLSRSTTHLI

SEQ ID NO: 4384 - protein, 475 aa, Homo sapiens
MSATAAARKRGKPASGAGAGAGAGKRRRKADSAGDRGKSKGGGKMNEEISSDSESESLAPRKPEEEEEEELEETAQEKKLRLAKLYLEQLRQQEEEKAEARAFEEDQVAGRLKEDVLEQRGRLQKLVAKEIQAPASADIRVLRGHQLSITCLVVTPDDSAIFSAAKDCSIIKWSVESGRKLHVIPRAKKGAEGKPPGHSSHVLCMAISSDGKYLASGDRSKLILIWEAQSCQHLYTFTGHRDAVSGLAFRRGTHQLYSTSHDRSVKVWNVAENSYVETLFGHQDAVAALDALSRECCVTAGGRDGTVRVWKIPEESQLVFYGHQGSIDCIHLINEEHMVSGADDGSVALWGLSKKRPLALQREAHGLRGEPGLEQPFWISSVAALLNTDLVATGSHSSCVRLWQCGEGFRQLDLLCDIPLVGFINSLKFSSSGDFLVAGVGQEHRLGRWWRIKEARNSVCIIPLRRVPVPPAAGS

SEQ ID NO: 4385 - protein, 314 aa, Homo sapiens
MLVSGRRRLLTVLLQAQKWPFQPSRDMRLVQFRAPHLVGPHLGLETGNGGGVINLNAFDPTLPKTMTQFLEQGEATLSVARRALAAQLPVLPRSEVTFLAPVTRPDKVVCVGMNYVDHCKEQNVPVPKEPIIFSKFASSIVGPYDEVVLPPQSQEVDWEVELAVVIGKKGKHIKATDAMAHVAGFTVAHDVSARDWQMRRNGKQWLLGKTFDTFCPLGPALVTKDSVADPHNLKICCRVNGEVVQSGNTNQMVFKTEDLIAWVSQFVTFYPGDVILTGTPPGVGVFRKPPVFLKKGDEVQCEIEELGVIINKVV

SEQ ID NO: 4386 - protein, 114 aa, Homo sapiens
MGPRRRSRKPEAPRRRSPSPTPTPGPSRRGPSLGASSHQHSRRRQGWLKEIRKLQKSTHLLIRKLPFSRLAAEAFLVHLFEDAYLLTLHAGRVTLFPKDVQLARRIRGLEEGLG

SEQ ID NO: 4387 - protein, 102 aa, Homo sapiens
MAGQAFRKFLPLFDRVLVERSAAETVTKGGIMLPEKSQGKVLQATVVAVGSGSKGKGGEIQPVSVKVGDKVLLPEYGGTKVVLDDKDYFLFRDGDILGKYVD

SEQ ID NO: 4388 - protein, 350 aa, Homo sapiens
MEPKRIREGYLVKKGSVFNTWKPMWVVLLEDGIEFYKKKSDNSPKGMIPLKGSTLTSPCQDFGKRMFVFKITTTKQQDHFFQAAFLEERDAWVRDIKKAIKCIEGGQKFARKSTRRSIRLPETIDLGALYLSMKDTEKGIKELNLEKDKKIFNHCFTGNCVIDWLVSNQSVRNRQEGLMIASSLLNEGYLQPAGDMSKSAVDGTAENPFLDNPDAFYYFPDSGFFCEENSSDDDVILKEEFRGVIIKQGCLLKQGHRRKNWKVRKFILREDPAYLHYYDPAGAEDPLGAIHLRGCVVTSVESNSNGRKSEEENLFEIITADEVHYFLQAATPKERTEWIRAIQMASRTGK

SEQ ID NO: 4389 - protein, 261 aa, Homo sapiens
MEGGLGRAVCLLTGASRGFGRTLAPLLASLLSPGSVLVLSARNDEALRQLEAELGAERSGLRVVRVPADLGAEAGLQQLLGALRELPRPKGLQRLLLINNAGSLGDVSKGFVDLSDSTQVNNYWALNLTSMLCLTSSVLKAFPDSPGLNRTVVNISSLCALQPFKGWALYCAGKAARDMLFQVLALEEPNVRVLNYAPGPLDTDMQQLARETSVDPDMRKGLQELKAKGKLVDCKVSAQKLLSLLEKDEFKSGAHVDFYDK

SEQ ID NO: 4390 - protein, 434 aa, Homo sapiens
MSILKIHAREIFDSRGNPTVEVDLFTSKGLFRAAVPSGASTGIYEALELRDNDKTRYMGKGVSKAVEHINKTIAPALVSKKLNVTEQEKIDKLMIEMDGTENKSKFGANAILGVSLAVCKAGAVEKGVPLYRHIADLAGNSEVILPVPAFNVINGGSHAGNKLAMQEFMILPVGAANFREAMRIGAEVYHNLKNVIKEKYGKDATNVGDEGGFAPNILENKEGLELLKTAIGKAGYTDKVVIGMDVAASEFFRSGKYDLDFKSPDDPSRYISPDQLADLYKSFIKDYPVVSIEDPFDQDDWGAWQKFTASAGIQVVGDDLTVTNPKRIAKAVNEKSCNCLLLKVNQIGSVTESLQACKLAQANGWGVMVSHRSGETEDTFIADLVVGLCTGQIKTGAPCRSERLAKYNQLLRIEEELGSKAKFAGRNFRNPLAK

SEQ ID NO: 4391 - protein, 121 aa, Homo sapiens
MGCASAKHVATVQNEEEAQKGKNYQNGDVFGDEYRIKPVEEVKYMKNGAEEEQKIAARNQENLEKSASSNVRLKTNKEVPGLVHQPRANMHISESQQEFFRMLDEKIEKGRDYCSEEEDIT

SEQ ID NO: 4392 - protein, 211 aa, Homo sapiens
MQSAMFLAVQHDCRPMDKSAGSGHKSEEKREKMKRTLLKDWKTRLSYFLQNSSTPGKPKTGKKSKQQAFIKPSPEEAQLWSEAFDELLASKYGLAAFRAFLKSEFCEENIEFWLACEDFKKTKSPQKLSSKARKIYTDFIEKEAPKEINIDFQTKTLIAQNIQEATSGCFTTAQKRVYSLMENNSYPRFLESEFYQDLCKKPQITTEPHAT

SEQ ID NO: 4393 - protein, 181 aa, Homo sapiens
MLLEPGRGCCALAILLAIVDIQSGGCINITSSASQEGTRLNLICTVWHKKEEAEGFVVFLCKDRSGDCSPETSLKQLRLKRDPGIDGVGEISSQLMFTISQVTPLHSGTYQCCARSQKSGIRLQGHFFSILFTETGNYTVTGLKQRQHLEFSHNEGTLSSGFLQEKVWVMLVTSLVALQAL

SEQ ID NO: 4394 - protein, 306 aa, Homo sapiens
MDTPPLSDSESESDESLVTDRELQDAFSRGLLKPGLNVVLEGPKKAVNDVNGLKQCLAEFKRDLEWVERLDVTLGPVPEIGGSEAPAPQNKDQKAVDPEDDFQREMSFYRQAQAAVLAVLPRLHQLKVPTKRPTDYFAEMAKSDLQMQKIRQKLQTKQAAMERSEKAKQLRALRKYGKKVQTEVLQKRQQEKAHMMNAIKKYQKGFSDKLDFLEGDQKPLAQRKKAGAKGQQMRKGPSAKRRYKNQKFGFGGKKKGSKWNTRESYDDVSSFRAKTAHGRGLKRPGKKGSNKRPGKRTREKMKNRTH

SEQ ID NO: 4395 - protein, 225 aa, Homo sapiens
MGFGDLKSPAGLQVLNDYLADKSYIEGYVPSQADVAVFEAVSSPPPADLCHALRWYNHIKSYEKEKASLPGVKKALGKYGPADVEDTTGSGATDSKDDDDIDLFGSDDEEESEEAKRLREERLAQYESKKAKKPALVAKSSILLDVKPWDDETDMAKLEECVRSIQADGLVWGSSKLVPVGYGIKKLQIQCVVEDDKVGTDMLEEQITAFEDYVQSMDVAAFNKI

SEQ ID NO: 4396 - protein, 191 aa, Homo sapiens
MEAKAAPKPAASGACSVSAEETEKWMEEAMHMAKEALENTEVPVGCLMVYNNEVVGKGRNEVNQTKNATRHAEMVAIDQVLDWCRQSGKSPSEVFEHTVLYVTVEPCIMCAAALRLMKIPLVVYGCQNERFGGCGSVLNIASADLPNTGRPFQCIPGYRAEEAVEMLKTFYKQENPNAPKSKVRKKECQKS

SEQ ID NO: 4397 - protein, 790 aa, Homo sapiens
MAEQVLPQALYLSNMRKAVKIRERTPEDIFKPTNGIIHHFKTMHRYTLEMFRTCQFCPQFREIIHKALIDRNIQATLESQKKLNWCREVRKLVALKTNGDGNCLMHATSQYMWGVQDTDLVLRKALFSTLKETDTRNFKFRWQLESLKSQEFVETGLCYDTRNWNDEWDNLIKMASTDTPMARSGLQYNSLEEIHIFVLCNILRRPIIVISDKMLRSLESGSNFAPLKVGGIYLPLHWPAQECYRYPIVLGYDSHHFVPLVTLKDSGPEIRAVPLVNRDRGRFEDLKVHFLTDPENEMKEKLLKEYLMVIEIPVQGWDHGTTHLINAAKLDEANLPKEINLVDDYFELVQHEYKKWQENSEQGRREGHAQNPMEPSVPQLSLMDVKCETPNCPFFMSVNTQPLCHECSERRQKNQNKLPKLNSKPGPEGLPGMALGASRGEAYEPLAWNPEESTGGPHSAPPTAPSPFLFSETTAMKCRSPGCPFTLNVQHNGFCERCHNARQLHASHAPDHTRHLDPGKCQACLQDVTRTFNGICSTCFKRTTAEASSSLSTSLPPSCHQRSKSDPSRLVRSPSPHSCHRAGNDAPAGCLSQAARTPGDRTGTSKCRKAGCVYFGTPENKGFCTLCFIEYRENKHFAAASGKVSPTASRFQNTIPCLGRECGTLGSTMFEGYCQKCFIEAQNQRFHEAKRTEEQLRSSQRRDVPRTTQSTSRPKCARASCKNILACRSEELCMECQHPNQRMGPGAHRGEPAPEDPPKQRCRAPACDHFGNAKCNGYCNECFQFKQMYG

SEQ ID NO: 4398 - protein, 431 aa, Homo sapiens
MTVKTEAAKGTLTYSRMRGMVAILIAFMKQRRMGLNDFIQKIANNSYACKHPEVQSILKISQPQEPELMNANPSPPPSPSQQINLGPSSNPHAKPSDFHFLKVIGKGSFGKVLLARHKAEEVFYAVKVLQKKAILKKKEEKHIMSERNVLLKNVKHPFLVGLHFSFQTADKLYFVLDYINGGELFYHLQRERCFLEPRARFYAAEIASALGYLHSLNIVYRDLKPENILLDSQGHIVLTDFGLCKENIEHNSTTSTFCGTPEYLAPEVLHKQPYDRTVDWWCLGAVLYEMLYGLPPFYSRNTAEMYDNILNKPLQLKPNITNSARHLLEGLLQKDRTKRLGAKDDFMEIKSHVFFSLINWDDLINKKITPPFNPNVSGPNDLRHFDPEFTEEPVPNSIGKSPDSVLVTASVKEAAEAFLGFSYAPPTDSFL

SEQ ID NO: 4399 - protein, 377 aa, Homo sapiens
MKFPGPLENQRLSFLLEKAITREAQMWKVNVRKMPSNQNVSPSQRDEVIQWLAKLKYQFNLYPETFALASSLLDRFLATVKAHPKYLSCIAISCFFLAAKTVEEDERIPVLKVLARDSFCGCSSSEILRMERIILDKLNWDLHTATPLDFLHIFHAIAVSTRPQLLFSLPKLSPSQHLAVLTKQLLHCMACNQLLQFRGSMLALAMVSLEMEKLIPDWLSLTIELLQKAQMDSSQLIHCRELVAHHLSTLQSSLPLNSVYVYRPLKHTLVTCDKGVFRLHPSSVPGPDFSKDNSKPEVPVRGTAAFYHHLPAASGCKQTSTKRKVEEMEVDDFYDGIKRLYNEDNVSENVGSVCGTDLSRQEGHASPCPPLQPVSVM

SEQ ID NO: 4400 - protein, 518 aa, Homo sapiens
MECDLMETDILESLEDLGYKGPLLEDGALSQAVSAGASSPEFTKLCAWLVSELRVLCKLEENVQATNSPSEAEEFQLEVSGLLGEMNCPYLSLTSGDVTKRLLIQKNCLLLLTYLISELEAARMLCVNAPPKKAQEGGGSEVFQELKGICIALGMSKPPANITMFQFFSGIEKKLKETLAKVPPNHVGKPLLKKPMGPAHWEKIEAINQAIANEYEVRRKLLIKRLDVTVQSFGWSDRAKSQTEKLAKVYQPKRSVLSPKTTISVAHLLAARQDLSKILRTSSGSIREKTACAINKVLMGRVPDRGGRPNEIEPPPPEMPPWQKRQDGPQQQTGGRGGGRGGYEHSSYGGRGGHEQGGGRGGRGGYDHGGRGGGRGNKHQGGWTDGGSGGGGGYQDGGYRDSGFQPGGYHGGHSSGGYQGGGYGGFQTSSSYTGSGYQGGGYQQDNRYQDGGHHGDRGGGRGGRGGRGGRGGRAGQGGGWGGRGSQNYHQGGQFEQHFQHGGYQYNHSGFGQGRHYTS

SEQ ID NO: 4401 - protein, 714 aa, Homo sapiens
MRKKRGREDESYNISEVMSKEEILSVAKKNKKENEDENSSSTNLCVEDLQKNKDSNSIIKDRLSETVRQNTKFFFDPVRKCNGQPVPFQQPKHFTGGVMRWYQVEGMEWLRMLWENGINGILADEMGLGKTVQCIATIALMIQRGVPGPFLVCGPLSTLPNWMAEFKRFTPDIPTMLYHGTQEERQKLVRNIYKRKGTLQIHPVVITSFEIAMRDRNALQHCYWKYLIVDEGHRIKNMKCRLIRELKRFNADNKLLLTGTPLQNNLSELWSLLNFLLPDVFDDLKSFESWFDITSLSETAEDIIAKEREQNVLHMLHQILTPFLLRRLKSDVALEVPPKREVVVYAPLSKKQEIFYTAIVNRTIANMFGSSEKETIELSPTGRPKRRTRKSINYSKIDDFPNELEKLISQIQPEVDRERAVVEVNIPVESEVNLKLQNIMMLLRKCCNHPYLIEYPIDPVTQEFKIDEELVTNSGKFLILDRMLPELKKRGHKVLLFSQMTSMLDILMDYCHLRDFNFSRLDGSMSYSEREKNMHSFNTDPEVFIFLVSTRAGGLGINLTAADTVIIYDSDWNPQSDLQAQDRCHRIGQTKPVVVYRLVTANTIDQKIVERAAAKRKLEKLIIHKNHFKGGQSGLNLSKNFLDPKELMELLKSRDYEREIKGSREKVISDKDLELLLDRSDLIDQMNASGPIKEKMGIFKILENSEDSSPECLF

SEQ ID NO: 4402 - protein, 838 aa, Homo sapiens
MPAERPAGSGGSEAPAMVEQLDTAVITPAMLEEEEQLEAAGLERERKMLEKARMSWDRESTEIRYRRLQHLLEKSNIYSKFLLTKMEQQQLEEQKKKEKLERKKESLKVKKGKNSIDASEEKPVMRKKRGREDESYNISEVMSKEEILSVAKKNKKENEDENSSSTNLCVEDLQKNKDSNSIIKDRLSETVRQNTKFFFDPVRKCNGQPVPFQQPKHFTGGVMRWYQVEGMEWLRMLWENGINGILADEMGLGKTVQCIATIALMIQRGVPGPFLVCGPLSTLPNWMAEFKRFTPDIPTMLYHGTQEERQKLVRNIYKRKGTLQIHPVVITSFEIAMRDRNALQHCYWKYLIVDEGHRIKNMKCRLIRELKRFNADNKLLLTGTPLQNNLSELWSLLNFLLPDVFDDLKSFESWFDITSLSETAEDIIAKEREQNVLHMLHQILTPFLLRRLKSDVALEVPPKREVVVYAPLSKKQEIFYTAIVNRTIANMFGSSEKETIELSPTGRPKRRTRKSINYSKIDDFPNELEKLISQIQPEVDRERAVVEVNIPVESEVNLKLQNIMMLLRKCCNHPYLIEYPIDPVTQEFKIDEELVTNSGKFLILDRMLPELKKRGHKVLLFSQMTSMLDILMDYCHLRDFNFSRLDGSMSYSEREKNMHSFNTDPEVFIFLVSTRAGGLGINLTAADTVIIYDSDWNPQSDLQAQDRCHRIGQTKPVVVYRLVTANTIDQKIVERAAAKRKLEKLIIHKNHFKGGQSGLNLSKNFLDPKELMELLKSRDYEREIKGSREKVISDKDLELLLDRSDLIDQMNASGPIKEKMGIFKILENSEDSSPECLF

SEQ ID NO: 4403 - protein, 367 aa, Homo sapiens
MVMEVGTLDAGGLRALLGERAAQCLLLDCRSFFAFNAGHIAGSVNVRFSTIVRRRAKGAMGLEHIVPNAELRGRLLAGAYHAVVLLDERSAALDGAKRDGTLALAAGALCREARAAQVFFLKGGYEAFSASCPELCSKQSTPMGLSLPLSTSVPDSAESGCSSCSTPLYDQGGPVEILPFLYLGSAYHASRKDMLDALGITALINVSANCPNHFEGHYQYKSIPVEDNHKADISSWFNEAIDFIDSIKNAGGRVFVHCQAGISRSATICLAYLMRTNRVKLDEAFEFVKQRRSIISPNFSFMGQLLQFESQVLAPHCSAEAGSPAMAVLDRGTSTTTVFNFPVSIPVHSTNSALSYLQSPITTSPSC

SEQ ID NO: 4404 - protein, 543 aa, Homo sapiens
MAAAKAEMQLMSPLQISDPFGSFPHSPTMDNYPKLEEMMLLSNGAPQFLGAAGAPEGSGSNSSSSSSGGGGGGGGGSNSSSSSSTFNPQADTGEQPYEHLTAESFPDISLNNEKVLVETSYPSQTTRLPPITYTGRFSLEPAPNSGNTLWPEPLFSLVSGLVSMTNPPASSSSAPSPAASSASASQSPPLSCAVPSNDSSPIYSAAPTFPTPNTDIFPEPQSQAFPGSAGTALQYPPPAYPAAKGGFQVPMIPDYLFPQQQGDLGLGTPDQKPFQGLESRTQQPSLTPLSTIKAFATQSGSQDLKALNTSYQSQLIKPSRMRKYPNRPSKTPPHERPYACPVESCDRRFSRSDELTRHIRIHTGQKPFQCRICMRNFSRSDHLTTHIRTHTGEKPFACDICGRKFARSDERKRHTKIHLRQKDKKADKSVVASSATSSLSSYPSPVATSYPSPVTTSYPSPATTSYPSPVPTSFSSPGSSTYPSPVHSGFPSPSVATTYSSVPPAFPAQVSSFPSSAVTNSFSASTGLSDMTATFSPRTIEIC

SEQ ID NO: 4405 - protein, 394 aa, Homo sapiens
MVTMEELREMDCSVLKRLMNRDENGGGAGGSGSHGTLGLPSGGKCLLLDCRPFLAHSAGYILGSVNVRCNTIVRRRAKGSVSLEQILPAEEEVRARLRSGLYSAVIVYDERSPRAESLREDSTVSLVVQALRRNAERTDICLLKGGYERFSSEYPEFCSKTKALAAIPPPVPPSATEPLDLGCSSCGTPLHDQGGPVEILPFLYLGSAYHAARRDMLDALGITALLNVSSDCPNHFEGHYQYKCIPVEDNHKADISSWFMEAIEYIDAVKDCRGRVLVHCQAGISRSATICLAYLMMKKRVRLEEAFEFVKQRRSIISPNFSFMGQLLQFESQVLATSCAAEAASPSGPLRERGKTPATPTSQFVFSFPVSVGVHSAPSSLPYLHSPITTSPSC

SEQ ID NO: 4406 - protein, 303 aa, Homo sapiens
MGRKVHSNGSQFAEHSRSPRRTGRDCKPVRAPSMALGVSQLAGRSRCLCSESQGGYERFSSEYPEFCSKTKALAAIPPPVPPSATEPLDLGCSSCGTPLHDQGGPVEILPFLYLGSAYHAARRDMLDALGITALLNVSSDCPNHFEGHYQYKCIPVEDNHKADISSWFMEAIEYIDAVKDCRGRVLVHCQAGISRSATICLAYLMMKKRVRLEEAFEFVKQRRSIISPNFSFMGQLLQFESQVLATSCAAEAASPSGPLRERGKTPATPTSQFVFSFPVSVGVHSAPSSLPYLHSPITTSPSC

SEQ ID NO: 4407 - protein, 741 aa, Homo sapiens
MGPPGPALPATMNNSSSETRGHPHSASSPSERVFPMPLPRKAPLNIPGTPVLEDFPQNDDEKERLQRRRSRVFDLQFSTDSPRLLASPSSRSIDISATIPKFTNTQITEHYSTCIKLSTENKITTKNAFGLHLIDFMSEILKQKDTEPTNFKVAAGTLDASTKIYAVRVDAVHADVYRVLGGLGKDAPSLEEVEGHVADGSATEMGTTKKAVKPKKKHLHRTIEQNINNLNVSEADRKCEIDPMFQKTAASFDECSTAGVFLSTLHCQDYRSELLFPSDVQTLSTGEPLELPELGCVEMTDLKAPLQQCAEDRQICPSLAGFQFTQWDSETHNESVSALVDKFKKNDQVFDINAEVDESDCGDFPDGSLGDDFDANDEPDHTAVGDHEEFRSWKEPCQVQSCQEEMISLGDGDIRTMCPLLSMKPGEYSYFSPRTMSMWAGPDHWRFRPRRKQDAPSQSENKKKSTKKDFEIDFEDDIDFDVYFRKTKAATILTKSTLENQNWRATTLPTDFNYNVDTLVQLHLKPGTRLLKMAQGHRVETEHYEEIEDYDYNNPNDTSNFCPGLQAADSDDEDLDDLFVGPVGNSDLSPYPCHPPKTAQQNGDTPEAQGLDITTYGESNLVAEPQKVNKIEIHYAKTAKKMDMKKLKQSMWSLLTALSGKEADAEANHREAGKEAALAEVADEKMLSGLTKDLQRSLPPVMAQNLSIPLAFACLLHLANEKNLKLEGTEDLSDVLVRQGD

SEQ ID NO: 4408 - protein, 205 aa, Homo sapiens
MSKKKGLSAEEKRTRMMEIFSETKDVFQLKDLEKIAPKEKGITAMSVKEVLQSLVDDGMVDCERIGTSNYYWAFPSKALHARKHKLEVLESQLSEGSQKHASLQKSIEKAKIGRCETEERTRLAKELSSLRDQREQLKAEVEKYKDCDPQVVEEIRQANKVAKEAANRWTDNIFAIKSWAKRKFGFEENKIDRTFGIPEDFDYID

SEQ ID NO: 4409 - protein, 242 aa, Homo sapiens
MRPLSMSGHFLLAPIPESSSDYLLPKDIKLAVLGAGRVGKSAMIVRFLTKRFIGDYEPNTGKLYSRLVYVEGDQLSLQIQDTPGGVQIQDSLPQVVDSLSKCVQWAEGFLLVYSITDYDSYLSIRPLYQHIRKVHPDSKAPVIIVGNKGDLLHARQVQTQDGIQLANELGSLFLEISTSENYEDVCDVFQHLCKEVSKMHGLSGERRRASIIPRPRSPNMQDLKRRFKQALSPKVKAPSALG

SEQ ID NO: 4410 - protein, 476 aa, Homo sapiens
MMTAKAVDKIPVTLSGFVHQLSDNIYPVEDLAATSVTIFPNAELGGPFDQMNGVAGDGMINIDMTGEKRSLDLPYPSSFAPVSAPRNQTFTYMGKFSIDPQYPGASCYPEGIINIVSAGILQGVTSPASTTASSSVTSASPNPLATGPLGVCTMSQTQPDLDHLYSPPPPPPPYSGCAGDLYQDPSAFLSAATTSTSSSLAYPPPPSYPSPKPATDPGLFPMIPDYPGFFPSQCQRDLHGTAGPDRKPFPCPLDTLRVPPPLTPLSTIRNFTLGGPSAGVTGPGASGGSEGPRLPGSSSAAAAAAAAAAYNPHHLPLRPILRPRKYPNRPSKTPVHERPYPCPAEGCDRRFSRSDELTRHIRIHTGHKPFQCRICMRNFSRSDHLTTHIRTHTGEKPFACDYCGRKFARSDERKRHTKIHLRQKERKSSAPSASVPAPSTASCSGGVQPGGTLCSSNSSSLGGGPLAPCSSRTRTP

SEQ ID NO: 4411 - protein, 427 aa, Homo sapiens
MAEQDVENDLLDYDEEEEPQAPQESTPAPPKKDIKGSYVSIHSSGFRDFLLKPELLRAIVDCGFEHPSEVQHECIPQAILGMDVLCQAKSGMGKTAVFVLATLQQIEPVNGQVTVLVMCHTRELAFQISKEYERFSKYMPSVKVSVFFGGLSIKKDEEVLKKNCPHVVVGTPGRILALVRNRSFSLKNVKHFVLDECDKMLEQLDMRRDVQEIFRLTPHEKQCMMFSATLSKDIRPVCRKFMQDPMEVFVDDETKLTLHGLQQYYVKLKDSEKNRKLFDLLDVLEFNQVIIFVKSVQRCMALAQLLVEQNFPAIAIHRGMAQEERLSRYQQFKDFQRRILVATNLFGRGMDIERVNIVFNYDMPEDSDTYLHRVARAGRFGTKGLAITFVSDENDAKILNDVQDRFEVNVAELPEEIDISTYIEQSR

SEQ ID NO: 4412 - protein, 127 aa, Homo sapiens
MSQGLPAAGSVLQRSVAAPGNQPQPQPQQQSPEDDDRKVRRREKNRVAAQRSRKKQTQKADKLHEEYESLEQENTMLRREIGKLTEELKHLTEALKEHEKMCPLLLCPMNFVPVPPRPDPVAGCLPR

SEQ ID NO: 4413 - protein, 775 aa, Homo sapiens
MRASLLLSVLRPAGPVAVGISLGFTLSLLSVTWVEEPCGPGPPQPGDSELPPRGNTNAARRPNSVQPGAEREKPGAGEGAGENWEPRVLPYHPAQPGQAAKKAVRTRYISTELGIRQRLLVAVLTSQTTLPTLGVAVNRTLGHRLERVVFLTGARGRRAPPGMAVVTLGEERPIGHLHLALRHLLEQHGDDFDWFFLVPDTTYTEAHGLARLTGHLSLASAAHLYLGRPQDFIGGEPTPGRYCHGGFGVLLSRMLLQQLRPHLEGCRNDIVSARPDEWLGRCILDATGVGCTGDHEGVHYSHLELSPGEPVQEGDPHFRSALTAHPVRDPVHMYQLHKAFARAELERTYQEIQELQWEIQNTSHLAVDGDQAAAWPVGIPAPSRPASRFEVLRWDYFTEQHAFSCADGSPRCPLRGADRADVADVLGTALEELNRRYHPALRLQKQQLVNGYRRFDPARGMEYTLDLQLEALTPQGGRRPLTRRVQLLRPLSRVEILPVPYVTEASRLTVLLPLAAAERDLAPGFLEAFATAALEPGDAAAALTLLLLYEPRQAQRVAHADVFAPVKAHVAELERRFPGARVPWLSVQTAAPSPLRLMDLLSKKHPLDTLFLLAGPDTVLTPDFLNRCRMHAISGWQAFFPMHFQAFHPAVAPPQGPGPPELGRDTGRFDRQAASEACFYNSDYVAARGRLAAASEQEEELLESLDVYELFLHFSSLHVLRAVEPALLQRYRAQTCSARLSEDLYHRCLQSVLEGLGSRTQLAMLLFEQEQGNST

SEQ ID NO: 4414 - protein, 50 aa, Homo sapiens
MASQNRDPAATSVAAARKGAEPSGGAARGPVGKRLQQELMTLMNPTLIVP

SEQ ID NO: 4415 - protein, 5171 aa, Homo sapiens
MHSSSYSYRSSDSVFSNTTSTRTSLDSNENLLLVHCGPTLINSCISFGSESFDGHRLEMLQQIANRVQRDSVICEDKLILAGNALQSDSKRLESGVQFQNEAEIAGYILECENLLRQHVIDVQILIDGKYYQADQLVQRVAKLRDEIMALRNECSSVYSKGRILTTEQTKLMISGITQSLNSGFAQTLHPSLTSGLTQSLTPSLTSSSMTSGLSSGMTSRLTPSVTPAYTPGFPSGLVPNFSSGVEPNSLQTLKLMQIRKPLLKSSLLDQNLTEEEINMKFVQDLLNWVDEMQVQLDRTEWGSDLPSVESHLENHKNVHRAIEEFESSLKEAKISEIQMTAPLKLTYAEKLHRLESQYAKLLNTSRNQERHLDTLHNFVSRATNELIWLNEKEEEEVAYDWSERNTNIARKKDYHAELMRELDQKEENIKSVQEIAEQLLLENHPARLTIEAYRAAMQTQWSWILQLCQCVEQHIKENTAYFEFFNDAKEATDYLRNLKDAIQRKYSCDRSSSIHKLEDLVQESMEEKEELLQYKSTIANLMGKAKTIIQLKPRNSDCPLKTSIPIKAICDYRQIEITIYKDDECVLANNSHRAKWKVISPTGNEAMVPSVCFTVPPPNKEAVDLANRIEQQYQNVLTLWHESHINMKSVVSWHYLINEIDRIRASNVASIKTMLPGEHQQVLSNLQSRFEDFLEDSQESQVFSGSDITQLEKEVNVCKQYYQELLKSAEREEQEESVYNLYISEVRNIRLRLENCEDRLIRQIRTPLERDDLHESVFRITEQEKLKKELERLKDDLGTITNKCEEFFSQAAASSSVPTLRSELNVVLQNMNQVYSMSSTYIDKLKTVNLVLKNTQAAEALVKLYETKLCEEEAVIADKNNIENLISTLKQWRSEVDEKRQVFHALEDELQKAKAISDEMFKTYKERDLDFDWHKEKADQLVERWQNVHVQIDNRLRDLEGIGKSLKYYRDTYHPLDDWIQQVETTQRKIQENQPENSKTLATQLNQQKMLVSEIEMKQSKMDECQKYAEQYSATVKDYELQTMTYRAMVDSQQKSPVKRRRMQSSADLIIQEFMDLRTRYTALVTLMTQYIKFAGDSLKRLEEEEKSLEEEKKEHVEKAKELQKWVSNISKTLKDAEKAGKPPFSKQKISSEEISTKKEQLSEALQTIQLFLAKHGDKMTDEERNELEKQVKTLQESYNLLFSESLKQLQESQTSGDVKVEEKIVAERQQEYKEKLQGICDLLTQTENRLIGHQEAFMIGDGTVELKKYQSKQEELQKDMQGSAQALAEVVKNTENFLKENGEKLSQEDKALIEQKLNEAKIKCEQLNLKAEQSKKELDKVVTTAIKEETEKVAAVKQLEESKTKIENLLDWLSNVDKDSERAGTKHKQVIEQNGTHFQEGDGKSAIGEEDEVNGNLLETDVDGQVGTTQENLNQQYQKVKAQHEKIISQHQAVIIATQSAQVLLEKQGQYLSPEEKEKLQKNMKELKVHYETALAESEKKMKLTHSLQEELEKFDADYTEFEHWLQQSEQELENLEAGADDINGLMTKLKRQKSFSEDVISHKGDLRYITISGNRVLEAAKSCSKRDGGKVDTSATHREVQRKLDHATDRFRSLYSKCNVLGNNLKDLVDKYQHYEDASCGLLAGLQACEATASKHLSEPIAVDPKNLQRQLEETKALQGQISSQQVAVEKLKKTAEVLLDARGSLLPAKNDIQKTLDDIVGRYEDLSKSVNERNEKLQITLTRSLSVQDGLDEMLDWMGNVESSLKEQGQVPLNSTALQDIISKNIMLEQDIAGRQSSINAMNEKVKKFMETTDPSTASSLQAKMKDLSARFSEASHKHKETLAKMEELKTKVELFENLSEKLQTFLETKTQALTEVDVPGKDVTELSQYMQESTSEFLEHKKHLEVLHSLLKEISSHGLPSDKALVLEKTNNLSKKFKEMEDTIKEKKEAVTSCQEQLDAFQVLVKSLKSWIKETTKKVPIVQPSFGAEDLGKSLEDTKKLQEKWSLKTPEIQKVNNSGISLCNLISAVTTPAKAIAAVKSGGAVLNGEGTATNTEEFWANKGLTSIKKDMTDISHGYEDLGLLLKDKIAELNTKLSKLQKAQEESSAMMQWLQKMNKTATKWQQTPAPTDTEAVKTQVEQNKSFEAELKQNVNKVQELKDKLTELLEENPDTPEAPRWKQMLTEIDSKWQELNQLTIDRQQKLEESSNNLTQFQTVEAQLKQWLVEKELMVSVLGPLSIDPNMLNTQRQQVQILLQEFATRKPQYEQLTAAGQGILSRPGEDPSLRGIVKEQLAAVTQKWDSLTGQLSDRCDWIDQAIVKSTQYQSLLRSLSDKLSDLDNKLSSSLAVSTHPDAMNQQLETAQKMKQEIQQEKKQIKVAQALCEDLSALVKEEYLKAELSRQLEGILKSFKDVEQKAENHVQHLQSACASSHQFQQMSRDFQAWLDTKKEEQNKSHPISAKLDVLESLIKDHKDFSKTLTAQSHMYEKTIAEGENLLLKTQGSEKAALQLQLNTIKTNWDTFNKQVKERENKLKESLEKALKYKEQVETLWPWIDKCQNNLEEIKFCLDPAEGENSIAKLKSLQKEMDQHFGMVELLNNTANSLLSVCEIDKEVVTDENKSLIQKVDMVTEQLHSKKFCLENMTQKFKEFQEVSKESKRQLQCAKEQLDIHDSLGSQAYSNKYLTMLQTQQKSLQALKHQVDLAKRLAQDLVVEASDSKGTSDVLLQVETIAQEHSTLSQQVDEKCSFLETKLQGIGHFQNTIREMFSQFAEFDDELDSMAPVGRDAETLQKQKETIKAFLKKLEALMASNDNANKTCKMMLATEETSPDLVGIKRDLEALSKQCNKLLDRAQAREEQVEGTIKRLEEFYSKLKEFSILLQKAEEHEESQGPVGMETETINQQLNMFKVFQKEEIEPLQGKQQDVNWLGQGLIQSAAKSTSTQGLEHDLDDVNARWKTLNKKVAQRAAQLQEALLHCGRFQDALESLLSWMVDTEELVANQKPPSAEFKVVKAQIQEQKLLQRLLDDRKSTVEVIKREGEKIATTAEPADKVKILKQLSLLDSRWEALLNKAETRNRQLEGISVVAQQFHETLEPLNEWLTTIEKRLVNCEPIGTQASKLEEQIAQHKALEDDIINHNKHLHQAVSIGQSLKVLSSREDKDMVQSKLDFSQVWYIEIQEKSHSRSELLQQALCNAKIFGEDEVELMNWLNEVHDKLSKLSVQDYSTEGLWKQQSELRVLQEDILLRKQNVDQALLNGLELLKQTTGDEVLIIQDKLEAIKARYKDITKLSTDVAKTLEQALQLARRLHSTHEELCTWLDKVEVELLSYETQVLKGEEASQAQMRPKELKKEAKNNKALLDSLNEVSSALLELVPWRAREGLEKMVAEDNERYRLVSDTITQKVEEIDAAILRSQQFDQAADAELSWITETEKKLMSLGDIRLEQDQTSAQLQVQKTFTMEILRHKDIIDDLVKSGHKIMTACSEEEKQSMKKKLDKVLKNYDTICQINSERYLQLERAQSLVNQFWETYEELWPWLTETQSIISQLPAPALEYETLRQQQEEHRQLRELIAEHKPHIDKMNKTGPQLLELSPGEGFSIQEKYVAADTLYSQIKEDVKKRAVALDEAISQSTQFHDKIDQILESLERIVERLRQPPSISAEVEKIKEQISENKNVSVDMEKLQPLYETLKQRGEEMIARSGGTDKDISAKAVQDKLDQMVFIWENIHTLVEEREAKLLDVMELAEKFWCDHMSLIVTIKDTQDFIRDLEDPGIDPSVVKQQQEAAETIREEIDGLQEELDIVINLGSELIAACGEPDKPIVKKSIDELNSAWDSLNKAWKDRIDKLEEAMQAAVQYQDGLQAVFDWVDIAGGKLASMSPIGTDLETVKQQIEELKQFKSEAYQQQIEMERLNHQAELLLKKVTEESDKHTVQDPLMELKLIWDSLEERIINRQHKLEGALLALGQFQHALDELLAWLTHTEGLLSEQKPVGGDPKAIEIELAKHHVLQNDVLAHQSTVEAVNKAGNDLIESSAGEEASNLQNKLEVLNQRWQNVLEKTEQRKQQLDGALRQAKGFHGEIEDLQQWLTDTERHLLASKPLGGLPETAKEQLNVHMEVCAAFEAKEETYKSLMQKGQQMLARCPKSAETNIDQDINNLKEKWESVETKLNERKTKLEEALNLAMEFHNSLQDFINWLTQAEQTLNVASRPSLILDTVLFQIDEHKVFANEVNSHREQIIELDKTGTHLKYFSQKQDVVLIKNLLISVQSRWEKVVQRLVERGRSLDDARKRAKQFHEAWSKLMEWLEESEKSLDSELEIANDPDKIKTQLAQHKEFQKSLGAKHSVYDTTNRTGRSLKEKTSLADDNLKLDDMLSELRDKWDTICGKSVERQNKLEEALLFSGQFTDALQALIDWLYRVEPQLAEDQPVHGDIDLVMNLIDNHKAFQKELGKRTSSVQALKRSARELIEGSRDDSSWVKVQMQELSTRWETVCALSISKQTRLEAALRQAEEFHSVVHALLEWLAEAEQTLRFHGVLPDDEDALRTLIDQHKEFMKKLEEKRAELNKATTMGDTVLAICHPDSITTIKHWITIIRARFEEVLAWAKQHQQRLASALAGLIAKQELLEALLAWLQWAETTLTDKDKEVIPQEIEEVKALIAEHQTFMEEMTRKQPDVDKVTKTYKRRAADPSSLQSHIPVLDKGRAGRKRFPASSLYPSGSQTQIETKNPRVNLLVSKWQQVWLLALERRRKLNDALDRLEELREFANFDFDIWRKKYMRWMNHKKSRVMDFFRRIDKDQDGKITRQEFIDGILSSKFPTSRLEMSAVADIFDRDGDGYIDYYEFVAALHPNKDAYKPITDADKIEDEVTRQVAKCKCAKRFQVEQIGDNKYRFFLGNQFGDSQQLRLVRILRSTVMVRVGGGWMALDEFLVKNDPCRAKGRTNMELREKFILADGASQGMAAFRPRGRRSRPSSRGASPNRSTSVSSQAAQAASPQVPATTTPKILHPLTRNYGKPWLTNSKMSTPCKAAECSDFPVPSAEGTPIQGSKLRLPGYLSGKGFHSGEDSGLITTAAARVRTQFADSKKTPSRPGSRAGSKAGSRASSRRGSDASDFDISEIQSVCSDVETVPQTHRPTPRAGSRPSTAKPSKIPTPQRKSPASKLDKSSKR

SEQ ID NO: 4416 - protein, 444 aa, Homo sapiens
MSSSYDEASLAPEETTDSFWEVGNYKRTVKRIDDGHRLCNDLMNCVQERAKIEKAYGQQLTDWAKRWRQLIEKGPQYGSLERAWGAIMTEADKVSELHQEVKNNLLNEDLEKVKNWQKDAYHKQIMGGFKETKEAEDGFRKAQKPWAKKMKELEAAKKAYHLACKEEKLAMTREMNSKTEQSVTPEQQKKLQDKVDKCKQDVQKTQEKYEKVLEDVGKTTPQYMENMEQVFEQCQQFEEKRLVFLKEVLLDIKRHLNLAENSSYIHVYRELEQAIRGADAQEDLRWFRSTSGPGMPMNWPQFEEWNPDLPHTTTKKEKQPKKAEGVALTNATGAVESTSQAGDRGSVSSYDRGQPYATEWSDDESGNPFGGSETNGGANPFEDDSKGVRVRALYDYDGQEQDELSFKAGDELTKLGEEDEQGWCRGRLDSGQLGLYPANYVEAI

SEQ ID NO: 4417 - protein, 221 aa, Homo sapiens
MSETAPLAPTIPAPAEKTPVKKKAKKAGATAGKRKASGPPVSELITKAVAASKERSGVSLAALKKALAAAGYDVEKNNSRIKLGLKSLVSKGTLVQTKGTGASGSFKLNKKAASGEGKPKAKKAGAAKPRKPAGAAKKPKKVAGAATPKKSIKKTPKKVKKPATAAGTKKVAKSAKKVKTPQPKKAAKSPAKAKAPKPKAAKPKSGKPKVTKAKKAAPKKK

SEQ ID NO: 4418 - protein, 103 aa, Homo sapiens [sequence omitted]

SEQ ID NO: 4419 - protein, 215 aa, Homo sapiens
MSETVPPAPAASAAPEKPLAGKKAKKPAKAAAASKKKPAGPSVSELIVQAASSSKERGGVSLAALKKALAAAGYDVEKNNSRIKLGIKSLVSKGTLVQTKGTGASGSFKLNKKASSVETKPGASKVATKTKATGASKKLKKATGASKKSVKTPKKAKKPAATRKSSKNPKKPKTVKPKKVAKSPAKAKAVKPKAAKARVTKPKTAKPKKAAPKKK

SEQ ID NO: 4420 - protein, 164 aa, Homo sapiens
MSEPAGDVRQNPCGSKACRRLFGPVDSEQLSRDCDALMAGCIQEARERWNFDFVTETPLEGDFAWERVRGLGLPKLYLPTGPRRGRDELGGGRRPGTSPALLQGTAEEDHVDLSLSCTLVPRSGEQAEGSPGGPGDSQGRKRRQTSMTDFYHSKRRLIFSKRKP

SEQ ID NO: 4421 - protein, 474 aa, Homo sapiens
MVQQTNNAENTEALLAGESSDSGAGLELGIASSPTPGSTASTGGKADDPSWCKTPSGHIKRPMNAFMVWSQIERRKIMEQSPDMHNAEISKRLGKRWKLLKDSDKIPFIREAERLRLKHMADYPDYKYRPRKKVKSGNANSSSSAAASSKPGEKGDKVGGSGGGGHGGGGGGGSSNAGGGGGGASGGGANSKPAQKKSCGSKVAGGAGGGVSKPHAKLILAGGGGGGKAAAAAAASFAAEQAGAAALLPLGAAADHHSLYKARTPSASASASSAASASAALAAPGKHLAEKKVKRVYLFGGLGTSSSPVGGVGAGADPSDPLGLYEEEGAGCSPDAPSLSGRSSAASSPAAGRSPADHRGYASLRAASPAPSSAPSHASSSASSHSSSSSSSGSSSSDDEFEDDLLDLNPSSNFESMSLGSFSSSSALDRDLDFNFEPGSGSHFEFPDYCTPEVSEMISGDWLESSISNLVFTY

SEQ ID NO: 4422 - protein, 593 aa, Homo sapiens
MEQPEDMASLSEFDSLAGSIPATKVEITVSCRNLLDKDMFSKSDPLCVMYTQGMENKQWREFGRTEVIDNTLNPDFVRKFIVDYFFEEKQNLRFDLYDVDSKSPDLSKHDFLGQAFCTLGEIVGSPGSRLEKPLTIGAFSLNSRTGKPMPAVSNGGVPGKKCGTIILSAEELSNCRDVATMQFCANKLDKKDFFGKSDPFLVFYRSNEDGTFTICHKTEVMKNTLNPVWQTFSIPVRALCNGDYDRTIKVEVYDWDRDGSHDFIGEFTTSYRELARGQSQFNIYEVVNPKKKMKKKKYVNSGTVTLLSFAVESECTFLDYIKGGTQINFTVAIDFTASNGNPSQSTSLHYMSPYQLNAYALALTAVGEIIQHYDSDKMFPALGFGAKLPPDGRVSHEFPLNGNQENPSCCGIDGILEAYHRSLRTVQLYGPTNFAPVVTHVARNAAAVQDGSQYSVLLIITDGVISDMAQTKEAIVNAAKLPMSIIIVGVGQAEFDAMVELDGDDVRISSRGKLAERDIVQFVPFRDYVDRTGNHVLSMARLARDVLAEIPDQLVSYMKAQGIRPRPPPAAPTHSPSQSPARTPPASPLHTHI

SEQ ID NO: 4423 - protein, 56 aa, Homo sapiens [sequence omitted]

SEQ ID NO: 4424 - protein, 570 aa, Homo sapiens
MAGGAREVLTLQLGHFAGFVGAHWWNQQDAALGRATDSKEPPGELCPDVLYRTGRTLHGQETYTPRLILMDLKGSLSSLKEEGGLYRDKQLDAAIAWQGKLTTHKEELYPKNPYLQDFLSAEGVLSSDGVWRVKSIPNGKGSSPLPTATTPKPLIPTEASIRVWSDFLRVHLHPRSICMIQKYNHDGEAGRLEAFGQGESVLKEPKYQEELEDRLHFYVEECDYLQGFQILCDLHDGFSGVGAKAAELLQDEYSGRGIITWGLLPGPYHRGEAQRNIYRLLNTAFGLVHLTAHSSLVCPLSLGGSLGLRPEPPVSFPYLHYDATLPFHCSAILATALDTVTVPYRLCSSPVSMVHLADMLSFCGKKVVTAGAIIPFPLAPGQSLPDSLMQFGGATPWTPLSACGEPSGTRCFAQSVVLRGIDRACHTSQLTPGTPPPSALHACTTGEEILAQYLQQQQPGVMSSSHLLLTPCRVAPPYPHLFSSCSPPGMVLDGSPKGAAVESIPVFGALCSSSSLHQTLEALARDLTKLDLRRWASFMDAGVEHDDVAELLQELQSLAQCYQGGDSLVD

SEQ ID NO: 4425 - protein, 204 aa, Homo sapiens
MEESVVRPSVFVVDGQTDIPFTRLGRSHRRQSCSVARDGPAGSWEQLIQERRSHEVNPAAHLTGANSSLTGSGGPLLWETQLGLAFLRGLSYHDGALVVTKAGYYYIYSKVQLGGVGCPLGLASTITHGLYKRTPRYPEELELLVSQQSPCGRATSSSRVWWDSSFLGGVVHLEAGEKVVVRVLDERLVRLRDGTRSYFGAFMV

SEQ ID NO: 4426 - protein, 338 aa, Homo sapiens
MFQAFPGDYDSGSRCSSSPSAESQYLSSVDSFGSPPTAAASQECAGLGEMPGSFVPTVTAITTSQDLQWLVQPTLISSMAQSQGQPLASQPPVVDPYDMPGTSYSTPGMSGYSSGGASGSGGPSTSGTTSGPGPARPARARPRRPREETLTPEEEEKRRVRRERNKLAAAKCRNRRRELTDRLQAETDQLEEEKAELESEIAELQKEKERLEFVLVAHKPGCKIPYEEGPGPGPLAEVRDLPGSAPAKEDGFSWLLPPPPPPPLPFQTSQDAPPNLTASLFTHSEVQVLGDPFPVVNPSYTSSFVLTCPEVSAFAGAQRTSGSDQPSDPLNSPSLLAL

SEQ ID NO: 4427 - protein, 580 aa, Homo sapiens
MEVPQPEPAPGSALSPAGVCGGAQRPGHLPGLLLGSHGLLGSPVRAAASSPVTTLTQTMHDLAGLGSETPKSQVGTLLFRSRSRLTHLSLSRRASESSLSSESSESSDAGLCMDSPSPMDPHMAEQTFEQAIQAASRIIRNEQFAIRRFQSMPVRLLGHSPVLRNITNSQAPDGRRKSEAGSGAASSSGEDKENDGFVFKMPWKPTHPSSTHALAEWASRREAFAQRPSSAPDLMCLSPDRKMEVEELSPLALGRFSLTPAEGDTEEDDGFVDILESDLKDDDAVPPGMESLISAPLVKTLEKEEEKDLVMYSKCQRLFRSPSMPCSVIRPILKRLERPQDRDTPVQNKRRRSVTPPEEQQEAEEPKARVLRSKSLCHDEIENLLDSDHRELIGDYSKAFLLQTVDGKHQDLKYISPETMVALLTGKFSNIVDKFVIVDCRYPYEYEGGHIKTAVNLPLERDAESFLLKSPIAPCSLDKRVILIFHCEFSSERGPRMCRFIRERDRAVNDYPSLYYPEMYILKGGYKEFFPQHPNFCEPQDYRPMNHEAFKDELKTFRLKTRSWAGERSRRELCSRLQDQ

SEQ ID NO: 4428 - protein, 496 aa, Homo sapiens
MTTFFTSVPPWIQDAKQEEEVGWKLVPRPRGREAESQVKCQCEISGTPFSNGEKLRPHSLPQPEQRPYSCPQLHCGKAFASKYKLYRHMATHSAQKPHQCMYCDKMFHRKDHLRNHLQTHDPNKEALHCSECGKNYNTKLGYRRHLAMHAASSGDLSCKVCLQTFESTQALLEHLKAHSRRVAGGAKEKKHPCDHCDRRFYTRKDVRRHLVVHTGRKDFLCQYCAQRFGRKDHLTRHVKKSHSQELLKIKTEPVDMLGLLSCSSTVSVKEELSPVLCMASRDVMGTKAFPGMLPMGMYGAHIPTMPSTGVPHSLVHNTLPMGMSYPLESSPISSPAQLPPKYQLGSTSYLPDKLPKVEVDSFLAELPGSLSLSSAEPQPASPQPAAAAALLDEALLAKSPANLSEALCAANVDFSHLLGFLPLNLPPCNPPGATGGLVMGYSQAEAQPLLTTLQAQPQDSPGAGGPLNFGPLHSLPPVFTSGLSSTTLPRFHQAFQ

SEQ ID NO: 4429 - protein, 358 aa, Homo sapiens
MAAVLKPVLLGLRDAPVHGSPTGPGAWTASKLGGIPDALPTVAAPRPVCQRCGQPLALVVQVYCPLEGSPFHRLLHVFACACPGCSTGGARSWKVFRSQCLQVPEREAQDAQKQGNSLAAEDWCEGADDWGSDTEEGPSPQFTLDFGNDASSAKDVDWTARLQDLRLQDAVLGAAHPVPPGLPLFLPYYICVADEDDYRDFVNLDHAHSLLRDYQQREGIAMDQLLSQSLPNDGDEKYEKTIIKSGDQTFYKFMKRIAACQEQILRYSWSGEPLFLTCPTSEVTELPACSQCGGQRIFEFQLMPALVSMLKSANLGLSVEFGTILVYTCEKSCWPPNHQTPMEEFCIIQEDPDELLFK

SEQ ID NO: 4430 - protein, 184 aa, Homo sapiens
MGLLTILKKMKQKERELRLLMLGLDNAGKTTILKKFNGEDIDTISPTLGFNIKTLEHRGFKLNIWDVGGQKSLRSYWRNYFESTDGLIWVVDSADRQRMQDCQRELQSLLVEERLAGATLLIFANKQDLPGALSSNAIREVLELDSIRSHHWCIQGCSAVTGENLLPGIDWLLDDISSRIFTAD

SEQ ID NO: 4431 - protein, 704 aa, Homo sapiens
MARELRALLLWGRRLRPLLRAPALAAVPGGKPILCPRRTTAQLGPRRNPAWSLQAGRLFSTQTAEDKEEPLHSIISSTESVQGSTSKHEFQAETKKLLDIVARSLYSEKEVFIRELISNASDALEKLRHKLVSDGQALPEMEIHLQTNAEKGTITIQDTGIGMTQEELVSNLGTIARSGSKAFLDALQNQAEASSKIIGQFGVGFYSAFMVADRVEVYSRSAAPGSLGYQWLSDGSGVFEIAEASGVRTGTKIIIHLKSDCKEFSSEARVRDVVTKYSNFVSFPLYLNGRRMNTLQAIWMMDPKDVREWQHEEFYRYVAQAHDKPRYTLHYKTDAPLNIRSIFYVPDMKPSMFDVSRELGSSVALYSRKVLIQTKATDILPKWLRFIRGVVDSEDIPLNLSRELLQESALIRKLRDVLQQRLIKFFIDQSKKDAEKYAKFFEDYGLFMREGIVTATEQEVKEDIAKLLRYESSALPSGQLTSLSEYASRMRAGTRNIYYLCAPNRHLAEHSPYYEAMKKKDTEVLFCFEQFDELTLLHLREFDKKKLISVETDIVVDHYKEEKFEDRSPAAECLSEKETEELMAWMRNVLGSRVTNVKVTLRLDTHPAMVTVLEMGAARHFLRMQQLAKTQEERAQLLQPTLEINPRHALIKKLNQLRASEPGLAQLLVDQIYENAMIAAGLVDDPRAMVGRLNELLVKALERH

SEQ ID NO: 4432 - protein, 846 aa, Homo sapiens
MSSSHFASRHRKDISTEMIRTKIAHRKSLSQKENRHKEYERNRHFGLKDVNIPTLEGRILVELDETSQGLVPEKTNVKPRAMKTILGDQRKQMLQKYKEEKQLQKLKEQREKAKRGIFKVGRYRPDMPCFLLSNQNAVKAEPKKAIPSSVRITRSKAKDQMEQTKIDNESDVRAIRPGPRQTSEKKVSDKEKKVVQPVMPTSLRMTRSATQAAKQVPRTVSSTTARKPVTRAANENEPEGKVPSKGRPAKNVETKPDKGISCKVDSEENTLNSQTNATSGMNPDGVLSKMENLPEINTAKIKGKNSFAPKDFMFQPLDGLKTYQVTPMTPRSANAFLTPSYTWTPLKTEVDESQATKEILAQKCKTYSTKTIQQDSNKLPCPLGPLTVWHEEHVLNKNEATTKNLNGLPIKEVPSLERNEGRIAQPHHGVPYFRNILQSETEKLTSHCFEWDRKLELDIPDDAKDLIRTAVGQTRLLMKERFKQFEGLVDDCEYKRGIKETTCTDLDGFWDMVSFQIEDVIHKFNNLIKLEESGWQVNNNMNHNMNKNVFRKKVVSGIASKPKQDDAGRIAARNRLAAIKNAMRERIRQEECAETAVSVIPKEVDKIVFDAGFFRVESPVKLFSGLSVSSEGPSQRLGTPKSVNKAVSQSRNEMGIPQQTTSPENAGPQNTKSEHVKKTLFLSIPESRSSIEDAQCPGLPDLIEENHVVNKTDLKVDCLSSERMSLPLLAGGVADDINTNKKEGISDVVEGMELNSSITSQDVLMSSPEKNTASQNSILEEGETKISQSELFDNKSLTTECHLLDSPGLNCSNPFTQLERRHQEHARHISFGGNLITFSPLQPGEF

SEQ ID NO: 4433 - protein, 1219 aa, Homo sapiens
MPVSTSLHQDGSQERPVSLTSTTSSSGSSCDSRSAMEEPSSSEAPAKNGAGSLRSRHLPNSNNNSSSWLNVKGPLSPFNSRAAAGPAHHKLSYLGRVVREIVETERMYVQDLRSIVEDYLLKIIDTPGLLKPEQVSALFGNIENIYALNSQLLRDLDSCNSDPVAVASCFVERSQEFDIYTQYCNNYPNSVAALTECMRDKQQAKFFRDRQELLQHSLPLGSYLLKPVQRILKYHLLLQEIAKHFDEEEDGFEVVEDAIDTMTCVAWYINDMKRRHEHAVRLQEIQSLLINWKGPDLTTYGELVLEGTFRVHRVRNERTFFLFDKTLLITKKRGDHFVYKGNIPCSSLMLIESTRDSLCFTVTHYKHSKQQYSIQAKTVEEKRNWTHHIKRLILENHHATIPQKAKEAILEMDSYYPNRYRCSPERLKKAWSSQDEVSTNVRQGRRQSEPTKHLLRQLNEKARAAGMKGKGRRESESSRSSRRPSGRSPTSTEKRMSFESISSLPEVEPDPEAGSEQEVFSAVEGPSAEETPSDTESPEVLETQLDAHQGLLGMDPPGDMVDFVAAESTEDLKALSSEEEEEMGGAAQEPESLLPPSVLDQASVIAERFVSSFSRRSSVAQEDSKSSGFGSPRLVSRSSSVLSLEGSEKGLARHGSATDSLSCQLSPEVDISVGVATEDSPSVNGMEPPSPGCPVEPDRSSCKKKESALSTRDRLLLDKIKSYYENAEHHDAGFSVRRRESLSYIPKGLVRNSISRFNSLPRPDPEPVPPVGSKRQVGSRPTSWALFELPGPSQAVKGDPPPISDAEFRPSSEIVKIWEGMESSGGSPGKGPGQGQANGFDLHEPLFILEEHELGAITEESATASPESSSPTEGRSPAHLARELKELVKELSSSTQGELVAPLHPRIVQLSHVMDSHVSERVKNKVYQLARQYSLRIKSNKPVMARPPLQWEKVAPERDGKSPTVPCLQEEAGEPLGGKGKRKPVLSLFDYEQLMAQEHSPPKPSSAGEMSPQRFFFNPSAVSQRTTSPGGRPSARSPLSPTETFSWPDVRELCSKYASRDEARRAGGGRPRGPPVNRSHSVPENMVEPPLSGRVGRCRSLSTKRGRGGGEAAQSPGPLPQSKPDGGETLYVTADLTLEDNRRVIVMEKGPLPSPTAGLEESSGQGPSSPVALLGQVQDFQQSAECQPKEEGSRDPADPSQQGRVRNLREKFQALNSVG

SEQ ID NO: 4434 - protein, 195 aa, Homo sapiens
MGRARDAILDALENLTAEELKKFKLKLLSVPLREGYGRIPRGALLSMDALDLTDKLVSFYLETYGAELTANVLRDMGLQEMAGQLQAATHQGSGAAPAGIQAPPQSAAKPGLHFIDQHRAALIARVTNVEWLLDALYGKVLTDEQYQAVRAEPTNPSKMRKLFSFTPAWNWTCKDLLLQALRESQSYLVEDLERS

SEQ ID NO: 4435 - protein, 1087 aa, Homo sapiens
MARSSPYLRQLQGPLLPPRDLVEEDDDYLNDDVEEDEESVFIDAEELCSGGVKAGSLPGCLRVSICDENTQETCKVFGRFPITGAWWRVKVQVKPVVGSRSYQYQVQGFPSYFLQSDMSPPNQKHICALFLKECEVSSDDVNKFLTWVKEVSNYKNLNFENLRETLRTFHKETGRKDQKQPTQNGQEELFLDNEMSLPLENTIPFRNVMTALQFPKIMEFLPVLLPRHFKWIIGSGSKEMLKEIEEILGTHPWKLGFSKITYREWKLLRCEASWIAFCQCESLLQLMTDLEKNALIMYSRLKQICREDGHTYVEVNDLTLTLSNHMSFHAASESLKFLKDIGVVTYEKSCVFPYDLYHAERAIAFSICDLMKKPPWHLCVDVEKVLASIHTTKPENSSDDALNESKPDEVRLENPVDVVDTQDNGDHIWTNGENEINAEISEVQLDQDQVEVPLDRDQVAALEMICSNPVTVISGKGGCGKTTIVSRLFKHIEQLEEREVKKACEDFEQDQNASEEWITFTEQSQLEADKAIEVLLTAPTGKAAGLLRQKTGLHAYTLCQVNYSFYSWTQTMMTTNKPWKFSSVRVLVVDEGSLVSVGIFKSVLNLLCEHSKLSKLIILGDIRQLPSIEPGNLLKDLFETLKSRNCAIELKTNHRAESQLIVDNATRISRRQFPKFDAELNISDNPTLPISIQDKTFIFVRLPEEDASSQSSKTNHHSCLYSAVKTLLQENNLQNAKTSQFIAFRRQDCDLINDCCCKHYTGHLTKDHQSRLVFGIGDKICCTRNAYLSDLLPENISGSQQNNDLDASSEDFSGTLPDFAKNKRDFESNVRLCNGEIFFITNDVTDVTFGKRRSLTINNMAGLEVTVDFKKLMKYCRIKHAWARTIHTFQGSEEQTVVYVVGKAGRQHWQHVYTAVTRGRCRVYVIAEESQLRNAIMKNSFPRKTRLKHFLQSKLSSSGAPPADFPSPRKSSGDSGGPSTPSASPLPVVTDHAMTNDVTWSEASSPDERTLTFAERWQLSSPDGVDTDDDLPKSRASKRTCGVNDDESPSKIFMVGESPQVSSRLQNLRLNNLIPRQLFKPTDNQET

SEQ ID NO: 4436 - protein, 355 aa, Homo sapiens
MALSEPILPSFSTFASPCRERGLQERWPRAEPESGGTDDDLNSVLDFILSMGLDGLGAEAAPEPPPPPPPPAFYYPEPGAPPPYSAPAGGLVSELLRPELDAPLGPALHGRFLLAPPGRLVKAEPPEADGGGGYGCAPGLTRGPRGLKREGAPGPAASCMRGPGGRPPPPPDTPPLSPDGPARLPAPGPRASFPPPFGGPGFGAPGPGLHYAPPAPPAFGLFDDAAAAAAALGLAPPAARGLLTPPASPLELLEAKPKRGRRSWPRKRTATHTCSYAGCGKTYTKSSHLKAHLRTHTGEKPYHCNWDGCGWKFARSDELTRHYRKHTGHRPFQCHLCDRAFSRSDHLALHMKRHM

SEQ ID NO: 4437 - protein, 205 aa, Homo sapiens
MAAPGERGRFHGGNLFFLPGGARSEMMDDLATDARGRGAGRRDAAASASTPAQAPTSDSPVAEDASRRRPCRACVDFKTWMRTQQKRDTKFREDCPPDREELGRHSWAVLHTLAAYYPDLPTPEQQQDMAQFIHLFSKFYPCEECAEDLRKRLCRNHPDTRTRACFTQWLCHLHNEVNRKLGKPDFDCSKVDERWRDGWKDGSCD

SEQ ID NO: 4438 - protein, 448 aa, Homo sapiens
MRECISVHVGQAGVQMGNACWELYCLEHGIQPDGQMPSDKTIGGGDDSFTTFFCETGAGKHVPRAVFVDLEPTVIDEIRNGPYRQLFHPEQLITGKEDAANNYARGHYTIGKEIIDPVLDRIRKLSDQCTGLQGFLVFHSFGGGTGSGFTSLLMERLSVDYGKKSKLEFSIYPAPQVSTAVVEPYNSILTTHTTLEHSDCAFMVDNEAIYDICRRNLDIERPTYTNLNRLISQIVSSITASLRFDGALNVDLTEFQTNLVPYPRIHFPLATYAPVISAEKAYHEQLSVAEITNACFEPANQMVKCDPRHGKYMACCLLYRGDVVPKDVNAAIAAIKTKRSIQFVDWCPTGFKVGINYQPPTVVPGGDLAKVQRAVCMLSNTTAIAEAWARLDHKFDLMYAKRAFVHWYVGEGMEEGEFSEAREDMAALEKDYEEVGIDSYEDEDEGEE

SEQ ID NO: 4439 - protein, 205 aa, Homo sapiens
MTERRVPFSLLRGPSWDPFRDWYPHSRLFDQAFGLPRLPEEWSQWLGGSSWPGYVRPLPPAAIESPAVAAPAYSRALSRQLSSGVSEIRHTADRWRVSLDVNHFAPDELTVKTKDGVVEITGKHEERQDEHGYISRCFTRKYTLPPGVDPTQVSSSLSPEGTLTVEAPMPKLATQSNEITIPVTFESRAQLGGPEAAKSDETAAK

SEQ ID NO: 4440 - protein, 70 aa, Homo sapiens
MSEKKQPVDLGLLEEDDEFEEFPAEDWAGLDEDEDAHVWEDNWDDDNVEDDFSNQLRAELEKHGYKMETS

SEQ ID NO: 4441 - protein, 339 aa, Homo sapiens
MAVAQQLRAESDFEQLPDDVAISANIADIEEKRGFTSHFVFVIEVKTKGGSKYLIYRRYRQFHALQSKLEERFGPDSKSSALACTLPTLPAKVYVGVKQEIAEMRIPALNAYMKSLLSLPVWVLMDEDVRIFFYQSPYDSEQVPQALRRLRPRTRKVKSVSPQGNSVDRMAAPRAEALFDFTGNSKLELNFKAGDVIFLLSRINKDWLEGTVRGATGIFPLSFVKILKDFPEEDDPTNWLRCYYYEDTISTIKDIAVEEDLSSTPLLKDLLELTRREFQREDIALNYRDAEGDLVRLLSDEDVALMVRQARGLPSQKRLFPWKLHITQKDNYRVYNTMP

SEQ ID NO: 4442 - protein, 569 aa, Homo sapiens
MKKKLVVLGLLAVVLVLVIVGLCLWLPSASKEPDNHVYTRAAVAADAKQCSKIGRDALRDGGSAVDAAIAALLCVGLMNAHSMGIGGGLFLTIYNSTTRKAEVINAREVAPRLAFATMFNSSEQSQKGGLSVAVPGEIRGYELAHQRHGRLPWARLFQPSIQLARQGFPVGKGLAAALENKRTVIEQQPVLCEVFCRDRKVLREGERLTLPQLADTYETLAIEGAQAFYNGSLTAQIVKDIQAAGGIVTAEDLNNYRAELIEHPLNISLGDVVLYMPSAPLSGPVLALILNILKGYNFSRESVESPEQKGLTYHRIVEAFRFAYAKRTLLGDPKFVDVTEVVRNMTSEFFAAQLRAQISDDTTHPISYYKPEFYTPDDGGTAHLSVVAEDGSAVSATSTINLYFGSKVRSPVSGILFNNEMDDFSSPSITNEFGVPPSPANFIQPGKQPLSSMCPTIMVGQDGQVRMVVGAAGGTQITTATALAIIYNLWFGYDVKRAVEEPRLHNQLLPNVTTVERNIDQAVTAALETRHHHTQIASTFIAVVQAIVRTAGGWAAASDSRKGGEPAGY

SEQ ID NO: 4443 - protein, 419 aa, Homo sapiens
MWPGNAWRAALFWVPRGRRAQSALAQLRGILEGELEGIRGAGTWKSERVITSRQGPHIRVDGVSGGILNFCANNYLGLSSHPEVIQAGLQALEEFGAGLSSVRFICGTQSIHKNLEAKIARFHQREDAILYPSCYDANAGLFEALLTPEDAVLSDELNHASIIDGIRLCKAHKYRYRHLDMADLEAKLQEAQKHRLRLVATDGAFSMDGDIAPLQEICCLASRYGALVFMDECHATGFLGPTGRGTDELLGVMDQVTIINSTLGKALGGASGGYTTGPGPLVSLLRQRARPYLFSNSLPPAVVGCASKALDLLMGSNTIVQSMAAKTQRFRSKMEAAGFTISGASHPICPVMLGDARLASRMADDMLKRGIFVIGFSYPVVPKGKARIRVQISAVHSEEDIDRCVEAFVEVGRLHGALP

SEQ ID NO: 4444 - protein, 297 aa, Homo sapiens
MVHQVLYRALVSTKWLAESIRTGKLGPGLRVLDASWYSPGTREARKEYLERHVPGASFFDIEECRDTASPYEMMLPSEAGFAEYVGRLGISNHTHVVVYDGEHLGSFYAPRVWWMFRVFGHRTVSVLNGGFRNWLKEGHPVTSEPSRPEPAVFKATLDRSLLKTYEQVLENLESKRFQLVDSRSQGRFLGTEPEPDAVGLDSGHIRGAVNMPFMDFLTEDGFEKGPEELRALFQTKKVDLSQPLIATCRKGVTACHVALAAYLCGKPDVAVYDGSWSEWFRRAPPESRVSQGKSEKA

SEQ ID NO: 4445 - protein, 834 aa, Homo sapiens
MEDPAAPGTGGPPANGNGNGGGKGKQAAPKGREAFRSQRRESEGSVDCPTLEFEYGDADGHAAELSELYSYTENLEFTNNRRCFEEDFKTQVQGKEWLELEEDAQKAYIMGLLDRLEVVSRERRLKVARAVLYLAQGTFGECDSEVDVLHWSRYNCFLLYQMGTFSTFLELLHMEIDNSQACSSALRKPAVSIADSTELRVLLSVMYLMVENIRLERETDPCGWRTARETFRTELSFSMHNEEPFALLLFSMVTKFCSGLAPHFPIKKVLLLLWKVVMFTLGGFEHLQTLKVQKRAELGLPPLAEDSIQVVKSMRAASPPSYTLDLGESQLAPPPSKLRGRRGSRRQLLTKQDSLDIYNERDLFKTEEPATEEEEESAGDGERTLDGELDLLEQDPLVPPPPSQAPLSAERVAFPKGLPWAPKVRQKDIEHFLEMSRNKFIGFTLGQDTDTLVGLPRPIHESVKTLKQHKYISIADVQIKNEEELEKCPMSLGEEVVPETPCEILYQGMLYSLPQYMIALLKILLAAAPTSKAKTDSINILADVLPEEMPITVLQSMKLGIDVNRHKEIIVKSISTLLLLLLKHFKLNHIYQFEYVSQHLVFANCIPLILKFFNQNILSYITAKNSISVLDYPCCTIQDLPELTTESLEAGDNSQFCWRNLFSCINLLRLLNKLTKWKHSRTMMLVVFKSAPILKRALKVKQAMLQLYVLKLLKLQTKYLGRQWRKSNMKTMSAIYQKVRHRMNDDWAYGNDIDARPWDFQAEECTLRANIEAFNSRRYDRPQDSEFSPVDNCLQSVLGQRLDLPEDFHYSYELWLEREVFSQPICWEELLQNH

SEQ ID NO: 4446 - protein, 867 aa, Homo sapiens
MENEKENLFCEPHKRGLMKTPLKESTTANIVLAEIQPDFGPLTTPTKPKEGSQGEPWTPTANLKMLISAVSPEIRNRDQKRGLFDNRSGLPEAKDCIHEHLSGDEFEKSQPSRKEKSLGLLCHKFLARYPNYPNPAVNNDICLDEVAEELNVERRRIYDIVNVLESLHMVSRLAKNRYTWHGRHNLNKTLGTLKSIGEENKYAEQIMMIKKKEYEQEFDFIKSYSIEDHIIKSNTGPNGHPDMCFVELPGVEFRAASVNSRKDKSLRVMSQKFVMLFLVSTPQIVSLEVAAKILIGEDHVEDLDKSKFKTKIRRLYDIANVLSSLDLIKKVHVTEERGRKPAFKWTGPEISPNTSGSSPVIHFTPSDLEVRRSSKENCAKNLFSTRGKPNFTRHPSLIKLVKSIESDRRKINSAPSSPIKTNKAESSQNSAPFPSKMAQLAAICKMQLEEQSSESRQKVKVQLARSGPCKPVAPLDPPVNAEMELTAPSLIQPLGMVPLIPSPLSSAVPLILPQAPSGPSYAIYLQPTQAHQSVTPPQGLSPTVCTTHSSKATGSKDSTDATTEKAANDTSKASASTRPGSLLPAPERQGAKSRTREPAGERGSKRASMLEDSGSKKKFKEDLKGLENVSATLFPSGYLIPLTQCSSLGAESILSGKENSSALSPNHRIYSSPIAGVIPVTSSELTAVNFPSFHVTPLKLMVSPTSVAAVPVGNSPALASSHPVPIQNPSSAIVNFTLQHLGLISPNVQLSASPGSGIVPVSPRIESVNVAPENAGTQQGRATNYDSPVPGQSQPNGQSVAVTGAQQPVPVTPKGSQLVAESFFRTPGGPTKPTSSSCMDFEGANKTSLGTLFVPQRKLEVSTEDVH

SEQ ID NO: 4447 - protein, 239 aa, Homo sapiens
MPLGHIMRLDLEKIALEYIVPCLHEVGFCYLDNFLGEVVGDCVLERVKQLHCTGALRDGQLAGPRAGVSKRHLRGDQITWIGGNEEGCEAISFLLSLIDRLVLYCGSRLGKYYVKERSKAMVACYPGNGTGYVRHVDNPNGDGRCITCIYYLNKNWDAKLHGGILRIFPEGKSFIADVEPIFDRLLFFWSDRRNPHEVQPSYATRYAMTVWYFDAEERAEAKKKFRNLTRKTESALTED

SEQ ID NO: 4448 - protein, 1336 aa, Homo sapiens
MMEIQMDEGGGVVVYQDDYCSGSVMSERVSGLAGSIYREFERLIHCYDEEVVKELMPLVVNVLENLDSVLSENQEHEVELELLREDNEQLLTQYEREKALRRQAEEKFIEFEDALEQEKKELQIQVEHYEFQTRQLELKAKNYADQISRLEERESEMKKEYNALHQRHTEMIQTYVEHIERSKMQQVGGNSQTESSLPGRRKERPTSLNVFPLADGTVRAQIGGKLVPAGDHWHLSDLGQLQSSSSYQCPQDEMSESGQSSAAATPSTTGTKSNTPTSSVPSAAVTPLNESLQPLGDYGVGSKNSKRAREKRDSRNMEVQVTQEMRNVSIGMGSSDEWSDVQDIIDSTPELDMCPETRLDRTGSSPTQGIVNKAFGINTDSLYHELSTAGSEVIGDVDEGADLLGEFSVRDDFFGMGKEVGNLLLENSQLLETKNALNVVKNDLIAKVDQLSGEQEVLRGELEAAKQAKVKLENRIKELEEELKRVKSEAIIARREPKEEAEDVSSYLCTESDKIPMAQRRRFTRVEMARVLMERNQYKERLMELQEAVRWTEMIRASREHPSVQEKKKSTIWQFFSRLFSSSSSPPPAKRPYPSVNIHYKSPTTAGFSQRRNHAMCPISAGSRPLEFFPDDDCTSSARREQKREQYRQVREHVRNDDGRLQACGWSLPAKYKQLSPNGGQEDTRMKNVPVPVYCRPLVEKDPTMKLWCAAGVNLSGWRPNEDDAGNGVKPAPGRDPLTCDREGDGEPKSAHTSPEKKKAKELPEMDATSSRVWILTSTLTTSKVVIIDANQPGTVVDQFTVCNAHVLCISSIPAASDSDYPPGEMFLDSDVNPEDPGADGVLAGITLVGCATRCNVPRSNCSSRGDTPVLDKGQGEVATIANGKVNPSQSTEEATEATEVPDPGPSEPETATLRPGPLTEHVFTDPAPTPSSGPQPGSENGPEPDSSSTRPEPEPSGDPTGAGSSAAPTMWLGAQNGWLYVHSAVANWKKCLHSIKLKDSVLSLVHVKGRVLVALADGTLAIFHRGEDGQWDLSNYHLMDLGHPHHSIRCMAVVYDRVWCGYKNKVHVIQPKTMQIEKSFDAHPRRESQVRQLAWIGDGVWVSIRLDSTLRLYHAHTHQHLQDVDIEPYVSKMLGTGKLGFSFVRITALLVAGSRLWVGTGNGVVISIPLTETVVLHRGQLLGLRANKTSPTSGEGARPGGIIHVYGDDSSDRAASSFIPYCSMAQAQLCFHGHRDAVKFFVSVPGNVLATLNGSVLDSPAEGPGPAAPASEVEGQKLRNVLVLSGGEGYIDFRIGDGEDDETEEGAGDMSQVKPVLSKAERSHIIVWQVSYTPE

SEQ ID NO: 4449 - protein, 1332 aa, Homo sapiens
MTGEVGSEVHLEINDPNVISQEEADSPSDSGQGSYETIGPLSEGDSDEEIFVSKKLKNRKVLQDSDSETEDTNASPEKTTYDSAEEENKENLYAGKNTKIKRIYKTVADSDESYMEKSLYQENLEAQVKPCLELSLQSGNSTDFTTDRKSSKKHIHDKEGTAGKAKVKSKRRLEKEERKMEKIRQLKKKETKNQEDDVEQPFNDSGCLLVDKDLFETGLEDENNSPLEDEESLESIRAAVKNKVKKHKKKEPSLESGVHSFEEGSELSKGTTRKERKAARLSKEALKQLHSETQRLIRESALNLPYHMPENKTIHDFFKRKPRPTCHGNAMALLKSSKYQSSHHKEIIDTANTTEMNSDHHSKGSEQTTGAENEVETNALPVVSKETQIITGSDESCRKDLVKNEELEIQEKQKQSDIRPSPGDSSVLQQESNFLGNNHSEECQVGGLVAFEPHALEGEGPQNPEETDEKVEEPEQQNKSSAVGPPEKVRRFTLDRLKQLGVDVSIKPRLGADEDSFVILEPETNRELEALKQRFWKHANPAAKPRAGQTVNVNVIVKDMGTDGKEELKADVVPVTLAPKKLDGASHTKPGEKLQVLKAKLQEAMKLRRFEERQKRQALFKLDNEDGFEEEEEEEEEMTDESEEDGEEKVEKEEKEEELEEEEEKEEEEEEEGNQETAEFLLSSEEIETKDEKEMDKENNDGSSEIGKAVGFLSVPKSLSSDSTLLLFKDSSSKMGYFPTEEKSETDENSGKQPSKLDEDDSCSLLTKESSHNSSFELIGSTIPSYQPCNRQTGRGTSFFPTAGGFRSPSPGLFRASLVSSASKSSGKLSEPSLPIEDSQDLYNASPEPKTLFLGAGDFQFCLEDDTQSQLLDADGFLNVRNHRNQYQALKPRLPLASMDENAMDANMDELLDLCTGKFTSQAEKHLPRKSDKKENMEELLNLCSGKFTSQDASTPASSELNKQEKESSMGDPMEEALALCSGSFPTDKEEEDEEEEFGDFRLVSNDNEFDSDEDEHSDSGNDLALEDHEDDDEEELLKRSEKLKRQMRLRKYLEDEAEVSGSDVGSEDEYDGEEIDEYEEDVIDEVLPSDEELQSQIKKIHMKTMLDDDKRQLRLYQERYLADGDLHSDGPGRMRKFRWKNIDDASQMDLFHRDSDDDQTEEQLDESEARWRKERIEREQWLRDMAQQGKITAEEEEEIGEDSQFMILAKKVTAKALQKNASRPMVIQESKSLLRNPFEAIRPGSAQQVKTGSLLNQPKAVLQKLAALSDHNPSAPRNSRNFVFHTLSPVKAEAAKESSKSQKIPEKDSDWLTWSGAPIPGFFRLSFDPHG

SEQ ID NO: 4450 - protein, 428 aa, Homo sapiens
APMEVAVCTDSAAPMWSCIVWELHSGANLLTYRGGQAGPRGLALLNGEYLLAAQLGKNYISAWELQRKDQLQQKIMCPGPVTCLTASPNGLYVLAGVAESIHLWEVSTGNLLVILSRHYQDVSCLQFTGDSSHFISGGKDCLVLVWSLCSVLQADPSRIPAPRHVWSHHALPITDLHCGFGGPLARVATSSLDQTVKLWEVSSGELLLSVLFDVSIMAVTMDLAEHHMFCGGSEGSIFQVDLFTWPGQRERSFHPEQDAGKVFKGNQVTCLSVSTDGSVLLSGSHDETVRLWDVQSKQCIRTVALKGPVTNAAILLAPVSMLSSDFRPSLPLPHFNKHLLGAEHGDEPRHGGLTLRLGLHQQGSEPSYLDRTEQLQAVLCSTMEKSVLGGQDQLRVRVTELEDEVRNLRKINRDLFDFSTRFITRPAK

SEQ ID NO: 4451 - protein, 451 aa, Homo sapiens
MPREIITLQLGQCGNQIGFEFWKQLCAEHGISPEGIVEEFATEGTDRKDVFFYQADDEHYIPRAVLLDLEPRVIHSILNSPYAKLYNPENIYLSEHGGGAGNNWASGFSQGEKIHEDIFDIIDREADGSDSLEGFVLCHSIAGGTGSGLGSYLLERLNDRYPKKLVQTYSVFPNQDEMSDVVVQPYNSLLTLKRLTQNADCVVVLDNTALNRIATDRLHIQNPSFSQINQLVSTIMSASTTTLRYPGYMNNDLIGLIASLIPTPRLHFLMTGYTPLTTDQSVASVRKTTVLDVMRRLLQPKNVMVSTGRDRQTNHCYIAILNIIQGEVDPTQVHKSLQRIRERKLANFIPWGPASIQVALSRKSPYLPSAHRVSGLMMANHTSISSLFERTCRQYDKLRKREAFLEQFRKEDMFKDNFDEMDTSREIVQQLIDEYHAATRPDYISWGTQEQ

SEQ ID NO: 4452 - protein, 146 aa, Homo sapiens [sequence omitted]

SEQ ID NO: 4453 - protein, 1015 aa, Homo sapiens
MGAERRLLSIKEAFRLAQQPHQNQAKLVVALSRTYRTMDDKTVFHEEFIHYLKYVMVVYKREPAVERVIEFAAKFVTSFHQSDMEDDEEEEDGGLLNYLFTFLLKSHEANSNAVRFRVCLLINKLLGSMPENAQIDDDVFDKINKAMLIRLKDKIPNVRIQAVLALSRLQDPKDDECPVVNAYATLIENDSNPEVRRAVLSCIAPSAKTLPKIVGRTKDVKEAVRKLAYQVLAEKVHMRAMSIAQRVMLLQQGLNDRSDAVKQAMQKHLLQGWLRFSEGNILELLHRLDVENSSEVAVSVLNALFSITPLSELVGLCKNNDGRKLIPVETLTPEIALYWCALCEYLKSKGDEGEEFLEQILPEPVVYADYLLSYIQSIPVVNEEHRGDFSYIGNLMTKEFIGQQLILIIKSLDTSEEGGRKKLLAVLQEILILPTIPISLVSFLVERLLHIIIDDNKRTQIVTEIISEIRAPIVTVGVNNDPADVRKKELKMAEIKVKLIEAKEALENCITLQDFNRASELKEEIKALEDARINLLKETEQLEIKEVHIEKNDAETLQKCLILCYELLKQMSISTGLSATMNGIIESLILPGIISIHPVVRNLAVLCLGCCGLQNQDFARKHFVLLLQVLQIDDVTIKISALKAIFDQLMTFGIEPFKTKKIKTLHCEGTEINSDDEQESKEVEETATAKNVLKLLSDFLDSEVSELRTGAAEGLAKLMFSGLLVSSRILSRLILLWYNPVTEEDVQLRHCLGVFFPVFAYASRTNQECFEEAFLPTLQTLANAPASSPLAEIDITNVAELLVDLTRPSGLNPQAKTSQDYQALTVHDNLAMKICNEILTSPCSPEIRVYTKALSSLELSSHLAKDLLVLLNEILEQVKDRTCLRALEKIKIQLEKGNKEFGDQAEAAQDATLTTTTFQNEDEKNKEVYMTPLRGVKATQASKSTQLKTNRGQRKVTVSARTNRRCQTAEADSESDHEVPEPESEMKMRLPRRAKTAALEKSKLNLAQFLNEDLS

SEQ ID NO: 4454 - protein, 926 aa, Homo sapiens
MTTKDYPSLWGFGTTKTFKIPIEHLDFKYIEKCSDVKHLEKILCVLRSGEEGYYPELTEFCEKHLQALAPESRALRKDKPAATAASFTAEEWEKIDGDIKSWVSEIKKEEDKMHFHETETFPAMKDNLPPVRGSNSCLHVGKEKYSKRPTKKKTPRDYAEWDKFDVEKECLKIDEDYKEKTVIDKSHLSKIETRIDTAGLTEKEKDFLATREKEKGNEAFNSGDYEEAVMYYTRSISALPTVVAYNNRAQAEIKLQNWNSAFQDCEKVLELEPGNVKALLRRATTYKHQNKLREATEDLSKVLDVEPDNDLAKKTLSEVERDLKNSEAASETQTKGKRMVIQEIENSEDEEGKSGRKHEDGGGDKKPAEPAGAARAAQPCVMGNIQKKLTGKAEGGKRPARGAPQRGQTPEAGADKRSPRRASAAAAAGGGATGHPGGGQGAENPAGLKSQGNELFRSGQFAEAAGKYSAAIALLEPAGSEIADDLSILYSNRAACYLKEGNCSGCIQDCNRALELHPFSMKPLLRRAMAYETLEQYGKAYVDYKTVLQIDCGLQLANDSVNRLSRILMELDGPNWREKLSPIPAVPASVPLQAWHPAKEMISKQAGDSSSHRQQGITDEKTFKALKEEGNQCVNDKNYKDALSKYSECLKINNKECAIYTNRALCYLKLCQFEEAKQDCDQALQLADGNVKAFYRRALAHKGLKNYQKSLIDLNKVILLDPSIIEAKMELEEVTRLLNLKDKTAPFNKEKERRKIEIQEVNEGKEEPGRPAGEVSMGCLASEKGGKSSRSPEDPEKLPIAKPNNAYEFGQIINALSTRKDKEACAHLLAITAPKDLPMFLSNKLEGDTFLLLIQSLKNNLIEKDPSLVYQHLLYLSKAERFKMMLTLISKGQKELIEQLFEDLSDTPNNHFTLEDIQALKRQYEL

SEQ ID NO: 4455 - protein, 700 aa, Homo sapiens
MGQTVNEDSMDVKKENQEKTPQSSTSSVQRDDFHWEEYLKETGSISAPSECFRQSQIPPVNDFKVGMKLEARDPRNATSVCIATVIGITGARLRLRLDGSDNRNDFWRLVDSPDIQPVGTCEKEGDLLQPPLGYQMNTSSWPMFLLKTLNGSEMASATLFKKEPPKPPLNNFKVGMKLEAIDKKNPYLICPATIGDVKGDEVHITFDGWSGAFDYWCKYDSRDIFPAGWCRLTGDVLQPPGTSVPIVKNIAKTESSPSEASQHSMQSPQKTTLILPTQQVRRSSRIKPPGPTAVPKRSSSVKNITPRKKGPNSGKKEKPLPVICSTSAASLKSLTRDRGMLYKDVASGPCKIVMSTVCVYVNKHGNFGPHLDPKRIQQLPDHFGPGPVNVVLRRIVQACVDCALETKTVFGYLKPDNRGGEVITASFDGETHSIQLPPVNSASFALRFLENFCHSLQCDNLLSSQPFSSSRGHTHSSAEHDKNQSAKEDVTERQSTKRSPQQTVPYVVPLSPKLPKTKEYASEGEPLFAGGSAIPKEENLSEDSKSSSLNSGNYLNPACRNPMYIHTSVSQDFSRSVPGTTSSPLVGDISPKSSPHEVKFQMQRKSEAPSYIAVPDPSVLKQGFSKDPSTWSVDEVIQFMKHTDPQISGPLADLFRQHEIDGKALFLLKSDVMMKYMGLKLGPALKLCYYIEKLKEGKYS

SEQ ID NO: 4456 - protein, 482 aa, Homo sapiens
MAALMTPGTGAPPAPGDFSGEGSQGLPDPSPEPKQLPELIRMKRDGGRLSEADIRGFVAAVVNGSAQGAQIGAMLMAIRLRGMDLEETSVLTQALAQSGQQLEWPEAWRQQLVDKHSTGGVGDKVSLVLAPALAACGCKVPMISGRGLGHTGGTLDKLESIPGFNVIQSPEQMQVLLDQAGCCIVGQSEQLVPADGILYAARDVTATVDSLPLITASILSKKLVEGLSALVVDVKFGGAAVFPNQEQARELAKTLVGVGASLGLRVAAALTAMDKPLGRCVGHALEVEEALLCMDGAGPPDLRDLVTTLGGALLWLSGHAGTQAQGAARVAAALDDGSALGRFERMLAAQGVDPGLARALCSGSPAERRQLLPRAREQEELLAPADGTVELVRALPLALVLHELGAGRSRAGEPLRLGVGAELLVDVGQRLRRGTPWLRVHRDGPALSGPQSRALQEALVLSDRAPFAAPSPFAELVLPPQQ

SEQ ID NO: 4457 - protein, 361 aa, Homo sapiens
MGNVLAASSPPAGPPPPPAPALVGLPPPPPSPPGFTLPPLGGSLGAGTSTSRSSERTPGAATASASGAAEDGACGCLPNPGTFEECHRKCKELFPIQMEGVKLTVNKGLSNHFQVNHTVALSTIGESNYHFGVTYVGTKQLSPTEAFPVLVGDMDNSGSLNAQVIHQLGPGLRSKMAIQTQQSKFVNWQVDGEYRGSDFTAAVTLGNPDVLVGSGILVAHYLQSITPCLALGGELVYHRRPGEEGTVMSLAGKYTLNNWLATVTLGQAGMHATYYHKASDQLQVGVEFEASTRMQDTSVSFGYQLDLPKANLLFKGSVDSNWIVGATLEKKLPPLPLTLALGAFLNHRKNKFQCGFGLTIG

SEQ ID NO: 4458 - protein, 105 aa, Homo sapiens [sequence omitted]

SEQ ID NO: 4459 - protein, 132 aa, Homo sapiens
MATTVTLEKCGHNKGYKGLDNCRFCPGSQCCVEDGPESIDSIIDMDAVCKRVTTLGLDVSVTISQDAGRYLCDFTYYTSLYQSHGRSAFVHVPPLGKPYNADQLGRALRAIIEEMLDLLEQSEGKINYCHKH

SEQ ID NO: 4460 - protein, 412 aa, Homo sapiens
MSSKGSVVLAYSGGLDTSCILVWLKEQGYDVIAYLANIGQKEDFEEARKKALKLGAKKVFIEDVSREFVEEFIWPAIQSSALYEDRYLLGTSLARPCIARKQVEIAQREGAKYVSHGATGKGNDQVRFELSCYSLAPQIKVIAPWRMPEFYNRFKGRNDLMEYAKQHGIPIPVTPKNPWSMDENLMHISYEAGILENPKNQAPPGLYTKTQDPAKAPNTPDILEIEFKKGVPVKVTNVKDGTTHQTSLELFMYLNEVAGKHGVGRIDIVENRFIGMKSRGIYETPAGTILYHAHLDIEAFTMDREVRKIKQGLGLKFAELVYTGFWHSPECEFVRHCIAKSQERVEGKVQVSVLKGQVYILGRESPLSLYNEELVSMNVQGDYEPTDATGFININSLRLKEYHRLQSKVTAK

SEQ ID NO: 4461 - protein, 473 aa, Homo sapiens
MGQSGRSRHQKRARAQAQLRNLEAYAANPHSFVFTRGCTGRNIRQLSLDVRRVMEPLTASRLQVRKKNSLKDCVAVAGPLGVTHFLILSKTETNVYFKLMRLPGGPTLTFQVKKYSLVRDVVSSLRRHRMHEQQFAHPPLLVLNSFGPHGMHVKLMATMFQNLFPSINVHKVNLNTIKRCLLIDYNPDSQELDFRHYSIKVVPVGASRGMKKLLQEKFPNMSRLQDISELLATGAGLSESEAEPDGDHNITELPQAVAGRGNMRAQQSAVRLTEIGPRMTLQLIKVQEGVGEGKVMFHSFVSKTEEELQAILEAKEKKLRLKAQRQAQQAQNVQRKQEQREAHRKKSLEGMKKARVGGSDEEASGIPSRTASLELGEDDDEQEDDDIEYFCQAVGEAPSEDLFPEAKQKRLAKSPGRKRKRWEMDRGRGRLCDQKFPKTKDKSQGAQARRGPRGASRDGGRGRGRGRPGKRVA

SEQ ID NO: 4462 - protein, 1782 aa, Homo sapiens
MGAGSSTEQRSPEQPPEGSSTPAEPEPSGGGPSAEAAPDTTADPAIAASDPATKLLQKNGQLSTINGVAEQDELSLQEGDLNGQKGALNGQGALNSQEEEEVIVTEVGQRDSEDVSKRDSDKEMATKSAVVHDITDDGQEETPEIIEQIPSSESNLEELTQPTESQANDIGFKKVFKFVGFKFTVKKDKTEKPDTVQLLTVKKDEGEGAAGAGDHKDPSLGAGEAASKESEPKQSTEKPEETLKREQSHAEISPPAESGQAVEECKEEGEEKQEKEPSKSAESPTSPVTSETGSTFKKFFTQGWAGWRKKTSFRKPKEDEVEASEKKKEQEPEKVDTEEDGKAEVASEKLTASEQAHPQEPAESAHEPRLSAEYEKVELPSEEQVSGSQGPSEEKPAPLATEVFDEKIEVHQEEVVAEVHVSTVEERTEEQKTEVEETAGSVPAEELVEMDAEPQEAEPAKELVKLKETCVSGEDPTQGADLSPDEKVLSKPPEGVVSEVEMLSSQERMKVQGSPLKKLFTSTGLKKLSGKKQKGKRGGGDEESGEHTQVPADSPDSQEEQKGESSASSPEEPEEITCLEKGLAEVQQDGEAEEGATSDGEKKREGVTPWASFKKMVTPKKRVRRPSESDKEDELDKVKSATLSSTESTASEMQEEMKGSVEEPKPEEPKRKVDTSVSWEALICVGSSKKRARRGSSSDEEGGPKAMGGDHQKADEAGKDKETGTDGILAGSQEHDPGQGSSSPEQAGSPTEGEGVSTWESFKRLVTPRKKSKSKLEEKSEDSIAGSGVEHSTPDTEPGKEESWVSIKKFIPGRRKKRPDGKQEQAPVEDAGPTGANEDDSDVPAVVPLSEYDAVEREKMEAQQAQKSAEQPEQKAATEVSKELSESQVHMMAAAVADGTRAATIIEERSPSWISASVTEPLEQVEAEAALLTEEVLEREVIAEEEPPTVTEPLPENREARGDTVVSEAELTPEAVTAAETAGPLGAEEGTEASAAEETTEMVSAVSQLTDSPDTTEEATPVQEVEGGVPDIEEQERRTQEVLQAVAEKVKEESQLPGTGGPEDVLQPVQRAEAERPEEQAEASGLKKETDVVLKVDAQEAKTEPFTQGKVVGQTTPESFEKAPQVTESIESSELVTTCQAETLAGVKSQEMVMEQAIPPDSVETPTDSETDGSTPVADFDAPGTTQKDEIVEIHEENEVASGTQSGGTEAEAVPAQKERPPAPSSFVFQEETKEQSKMEDTLEHTDKEVSVETVSILSKTEGTQEADQYADEKTKDVPFFEGLEGSIDTGITVSREKVTEVALKGEGTEEAECKKDDALELQSHAKSPPSPVEREMVVQVEREKTEAEPTHVNEEKLEHETAVTVSEEVSKQLLQTVNVPIIDGAKEVSSLEGSPPPCLGQEEAVCTKIQVQSSEASFTLTAAAEEEKVLGETANILETGETLEPAGAHLVLEEKSSEKNEDFAAHPGEDAVPTGPDCQAKSTPVIVSATTKKGLSSDLEGEKTTSLKWKSDEVDEQVACQEVKVSVAIEDLEPENGILELETKSSKLVQNIIQTAVDQFVRTEETATEMLTSELQTQAHVIKADSQDAGQETEKEGEEPQASAQDETPITSAKEESESTAVGQAHSDISKDMSEASEKTMTVEVEGSTVNDQQLEEVVLPSEEEGGGAGTKSVPEDDGHALLAERIEKSLVEPKEDEKGDDVDDPENQNSALADTDASGGLTKESPDTNGPKQKEKEDAQEVELQEGKVHSESDKAITPQAQEELQKQERESAKSELTES

SEQ ID NO: 4463 - protein, 1217 aa, Homo sapiens
MKGMSHEPKSPSLGMLSTATRTTATVNPLTPSPLNGALVPSGSPATSSALSAQAAPSSSFAAALRKLAKQAEEPRGSSLSSESSPVSSPATNHSSPASTPKRVPMGPIIVPPGGHSVPSTPPVVTIAPTKTVNGVWRSESRQDAGSRSSSGGRERLIVEPPLPQEKAGGPAIPSHLLSTPYPFGLSPSSVVQDSRFPPLNLQRPVHHVVPPSTVTEDYLRSFRPYHTTDDLRMSSLPPLGLDPATAAAYYHPSYLAPHPFPHPAFRMDDSYCLSALRSPFYPIPTPGSLPPLHPSAMHLHLSGVRYPPELSHSSLAALHSERMSGLSAERLQMDEELRREREREREREREREADREREKEREREREKEREQEKEREREKERERELERQREQRAREKELLAAKALEPSFLPVAELHGLRGHATEERGKPSEQLTPTRAEKLKDAGLQAPKPVQHPLHPVPTPHHTVPSLISNHGIFSLPSSSAATALLIQRTNEEEKWLARQRRLRQEKEDRQSQVSEFRQQVLEQHLDMGRPPVPAEAEHRPESTTRPGPNRHEPGGRDPPQHFGGPPPLISPKPQLHAAPTALWNPVSLMDNTLETRRAESHSLHSHPAAFEPSRQAAVPLVKVERVFCPEKAEEGPRKREPAPLDKYQPPPPPPREGGSLEHQPFLPGPGPFLAELEKSTQTILGQQRASLPQAATFGELSGPLKPGSPYRPPVPRAPDPAYIYDEFLQQRRRLVSKLDLEERRRREAQEKGYYYDLDDSYDESDEEEVRAHLRCVAEQPPLKLDTSSEKLEFLQLFGLTTQQQKEELVAQKRRKRRRMLRERSPSPPTIQSKRQTPSPRLALSTRYSPDEMNNSPNFEEKKKFLTIFNLTHISAEKRKDKERLVEMLRAMKQKALSAAVADSLTNSPRDSPAVSLSEPATQQASLDVEKPVGVAASLSDIPKAAEPGKLEQVRPQELSRVQELAPASGEKARLSEAPGGKKSLSMLHYIRGAAPKDIPVPLSHSTNGKSKPWEPFVAEEFAHQFHESVLQSTQKALQKHKGSVAVLSAEQNHKVDTSVHYNIPELQSSSRAPPPQHNGQQEPPTARKGPPTQELDRDSEEEEEEDDEDGEDEEEVPKRKWQGIEAVFEAYQEHIEEQNLERQVLQTQCRRLEARHYSLSLTAEQLSHSVAELRSQKQKMVSERERLQAELDHLRKCLALPAMHWPRGYLKGYPR

SEQ ID NO: 4464 - protein, 185 aa, Homo sapiens
MDAAEVEFLAEKELVTIIPNFSLDKIYLIGGDLGPFNPGLPVEVPLWLAINLKQRQKCRLLPPEWMDVEKLEKMRDHERKEETFTPMPSPYYMELTKLLLNHASDNIPKADEIRTLVKDMWDTRIAKLRVSADSFVRQQEAHAKLDNLTLMEINTSGTFLTQALNHMYKLRTNLQPLESTQSQDF

SEQ ID NO: 4465 - protein, 170 aa, Homo sapiens
MAHAMENSWTISKEYHIDEEVGFALPNPQENLPDFYNDWMFIAKHLPDLIESGQLRERVEKLNMLSIDHLTDHKSQRLARLVLGCITMAYVWGKGHGDVRKVLPRNIAVPYCQLSKKLELPPILVYADCVLANWKKKDPNKYVNRTWTFCSHFVMETAVKDSSWSLYWWK

SEQ ID NO: 4466 - protein, 136 aa, Homo sapiens [sequence omitted]

SEQ ID NO: 4467 - protein, 205 aa, Homo sapiens
MSKGRAEAAAGAAGILLRYLQEQNRPYSSQDVFGNLQREHGLGKAVVVKTLEQLAQQGKIKEKMYGKQKIYFADQDQFDMVSDADLQVLDGKIVALTAKVQSLQQSCRYMEAEMQKEIQELKKECAGYRERLKNIKAATNHVTPEEKEQVYRERQKYCKEWRKRKRMATELSDAILEGYPKSKKQFFEEVGIETDEDYNVTLPDP

SEQ ID NO: 4468 - protein, 340 aa, Homo sapiens
MGKDYYQTLGLARGASDEEIKRAYRRQALRYHPDKNKEPGAEEKFKEIAEAYDVLSDPRKREIFDRYGEEGLKGSGPSGGSGGGANGTSFSYTFHGDPHAMFAEFFGGRNPFDTFFGQRNGEEGMDIDDPFSGFPMGMGGFTNVNFGRSRSAQEPARKKQDPPVTHDLRVSLEEIYSGCTKKMKISHKRLNPDGKSIRNEDKILTIEVKKGWKEGTKITFPKEGDQTSNNIPADIVFVLKDKPHNIFKRDGSDVIYPARISLREALCGCTVNVPTLDGRTIPVVFKDVIRPGMRRKVPGEGLPLPKTPEKRGDLIIEFEVIFPERIPQTSRTVLEQVLPI

SEQ ID NO: 4469 - protein, 679 aa, Homo sapiens
MSNAMYNKMWHQTQEALGALLDKEPQKMIEPQRNQVFIFQTLATFYVKYVQIFRNLENVYDQFVHPQKRILIRKVLDGVMGRILELKNEMVELELTEFHYFDDILQDLKLAPQQLDIPIPKYFLKEKLEVIKGREKILAQILADSGIDTSDMKYPVKSIPFDEAVKLIQIAERARQGRLRALFMKQIYLQEYRAKQSKMLGKKVTDTWAAALRIQKVWRRFHQRKETEKLREEEMIFLGMNPPPLFNEVSATVIQAEKVDRLRNEVQIKHEEDYREALVTIKNDLKLIEGVDIKENLQDQIRHWFIECRNLTGTFPDYPDVEEGGSAIIFSDKTIQQVIEDIIANQEEEEKNKKKKKKKEKQPKKAKKQKKGTKEKNKEEDEKWKMSPSLFLPAMKEGCNAYKEIWMKKDESWNFSQDYDPELIKEEKRKELQSEIRIQVDELMRQELKNLKLAVDRERERPVKAGKKKDKKKGKKGKKKEKKAKKDKDLTADRTIESLYKELVEEGLLIQALKVNLSDYIGEYSYLGTTLRQVSIEPMPSLLDVRQLITLYGIWPLGSAAVHEKAPLVKSLLLAGPSGVGKKMLVHAICTETGANLFNLSSSNIAGKYPGKNGLQMMLHAVFKVARQLQPSVVWIEDTEKTFYKKVPNAEKMFTPSAGEVAALQKNLKRSTSRMNLNA

SEQ ID NO: 4470 - protein, 730 aa, Homo sapiens
MFGRKRSVSFGGFGWIDKTMLASLKVKKQELANSSDATLPDRPLSPPLTAPPTMKSSEFFEMLEKMQGIKLEEQKPGPQKNKDDYIPYPSIDEVVEKGGPYPQVILPQFGGYWIEDPENVGTPTSLGSSICEEEEEDNLSPNTFGYKLECKGEARAYRRHFLGKDHLNFYCTGSSLGNLILSVKCEEAEGIEYLRVILRSKLKTVHERIPLAGLSKLPSVPQIAKAFCDDAVGLRFNPVLYPKASQMIVSYDEHEVNNTFKFGVIYQKARQTLEEELFGNNEESPAFKEFLDLLGDTITLQDFKGFRGGLDVTHGQTGVESVYTTFRDREIMFHVSTKLPFTDGDAQQLQRKRHIGNDIVAIIFQEENTPFVPDMIASNFLHAYIVVQVETPGTETPSYKVSVTAREDVPTFGPPLPSPPVFQKGPEFREFLLTKLTNAENACCKSDKFAKLEDRTRAALLDNLHDELHAHTQAMLGLGPEEDKFENGGHGGFLESFKRAIRVRSHSMETMVGGQKKSHSGGIPGSLSGGISHNSMEVTKTTFSPPVVAATVKNQSRSPIKRRSGLFPRLHTGSEGQGDSRARCDSTSSTPKTPDGGHSSQEIKSETSSNPSSPEICPNKEKPFMKLKENGRAISRSSSSTSSVSSTAGEGEAMEEGDSGGSQPSTTSPFKQEVFVYSPSPSSESPSLGAAATPIIMSRSPTDAKSRNSPRSNLKFRFDKLSHASSGAGH

SEQ ID NO: 4471 - protein, 1682 aa, Homo sapiens
MHRAVDPPGARAAREAFALGGLSCAGAWSSCPPHPPPRSAWLPGGRCSASIGQPPLPAPLPPSHGSSSGHPSKPYYAPGAPTPRPLHGKLESLHGCVQALLREPAQPGLWEQLGQLYESEHDSEEATRCYHSALRYGGSFAELGPRIGRLQQAQLWNFHTGSCQHRAKVLPPLEQVWNLLHLEHKRNYGAKRGGPPVKRAAEPPVVQPVPPAALSGPSGEEGLSPGGKRRRGCNSEQTGLPPGLPLPPPPLPPPPPPPPPPPPPLPGLATSPPFQLTKPGLWSTLHGDAWGPERKGSAPPERQEQRHSLPHPYPYPAPAYTAHPPGHRLVPAAPPGPGPRPPGAESHGCLPATRPPGSDLRESRVQRSRMDSSVSPAATTACVPYAPSRPPGLPGTTTSSSSSSSSNTGLRGVEPNPGIPGADHYQTPALEVSHHGRLGPSAHSSRKPFLGAPAATPHLSLPPGPSSPPPPPCPRLLRPPPPPAWLKGPACRAAREDGEILEELFFGTEGPPRPAPPPLPHREGFLGPPASRFSVGTQDSHTPPTPPTPTTSSSNSNSGSHSSSPAGPVSFPPPPYLARSIDPLPRPPSPAQNPQDPPLVPLTLALPPAPPSSCHQNTSGSFRRPESPRPRVSFPKTPEVGPGPPPGPLSKAPQPVPPGVGELPARGPRLFDFPPTPLEDQFEEPAEFKILPDGLANIMKMLDESIRKEEEQQQHEAGVAPQPPLKEPFASLQSPFPTDTAPTTTAPAVAVTTTTTTTTTTTATQEEEKKPPPALPPPPPLAKFPPPSQPQPPPPPPPSPASLLKSLASVLEGQKYCYRGTGAAVSTRPGPLPTTQYSPGPPSGATALPPTSAAPSAQGSPQPSASSSSQFSTSGGPWARERRAGEEPVPGPMTPTQPPPPLSLPPARSESEVLEEISRACETLVERVGRSATDPADPVDTAEPADSGTERLLPPAQAKEEAGGVAAVSGSCKRRQKEHQKEHRRHRRACKDSVGRRPREGRAKAKAKVPKEKSRRVLGNLDLQSEEIQGREKSRPDLGGASKAKPPTAPAPPSAPAPSAQPTPPSASVPGKKAREEAPGPPGVSRADMLKLRSLSEGPPKELKIRLIKVESGDKETFIASEVEERRLRMADLTISHCAADVVRASRNAKVKGKFRESYLSPAQSVKPKINTEEKLPREKLNPPTPSIYLESKRDAFSPVLLQFCTDPRNPITVIRGLAGSLRLNLGLFSTKTLVEASGEHTVEVRTQVQQPSDENWDLTGTRQIWPCESSRSHTTIAKYAQYQASSFQESLQEEKESEDEESEEPDSTTGTPPSSAPDPKNHHIIKFGTNIDLSDAKRWKPQLQELLKLPAFMRVTSTGNMLSHVGHTILGMNTVQLYMKVPGSRTPGHQENNNFCSVNINIGPGDCEWFAVHEHYWETISAFCDRHGVDYLTGSWWPILDDLYASNIPVYRFVQRPGDLVWINAGTVHWVQATGWCNNIAWNVGPLTAYQYQLALERYEWNEVKNVKSIVPMIHVSWNVARTVKISDPDLFKMIKFCLLQSMKHCQVQRESLVRAGKKIAYQGRVKDEPAYYCNECDVEVFNILFVTSENGSRNTYLVHCEGCARRRSAGLQGVVVLEQYRTEELAQAYDAFTLVRARRARGQRRRALGQAAGTGFGSPAAPFPEPPPAFSPQAPASTSR

SEQ ID NO: 4472 - protein, 180 aa, Homo sapiens
MRPLTEEETRVMFEKIAKYIGENLQLLVDRPDGTYCFRLHNDRVYYVSEKIMKLAANISGDKLVSLGTCFGKFTKTHKFRLHVTALDYLAPYAKYKVWIKPGAEQSFLYGNHVLKSGLGRITENTSQYQGVVVYSMADIPLGFGVAAKSTQDCRKVDPMAIVVFHQADIGEYVRHEETLT

SEQ ID NO: 4473 - protein, 133 aa, Homo sapiens
MRPLTEEETRVMFEKIAKYIGENLQLLVDRPDGTYCFRLHNDRVYYVSEKIMKLAANISGDKLVSLGTCFGKFTKTHKFRLHVTALDYLAPYAKGFGVAAKSTQDCRKVDPMAIVVFHQADIGEYVRHEETLT

SEQ ID NO: 4474 - protein, 489 aa, Homo sapiens
MESMFSSPAEAALQRETGVPGLLTPLPDLDGVYELERVAGFVRDLGCERVALQFPDQLLGDAVAVAARLEETTGSKMFILGDTAYGSCCVDVLGAEQAGAQALIHFGPACLSPPARPLPVAFVLRQRSVALELCVKAFEAQNPDPKAPVVLLSEPACAHALEALATLLRPRYLDLLVSSPAFPQPVGSLSPEPMPLERFGRRFPLAPGRRLEEYGAFYVGGSKASPDPDLDPDLSRLLLGWAPGQPFSSCCPDTGKTQDEGARAGRLRARRRYLVERARDARVVGLLAGTLGVAQHREALAHLRNLTQAAGKRSYVLALGRPTPAKLANFPEVDVFVLLACPLGALAPQLSGSFFQPILAPCELEAACNPAWPPPGLAPHLTHYADLLPGSPFHVALPPPESELWETPDVSLITGDLRPPPAWKSSNDHGSLALTPRPQLELAESSPAASFLSSRSWQGLEPRLGQTPVTEAVSGRRGIAIAYEDEGSG

SEQ ID NO: 4475 - protein, 465 aa, Homo sapiens
METGFPAIMYPGSFIGGWGEEYLSWEGPGLPDFVFQQQPVESEAMHCSNPKSGVVLATVARGPDACQILTRAPLGQDPPQRTVLGLLTANGQYRRTCGQGITRIRCYSGSENAFPPAGKKALPDCGVQEPPKQGFDIYMDELEQGDRDSCSVREGMAFEDVYEVDTGTLKSDLHFLLDFNTVSPMLVDSSLLSQSEDISSLGTDVINVTEYAEEIYQYLREAEIRHRPKAHYMKKQPDITEGMRTILVDWLVEVGEEYKLRAETLYLAVNFLDRFLSCMSVLRGKLQLVGTAAMLLASKYEEIYPPEVDEFVYITDDTYTKRQLLKMEHLLLKVLAFDLTVPTTNQFLLQYLRRQGVCVRTENLAKYVAELSLLEADPFLKYLPSLIAAAAFCLANYTVNKHFWPETLAAFTGYSLSEIVPCLSELHKAYLDIPHRPQQAIREKYKASKYLCVSLMEPPAVLLLQ

SEQ ID NO: 4476 - protein, 325 aa, Homo sapiens
MSLQSRLSGRLAQLRAAGQLLVPPRPRPGHLAGATRTRSSTCGPPAFLGVFGRRARTSAGVGAWGAAAVGRTAGVRTWAPLAMAAKVDLSTSTDWKEAKSFLKGLSDKQREEHYFCKDFVRLKKIPTWKEMAKGVAVKVEEPRYKKDKQLNEKISLLRSDITKLEVDAIVNAANSSLLGGGGVDGCIHRAAGPLLTDECRTLQSCKTGKAKITGGYRLPAKYVIHTVGPIAYGEPSASQAAELRSCYLSSLDLLLEHRLRSVAFPCISTGVFGYPCEAAAEIVLATLREWLEQHKDKVDRLIICVFLEKDEDIYRSRLPHYFPVA

SEQ ID NO: 4477 - protein, 171 aa, Homo sapiens
MHPFYTRAATMIGEIAAAVSFISKFLRTKGLTSERQLQTFSQSLQELLAEHYKHHWFPEKPCKGSGYRCIRINHKMDPLIGQAAQRIGLSSQELFRLLPSELTLWVDPYEVSYRIGEDGSICVLYEASPAGGSTQNSTNVQMVDSRISCKEELLLGRTSPSKNYNMMTVSG

SEQ ID NO: 4478 - protein, 1849 aa, Homo sapiens
MARLADYFIVVGYDHEKPGSGEGLGKIIQRFPQKDWDDTPFPQGIELFCQPGGWQLSRERKQPTFFVVVLTDIDSDRHYCSCLTFYEAEINLQGTKKEEIEGEAKVSGLIQPAEVFAPKSLVLVSRLYYPEIFRACLGLIYTVYVDSLNVSLESLIANLCACLVPAAGGSQKLFSLGAGDRQLIQTPLHDSLPITGTSVALLFQQLGIQNVLSLFCAVLTENKVLFHSASFQRLSDACRALESLMFPLKYSYPYIPILPAQLLEVLSSPTPFIIGVHSVFKTDVHELLDVIIADLDGGTIKIPECIHLSSLPEPLLHQTQSALSLILHPDLEVADHAFPPPRTALSHSKMLDKEVRAVFLRLFAQLFQGYRSCLQLIRIHAEPVIHFHKTAFLGQRGLVENDFLTKVLSGMAFAGFVSERGPPYRSCDLFDELVAFEVERIKVEENNPVKMIKHVRELAEQLFKNENPNPHMAFQKVPRPTEGSHLRVHILPFPEINEARVQELIQENVAKNQNAPPATRIEKKCVVPAGPPVVSIMDKVTTVFNSAQRLEVVRNCISFIFENKILETEKTLPAALRALKGKAARQCLTDELGLHVQQNRAILDHQQFDYIIRMMNCTLQDCSSLEEYNIAAALLPLTSAFYRKLAPGVSQFAYTCVQDHPIWTNQQFWETTFYNAVQEQVRSLYLSAKEDNHAPHLKQKDKLPDDHYQEKTAMDLAAEQLRLWPTLSKSTQQELVQHEESTVFSQAIHFANLMVNLLVPLDTSKNKLLRTSAPGDWESGSNSIVTNSIAGSVAESYDTESGFEDSENTDIANSVVRFITRFIDKVCTESGVTQDHIKSLHCMIPGIVAMHIETLEAVHRESRRLPPIQKPKILRPALLPGEEIVCEGLRVLLDPDGREEATGGLLGGPQLLPAEGALFLTTYRILFRGTPHDQLVGEQTVVRSFPIASITKEKKITMQNQLQQNMQEGLQITSASFQLIKVAFDEEVSPEVVEIFKKQLMKFRYPQSIFSTFAFAAGQTTPQIILPKQKEKNTSFRTFSKTIVKGAKRAGKMTIGRQYLLKKKTGTIVEERVNRPGWNEDDDVSVSDESELPTSTTLKASEKSTMEQLVEKACFRDYQRLGLGTISGSSSRSRPEYFRITASNRMYSLCRSYPGLLVVPQAVQDSSLPRVARCYRHNRLPVVCWKNSRSGTLLLRSGGFHGKGVVGLFKSQNSPQAAPTSSLESSSSIEQEKYLQALLNAVSVHQKLRGNSTLTVRPAFALSPGVWASLRSSTRLISSPTSFIDVGARLAGKDHSASFSNSSYLQNQLLKRQAALYIFGEKSQLRNFKVEFALNCEFVPVEFHEIRQVKASFKKLMRACIPSTIPTDSEVTFLKALGDSEWFPQLHRIMQLAVVVSEVLENGSSVLVCLEEGWDITAQVTSLVQLLSDPFYRTLEGFQMLVEKEWLSFGHKFSQRSSLTLNCQGSGFAPVFLQFLDCVHQVHNQYPTEFEFNLYYLKFLAFHYVSNRFKTFLLDSDYERLEHGTLFDDKGEKHAKKGVCIWECIDRMHKRSPIFFNYLYSPLEIEALKPNVNVSSLKKWDYYIEETLSTGPSYDWMMLTPKHFPSEDSDLAGEAGPRSQRRTVWPCYDDVSCTQPDALTSLFSEIEKLEHKLNQAPEKWQQLWERVTVDLKEEPRTDRSQRHLSRSPGIVSTNLPSYQKRSLLHLPDSSMGEEQNSSISPSNGVERRAATLYSQYTSKNDENRSFEGTLYKRGALLKGWKPRWFVLDVTKHQLRYYDSGEDTSCKGHIDLAEVEMVIPAGPSMGAPKHTSDKAFFDLKTSKRVYNFCAQDGQSAQQWMDKIQSCISDA

SEQ ID NO: 4479 - protein, 433 aa, Homo sapiens
MALRVTRNSKINAENKAKINMAGAKRVPTAPAATSKPGLRPRTALGDIGNKVSEQLQAKMPMKKEAKPSATGKVIDKKLPKPLEKVPMLVPVPVSEPVPEPEPEPEPEPVKEEKLSPEPILVDTASPSPMETSGCAPAEEDLCQAFSDVILAVNDVDAEDGADPNLCSEYVKDIYAYLRQLEEEQAVRPKYLLGREVTGNMRAILIDWLVQVQMKFRLLQETMYMTVSIIDRFMQNNCVPKKMLQLVGVTAMFIASKYEEMYPPEIGDFAFVTDNTYTKHQIRQMEMKILRALNFGLGRPLPLHFLRRASKIGEVDVEQHTLAKYLMELTMLDYDMVHFPPSQIAAGAFCLALKILDNGEWTPTLQHYLSYTEESLLPVMQHLAKNVVMVNQGLTKHMTVKNKYATSKHAKISTLPQLNSALVQDLAKAVAKV

SEQ ID NO: 4480 - protein, 625 aa, Homo sapiens
MACYIYQLPSWVLDDLCRNMDALSEWDWMEFASYVITDLTQLRKIKSMERVQGVSITRELLWWWGMRQATVQQLVDLLCRLELYRAAQIILNWKPAPEIRCPIPAFPDSVKPEKPLAASVRKAEDEQEEGQPVRMATFPGPGSSPARAHQPAFLQPPEEDAPHSLRSDLPTSSDSKDFSTSIPKQEKLLSLAGDSLFWSEADVVQATDDFNQNRKISQGTFADVYRGHRHGKPFVFKKLRETACSSPGSIERFFQAELQICLRCCHPNVLPVLGFCAARQFHSFIYPYMANGSLQDRLQGQGGSDPLPWPQRVSICSGLLCAVEYLHGLEIIHSNVKSSNVLLDQNLTPKLAHPMAHLCPVNKRSKYTMMKTHLLRTSAAYLPEDFIRVGQLTKRVDIFSCGIVLAEVLTGIPAMDNNRSPVYLKDLLLSDIPSSTASLCSRKTGVENVMAKEICQKYLEKGAGRLPEDCAEALATAACLCLRRRNTSLQEVCGSVAAVEERLRGRETLLPWSGLSEGTGSSSNTPEETDDVDNSSLDASSSMSVAPWAGAATPLLPTENGEGRLRVIVGREADSSSEACVGLEPPQDVTETSWQIEINEAKRKLMENILLYKEEKVDSIELFGP

SEQ ID NO: 4481 - protein, 370 aa, Homo sapiens
MLGAVEGPRWKQAEDIRDIYDFRDVLGTGAFSEVILAEDKRTQKLVAIKCIAKEALEGKEGSMENEIAVLHKIKHPNIVALDDIYESGGHLYLIMQLVSGGELFDRIVEKGFYTERDASRLIFQVLDAVKYLHDLGIVHRDLKPENLLYYSLDEDSKIMISDFGLSKMEDPGSVLSTACGTPGYVAPEVLAQKPYSKAVDCWSIGVIAYILLCGYPPFYDENDAKLFEQILKAEYEFDSPYWDDISDSAKDFIRHLMEKDPEKRFTCEQALQHPWIAGDTALDKNIHQSVSEQIKKNFAKSKWKQAFNATAVVRHMRKLQLGTSQEGQGQTASHGELLTPVAGGPAAGCCCRDCCVEPGTELSPTLPHQL

SEQ ID NO: 4482 - protein, 633 aa, Homo sapiens
MAAAAAAATTAACSSGSAGTDAAGASGLQQPPPQPQPQPAAAAPAQPPPEPPRKPRMDPRRRQAALSFLTNISLDGRLPPQDAEWGGGEEGGAAKPGAGGACGARTRFSLLAAAERGGCIALAAPGTPAAGLAAGSGPCLPQPSSLPPLIPGGHATVSGPGVARGFASPLGAGRASGEQWQPPRPAPLAACAQLQLLDGSGAAGQEELEEDDAFISVQVPAAAFLGSGTPGSGSGSRGRLNSFTQGILPIAFSRPTSQNYCSLEQPGQGGSTSAFEQLQRSRRRLISQRSSLETLEDIEENAPLRRCRTLSGSPRPKNFKKIHFIKNMRQHDTRNGRIVLISGRRSFCSIFSVLPYRDSTQVGDLKLDGGRQSTGAVSLKEIIGLEGVELGADGKTVSYTQFLLPTNAFGARRNTIDSTSSFSQFRNLSHRSLSIGRASGTQGSLDTGSDLGDFMDYDPNLLDDPQWPCGKHKRVLIFPSYMTTVIDYVKPSDLKKDMNETFKEKFPHIKLTLSKIRSLKREMRKLAQEDCGLEEPTVAMAFVYFEKLALKGKLNKQNRKLCAGACVLLAAKIGSDLKKHEVKHLIDKLEEKFRLNRRELIAFEFPVLVALEFALHLPEHEVMPHYRRLVQSS

SEQ ID NO: 4483 - protein, 427 aa, Homo sapiens
MAPKKRPETQKTSEIVLRPRNKRSRSPLELEPEAKKLCAKGSGPSRRCDSDCLWVGLAGPQILPPCRSIVRTLHQHKLGRASWPSVQQGLQQSFLHTLDSYRILQKAAPFDRRATSLAWHPTHPSTVAVGSKGGDIMLWNFGIKDKPTFIKGIGAGGSITGLKFNPLNTNQFYASSMEGTTRLQDFKGNILRVFASSDTINIWFCSLDVSASSRMVVTGDNVGNVILLNMDGKELWNLRMHKKKVTHVALNPCCDWFLATASVDQTVKIWDLRQVRGKASFLYSLPHRHPVNAACFSPDGARLLTTDQKSEIRVYSASQWDCPLGLIPHPHRHFQHLTPIKAAWHPRYNLIVVGRYPDPNFKSCTPYELRTIDVFDGNSGKMMCQLYDPESSGISSLNEFNPMGDTLASAMGYHILIWSQEEARTRK

SEQ ID NO: 4484 - protein, 237 aa, Homo sapiens
MAQPILGHGSLQPASAAGLASLELDSSLDQYVQIRIFKIIVIGDSNVGKTCLTFRFCGGTFPDKTEATIGVDFREKTVEIEGEKIKVQVWDTAGQERFRKSMVEHYYRNVHAVVFVYDVTKMTSFTNLKMWIQECNGHAVPPLVPKVLVGNKCDLREQIQVPSNLALKFADAHNMLLFETSAKDPKESQNVESIFMCLACRLKAQKSLLYRDAERQQGKVQKLEFPQEANSKTSCPC

SEQ ID NO: 4485 - protein, 90 aa, Homo sapiens
MDPLRAQQLAAELEVEMMADMYNRMTSACHRKCVPPHYKEAELSKGESVCLDRCVSKYLDIHERMGKKLTELSMQDEELMKRVQQSSGPA

SEQ ID NO: 4486 - protein, 149 aa, Homo sapiens
MEKEETTRELLLPNWQGSGSHGLTIAQRDDGVFVQEVTQNSPAARTGVVKEGDQIVGATIYFDNLQSGEVTQLLNTMGHHTVGLKLHRKGDRSPEPGQTWTREVFSSCSSEVVLNTPQPSALECKDQNKQKEASSQAGAVSVSTPNAGL

SEQ ID NO: 4487 - protein, 854 aa, Homo sapiens
MALRLVADFDLGKDVLPWLRAQRAVSEASGAGSGGADVLENDYESLHVLNVERNGNIIYTYKDDKGNVVFGLYDCQTRQNELLYTFEKDLQVFSCSVNSERTLLAASLVQSTKEGKRNELQPGSKCLTLLVEIHPVNNVKVLKAVDSYIWVQFLYPHIESHPLPENHLLLISEEKYIEQFRIHVAQEDGNRVVIKNSGHLPRDRIAEDFVWAQWDMSEQRLYYIDLKKSRSILKCIQFYADESYNLMFEVPLDISLSNSGFKLVNFGCDYHQYRDKFSKHLTLCVFTNHTGSLCVCYSPKCASWGQITYSVFYIHKGHSKTFTTSLENVGSHMTKGITFLNLDYYVAVYLPGHFFHLLNVQHPDLICHNLFLTGNNEMIDMLPHCPLQSLSGSLVLDCCSGKLYRALLSQSSLLQLLQNTCLDCEKMAALHCALYCGQGAQFLEAQIIQWISENVSACHSFDLIQEFIIASSYWSVYSETSNMDKLLPHSSVLTWNTEIPGITLVTEDIALPLMKVLSFKGYWEKLNSNLEYVKYAKPHFHYNNSVVRREWHNLISEEKTGKRRSAAYVRNILDNAVKVISNLEARNLGPRLTPLLQEEDSHQRLLMGLMVSELKDHFLRHLQGVEKKKIEQMVLDYISKLLDLICHIVETNWRKHNLHSWVLHFNSRGSAAEFAVFHIMTRILEATNSLFLPLPPGFHTLHTILGVQCLPLHNLLHCIDSGVLLLTETAVIRLMKDLDNTEKNEKLKFSIIVRLPPLIGQKICRLWDHPMSSNIISRNHVTRLLQNYKKQPRNSMINKSSFSVEFLPLNYFIEILTDIESSNQALYPFEGHDNVDAEFVEEAALKHTAMLLGL

SEQ ID NO: 4488 - protein, 155 aa, Homo sapiens
MAAETRNVAGAEAPPPQKRYYRQRAHSNPMADHTLRYPVKPEEMDWSELYPEFFAPLTQNQSHDDPKDKKEKRAQAQVEFADIGCGYGGLLADKDVLPLPRPTFQADKAQVANHQSHPASRICLRAKSWGAGVYHNRCAGATRLDVHSFRRAPTV

SEQ ID NO: 4489 - protein, 303 aa, Homo sapiens
MATSRYEPVAEIGVGAYGTVYKARDPHSGHFVALKSVRVPNGGGGGGGLPISTVREVALLRRLEAFEHPNVVRLMDVCATSRTDREIKVTLVFEHVDQDLRTYLDKAPPPGLPAETIKDLMRQFLRGLDFLHANCIVHRDLKPENILVTSGGTVKLADFGLARIYSYQMALTPVVVTLWYRAPEVLLQSTYATPVDMWSVGCIFAEMFRRKPLFCGNSEADQLGKIFDLIGLPPEDDWPRDVSLPRGAFPPRGPRPVQSVVPEMEESGAQLLLEMLTFNPHKRISAFRALQHSYLHKDEGNPE

SEQ ID NO: 4490 - protein, 778 aa, Homo sapiens
MTTRQATKDPLLRGVSPTPSKIPVRSQKRTPFPTVTSCAVDQENQDPRRWVQKPPLNIQRPLVDSAGPRPKARHQAETSQRLVGISQPRNPLEELRPSPRGQNVGPGPPAQTEAPGTIEFVADPAALATILSGEGVKSCHLGRQPSLAKRVLVRGSQGGTTQRVQGVRASAYLAPRTPTHRLDPARASCFSRLEGPGPRGRTLCPQRLQALISPSGPSFHPSTRPSFQELRRETAGSSRTSVSQASGLLLETPVQPAFSLPKGEREVVTHSDEGGVASLGLAQRVPLRENREMSHTRDSHDSHLMPSPAPVAQPLPGHVVPCPSPFGRAQRVPSPGPPTLTSYSVLRRLTVQPKTRFTPMPSTPRVQQAQWLRGVSPQSCSEDPALPWEQVAVRLFDQESCIRSLEGSGKPPVATPSGPHSNRTPSLQEVKIQRIGILQQLLRQEVEGLVGGQCVPLNGGSSLDMVELQPLLTEISRTLNATEHNSGTSHLPGLLKHSGLPKPCLPEECGEPQPCPPAEPGPPEAFCRSEPEIPEPSLQEQLEVPEPYPPAEPRPLESCCRSEPEIPESSRQEQLEVPEPCPPAEPRPLESYCRIEPEIPESSRQEQLEVPEPCPPAEPGPLQPSTQGQSGPPGPCPRVELGASEPCTLEHRSLESSLPPCCSQWAPATTSLIFSSQHPLCASPPICSLQSLRPPAGQAGLSNLAPRTLALRERLKSCLTAIHCFHEARLDDECAFYTSRAPPSGPTRVCTNPVATLLEWQDALCFIPVGSAAPQGSP

SEQ ID NO: 4491 - protein, 2120 aa, Homo sapiens
MRSFKRVNFGTLLSSQKEAEELLPALKEFLSNPPAGFPSSRSDAERRQACDAILRACNQQLTAKLACPRHLGSLLELAELACDGYLVSTPQRPPLYLERILFVLLRNAAAQGSPEATLRLAQPLHACLVQCSREAAPQDYEAVARGSFSLLWKGAEALLERRAAFAARLKALSFLVLLEDESTPCEVPHFASPTACRAVAAHQLFDASGHGLNEADADFLDDLLSRHVIRALVGERGSSSGLLSPQRALCLLELTLEHCRRFCWSRHHDKAISAVEKAHSYLRNTNLAPSLQLCQLGVKLLQVGEEGPQAVAKLLIKASAVLSKSMEAPSPPLRALYESCQFFLSGLERGTKRRYRLDAILSLFAFLGGYCSLLQQLRDDGVYGGSSKQQQSFLQMYFQGLHLYTVVVYDFAQGCQIVDLADLTQLVDSCKSTVVWMLEALEGLSGQELTDHMGMTASYTSNLAYSFYSHKLYAEACAISEPLCQHLGLVKPGTYPEVPPEKLHRCFRLQVESLKKLGKQAQGCKMVILWLAALQPCSPEHMAEPVTFWVRVKMDAARAGDKELQLKTLRDSLSGWDPETLALLLREELQAYKAVRADTGQERFNIICDLLELSPEETPAGAWARATHLVELAQVLCYHDFTQQTNCSALDAIREALQLLDSVRPEAQARDQLLDDKAQALLWLYICTLEAKMQEGIERDRRAQAPGNLEEFEVNDLNYEDKLQEDRFLYSNIAFNLAADAAQSKCLDQALALWKELLTKGQAPAVRCLQQTAASLQILAALYQLVAKPMQALEVLLLLRIVSERLKDHSKAAGSSCHITQLLLTLGCPSYAQLHLEEAASSLKHLDQTTDTYLLLSLTCDLLRSQLYWTHQKVTKGVSLLLSVLRDPALQKSSKAWYLLRVQVLQLVAAYLSLPSNNLSHSLWEQLCAQGWQTPEIALIDSHKLLRSIILLLMGSDILSTQKAAVETSFLDYGENLVQKWQVLSEVLSCSEKLVCHLGRLGSVSEAKAFCLEALKLTTKLQIPRQCALFLVLKGELELARNDIDLCQSDLQQVLFLLESCTEFGGVTQHLDSVKKVHLQKGKQQAQVPCPPQLPEEELFLRGPALELVATVAKEPGPIAPSTNSSPVLKTKPQPIPNFLSHSPTCDCSLCASPVLTAVCLRWVLVTAGVRLAMGHQAQGLDLLQVVLKGCPEAAERLTQALQASLNHKTPPSLVPSLLDEILAQAYTLLALEGLNQPSNESLQKVLQSGLKFVAARIPHLEPWRASLLLIWALTKLGGLSCCTTQLFASSWGWQPPLIKSVPGSEPSKTQGQKRSGRGRQKLASAPLRLNNTSQKGLEGRGLPCTPKPPDRIRQAGPHVPFTVFEEVCPTESKPEVPQAPRVQQRVQTRLKVNFSDDSDLEDPVSAEAWLAEEPKRRGTASRGRGRARKGLSLKTDAVVAPGSAPGNPGLNGRSRRAKKVASRHCEERRPQRASDQARPGPEIMRTIPEEELTDNWRKMSFEILRGSDGEDSASGGKTPAPGPEAASGEWELLRLDSSKKKLPSPCPDKESDKDLGPRLRLPSAPVATGLSTLDSICDSLSVAFRGISHCPPSGLYAHLCRFLALCLGHRDPYATAFLVTESVSITCRHQLLTHLHRQLSKAQKHRGSLEIADQLQGLSLQEMPGDVPLARIQRLFSFRALESGHFPQPEKESFQERLALIPSGVTVCVLALATLQPGTVGNTLLLTRLEKDSPPVSVQIPTGQNKLHLRSVLNEFDAIQKAQKENSSCTDKREWWTGRLALDHRMEVLIASLEKSVLGCWKGLLLPSSEEPGPAQEASRLQELLQDCGWKYPDRTLLKIMLSGAGALTPQDIQALAYGLCPTQPERAQELLNEAVGRLQGLTVPSNSHLVLVLDKDLQKLPWESMPSLQALPVTRLPSFRFLLSYSIIKEYGASPVLSQGVDPRSTFYVLNPHNNLSSTEEQFRANFSSEAGWRGVVGEVPRPEQVQEALTKHDLYIYAGHGAGARFLDGQAVLRLSCRAVALLFGCSSAALAVRGNLEGAGIVLKYIMAGCPLFLGNLWDVTDRDIDRYTEALLQGWLGAGPGAPLLYYVNQARQAPRLKYLIGAAPIAYGLPVSLR

SEQ ID NO: 4492 - protein, 320 aa, Homo sapiens
MAFPKKKLQGLVAATITPMTENGEINFSVIGQYVDYLVKEQGVKNIFVNGTTGEGLSLSVSERRQVAEEWVTKGKDKLDQVIIHVGALSLKESQELAQHAAEIGADGIAVIAPFFLKPWTKDILINFLKEVAAAAPALPFYYYHIPALTGVKIRAEELLDGILDKIPTFQGLKFSDTDLLDFGQCVDQNRQQQFAFLFGVDEQLLSALVMGATGAVGSTYNYLGKKTNQMLEAFEQKDFSLALNYQFCIQRFINFVVKLGFGVSQTKAIMTLVSGIPMGPPRLPLQKASREFTDSAEAKLKSLDFLSFTDLKDGNLEAGS

SEQ ID NO: 4493 - protein, 682 aa, Homo sapiens
MSTPAVPQDLQLPPSQRAQSAFKEQRRQKLKEHLLRRKTLFAYKQENEMLSSRDQRVVTSEDQVQEGTKVLKLKTKMADKENMKRPAESKNNTVVGKHCIPLKPSNELTNSTVVIDTHKPKDSNQTPHLLLTEDDPQSQHMTLSQAFHLKNNSKKKQMTTEKQKQDANMPKKPVLGSYRGQIVQSKINSFRKPLQVKDESSAATKKLSATIPKATKPQPVNTSSVTVKSNRSSNMTATTKFVSTTSQNTQLVRPPIRSHHSNTRDTVKQGISRTSANVTIRKGPHEKELLQSKTALSSVKTSSSQGIIRNKTLSRSIASEVIARPASLSNDKLMEKSEPVDQRRHTAGKAIVDSRSAQPKETSEERKARLSEWKAGKGRVLKRPPNSVVTQHEPAGQNEKPVGSFWTTMAEEDEQRLFTEKVNNTFSECLNLINEGCPKEDILVTLNDLIKNIPDAKKLVKYWICLALIEPITSPIENIIAIYEKAILAGAQPIEEMRHTIVDILTMKSQEKANLGENMEKSCASKEEVKEVSIEDTGVDVDPEKLEMESKLHRNLLFQDCEKEQDNKTKDPTHDVKTPNTETRTSCLIKYNVSTTPYLQSVKKKVQFDGTNSAFKELKFLTPVRRSRRLQEKTSKLPDMLKDHYPCVSSLEQLTELGRETDAFVCRPNAALCRVYYEADTT

SEQ ID NO: 4494 - protein, 164 aa, Homo sapiens [sequence omitted]

SEQ ID NO: 4495 - protein, 579 aa, Homo sapiens
MNKLYIGNLSENAAPSDLESIFKDAKIPVSGPFLVKTGYAFVDCPDESWALKAIEALSGKIELHGKPIEVEHSVPKRQRIRKLQIRNIPPHLQWEVLDSLLVQYGVVESCEQVNTDSETAVVNVTYSSKDQARQALDKLNGFQLENFTLKVAYIPDEMAAQQNPLQQPRGRRGLGQRGSSRQGSPGSVSKQKPCDLPLRLLVPTQFVGAIIGKEGATIRNITKQTQSKIDVHRKENAGAAEKSITILSTPEGTSAACKSILEIMHKEAQDIKFTEEIPLKILAHNNFVGRLIGKEGRNLKKIEQDTDTKITISPLQELTLYNPERTITVKGNVETCAKAEEEIMKKIRESYENDIASMNLQAHLIPGLNLNALGLFPPTSGMPPPTSGPPSAMTPPYPQFEQSETETVHLFIPALSVGAIIGKQGQHIKQLSRFAGASIKIAPAEAPDAKVRMVIITGPPEAQFKAQGRIYGKIKEENFVSPKEEVKLEAHIRVPSFAAGRVIGKGGKTVNELQNLSSAEVVVPRDQTPDENDQVVVKITGHFYACQVAQRKIQEILTQVKQHQQQKALQSGPPQSRRK

SEQ ID NO: 4496 - protein, 1249 aa, Homo sapiens
MSSMWSEYTIGGVKIYFPYKAYPSQLAMMNSILRGLNSKQHCLLESPTGSGKSLALLCSALAWQQSLSGKPADEGVSEKAEVQLSCCCACHSKDFTNNDMNQGTSRHFNYPSTPPSERNGTSSTCQDSPEKTTLAAKLSAKKQASIYRDENDDFQVEKKRIRPLETTQQIRKRHCFGTEVHNLDAKVDSGKTVKLNSPLEKINSFSPQKPPGHCSRCCCSTKQGNSQESSNTIKKDHTGKSKIPKIYFGTRTHKQIAQITRELRRTAYSGVPMTILSSRDHTCVHPEVVGNFNRNEKCMELLDGKNGKSCYFYHGVHKISDQHTLQTFQGMCKAWDIEELVSLGKKLKACPYYTARELIQDADIIFCPYNYLLDAQIRESMDLNLKEQVVILDEAHNIEDCARESASYSVTEVQLRFARDELDSMVNNNIRKKDHEPLRAVCCSLINWLEANAEYLVERDYESACKIWSGNEMLLTLHKMGITTATFPILQGHFSAVLQKEEKISPIYGKEEAREVPVISASTQIMLKGLFMVLDYLFRQNSRFADDYKIAIQQTYSWTNQIDISDKNGLLVLPKNKKRSRQKTAVHVLNFWCLNPAVAFSDINGKVQTIVLTSGTLSPMKSFSSELGVTFTIQLEANHIIKNSQVWVGTIGSGPKGRNLCATFQNTETFEFQDEVGALLLSVCQTVSQGILCFLPSYKLLEKLKERWLSTGLWHNLELVKTVIVEPQGGEKTNFDELLQVYYDAIKYKGEKDGALLVAVCRGKVSEGLDFSDDNARAVITIGIPFPNVKDLQVELKRQYNDHHSKLRGLLPGRQWYEIQAYRALNQALGRCIRHRNDWGALILVDDRFRNNPSRYISGLSKWVRQQIQHHSTFESALESLAEFSKKHQKVLNVSIKDRTNIQDNESTLEVTSLKYSTSPYLLEAASHLSPENFVEDEAKICVQELQCPKIITKNSPLPSSIISRKEKNDPVFLEEAGKAEKIVISRSTSPTFNKQTKRVSWSSFNSLGQYFTGKIPKATPELGSSENSASSPPRFKTEKMESKTVLPFTDKCESSNLTVNTSFGSCPQSETIISSLKIDATLTRKNHSEHPLCSEEALDPDIELSLVSEEDKQSTSNRDFETEAEDESIYFTPELYDPEDTDEEKNDLAETDRGNRLANNSDCILAKDLFEIRTIKEVDSAREVKAEDCIDTKLNGILHIEESKIDDIDGNVKTTWINELELGKTHEIEIKNFKPSPSKNKGMFPGFK

SEQ ID NO: 4497 - protein, 505 aa, Homo sapiens
MGLVSSKKPDKEKPIKEKDKGQWSPLKVSAQDKDAPPLPPLVVFNHLTPPPPDEHLDEDKHFVVALYDYTAMNDRDLQMLKGEKLQVLKGTGDWWLARSLVTGREGYVPSNFVARVESLEMERWFFRSQGRKEAERQLLAPINKAGSFLIRESETNKGAFSLSVKDVTTQGELIKHYKIRCLDEGGYYISPRITFPSLQALVQHYSKKGDGLCQRLTLPCVRPAPQNPWAQDEWEIPRQSLRLVRKLGSGQFGEVWMGYYKNNMKVAIKTLKEGTMSPEAFLGEANVMKALQHERLVRLYAVVTKEPIYIVTEYMARGCLLDFLKTDEGSRLSLPRLIDMSAQIAEGMAYIERMNSIHRDLRAANILVSEALCCKIADFGLARIIDSEYTAQEGAKFPIKWTAPEAIHFGVFTIKADVWSFGVLLMEVVTYGRVPYPGMSNPEVIRNLERGYRMPRPDTCPPELYRGVIAECWRSRPEERPTFEFLQSVLEDFYTATERQYELQP

SEQ ID NO: 4498 - protein, 859 aa, Homo sapiens
MEIEVSVAECKSVPGITSTPHPMDHPSAFYSPPHNGLLTDHHESLDNDVAREIRYLDEVLEANCCDSAVDGTYNGTSSPEPGAVVLVGGLSPPVHEATQPEPTERTASRQAPPHIELSNSSPDPMAEAERTNGHSPSQPRDALGDSLQVPVSPSSTTSSRCSSRDGEFTLTTLKKEAKFELRAFHEDKKPSKLFEDDEHEKEQYCIRKVRPSEEMLELEKERRELIRSQAVKKNPGIAAKWWNPPQEKTIEEQLDEEHLESHKKYKERKERRAQQEQLLLQKQLQQQQQQPPSQLCTAPASSHERASMIDKAKEDIVTEQIDFSAARKQFQLMENSRQAVAKGQSTPRLFSIKPFYRPLGSVNSDKPLTNPRPPSVGGPPEDSGASAAKGQKSPGALETPSAAGSQGNTASQGKEGPYSEPSKRGPLSKLWAEDGEFTSARAVLTVVKDDDHGILDQFSRSVNVSLTQEELDSGLDELSVRSQDTTVLETLSNDFSMDNISDSGASNETTNALQENSLADFSLPQTPQTDNPSEGRGEGVSKSFSDHGFYSPSSTLGDSPLVDDPLEYQAGLLVQNAIQQAIAEQVDKAVSKTSRDGAEQQGPEATVEEAEAAAFGSEKPQSMFEPPQVSSPVQEKRDVLPKILPAEDRALRERGPPQPLPAVQPSGPINMEETRPEGSYFSKYSEAAELRSTASLLATQESDVMVGPFKLRSRKQRTLSMIEEEIRAAQEREEELKRQRQVLQSTQSPRTKNAPSLPSRTCYKTAPGKIEKVKPPPSPTTEGPSLQPDLAPEEAAGTQRPKNLMQTLMEDYETHKSKRRERMDDSSVLEATRVNRRKSALALRWEAGIYANQEEEDNE

SEQ ID NO: 4499 - protein, 123 aa, Homo sapiens [sequence omitted]

SEQ ID NO: 4500 - protein, 915 aa, Homo sapiens
MARRSSFQSCQIISLFTFAVGVNICLGFTAHRIKRAEGWEEGPPTVLSDSPWTNISGSCKGRCFELQEAGPPDCRCDNLCKSYTSCCHDFDELCLKTARGWECTKDRCGEVRNEENACHCSEDCLARGDCCTNYQVVCKGESHWVDDDCEEIKAAECPAGFVRPPLIIFSVDGFRASYMKKGSKVMPNIEKLRSCGTHSPYMRPVYPTKTFPNLYTLATGLYPESHGIVGNSMYDPVFDATFHLRGREKFNHRWWGGQPLWITATKQGVKAGTFFWSVVIPHERRILTILQWLTLPDHERPSVYAFYSEQPDFSGHKYGPFGPEESSYGSPFTPAKRPKRKVAPKRRQERPVAPPKKRRRKIHRMDHYAAETRQDKMTNPLREIDKIVGQLMDGLKQLKLHRCVNVIFVGDHGMEDVTCDRTEFLSNYLTNVDDITLVPGTLGRIRSKFSNNAKYDPKAIIANLTCKKPDQHFKPYLKQHLPKRLHYANNRRIEDIHLLVERRWHVARKPLDVYKKPSGKCFFQGDHGFDNKVNSMQTVFVGYGSTFKYKTKVPPFENIELYNVMCDLLGLKPAPNNGTHGSLNHLLRTNTFRPTMPEEVTRPNYPGIMYLQSDFDLGCTCDDKVEPKNKLDELNKRLHTKGSTEERHLLYGRPAVLYRTRYDILYHTDFESGYSEIFLMPLWTSYTVSKQAEVSSVPDHLTSCVRPDVRVSPSFSQNCLAYKNDKQMSYGFLFPPYLSSSPEAKYDAFLVTNMVPMYPAFKRVWNYFQRVLVKKYASERNGVNVISGPIFDYDYDGLHDTEDKIKQYVEGSSIPVPTHYYSIITSCLDFTQPADKCDGPLSVSSFILPHRPDNEESCNSSEDESKWVEELMKMHTARVRDIEHLTSLDFFRKTSRSYPEILTLKTYLHTYESEI

SEQ ID NO: 4501 - protein, 257 aa, Homo sapiens
MPLNVSFTNRNYDLDYDSVQPYFYCDEEENFYQQQQQSELQPPAPSEDIWKKFELLPTPPLSPSRRSGLCSPSYVAVTPFSLRGDNDGGGGSFSTADQLEMVTELLGGDMVNQSFICDPDDETFIKNIIIQDCMWSGFSAAAKLVSEKLASYQAARKDSGSPNPARGHSVCSTSSLYLQDLSAAASECIDPSVVFPYPLNDSSSPKSCASQDSSAFSPSSDSLLSSTESSPQGSPEPLVLHEETPPTTSSDSGGTRR

SEQ ID NO: 4502 - protein, 1706 aa, Homo sapiens
MGSKDHAVFFREMTQLILNEMPKAGYSSILNDFVESNFFVIDGDSLLVTCLGVKSFKWGQNLHFFYLVECYLVDLLSNGGQFTIVFFKDAEYAYFDFPELLSLRTALILHLQHNTNIDVQTEFSGCLSQDWKLFLEQHYPYFLIVSEEGLSDLQTYLFNFLIIHSWGMKVNVVLSSGHESDTLRFYAYTMESTDRNQTFSKENETVIQSAYKSLIQHLEEIRVLVLATHFEHLKWNDMMEEAYQTLFLLQHLWSEGSDIQRVLCVTSCSLSLRMYHRVLVHSNCLSLQEVEDFCRLRCLCVAFQLHLPLSQRACSRVITCSWIRNSDSFLKMNKWCEYFILSNLNVFGCWNLNLNHVSDLYDEQLLKNIAFYYEFESTQEPHLNLGDSIRRDYEDLWNVVSHLVKEFNVGKSFPLRTTRRHFLRQEKSVIQEISLEKMPSVGFIPMTSAVIDEFVGDMMKDLPILKSDDPVVPSLFKQKTSDELLHWHAQRLLSDDYDRIKCHVDEQSRDPHVLDFLKKIQDYQQFYGKSLESISTKVIVTQTTRPKEDSSGASGEILQNTKPHQITKKSKKKSFLKEDQNKAQQNDDLLFSIEEEMKNNLHSGIRKLEDYLTSCASNSVKFGVEMLGLIACFKAWKKHCRGEGKISKDLSIAVQMMKRIHSLLERYPEILEAEHHQYIAKCLKYLGFNDLANSLDPTLIGDDKNKKKYSIDIGPARFQLQYMGHYLIRDERKDRDPRVQDFIPNAWQQELLDVVDKNESAVIVAPTSSGKTYASYYCMEKVLRESDVGVVVYVAPAKSLVGQVAATVENRFTKTLPAGRTLCGAFTRDYCHNVLNCQVLITVPECFEILLLAPHRQKWVERIRYVIFDEVHYLGREVGAKFWELLLVIIRCPFLVLSATINNPNLLTKWLQSVKQYWKQADKIMEEKCISEKQADKCLNFLQDHSYKNQSYEVRLVLCGERYNDLEKHICSVKHDDVYFDHFHPCAALTTDIIEKYGFPPDLTLTPQESIQLYDTMAQVWETWPRAQELCPEEFILFKNKIVIKKLDARKYEENLKAELTNWIKNGQVKKVKRVLKNLSPDSLSSSKDMVKMFPLLVEKLRQMDKLPAIFFLFKNDDVGKRAGSVCTFLEKTETKSHPHTECHSYVFAIDEVLEKVRKTQKRITKKNPKKAEKLERKKVYRAEYINFLENLKILEISEDCTYADVKALHTEITRNKDSTLERVLPRVRFTRHGKELKALAQRGIGYHHSSMYFKEKEFVEILFVKGLIRVVTATETLALGIHMPCKSVVFAQDSVYLDALNYRQMSGRAGRRGQDLLGNVYFFDIPLPKIKRLLASSVPELRGQFPLSITLVLRLMLLASKGDDPEDAKAKVLSVLKHSLLSFKRRRAMETLKLYFLFSLQLLIKEDYLNKKGNPKKFAGLASYLHGHEPSNLVFVNFLKRGLFHNLCKPAWKGSQQFSQDVMEKLVLVLANLFGRKYIPAKFQNANLSFSQSKVILAELPEDFKAALYEYNLAVMKDFASFLLIASKSVNMKKEHQLPLSRIKFTGKECEDSQLVSHLMSCKKGRVAISPFVCLSGNTDNDLLRPETINQVILRTVGVSGTQAPLLWPWKLDNRGRRMPLNAYVLNFYKHNCLTRLDQKNGMRMGQLLKCLKDFAFNIQAISDSLSELCENKRDNVVLAFKQLSQTFYEKLQEMQIQMSQNHLE

SEQ ID NO: 4503 - protein, 150 aa, Homo sapiens
MAASQCLCCSKFLFQRQNLACFLTNPHCGSLVNADGHGEVWTDWNNMSKFFQYGWRCTTNENTYSNRTLMGNWNQERYDLRNIVQPKPLPSQFGHYFETTYDTSYNNKMPLSTHRFKREPHWFPGHQPELDPPRYKCTEKSTYMNSYSKP

SEQ ID NO: 4504 - protein, 426 aa, Homo sapiens
MIIPSLEELDSLKYSDLQNLAKSLGLRANLRATKLLKALKGYIKHEARKGNENQDESQTSASSCDETEIQISNQEEAERQPLGHVTKTRRRCKTVRVDPDSQNHEKQESQDLRATAKVPSPPDEHQEAENAVSSGNRDSKVPSEGKKSLYTDESSKPGKNKRTAITTPNFKKLHEAHFKEMESIDQYIERKKKHFEEHNSMNELKQQPINKGGVRTPVPPRGRLSVASTPISQRRSQGRSCGPASQSTLGLKGSLKRSAISAAKTGVRFSAATKDNEHKRSLTKTPARKSAHVTVSGGTPKGEAVLGTHKLKTITGNSAAVITPFKLTTEATQTPVSNKKPVFDLKASLSRPLNYEPHKGKLKPWGQSKENNYLNQHVNRINFYKKTYKQPHLQTKEEQRKKREQERKEKKAKVLGMRRGLILAED

SEQ ID NO: 4505 - protein, 960 aa, Homo sapiens
MKSARAKTPRKPTVKKGSQTNLKDPVGVYCRVRPLGFPDQECCIEVINNTTVQLHTPEGYRLNRNGDYKETQYSFKQVFGTHTTQKELFDVVANPLVNDLIHGKNGLLFTYGVTGSGKTHTMTGSPGEGGLLPRCLDMIFNSIGSFQAKRYVFKSNDRNSMDIQCEVDALLERQKREAMPNPKTSSSKRQVDPEFADMITVQEFCKAEEVDEDSVYGVFVSYIEIYNNYIYDLLEEVPFDPIKPKPPQSKLLREDKNHNMYVAGCTEVEVKSTEEAFEVFWRGQKKRRIANTHLNRESSRSHSVFNIKLVQAPLDADGDNVLQEKEQITISQLSLVDLAGSERTNRTRAEGNRLREAGNINQSLMTLRTCMDVLRENQMYGTNKMVPYRDSKLTHLFKNYFDGEGKVRMIVCVNPKAEDYEENLQVMRFAEVTQEVEVARPVDKAICGLTPGRRYRNQPRGPVGNEPLVTDVVLQSFPPLPSCEILDINDEQTLPRLIEALEKRHNLRQMMIDEFNKQSNAFKALLQEFDNAVLSKENHMQGKLNEKEKMISGQKLEIERLEKKNKTLEYKIEILEKTTTIYEEDKRNLQQELETQNQKLQRQFSDKRRLEARLQGMVTETTMKWEKECERRVAAKQLEMQNKLWVKDEKLKQLKAIVTEPKTEKPERPSRERDREKVTQRSVSPSPVPLSSNYIAQISNGQQLMSQPQLHRRSNSCSSISVASCISEWEQKIPTYNTPLKVTSIARRRQQEPGQSKTCIVSDRRRGMYWTEGREVVPTFRNEIEIEEDHCGRLLFQPDQNAPPIRLRHRRSRSAGDRWVDHKPASNMQTETVMQPHVPHAITVSVANEKALAKCEKYMLTHQELASDGEIETKLIKGDIYKTRGGGQSVQFTDIETLKQESPNGSRKRRSSTVAPAQPDGAESEWTDVETRCSVAVEMRAGSQLGPGYQHHAQPKRKKP

SEQ ID NO: 4506 - protein, 1185 aa, Homo sapiens
MSLLNPVLLPPKVKAYLSQGERFIKWDDETTVASPVILRVDPKGYYLYWTYQSKEMEFLDITSIRDTRFGKFAKMPKSQKLRDVFNMDFPDNSFLLKTLTVVSGPDMVDLTFHNFVSYKENVGKAWAEDVLALVKHPLTANASRSTFLDKILVKLKMQLNSEGKIPVKNFFQMFPADRKRVEAALSACHLPKGKNDAINPEDFPEPVYKSFLMSLCPRPEIDEIFTSYHAKAKPYMTKEHLTKFINQKQRDSRLNSLLFPPARPDQVQGLIDKYEPSGINAQRGQLSPEGMVWFLCGPENSVLAQDKLLLHHDMTQPLNHYFINSSHNTYLTAGQFSGLSSAEMYRQVLLSGCRCVELDCWKGKPPDEEPIITHGFTMTTDIFFKEAIEAIAESAFKTSPYPIILSFENHVDSPRQQAKMAEYCRTIFGDMLLTEPLEKFPLKPGVPLPSPEDLRGKILIKNKKNQFSGPTSSSKDTGGEAEGSSPPSAPAGEGTVWAGEEGTELEEEEVEEEEEEESGNLDEEEIKKMQSDEGTAGLEVTAYEEMSSLVNYIQPTKFVSFEFSAQKNRSYVISSFTELKAYDLLSKASVQFVDYNKRQMSRIYPKGTRMDSSNYMPQMFWNAGCQMVALNFQTMDLPMQQNMAVFEFNGQSGYLLKHEFMRRPDKQFNPFSVDRIDVVVATTLSITVISGQFLSERSVRTYVEVELFGLPGDPKRRYRTKLSPSTNSINPVWKEEPFVFEKILMPELASLRVAVMEEGNKFLGHRIIPINALNSGYHHLCLHSESNMPLTMPALFIFLEMKDYIPGAWADLTVALANPIKFFSAHDTKSVKLKEAMGGLPEKPFPLASPVASQVNGALAPTSNGSPAARAGAREEAMKEAAEPRTASLEELRELKGVVKLQRRHEKELRELERRGARRWEELLQRGAAQLAELGPPGVGGVGACKLGPGKGSRKKRSLPREESAGAAPGEGPEGVDGRVRELKDRLELELLRQGEEQYECVLKRKEQHVAEQISKMMELAREKQAAELKALKETSENDTKEMKKKLETKRLERIQGMTKVTTDKMAQERLKREINNSHIQEVVQVIKQMTENLERHQEKLEEKQAACLEQIREMEKQFQKEALAEYEARMKGLEAEVKESVRACLRTCFPSEAKDKPERACECPPELCEQDPLIAKADAQESRL

SEQ ID NO: 4507 - protein, 163 aa, Homo sapiens
MRIEKCYFCSGPIYPGHGMMFVRNDCKVFRFCKSKCHKNFKKKRNPRKVRWTKAFRKAAGKELTVDNSFEFEKRRNEPIKYQRELWNKTIDAMKRVEEIKQKRQAKFIMNRLKKNKELQKVQDIKEVKQNIHLIRAPLAGKGKQLEEKMVQQLQEDVDMEDAP

SEQ ID NO: 4508 - protein, 84 aa, Homo sapiens
MPYLLISTQIRMEVGPTMVGDEQSDPELMQHLGASKRRALGNNFYEYYVDDPPRIVLDKLERRGFRVLSMTGVGQTLVWCLHKE

SEQ ID NO: 4509 - protein, 1056 aa, Homo sapiens
MASQPNSSAKKKEEKGKNIQVVVRCRPFNLAERKASAHSIVECDPVRKEVSVRTGGLADKSSRKTYTFDMVFGASTKQIDVYRSVVCPILDEVIMGYNCTIFAYGQTGTGKTFTMEGERSPNEEYTWEEDPLAGIIPRTLHQIFEKLTDNGTEFSVKVSLLEIYNEELFDLLNPSSDVSERLQMFDDPRNKRGVIIKGLEEITVHNKDEVYQILEKGAAKRTTAATLMNAYSSRSHSVFSVTIHMKETTIDGEELVKIGKLNLVDLAGSENIGRSGAVDKRAREAGNINQSLLTLGRVITALVERTPHVPYRESKLTRILQDSLGGRTRTSIIATISPASLNLEETLSTLEYAHRAKNILNKPEVNQKLTKKALIKEYTEEIERLKRDLAAAREKNGVYISEENFRVMSGKLTVQEEQIVELIEKIGAVEEELNRVTELFMDNKNELDQCKSDLQNKTQELETTQKHLQETKLQLVKEEYITSALESTEEKLHDAASKLLNTVEETTKDVSGLHSKLDRKKAVDQHNAEAQDIFGKNLNSLFNNMEELIKDGSSKQKAMLEVHKTLFGNLLSSSVSALDTITTVALGSLTSIPENVSTHVSQIFNMILKEQSLAAESKTVLQELINVLKTDLLSSLEMILSPTVVSILKINSQLKHIFKTSLTVADKIEDQKKELDGFLSILCNNLHELQENTICSLVESQKQCGNLTEDLKTIKQTHSQELCKLMNLWTERFCALEEKCENIQKPLSSVQENIQQKSKDIVNKMTFHSQKFCADSDGFSQELRNFNQEGTKLVEESVKHSDKLNGNLEKISQETEQRCESLNTRTVYFSEQWVSSLNEREQELHNLLEVVSQCCEASSSDITEKSDGRKAAHEKQHNIFLDQMTIDEDKLIAQNLELNETIKIGLTKLNCFLEQDLKLDIPTGTTPQRKSYLYPSTLVRTEPREHLLDQLKRKQPELLMMLNCSENNKEETIPDVDVEEAVLGQYTEEPLSQEPSVDAGVDCSSIGGVPFFQHKKSHGKDKENRGINTLERSKVEETTEHLVTKSRLPLRAQINL

SEQ ID NO: 4510 - protein, 777 aa, Homo sapiens
MPDNRQPRNRQPRIRSGNEPRSAPAMEPDGRGAWAHSRAALDRLEKLLRCSRCTNILREPVCLGGCEHIFCSNCVSDCIGTGCPVCYTPAWIQDLKINRQLDSMIQLCSKLRNLLHDNELSDLKEDKPRKSLFNDAGNKKNSIKMWFSPRSKKVRYVVSKASVQTQPAIKKDASAQQDSYEFVSPSPPADVSERAKKASARSGKKQKKKTLAEINQKWNLEAEKEDGEFDSKEESKQKLVSFCSQPSVISSPQINGEIDLLASGSLTESECFGSLTEVSLPLAEQIESPDTKSRNEVVTPEKVCKNYLTSKKSLPLENNGKRGHHNRLSSPISKRCRTSILSTSGDFVKQTVPSENIPLPECSSPPSCKRKVGGTSGRKNSNMSDEFISLSPGTPPSTLSSSSYRRVMSSPSAMKLLPNMAVKRNHRGETLLHIASIKGDIPSVEYLLQNGSDPNVKDHAGWTPLHEACNHGHLKVVELLLQHKALVNTTGYQNDSPLHDAAKNGHVDIVKLLLSYGASRNAVNIFGLRPVDYTDDESMKSLLLLPEKNESSSASHCSVMNTGQRRDGPLVLIGSGLSSEQQKMLSELAVILKAKKYTEFDSTVTHVVVPGDAVQSTLKCMLGILNGCWILKFEWVKACLRRKVCEQEEKYEIPEGPRRSRLNREQLLPKLFDGCYFYLWGTFKHHPKDNLIKLVTAGGGQILSRKPKPDSDVTQTINTVAYHARPDSDQRFCTQYIIYEDLCNYHPERVRQGKVWKAPSSWFIDCVMSFELLPLDS

SEQ ID NO: 4511 - protein, 414 aa, Homo sapiens
MSKKISGGSVVEMQGDEMTRIIWELIKEKLIFPYVELDLHSYDLGIENRDATNDQVTKDAAEAIKKHNVGVKCATITPDEKRVEEFKLKQMWKSPNGTIRNILGGTVFREAIICKNIPRLVSGWVKPIIIGRHAYGDQYRATDFVVPGPGKVEITYTPSDGTQKVTYLVHNFEEGGGVAMGMYNQDKSIEDFAHSSFQMALSKGWPLYLSTKNTILKKYDGRFKDIFQEIYDKQYKSQFEAQKIWYEHRLIDDMVAQAMKSEGGFIWACKNYDGDVQSDSVAQGYGSLGMMTSVLVCPDGKTVEAEAAHGTVTRHYRMYQKGQETSTNPIASIFAWTRGLAHRAKLDNNKELAFFANALEEVSIETIEAGFMTKDLAACIKGLPNVQRSDYLNTFEFMDKLGENLKIKLAQAKL

SEQ ID NO: 4512 - protein, 423 aa, Homo sapiens [sequence omitted]

SEQ ID NO: 4513 - protein, 63 aa, Homo sapiens
MPGLVDSNPAPPESQEKKPLKPCCACPETKKARDACIIEKGEEHCGHLIEAHKECMRALGFKI

SEQ ID NO: 4514 - protein, 391 aa, Homo sapiens
MADIDNKEQSELDQDLDDVEEVEEEETGEETKLKARQLTVQMMQNPQILAALQERLDGLVETPTGYIESLPRVVKRRVNALKNLQVKCAQIEAKFYEEVHDLERKYAVLYQPLFDKRFEIINAIYEPTEEECEWKPDEEDEISEELKEKAKIEDEKKDEEKEDPKGIPEFWLTVFKNVDLLSDMVQEHDEPILKHLKDIKVKFSDAGQPMSFVLEFHFEPNEYFTNEVLTKTYRMRSEPDDSDPFSFDGPEIMGCTGCQIDWKKGKNVTLKTIKKKQKHKGRGTVRTVTKTVSNDSFFNFFAPPEVPESGDLDDDAEAILAADFEIGHFLRERIIPRSVLYFTGEAIEDDDDDYDEEGEEADEEGEEEGDEENDPDYDPKKDQNPAECKQQ

SEQ ID NO: 4515 - protein, 386 aa, Homo sapiens
MKDCSNGCSAECTGEGGSKEVVGTFKAKDLIVTPATILKEKPDPNNLVFGTVFTDHMLTVEWSSEFGWEKPHIKPLQNLSLHPGSSALHYAVELFEGLKAFRGVDNKIRLFQPNLNMDRMYRSAVRATLPVFDKEELLECIQQLVKLDQEWVPYSTSASLYIRPTFIGTEPSLGVKKPTKALLFVLLSPVGPYFSSGTFNPVSLWANPKYVRAWKGGTGDCKMGGNYGSSLFAQCEAVDNGCQQVLWLYGEDHQITEVGTMNLFLYWINEDGEEELATPPLDGIILPGVTRRCILDLAHQWGEFKVSERYLTMDDLTTALEGNRVREMFGSGTACVVCPVSDILYKGETIHIPTMENGPKLASRILSKLTDIQYGREESDWTIVLS

SEQ ID NO: 4516 - protein, 685 aa, Homo sapiens
MAEWLLSASWQRRAKAMTAAAGSAGRAAVPLLLCALLAPGGAYVLDDSDGLGREFDGIGAVSGGGATSRLLVNYPEPYRSQILDYLFKPNFGASLHILKVEIGGDGQTTDGTEPSHMHYALDENYFRGYEWWLMKEAKKRNPNITLIGLPWSFPGWLGKGFDWPYVNLQLTAYYVVTWIVGAKRYHDLDIDYIGIWNERSYNANYIKILRKMLNYQGLQRVKIIASDNLWESISASMLLDAELFKVVDVIGAHYPGTHSAKDAKLTGKKLWSSEDFSTLNSDMGAGCWGRILNQNYINGYMTSTIAWNLVASYYEQLPYGRCGLMTAQEPWSGHYVVESPVWVSAHTTQFTQPGWYYLKTVGHLEKGGSYVALTDGLGNLTIIIETMSHKHSKCIRPFLPYFNVSQQFATFVLKGSFSEIPELQVWYTKLGKTSERFLFKQLDSLWLLDSDGSFTLSLHEDELFTLTTLTTGRKGSYPLPPKSQPFPSTYKDDFNVDYPFFSEAPNFADQTGVFEYFTNIEDPGEHHFTLRQVLNQRPITWAADASNTISIIGDYNWTNLTIKCDVYIETPDTGGVFIAGRVNKGGILIRSARGIFFWIFANGSYRVTGDLAGWIIYALGRVEVTAKKWYTLTLTIKGHFTSGMLNDKSLWTDIPVNFPKNGWAAIGTHSFEFAQFDNFLVEATR

SEQ ID NO: 4517 - protein, 586 aa, Homo sapiens
MATATPVPPRMGSRAGGPTTPLSPTRLSRLQEKEELRELNDRLAVYIDKVRSLETENSALQLQVTEREEVRGRELTGLKALYETELADARRALDDTARERAKLQIELGKCKAEHDQLLLNYAKKESDLNGAQIKLREYEAALNSKDAALATALGDKKSLEGDLEDLKDQIAQLEASLAAAKKQLADETLLKVDLENRCQSLTEDLEFRKSMYEEEINETRRKHETRLVEVDSGRQIEYEYKLAQALHEMREQHDAQVRLYKEELEQTYHAKLENARLSSEMNTSTVNSAREELMESRMRIESLSSQLSNLQKESRACLERIQELEDLLAKEKDNSRRMLTDKEREMAEIRDQMQQQLNDYEQLLDVKLALDMEISAYRKLLEGEEERLKLSPSPSSRVTVSRASSSRSVRTTRGKRKRVDVEESEASSSVSISHSASATGNVCIEEIDVDGKFIRLKNTSEQDQPMGGWEMIRKIGDTSVSYKYTSRYVLKAGQTVTIWAANAGVTASPPTDLIWKNQNSWGTGEDVKVILKNSQGEEVAQRSTVFKTTIPEEEEEEEEAAGVVVEEELFHQQGTPRASNRSCAIM

SEQ ID NO: 4518 - protein, 474 aa, Homo sapiens
MRRVVRQSKFRHVFGQAVKNDQCYDDIRVSRVTWDSSFCAVNPRFVAIIIEASGGGAFLVLPLHKTGRIDKSYPTVCGHTGPVLDIDWCPHNDQVIASGSEDCTVMVWQIPENGLTLSLTEPVVILEGHSKRVGIVAWHPTARNVLLSAGCDNAIIIWNVGTGEALINLDDMHSDMIYNVSWNRNGSLICTASKDKKVRVIDPRKQEIVAEKEKAHEGARPMRAIFLADGNVFTTGFSRMSERQLALWNPKNMQEPIALHEMDTSNGVLLPFYDPDTSIIYLCGKGDSSIRYFEITDESPYVHYLNTFSSKEPQRGMGYMPKRGLDVNKCEIARFFKLHERKCEPIIMTVPRKSDLFQDDLYPDTAGPEAALEAEEWFEGKNADPILISLKHGYIPGKNRDLKVVKKNILDSKPTANKKCDLISIPKKTTDTASVQNEAKLDEILKEIKSIKDTICNQDERISKLEQQMAKIAA

SEQ ID NO: 4519 - protein, 345 aa, Homo sapiens
MLMFDPVPVKQEAMDPVSVSYPSNYMESMKPNKYGVIYSTPLPEKFFQTPEGLSHGIQMEPVDLTVNKRSSPPSAGNSPSSLKFPSSHRRASPGLSMPSSSPPIKKYSPPSPGVQPFGVPLSMPPVMAAALSRHGIRSPGILPVIQPVVVQPVPFMYTSHLQQPLMVSLSEEMENSSSSMQVPVIESYEKPISQKKIKIEPGIEPQRTDYYPEEMSPPLMNSVSPPQALLQENHPSVIVQPGKRPLPVESPDTQRKRRIHRCDYDGCNKVYTKSSHLKAHRRTHTGEKPYKCTWEGCTWKFARSDELTRHFRKHTGIKPFQCPDCDRSFSRSDHLALHRKRHMLV

SEQ ID NO: 4520 - protein, 144 aa, Homo sapiens
MKSQWCRPVAMDLGVYQLRHFSISFLSSLLGTENASVRLDNSSSGASVVAIDNKIEQAMDLVKSHLMYAVREEVEVLKEQIKELIEKNSQLEQENNLLKTLASPEQLAQFQAQLQTGSPPATTQPQGTTQPPAQPASQGSGPTA

SEQ ID NO: 4521 - protein, 642 aa, Homo sapiens
MKRSSVSSGGAGRLSMQELRSQDVNKQGLYTPQTKEKPTFGKLSINKPTSERKVSLFGKRTSGHGSRNSQLGIFSSSEKIKDPRPLNDKAFIQQCIRQLCEFLTENGYAHNVSMKSLQAPSVKDFLKIFTFLYGFLCPSYELPDTKFEEEVPRIFKDLGYPFALSKSSMYTVGAPHTWPHIVAALVWLIDCIKIHTAMKESSPLFDDGQPWGEETEDGIMHNKLFLDYTIKCYESFMSGADSFDEMNAELQSKLKDLFNVDAFKLESLEAKNRALNEQIARLEQEREKEPNRLESLRKLKASLQGDVQKYQAYMSNLESHSAILDQKLNGLNEEIARVELECETIKQENTRLQNIIDNQKYSVADIERINHERNELQQTINKLTKDLEAEQQKLWNEELKYARGKEAIETQLAEYHKLARKLKLIPKGAENSKGYDFEIKFNPEAGANCLVKYRAQVYVPLKELLNETEEEINKALNKKMGLEDTLEQLNAMITESKRSVRTLKEEVQKLDDLYQQKIKEAEEEDEKCASELESLEKHKHLLESTVNQGLSEAMNELDAVQREYQLVVQTTTEERRKVGNNLQRLLEMVATHVGSVEKHLEEQIAKVDREYEECMSEDLSENIKEIRDKYEKKATLIKSSEE

SEQ ID NO: 4522 - protein, 122 aa, Homo sapiens
MSAAEAGGVFHRARGRTLAAFPAEKESEWKGPFYFILGADPQFGLIKAWSTGDCDNGGDEWEQEIRLTEQAVQAINKLNPKPKFFVLCGDLIHAMPAGQRPPRAPSRGGHRRENCSPILQSR

SEQ ID NO: 4523 - protein, 115 aa, Homo sapiens
MSYKPNLAAHMPAAALNAAGSVHSPSTSMATSSQYRQLLSDYGPPSLGYTQGTGNSQVPQSKYAELLAIIEELGKEIRPTYAGSKSAMERLKRGIIHARGLVRECLAETERNARS

SEQ ID NO: 4524 - protein, 422 aa, Homo sapiens
MAAAAVVEFQRAQSLLSTDREASIDILHSIVKRDIQENDEEAVQVKEQSILELGSLLAKTGQAAELGGLLKYVRPFLNSISKAKAARLVRSLLDLFLDMEAATGQEVELCLECIEWAKSEKRTFLRQALEARLVSLYFDTKRYQEALHLGSQLLRELKKMDDKALLVEVQLLESKTYHALSNLPKARAALTSARTTANAIYCPPKLQATLDMQSGIIHAAEEKDWKTAYSYFYEAFEGYDSIDSPKAITSLKYMLLCKIMLNTPEDVQALVSGKLALRYAGRQTEALKCVAQASKNRSLADFEKALTDYRAELRDDPIISTHLAKLYDNLLEQNLIRVIEPFSRVQIEHISSLIKLSKADVERKLSQMILDKKFHGILDQGEGVLIIFDEPPVDKTYEAALETIQNMSKVVDSLYNKAKKLT

SEQ ID NO: 4525 - protein, 960 aa, Homo sapiens
MSRLIVKNLPNGMKEERFRQLFAAFGTLTDCSLKFTKDGKFRKFGFIGFKSEEEAQKAQKHFNKSFIDTSRITVEFCKSFGDPAKPRAWSKHAQKPSQPKQPPKDSTTPEIKKDEKKKKVAGQLEKLKEDTEFQEFLSVHQRRAQAATWANDGLDAEPSKGKSKPASDYLNFDSDSGQESEEEGAGEDLEEEASLEPKAAVQKELSDMDYLKSKMVKAGSSSSSEEEESEDEAVHCDEGSEAEEEDSSATPVLQERDSKGAGQEQGMPAGKKRPPEARAETEKPANQKEPTTCHTVKLRGAPFNVTEKNVMEFLAPLKPVAIRIVRNAHGNKTGYIFVDFSNEEEVKQALKCNREYMGGRYIEVFREKNVPTTKGAPKNTTKSWQGRILGENEEEEDLAESGRLFVRNLPYTSTEEDLEKLFSKYGPLSELHYPIDSLTKKPKGFAFITFMFPEHAVKAYSEVDGQVFQGRMLHVLPSTIKKEASEDASALGSSSYKKKKEAQDKANSASSHNWNTLFMGPNAVADAIAQKYNATKSQVFDHETKGSVAVRVALGETQLVQEVRRFLIDNGVSLDSFSQAAAERSKTVILVKNLPAGTLAAQLQETFGHFGSLGRVLLPEGGITAIVEFLEPLEARKAFRHLAYSKFHHVPLYLEWAPVGVFSSTAPQKKKLQDTPSEPMEKDPAEPETVPDGETPEDENPTEEGADNSSAKMEEEEEEEEEEEESLPGCTLFIKNLNFDTTEEKLKEVFSKVGTVKSCSISKKKNKAGVLLSMGFGFVEYRKPEQAQKALKQLQGHVVDGHKLEVRISERATKPAVTLARKKQVPRKQTTSKILVRNIPFQAHSREIRELFSTFGELKTVRLPKKMTGTGTHRGFGFVDFLTKQDAKRAFNALCHSTHLYGRRLVLEWADSEVTLQALRRKTAAHFHEPPKKKRSVVLDEILEQLEGSDSDSEEQTLQL

SEQ ID NO: 4526 - protein, 419 aa, Homo sapiens
MSFIPVAEDSDFPIHNLPYGVFSTRGDPRPRIGVAIGDQILDLSIIKHLFTGPVLSKHQDVFNQPTLNSFMGLGQAAWKEARVFLQNLLSVSQARLRDDTELRKCAFISQASATMHLPATIGDYTDFYSSRQHATNVGIMFRDKENALMPNWLHLPVGYHGRASSVVVSGTPIRRPMGQMKPDDSKPPVYGACKLLDMELEMAFFVGPGNRLGEPIPISKAHEHIFGMVLMNDWSARDIQKWEYVPLGPFLGKSFGTTVSPWVVPMDALMPFAVPNPKQDPRPLPYLCHDEPYTFDINLSVNLKGEGMSQAATICKSNFKYMYWTMLQQLTHHSVNGCNLRPGDLLASGTISGPEPENFGSMLELSWKGTKPIDLGNGQTRKFLLDGDEVIITGYCQGDGYRIGFGQCAGKVLPALLPS

SEQ ID NO: 4527 - protein, 354 aa, Homo sapiens
MSLRGSLSRLLQTRVHSILKKSVHSVAVIGAPFSQGQKRKGVEHGPAAIREAGLMKRLSSLGCHLKDFGDLSFTPVPKDDLYNNLIVNPRSVGLANQELAEVVSRAVSDGYSCVTLGGDHSLAIGTISGHARHCPDLCVVWVDAHADINTPLTTSSGNLHGQPVSFLLRELQDKVPQLPGFSWIKPCISSASIVYIGLRDVDPPEHFILKNYDIQYFSMRDIDRLGIQKVMERTFDLLIGKRQRPIHLSFDIDAFDPTLAPATGTPVVGGLTYREGMYIAEEIHNTGLLSALDLVEVNPQLATSEEEAKTTANLAVDVIASSFGQTREGGHIVYDQLPTPSSPDESENQARVRI

SEQ ID NO: 4528 - protein, 2027 aa, Homo sapiens
MLKFKYGARNPLDAGAAEPIASRASRLNLFFQGKPPFMTQQQMSPLSREGILDALFVLFEECSQPALMKIKHVSNFVRKYSDTIAELQELQPSAKDFEVRSLVGCGHFAEVQVVREKATGDIYAMKVMKKKALLAQEQVSFFEEERNILSRSTSPWIPQLQYAFQDKNHLYLVMEYQPGGDLLSLLNRYEDQLDENLIQFYLAELILAVHSVHLMGYVHRDIKPENILVDRTGHIKLVDFGSAAKMNSNKMVNAKLPIGTPDYMAPEVLTVMNGDGKGTYGLDCDWWSVGVIAYEMIYGRSPFAEGTSARTFNNIMNFQRFLKFPDDPKVSSDFLDLIQSLLCGQKERLKFEGLCCHPFFSKIDWNNIRNSPPPFVPTLKSDDDTSNFDEPEKNSWVSSSPCQLSPSGFSGEELPFVGFSYSKALGILGRSESVVSGLDSPAKTSSMEKKLLIKSKELQDSQDKCHKMEQEMTRLHRRVSEVEAVLSQKEVELKASETQRSLLEQDLATYITECSSLKRSLEQARMEVSQEDDKALQLLHDIREQSRKLQEIKEQEYQAQVEEMRLMMNQLEEDLVSARRRSDLYESELRESRLAAEEFKRKATECQHKLLKAKDQGKPEVGEYAKLEKINAEQQLKIQELQEKLEKAVKASTEATELLQNIRQAKERAERELEKLQNREDSSEGIRKKLVEAEELEEKHREAQVSAQHLEVHLKQKEQHYEEKIKVLDNQIKKDLADKETLENMMQRHEEEAHEKGKILSEQKAMINAMDSKIRSLEQRIVELSEANKLAANSSLFTQRNMKAQEEMISELRQQKFYLETQAGKLEAQNRKLEEQLEKISHQDHSDKNRLLELETRLREVSLEHEEQKLELKRQLTELQLSLQERESQLTALQAARAALESQLRQAKTELEETTAEAEEEIQALTAHRDEIQRKFDALRNSCTVITDLEEQLNQLTEDNAELNNQNFYLSKQLDEASGANDEIVQLRSEVDHLRREITEREMQLTSQKQTMEALKTTCTMLEEQVMDLEALNDELLEKERQWEAWRSVLGDEKSQFECRVRELQRMLDTEKQSRARADQRITESRQVVELAVKEHKAEILALQQALKEQKLKAESLSDKLNDLEKKHAMLEMNARSLQQKLETERELKQRLLEEQAKLQQQMDLQKNHIFRLTQGLQEALDRADLLKTERSDLEYQLENIQVLYSHEKVKMEGTISQQTKLIDFLQAKMDQPAKKKKGLFSRRKEDPALPTQVPLQYNELKLALEKEKARCAELEEALQKTRIELRSAREEAAHRKATDHPHPSTPATARQQIAMSAIVRSPEHQPSAMSLLAPPSSRRKESSTPEEFSRRLKERMHHNIPHRFNVGLNMRATKCAVCLDTVHFGRQASKCLECQVMCHPKCSTCLPATCGLPAEYATHFTEAFCRDKMNSPGLQTKEPSSSLHLEGWMKVPRNNKRGQQGWDRKYIVLEGSKVLIYDNEAREAGQRPVEEFELCLPDGDVSIHGAVGASELANTAKADVPYILKMESHPHTTCWPGRTLYLLAPSFPDKQRWVTALESVVAGGRVSREKAEADAKLLGNSLLKLEGDDRLDMNCTLPFSDQVVLVGTEEGLYALNVLKNSLTHVPGIGAVFQIYIIKDLEKLLMIAGEERALCLVDVKKVKQSLAQSHLPAQPDISPNIFEAVKGCHLFGAGKIENGLCICAAMPSKVVILRYNENLSKYCIRKEIETSEPCSCIHFTNYSILIGTNKFYEIDMKQYTLEEFLDKNDHSLAPAVFAASSNSFPVSIVQVNSAGQREEYLLCFHEFGVFVDSYGRRSRTDDLKWSRLPLAFAYREPYLFVTHFNSLEVIEIQARSSAGTPARAYLDIPNPRYLGPAISSGAIYLASSYQDKLRVICCKGNLVKESGTEHHRGPSTSRSSPNKRGPPTYNEHITKRVASSPAPPEGPSHPREPSTPHRYREGRTELRRDKSPGRPLEREKSPGRMLSTRRERSPGRLFEDSSRGRLPAGAVRTPLSQVNKVWDQSSV

SEQ ID NO: 4529 - protein, 395 aa, Homo sapiens
MCDQTFLVNVFGSCDKCFKQRALRPVFKKSQQLSYCSTCAEIMATEGLHENETLASLKSEAESLKGKLEEERAKLHDVELHQVAERVEALGQFVMKTRRTLKGHGNKVLCMDWCKDKRRIVSSSQDGKVIVWDSFTTNKEHAVTMPCTWVMACAYAPSGCAIACGGLDNKCSVYPLTFDKNENMAAKKKSVAMHTNYLSACSFTNSDMQILTASGDGTCALWDVESGQLLQSFHGHGADVLCLDLAPSETGNTFVSGGCDKKAMVWDMRSGQCVQAFETHESDINSVRYYPSGDAFASGSDDATCRLYDLRADREVAIYSKESIIFGASSVDFSLSGRLLFAGYNDYTINVWDVLKGSRVSILFGHENRVSTLRVSPDGTAFCSGSWDHTLRVWA

SEQ ID NO: 4530 - protein, 301 aa, Homo sapiens
MLEPQENGVIDLPDYEHVEDETFPPFPPPASPERQDGEGTEPDEESGNGAPVRVPPKRTVKRNIPKLDAQRLISERGLPALRHVFDKAKFKGKGHEAEDLKMLIRHMEHWAHRLFPKLQFEDFIDRVEYLGSKKEVQTCLKRIRLDLPILHEDFVSNNDEVAENNEHDVTSTELDPFLTNLSESEMFASELSRSLTEEQQQRIERNKQLALERRQAKLLSNSQTLGNDMLMNTPRAHTVEEVNTDEDQKEESNGLNEDILDNPCNDAIANTLNEEETLLDQSFKNVQQQLDATSRNITEAR

SEQ ID NO: 4531 - protein, 863 aa, Homo sapiens
MSSPASTPSRRGSRRGRATPAQTPRSEDARSSPSQRRRGEDSTSTGELQPMPTSPGVDLQSPAAQDVLFSSPPQMHSSAIPLDFDVSSPLTYGTPSSRVEGTPRSGVRGTPVRQRPDLGSAQKGLQVDLQSDGAAAEDIVASEQSLGQKLVIWGTDVNVAACKENFQRFLQRFIDPLAKEEENVGIDITEPLYMQRLGEINVIGEPFLNVNCEHIKSFDKNLYRQLISYPQEVIPTFDMAVNEIFFDRYPDSILEHQIQVRPFNALKTKNMRNLNPEDIDQLITISGMVIRTSQLIPEMQEAFFQCQVCAHTTRVEMDRGRIAEPSVCGRCHTTHSMALIHNRSLFSDKQMIKLQESPEDMPAGQTPHTVILFAHNDLVDKVQPGDRVNVTGIYRAVPIRVNPRVSNVKSVYKTHIDVIHYRKTDAKRLHGLDEEAEQKLFSEKRVELLKELSRKPDIYERLASALAPSIYEHEDIKKGILLQLFGGTRKDFSHTGRGKFRAEINILLCGDPGTSKSQLLQYVYNLVPRGQYTSGKGSSAVGLTAYVMKDPETRQLVLQTGALVLSDNGICCIDEFDKMNESTRSVLHEVMEQQTLSIAKAGIICQLNARTSVLAAANPIESQWNPKKTTIENIQLPHTLLSRFDLIFLLLDPQDEAYDRRLAHHLVALYYQSEEQAEEELLDMAVLKDYIAYAHSTIMPRLSEEASQALIEAYVDMRKIGSSRGMVSAYPRQLESLIRLAEAHAKVRLSNKVEAIDVEEAKRLHREALKQSATDPRTGIVDISILTTGMSATSRKRKEELAEALKKLILSKGKTPALKYQQLFEDIRGQSDIAITKDMFEEALRALADDDFLTVTGKTVRLL

SEQ ID NO: 4532 - protein, 1139 aa, Homo sapiens
MPSGGDQSPPPPPPPPAAAASDEEEEDDGEAEDAAPPAESPTPQIQQRFDELCSRLNMDEAARAEAWDSYRSMSESYTLEGNDLHWLACALYVACRKSVPTVSKGTVEGNYVSLTRILKCSEQSLIEFFNKMKKWEDMANLPPHFRERTERLERNFTVSAVIFKKYEPIFQDIFKYPQEEQPRQQRGRKQRRQPCTVSEIFHFCWVLFIYAKGNFPMISDDLVNSYHLLLCALDLVYGNALQCSNRKELVNPNFKGLSEDFHAKDSKPSSDPPCIIEKLCSLHDGLVLEAKGIKEHFWKPYIRKLYEKKLLKGKEENLTGFLEPGNFGESFKAINKAYEEYVLSVGNLDERIFLGEDAEEEIGTLSRCLNAGSGTETAERVQMKNILQQHFDKSKALRISTPLTGVRYIKENSPCVTPVSTATHSLSRLHTMLTGLRNAPSEKLEQILRTCSRDPTQAIANRLKEMFEIYSQHFQPDEDFSNCAKEIASKHFRFAEMLYYKVLESVIEQEQKRLGDMDLSGILEQDAFHRSLLACCLEVVTFSYKPPGNFPFITEIFDVPLYHFYKVIEVFIRAEDGLCREVVKHLNQIEEQILDHLAWKPESPLWEKIRDNENRVPTCEEVMPPQNLERADEICIAGSPLTPRRVTEVRADTGGLGRSITSPTTLYDRYSSPPASTTRRRLFVENDSPSDGGTPGRMPPQPLVNAVPVQNVSGETVSVTPVPGQTLVTMATATVTANNGQTVTIPVQGIANENGGITFFPVQVNVGGQAQAVTGSIQPLSAQALAGSLSSQQVTGTTLQVPGQVAIQQISPGGQQQKQGQSVTSSSNRPRKTSSLSLFFRKVYHLAAVRLRDLCAKLDISDELRKKIWTCFEFSIIQCPELMMDRHLDQLLMCAIYVMAKVTKEDKSFQNIMRCYRTQPQARSQVYRSVLIKGKRKRRNSGSSDSRSHQNSPTELNKDRTSRDSSPVMRSSSTLPVPQPSSAPPTPTRLTGANSDMEEEERGDLIQFYNNIYIKQIKTFAMKYSQANMDAPPLSPYPFVRTGSPRRIQLSQNHPVYISPHKNETMLSPREKIFYYFSNSPSKRLREINSMIRTGETPTKKRGILLEDGSESPAKRICPENHSALLRRLQDVANDRGSH

SEQ ID NO: 4533 - protein, 446 aa, Homo sapiens
MEAEAADAPPGGVESALSCFSFNQDCTSLATGTKAGYKLFSLSSVEQLDQVHGSNEIPDVYIVERLFSSSLVVVVSHTKPRQMNVYHFKKGTEICNYSYSSNILSIRLNRQRLLVCLEESIYIHNIKDMKLLKTLLDIPANPTGLCALSINHSNSYLAYPGSLTSGEIVLYDGNSLKTVCTIAAHEGTLAAITFNASGSKLASASEKGTVIRVFSVPDGQKLYEFRRGMKRYVTISSLVFSMDSQFLCASSNTETVHIFKLEQVTNSRPEEPSTWSGYMGKMFMAATNYLPTQVSDMMHQDRAFATARLNFSGQRNICTLSTIQKLPRLLVASSSGHLYMYNLDPQDGGECVLIKTHSLLGSGTTEENKENDLRPSLPQSYAATVARPSASSASTVPGYSEDGGALRGEVIPEHEFATGPVCLDDENEFPPIILCRGNQKGKTKQS

SEQ ID NO: 4534 - protein, 426 aa, Homo sapiens
MFRTKRSALVRRLWRSRAPGGEDEEEGAGGGGGGGELRGEGATDSRAHGAGGGGPGRAGCCLGKAVRGAKGHHHPHPPAAGAGAAGGAEADLKALTHSVLKKLKERQLELLLQAVESRGGTRTACLLLPGRLDCRLGPGAPAGAQPAQPPSSYSLPLLLCKVFRWPDLRHSSEVKRLCCCESYGKINPELVCCNPHHLSRLCELESPPPPYSRYPMDFLKPTADCPDAVPSSAETGGTNYLAPGGLSDSQLLLEPGDRSHWCVVAYWEEKTRVGRLYCVQEPSLDIFYDLPQGNGFCLGQLNSDNKSQLVQKVRSKIGCGIQLTREVDGVWVYNRSSYPIFIKSATLDNPDSRTLLVHKVFPGFSIKAFDYEKAYSLQRPNDHEFMQQPWTGFTVQISFVKGWGQCYTRQFISSCPCWLEVIFNSR

SEQ ID NO: 4535 - protein, 360 aa, Homo sapiens
MPKFKQRRRKLKAKAERLFKKKEASHFQSKLITPPPPPPSPERVGISSIDISQSRSWLTSSWNFNFPNIRDAIKLWTNRVWSIYSWCQNCITQSLEVLKDTIFPSRICHRELYSVKQQFCILESKLCKLQEALKTISESSSCPSCGQTCHMSGKLTNVPACVLITPGDSKAVLPPTLPQPASHFPPPPPPPPLPPPPPPLAPVLLRKPSLAKALQAGPLKKDGPMQITVKDLLTVKLKKTQSLDEKRKLIPSPKARNPLVTVSDLQHVTLKPNSKVLSTRVTNVLITPGKSQMDLRKLLRKVDVERSPGGTPLTNKENMETGTGLTPVMTQALRRKFQLAHPRSPTPTLPLSTSSFDEQN

SEQ ID NO: 4536 - protein, 499 aa, Homo sapiens
MLERPPALAMPMPTEGTPPPLSGTPIPVPAYFRHAEPGFSLKRPRGLSRSLPPPPPAKGSIPISRLFPPRTPGWHQLQPRRVSFRGEASETLQSPGYDPSRPESFFQQSFQRLSRLGHGSYGEVFKVRSKEDGRLYAVKRSMSPFRGPKDRARKLAEVGSHEKVGQHPCCVRLEQAWEEGGILYLQTELCGPSLQQHCEAWGASLPEAQVWGYLRDTLLALAHLHSQGLVHLDVKPANIFLGPRGRCKLGDFGLLVELGTAGAGEVQEGDPRYMAPELLQGSYGTAADVFSLGLTILEVACNMELPHGGEGWQQLRQGYLPPEFTAGLSSELRSVLVMMLEPDPKLRATAEALLALPVLRQPRAWGVLWCMAAEALSRGWALWQALLALLCWLWHGLAHPASWLQPLGPPATPPGSPPCSLLLDSSLSSNWDDDSLGPSLSPEAVLARTVGSTSTPRSRCTPRDALDLSDINSEPPRGSFPSFEPRNLLSLFEDTLDPT

SEQ ID NO: 4537 - protein, 975 aa, Homo sapiens
MEDYEQELCGVEDDFHNQFAAELEVLAELEGASTPSPSGVPLFTAGRPPRTFEEALARGDAASSPAPAASVGSSQGGARKRQVDADLQPAGSLPHAPRIKRPRLQVVKRLNFRSEEMEEPPPPDSSPTDITPPPSPEDLAELWGHGVSEAAADVGLTRASPAARNPVLRRPPILEDYVHVTSTEGVRAYLVLRADPMAPGVQGSLLHVPWRGGGQLDLLGVSLASLKKQVDGERRERLLQEAQKLSDTLHSLRSGEEEAAQPLGAPEEEPTDGQDASSHCLWVDEFAPRHYTELLSDDFTNRCLLKWLKLWDLVVFGHERPSRKPRPSVEPARVSKEATAPGKWKSHEQVLEEMLEAGLDPSQRPKQKVALLCGPPGLGKTTLAHVIARHAGYSVVEMNASDDRSPEVFRTRIEAATQMESVLGAGGKPNCLVIDEIDGAPVAAINVLLSILNRKGPQEVGPQGPAVPSGGGRRRRAEGGLLMRPIICICNDQFAPSLRQLKQQAFLLHFPPTLPSRLVQRLQEVSLRQGMRADPGVLAALCEKTDNDIRACINTLQFLYSRGQRELSVRDVQATRVGLKDQRRGLFSVWQEVFQLPRAQRRRVGQDPALPADTLLLGDGDAGSLTSASQRFYRVLHAAASAGEHEKVVQGLFDNFLRLRLRDSSLGAVCVALDWLAFDDLLAGAAHHSQSFQLLRYPPFLPVAFHVLFASSHTPRITFPSSQQEAQNRMSQMRNLIQTLVSGIAPATRSRATPQALLLDALCLLLDILAPKLRPVSTQLYSTREKQQLASLVGTMLAYSLTYRQERTPDGQYIYRLEPNVEELCRFPELPARKPLTYQTKQLIAREIEVEKMRRAEASARVENSPQVDGSPPGLEGLLGGIGEKGVHRPAPRNHEQRLEHIMRRAAREEQPEKDFFGRVVVRSTAVPSAGDTAPEQDSVERRMGTAVGRSEVWFRFNEGVSNAVRRSLYIRDLL

SEQ ID NO: 4538 - protein, 421 aa, Homo sapiens
MASFPPRVNEKEIVRLRTIGELLAPAAPFDKKCGRENWTVAFAPDGSYFAWSQGHRTVKLVPWSQCLQNFLLHGTKNVTNSSSLRLPRQNSDGGQKNKPREHIIDCGDIVWSLAFGSSVPEKQSRCVNIEWHRFRFGQDQLLLATGLNNGRIKIWDVYTGKLLLNLVDHTEVVRDLTFAPDGSLILVSASRDKTLRVWDLKDDGNMMKVLRGHQNWVYSCAFSPDSSMLCSVGASKAVFLWNMDKYTMIRKLEGHHHDVVACDFSPDGALLATASYDTRVYIWDPHNGDILMEFGHLFPPPTPIFAGGANDRWVRSVSFSHDGLHVASLADDKMVRFWRIDEDYPVQVAPLSNGLCCAFSTDGSVLAAGTHDGSVYFWATPRQVPSLQHLCRMSIRRVMPTQEVQELPIPSKLLEFLSYRI

SEQ ID NO: 4539 - protein, 470 aa, Homo sapiens
MPGFDYKFLEKPKRRLLCPLCGKPMREPVQVSTCGHRFCDTCLQEFLSEGVFKCPEDQLPLDYAKIYPDPELEVQVLGLPIRCIHSEEGCRWSGPLRHLQGHLNTCSFNVIPCPNRCPMKLSRRDLPAHLQHDCPKRRLKCEFCGCDFSGEAYESHEGMCPQESVYCENKCGARMMRRLLAQHATSECPKRTQPCTYCTKEFVFDTIQSHQYQCPRLPVACPNQCGVGTVAREDLPGHLKDSCNTALVLCPFKDSGCKHRCPKLAMARHVEESVKPHLAMMCALVSRQRQELQELRRELEELSVGSDGVLIWKIGSYGRRLQEAKAKPNLECFSPAFYTHKYGYKLQVSAFLNGNGSGEGTHLSLYIRVLPGAFDNLLEWPFARRVTFSLLDQSDPGLAKPQHVTETFHPDPNWKNFQKPGTWRGSLDESSLGFGYPKFISHQDIRKRNYVRDDAVFIRAAVELPRKILS

SEQ ID NO: 4540 - protein, 195 aa, Homo sapiens
MPGFDYKFLEKPKRRLLCPLCGKPMREPVQVSTCGHRFCDTCLQEFLSEGVFKCPEDQLPLDYAKIYPDPELEVQVLGLPIRCIHSEEGCRWSGPLRHLQGHLNTCSFNVIPCPNRCPMKLSRRDLPAHLQHDCPKRRLKCEFCGCDFSGEAYESSLGFGYPKFISHQDIRKRNYVRDDAVFIRAAVELPRKILS

SEQ ID NO: 4541 - protein, 674 aa, Homo sapiens
MTIRHQGQQYRPRMAFLQKIEALVKDMQNPETGVRMQNQRVLVTSVPHAMTGSDVLQWIVQRLWISSLEAQNLGNFIVRYGYIYPLQDPKNLILKPDGSLYRFQTPYFWPTQQWPAEDTDYAIYLAKRNIKKKGILEEYEKENYNFLNQKMNYKWDFVIMQAKEQYRAGKERNKADRYALDCQEKAYWLVHRCPPGMDNVLDYGLDRVTNPNEVKVNQKQTVVAVKKEIMYYQQALMRSTVKSSVSLGGIVKYSEQFSSNDAIMSGCLPSNPWITDDTQFWDLNAKLVEIPTKMRVERWAFNFSELIRDPKGRQSFQYFLKKEFSGENLGFWEACEDLKYGDQSKVKEKAEEIYKLFLAPGARRWINIDGKTMDITVKGLKHPHRYVLDAAQTHIYMLMKKDSYARYLKSPIYKDMLAKAIEPQETTKKSSTLPFMRRHLRSSPSPVILRQLEEEAKAREAANTVDITQPGQHMAPSPHLTVYTGTCMPPSPSSPFSSSCRSPRKPFASPSRFIRRPSTTICPSPIRVALESSSGLEQKGECSGSMAPRGPSVTESSEASLDTSWPRSRPRAPPKARMALSFSRFLRRGCLASPVFARLSPKCPAVSHGRVQPLGDVGQQLPRLKSKRVANFFQIKMDVPTGSGTCLMDSEDAGTGESGDRATEKEVICPWESL

SEQ ID NO: 4542 - protein, 142 aa, Homo sapiens
MATKIDKEACRAAYNLVRDDGSAVIWVTFKYDGSTIVPGEQGAEYQHFIQQCTDDVRLFAFVRFTTGDAMSKRSKFALITWIGENVSGLQRAKTGTDKTLVKEVVQNFAKEFVISDRKELEEDFIKSELKKAGGANYDAQTE

SEQ ID NO: 4543 - protein, 196 aa, Homo sapiens
MFCEKAMELIRELHRAPEGQLPAFNEDGLRQVLEEMKALYEQNQSDVNEAKSGGRSDLIPTIKFRHCSLLRNRRCTVAYLYDRLLRIRALRWEYGSVLPNALRFHMAAEEMEWFNNYKRSLATYMRSLGGDEGLDITQDMKPPKSLYIEVRCLKDYGEFEVDDGTSVLLKKNSQHFLPRWKCEQLIRQGVLEHILS

SEQ ID NO: 4544 - protein, 196 aa, Homo sapiens
MADSAQAQKLVYLVTGGCGFLGEHVVRMLLQREPRLGELRVFDQHLGPWLEELKTGPVRVTAIQGDVTQAHEVAAAVAGAHVVIHTAGLVDVFGRASPKTIHEVNVQGTRNVIEACVQTGTRFLVYTSSMEVVGPNTKGHPFYRGNEDTPYEAVHRHPYPCSKALAEWLVLEANGRKAMLPGCTCWQPGSWSSGQP

SEQ ID NO: 4545 - protein, 869 aa, Homo sapiens
MEPETALWGPDLQGPEQSPNDAHRGAESENEEESPRQESSGEEIIMGDPAQSPESKDSTEMSLERSSQDPSVPQNPPTPLGHSNPLDHQIPLDPPAPEVVPTPSDWTKACEASWQWGALTTWNSPPVVPANEPSLRELVQGRPAGAEKPYICNECGKSFSQWSKLLRHQRIHTGERPNTCSECGKSFTQSSHLVQHQRTHTGEKPYKCPDCGKCFSWSSNLVQHQRTHTGEKPYKCTECEKAFTQSTNLIKHQRSHTGEKPYKCGECRRAFYRSSDLIQHQATHTGEKPYKCPECGKRFGQNHNLLKHQKIHAGEKPYRCTECGKSFIQSSELTQHQRTHTGEKPYECLECGKSFGHSSTLIKHQRTHLREDPFKCPVCGKTFTLSATLLRHQRTHTGERPYKCPECGKSFSVSSNLINHQRIHRGERPYICADCGKSFIMSSTLIRHQRIHTGEKPYKCSDCGKSFIRSSHLIQHRRTHTGEKPYKCPECGKSFSQSSNLITHVRTHMDENLFVCSDCGKAFLEAHELEQHRVIHERGKTPARRAQGDSLLGLGDPSLLTPPPGAKPHKCLVCGKGFNDEGIFMQHQRIHIGENPYKNADGLIAHAAPKPPQLRSPRLPFRGNSYPGAAEGRAEAPGQPLKPPEGQEGFSQRRGLLSSKTYICSHCGESFLDRSVLLQHQLTHGNEKPFLFPDYRIGLGEGAGPSPFLSGKPFKCPECKQSFGLSSELLLHQKVHAGGKSSQKSPELGKSSSVLLEHLRSPLGARPYRCSDCRASFLDRVALTRHQETHTQEKPPNPEDPPPEAVTLSTDQEGEGETPTPTESSSHGEGQNPKTLVEEKPYLCPECGAGFTEVAALLLHRSCHPGVSL

SEQ ID NO: 4546 - protein, 257 aa, Homo sapiens [sequence omitted]

SEQ ID NO: 4547 - protein, 487 aa, Homo sapiens
MSLPPIRLPSPYGSDRLVQLAARLRPALCDTLITVGSQEFPAHSLVLAGVSQQLGRRGQWALGEGISPSTFAQLLNFVYGESVELQPGELRPLQEAARALGVQSLEEACWRARGDRAKKPDPGLKKHQEEPEKPSRNPERELGDPGEKQKPEQVSRTGGREQEMLHKHSPPRGRPEMAGATQEAQQEQTRSKEKRLQAPVGQRGADGKHGVLTWLRENPGGSEESLRKLPGPLPPAGSLQTSVTPRPSWAEAPWLVGGQPALWSILLMPPRYGIPFYHSTPTTGAWQEVWREQRIPLSLNAPKGLWSQNQLASSSPTPGSLPQGPAQLSPGEMEESDQGHTGALATCAGHEDKAGCPPRPHPPPAPPARSRPYACSVCGKRFSLKHQMETHYRVHTGEKPFSCSLCPQRSRDFSAMTKHLRTHGAAPYRCSLCGAGCPSLASMQAHMRGHSPSQLPPGWTIRSTFLYSSSRPSRPSTSPCCPSSSTT

SEQ ID NO: 4548 - protein, 410 aa, Homo sapiens
MPRERRERDAKERDTMKEDGGAEFSARSRKRKANVTVFLQDPDEEMAKIDRTARDQCGSQPWDNNAVCADPCSLIPTPDKEDDDRVYPNSTCKPRIIAPSRGSPLPVLSWANREEVWKIMLNKEKTYLRDQHFLEQHPLLQPKMRAILLDWLMEVCEVYKLHRETFYLAQDFFDRYMATQENVVKTLLQLIGISSLFIAAKLEEIYPPKLHQFAYVTDGACSGDEILTMELMIMKALKWRLSPLTIVSWLNVYMQVAYLNDLHEVLLPQYPQQIFIQIAELLDLCVLDVDCLEFPYGILAASALYHFSSSELMQKVSGYQWCDIENCVKWMVPFAMVIRETGSSKLKHFRGVADEDAHNIQTHRDSLDLLDKARAKKAMLSEQNRASPLPSGLLTPPQSGKKQSSGPEMA

SEQ ID NO: 4549 - protein, 168 aa, Homo sapiens
MAEPWGNELASAAARGDLEQLTSLLQNNVNVNAQNGFGRTALQVMKLGNPEIARRLLLRGANPDLKDRTGFAVIHDAARAGFLDTLQTLLEFQADVNIEDNEGNLPLHLAAKEGHLRVVEFLVKHTASNVGHRNHKGDTACDLARLYGRNEVVSLMQANGAGGATNLQ

SEQ ID NO: 4550 - protein, 199 aa, Homo sapiens
MSSGNAKIGHPAPNFKATAVMPDGQFKDISLSDYKGKYVVFFFYPLDFTFVCPTEIIAFSDRAEEFKKLNCQVIGASVDSHFCHLAWVNTPKKQGGLGPMNIPLVSDPKRTIAQDYGVLKADEGISFRGLFIIDDKGILRQITVNDLPVGRSVDETLRLVQAFQFTDKHGEVCPAGWKPGSDTIKPDVQKSKEYFSKQK

SEQ ID NO: 4551 - protein, 735 aa, Homo sapiens
MGESPASVVLNASGGLFSLKMETLESELTCPICLELFEDPLLLPCAHSLCFSCAHRILVSSCSSGESIEPITAFQCPTCRYVISLNHRGLDGLKRNVTLQNIIDRFQKASVSGPNSPSESRRERTYRPTTAMSSERIACQFCEQDPPRDAVKTCITCEVSYCDRCLRATHPNKKPFTSHRLVEPVPDTHLRGITCLDHENEKVNMYCVSDDQLICALCKLVGRHRDHQVASLNDRFEKLKQTLEMNLTNLVKRNSELENQMAKLIQICQQVEVNTAMHEAKLMEECDELVEIIQQRKQMIAVKIKETKVMKLRKLAQQVANCRQCLERSTVLINQAEHILKENDQARFLQSAKNIAERVAMATASSQVLIPDINFNDAFENFALDFSREKKLLEGLDYLTAPNPPSIREELCTASHDTITVHWISDDEFSISSYELQYTIFTGQANFISKSWCSWGLWPEIRKCKEAVSCSRLAGAPRGLYNSVDSWMIVPNIKQNHYTVHGLQSGTRYIFIVKAINQAGSRNSEPTRLKTNSQPFKLDPKMTHKKLKISNDGLQMEKDESSLKKSHTPERFSGTGCYGAAGNIFIDSGCHYWEVVMGSSTWYAIGIAYKSAPKNEWIGKNASSWVFSRCNSNFVVRHNNKEMLVDVPPHLKRLGVLLDYDNNMLSFYDPANSLHLHTFDVTFILPVCPTFTIWNKSLMILSGLPAPDFIDYPERQECNCRPQESPYVSGMKTCH

SEQ ID NO: 4552 - protein, 1722 aa, Homo sapiens
MSDPRQSQEEKHKLGRASSKFKDPPRIMQSDDYFARKFKAINGNMGPTTSLNASNSNETGGGGPANGTPAVPKMGVRARVSEWPPKKDCSKELTCKALWESRSQTSYESITSVLQNGQSDQSEGQQDEQLDLDFVEAKYTIGDIFVHSPQRGLHPIRQRSNSDVTISDIDAEDVLDQNAVNPNTGAALHREYGSTSSIDRQGLSGENFFAMLRGYRVENYDHKAMVPFGFPEFFRCDPAISPSLHAAAQISRGEFVRISGLDYVDSALLMGRDRDKPFKRRLKSESVETSLFRKLRTVKSEHETFKFTSELEESRLERGIRPWNCQRCFAHYDVQSILFNINEAMATRANVGKRKNITTGASAASQTQMPTGQTGNCESPLGSKEDLNSKENLDADEGDGKSNDLVLSCPYFRNETGGEGDRRIALSRANSSSFSSGESCSFESSLSSHCTNAGVSVLEVPRENQPIHREKVKRYIIEHIDLGAYYYRKFFYGKEHQNYFGIDENLGPVAVSIRREKVEDAKEKEGSQFNYRVAFRTSELTTLRGAILEDAIPSTARHGTARGLPLKEVLEYVIPELSIQCLRQASNSPKVSEQLLKLDEQGLSFQHKIGILYCKAGQSTEEEMYNNETAGPAFEEFLDLLGQRVRLKGFSKYRAQLDNKTDSTGTHSLYTTYKDYELMFHVSTLLPYMPNNRQQLLRKRHIGNDIVTIVFQEPGALPFTPKSIRSHFQHVFVIVKVHNPCTENVCYSVGVSRSKDVPPFGPPIPKGVTFPKSAVFRDFLLAKVINAENAAHKSEKFRAMATRTRQEYLKDLAENFVTTATVDTSVKFSFITLGAKKKEKVKPRKDAHLFSIGAIMWHVIARDFGQSADIECLLGISNEFIMLIEKDSKNVVFNCSCRDVIGWTSGLVSIKVFYERGECVLLSSVDNCAEDIREIVQRLVIVTRGCETVEMTLRRNGLGQLGFHVNFEGIVADVEPFGFAWKAGLRQGSRLVEICKVAVATLTHEQMIDLLRTSVTVKVVIIQPHDDGSPRRGCSELCRIPMVEYKLDSEGTPCEYKTPFRRNTTWHRVPTPALQPLSRASPIPGTPDRLPCQQLLQQAQAAIPRSTSFDRKLPDGTRSSPSNQSSSSDPGPGGSGPWRPQVGYDGCQSPLLLEHQGSGPLECDGAREREDTMEASRHPETKWHGPPSKVLGSYKERALQKDGSCKDSPNKLSHIGDKSCSSHSSSNTLSSNTSSNSDDKHFGSGDLMDPELLGLTYIKGASTDSGIDTAPCMPATILGPVHLAGSRSLIHSRAEQWADAADVSGPDDEPAKLYSVHGYASTISAGSAAEGSMGDLSEISSHSSGSHHSGSPSAHCSKSSGSLDSSKVYIVSHSSGQQVPGSMSKPYHRQGAVNKYVIGWKKSEGSPPPEEPEVTECPGMYSEMDVMSTATQHQTVVGDAVAETQHVLSKEDFLKLMLPDSPLVEEGRRKFSFYGNLSPRRSLYRTLSDESICSNRRGSSFGSSRSSVLDQALPNDILFSTTPPYHSTLPPRAHPAPSMGSLRNEFWFSDGSLSDKSKCADPGLMPLPDTATGLDWTHLVDAARAFEGLDSDEELGLLCHHTSYLDQRVASFCTLTDMQHGQDLEGAQELPLCVDPGSGKEFMDTTGERSPSPLTGKVNQLELILRQLQTDLRKEKQDKAVLQAEVQHLRQDNMRLQEESQTATAQLRKFTEWFFTTIDKKS

SEQ ID NO: 4553 - protein, 374 aa, Homo sapiens
MARSLTWRCCPWCLTEDEKAAARVDQEINRILLEQKKQDRGELKLLLLGPGESGKSTFIKQMRIIHGAGYSEEERKGFRPLVYQNIFVSMRAMIEAMERLQIPFSRPESKHHASLVMSQDPYKVTTFEKRYAAAMQWLWRDAGIRACYERRREFHLLDSAVYYLSHLERITEEGYVPTAQDVLRSRMPTTGINEYCFSVQKTNLRIVDVGGQKSERKKWIHCFENVIALIYLASLSEYDQCLEENNQENRMKESLALFGTILELPWFKSTSVILFLNKTDILEEKIPTSHLATYFPSFQGPKQDAEAAKRFILDMYTRMYTGCVDGPEGSKKGARSRRLFSHYTCATDTQNIRKVFKDVRDSVLARYLDEINLL

SEQ ID NO: 4554 - protein, 627 aa, Homo sapiens
MAAAVLTDRAQVSVTFDDVAVTFTKEEWGQLDLAQRTLYQEVMLENCGLLVSLGCPVPKAELICHLEHGQEPWTRKEDLSQDTCPGDKGKPKTTEPTTCEPALSEGISLQGQVTQGNSVDSQLGQAEDQDGLSEMQEGHFRPGIDPQEKSPGKMSPECDGLGTADGVCSRIGQEQVSPGDRVRSHNSCESGKDPMIQEEENNFKCSECGKVFNKKHLLAGHEKIHSGVKPYECTECGKTFIKSTHLLQHHMIHTGERPYECMECGKAFNRKSYLTQHQRIHSGEKPYKCNECGKAFTHRSNFVLHNRRHTGEKSFVCTECGQVFRHRPGFLRHYVVHSGENPYECLECGKVFKHRSYLMWHQQTHTGEKPYECSECGKVFLESAALIHHYVIHTGEKPFECLECGKAFNHRSYLKRHQRIHTGEKPFVCSECGKAFTHCSTFILHKRAHTGEKPFECKECGKAFSNRKDLIRHFSIHTGEKPYECVECGKAFTRMSGLTRHKRIHSGEKPYECVECGKSFCWSTNLIRHAIIHTGEKPYKCSECGKAFSRSSSLTQHQRMHTGKNPISVTDVGRPFTSGQTSVTLRELLLGKDFLNVTTEANILPEETSSSASDQPYQRETPQVSSL

SEQ ID NO: 4555 - protein, 309 aa, Homo sapiens
MSSTQFNKGPSYGLSAEVKNRLLSKYDPQKEAELRTWIEGLTGLSIGPDFQKGLKDGTILCTLMNKLQPGSVPKINRSMQNWHQLENLSNFIKAMVSYGMNPVDLFEANDLFESGNMTQVQVSLLALAGKAKTKGLQSGVDIGVKYSEKQERNFDDATMKAGQCVIGLQMGTNKCASQSGMTAYGTRRHLYDPKNHILPPMDHSTISLQMGTNKCASQVGMTAPGTRRHIYDTKLGTDKCDNSSMSLQMGYTQGANQSGQVFGLGRQIYDPKYCPQGTVADGAPSGTGDCPDPGEVPEYPPYYQEEAGY

SEQ ID NO: 4556 - protein, 898 aa, Homo sapiens
MSVTEEDLCHHMKVVVRVRPENTKEKAAGFHKVVHVVDKHILVFDPKQEEVSFFHGKKTTNQNVIKKQNKDLKFVFDAVFDETSTQSEVFEHTTKPILRSFLNGYNCTVLAYGATGAGKTHTMLGSADEPGVMYLTMLHLYKCMDEIKEEKICSTAVSYLEVYNEQIRDLLVNSGPLAVREDTQKGVVVHGLTLHQPKSSEEILHLLDNGNKNRTQHPTDMNATSSRSHAVFQIYLRQQDKTASINQNVRIAKMSLIDLAGSERASTSGAKGTRFVEGTNINRSLLALGNVINALADSKRKNQHIPYRNSKLTRLLKDSLGGNCQTIMIAAVSPSSVFYDDTYNTLKYANRAKDIKSSLKSNVLNVNNHITQYVKICNEQKAEILLLKEKLKAYEEQKAFTNENDQAKLMISNPQEKEIERFQEILNCLFQNREEIRQEYLKLEMLLKENELKSFYQQQCHKQIEMMCSEDKVEKATGKRDHRLAMLKTRRSYLEKRREEELKQFDENTNWLHRVEKEMGLLSQNGHIPKELKKDLHCHHLHLQNKDLKAQIRHMMDLACLQEQQHRQTEAVLNALLPTLRKQYCTLKEAGLSNAAFESDFKEIEHLVERKKVVVWADQTAEQPKQNDLPGISVLMTFPQLGPVQPIPCCSSSGGTNLVKIPTEKRTRRKLMPSPLKGQHTLKSPPSQSVQLNDSLSKELQPIVYTPEDCRKAFQNPSTVTLMKPSSFTTSFQAISSNINSDNCLKMLCEVAIPHNRRKECGQEDLDSTFTICEDIKSSKCKLPEQESLPNDNKDILQRLDPSSFSTKHSMPVPSMVPSYMAMTTAAKRKRKLTSSTSNSSLTADVNSGFAKRVRQDNSSEKHLQENKPTMEHKRNICKINPSMVRKFGRNISKGNLR

SEQ ID NO: 4557 - protein, 566 aa, Homo sapiens
MFVSDFRKEFYEVVQSQRVLLFVASDVDALCACKILQALFQCDHVQYTLVPVSGWQELETAFLEHKEQFHYFILINCGANVDLLDILQPDEDTIFFVCDTHRPVNVVNVYNDTQIKLLIKQDDDLEVPAYEDIFRDEEEDEEHSGNDSDGSEPSEKRTRLEEEIVEQTMRRRQRREWEARRRDILFDYEQYEYHGTSSAMVMFELAWMLSKDLNDMLWWAIVGLTDQWVQDKITQMKYVTDVGVLQRHVSRHNHRNEDEENTLSVDCTRISFEYDLRLVLYQHWSLHDSLCNTSYTAARFKLWSVHGQKRLQEFLADMGLPLKQVKQKFQAMDISLKENLREMIEESANKFGMKDMRVQTFSIHFGFKHKFLASDVVFATMSLMESPEKDGSGTDHFIQALDSLSRSNLDKLYHGLELAKKQLRATQQTIASCLCTNLVISQGPFLYCSLMEGTPDVMLFSRPASLSLLSKHLLKSFVCSTKNRRCKLLPLVMAAPLSMEHGTVTVVGIPPETDSSDRKNFFGRAFEKAAESTSSRMLHNHFDLSVIELKAEDRSKFLDALISLLS

SEQ ID NO: 4558 - protein, 168 aa, Homo sapiens
MEPPNLYPVKLYVYDLSKGLARRLSPIMLGKQLEGIWHTSIVVHKDEFFFGSGGISSCPPGGTLLGPPDSVVDVGSTEVTEEIFLEYLSSLGESLFRGEAYNLFEHNCNTFSNEVAQFLTGRKIPSYITDLPSEVLSTPFGQALRPLLDSIQIQPPGGSSVGRPNGQS

SEQ ID NO: 4559 - protein, 214 aa, Homo sapiens
MGLRDWLRTVCCCCGCECLEERALPEKEPLVSDNNPYSSFGATLVRDDEKNLWSMPHDVSHTEADDDRTLYNLIVIRNQQAKDSEEWQKLNYDIHTLRQVRREVRNRWKCILEDLGFQKEADSLLSVTKLSTISDSKNTRKAREMLLKLAEETNIFPTSWELSERYLFVVDRLIALDAAEEFFKLARRTYPKKPGVPCLADGQKELHYLPFPSP

SEQ ID NO: 4560 - protein, 919 aa, Homo sapiens
MQRSIMSFFHPKKEGKAKKPEKEASNSSRETEPPPKAALKEWNGVVSESDSPVKRPGRKAARVLGSEGEEEDEALSPAKGQKPALDCSQVSPPRPATSPENNASLSDTSPMDSSPSGIPKRRTARKQLPKRTIQEVLEEQSEDEDREAKRKKEEEEEETPKESLTEAEVATEKEGEDGDQPTTPPKPLKTSKAETPTESVSEPEVATKQELQEEEEQTKPPRRAPKTLSSFFTPRKPAVKKEVKEEEPGAPGKEGAAEGPLDPSGYNPAKNNYHPVEDACWKPGQKVPYLAVARTFEKIEEVSARLRMVETLSNLLRSVVALSPPDLLPVLYLSLNHLGPPQQGLELGVGDGVLLKAVAQATGRQLESVRAEAAEKGDVGLVAENSRSTQRLMLPPPPLTASGVFSKFRDIARLTGSASTAKKIDIIKGLFVACRHSEARFIARSLSGRLRLGLAEQSVLAALSQAVSLTPPGQEFPPAMVDAGKGKTAEARKTWLEEQGMILKQTFCEVPDLDRIIPVLLEHGLERLPEHCKLSPGIPLKPMLAHPTRGISEVLKRFEEAAFTCEYKYDGQRAQIHALEGGEVKIFSRNQEDNTGKYPDIISRIPKIKLPSVTSFILDTEAVAWDREKKQIQPFQVLTTRKRKEVDASEIQVQVCLYAFDLIYLNGESLVREPLSRRRQLLRENFVETEGEFVFATSLDTKDIEQIAEFLEQSVKDSCEGLMVKTLDVDATYEIAKRSHNWLKLKKDYLDGVGDTLDLVVIGAYLGRGKRAGRYGGFLLASYDEDSEELQAICKLGTGFSDEELEEHHQSLKALVLPSPRPYVRIDGAVIPDHWLDPSAVWEVKCADLSLSPIYPAARGLVDSDKGISLRFPRFIRVREDKQPEQATTSAQVACLYRKQSQIQNQQGEDSGSDPEDTY

SEQ ID NO: 4561 - protein, 271 aa, Homo sapiens
MAKVPDMFEDLKNCYSENEEDSSSIDHLSLNQKSFYHVSYGPLHEGCMDQSVSLSISETSKTSKLTFKESMVVVATNGKVLKKRRLSLSQSITDDDLEAIANDSEEEIIKPRSAPFSFLSNVKYNFMRIIKYEFILNDALNQSIIRANDQYLTAAALHNLDEAVKFDMGAYKSSKDDAKITVILRISKTQLYVTAQDEDQPVLLKEMPEIPKTITGSETNLLFFWETHGTKNYFTSVAHPNLFIATKQDYWVCLAGGPPSITDFQILENQA

SEQ ID NO: 4562 - protein, 269 aa, Homo sapiens
MAEVPELASEMMAYYSGNEDDLFFEADGPKQMKCSFQDLDLCPLDGGIQLRISDHHYSKGFRQAASVVVAMDKLRKMLVPCPQTFQENDLSTFFPFIFEEEPIFFDTWDNEAYVHDAPVRSLNCTLRDSQQKSLVMSGPYELKALHLQGQDMEQQVVFSMSFVQGEESNDKIPVALGLKEKNLYLSCVLKDDKPTLQLESVDPKNYPKKKMEKRFVFNKIEINNKLEFESAQFPNWYISTSQAENMPVFLGGTKGGQDITDFTMQFVSS

SEQ ID NO: 4563 - protein, 441 aa, Homo sapiens
MSEREVSTAPAGTDMPAAKKQKLSSDENSNPDLSGDENDDAVSIESGTNTERPDTPTNTPNAPGRKSWGKGKWKSKKCKYSFKCVNSLKEDHNQPLFGVQFNWHSKEGDPLVFATVGSNRVTLYECHSQGEIRLLQSYVDADADENFYTCAWTYDSNTSHPLLAVAGSRGIIRIINPITMQCIKHYVGHGNAINELKFHPRDPNLLLSVSKDHALRLWNIQTDTLVAIFGGVEGHRDEVLSADYDLLGEKIMSCGMDHSLKLWRINSKRMMNAIKESYDYNPNKTNRPFISQKIHFPDFSTRDIHRNYVDCVRWLGDLILSKSCENAIVCWKPGKMEDDIDKIKPSESNVTILGRFDYSQCDIWYMRFSMDFWQKMLALGNQVGKLYVWDLEVEDPHKAKCTTLTHHKCGAAIRQTSFSRDSSILIAVCDDASIWRWDRLR

SEQ ID NO: 4564 - protein, 202 aa, Homo sapiens
MAKVSVLNVAVLENPSPFHSPFRFEISFECSEALADDLEWKIIYVGSAESEEFDQILDSVLVGPVPAGRHMFVFQADAPNPSLIPETDAVGVTVVLITCTYHGQEFIRVGYYVNNEYLNPELRENPPMKPDFSQLQRNILASNPRVTRFHINWDNNMDRLEAIETQDPSLGCGLPLNCTPIKGLGLPGCIPGLLPENSMDCI

SEQ ID NO: 4565 - protein, 604 aa, Homo sapiens
MNIVENSIFLSNLMKSANTFELKYDLSCELYRMSTYSTFPAGVPVSERSLARAGFYYTGVNDKVKCFCCGLMLDNWKRGDSPTEKHKKLYPSCRFVQSLNSVNNLEATSQPTFPSSVTNSTHSLLPGTENSGYFRGSYSNSPSNPVNSRANQDFSALMRSSYHCAMNNENARLLTFQTWPLTFLSPTDLAKAGFYYIGPGDRVACFACGGKLSNWEPKDNAMSEHLRHFPKCPFIENQLQDTSRYTVSNLSMQTHAARFKTFFNWPSSVLVNPEQLASAGFYYVGNSDDVKCFCCDGGLRCWESGDDPWVQHAKWFPRCEYLIRIKGQEFIRQVQASYPHLLEQLLSTSDSPGDENAESSIIHFEPGEDHSEDAIMMNTPVINAAVEMGFSRSLVKQTVQRKILATGENYRLVNDLVLDLLNAEDEIREEERERATEEKESNDLLLIRKNRMALFQHLTCVIPILDSLLTAGIINEQEHDVIKQKTQTSLQARELIDTILVKGNIAATVFRNSLQEAEAVLYEHLFVQQDIKYIPTEDVSDLPVEEQLRRLQEERTCKVCMDKEVSIVFIPCGHLVVCKDCAPSLRKCPICRSTIKGTVRTFLS

SEQ ID NO: 4566 - protein, 856 aa, Homo sapiens
MGTTASTAQQTVSAGTPFEGLQGSGTMDSRHSVSIHSFQSTSLHNSKAKSIIPNKVAPVVITYNCKEEFQIHDELLKAHYTLGRLSDNTPEHYLVQGRYFLVRDVTEKMDVLGTVGSCGAPNFRQVQGGLTVFGMGQPSLSGFRRVLQKLQKDGHRECVIFCVREEPVLFLRADEDFVSYTPRDKQNLHENLQGLGPGVRVESLELAIRKEIHDFAQLSENTYHVYHNTEDLWGEPHAVAIHGEDDLHVTEEVYKRPLFLQPTYRYHRLPLPEQGSPLEAQLDAFVSVLRETPSLLQLRDAHGPPPALVFSCQMGVGRTNLGMVLGTLILLHRSGTTSQPEAAPTQAKPLPMEQFQVIQSFLRMVPQGRRMVEEVDRAITACAELHDLKEVVLENQKKLEGIRPESPAQGSGSRHSVWQRALWSLERYFYLILFNYYLHEQYPLAFALSFSRWLCAHPELYRLPVTLSSAGPVAPRDLIARGSLREDDLVSPDALSTVREMDVANFRRVPRMPIYGTAQPSAKALGSILAYLTDAKRRLRKVVWVSLREEAVLECDGHTYSLRWPGPPVAPDQLETLEAQLKAHLSEPPPGKEGPLTYRFQTCLTMQEVFSQHRRACPGLTYHRIPMPDFCAPREEDFDQLLEALRAALSKDPGTGFVFSCLSGQGRTTTAMVVAVLAFWHIQGFPEVGEEELVSVPDAKFTKGEFQVVMKVVQLLPDGHRVKKEVDAALDTVSETMTPMHYHLREIIICTYRQAKAAKEAQEMRRLQLRSLQYLERYVCLILFNAYLHLEKADSWQRPFSTWMQEVASKAGIYEILNELGFPELESGEDQPFSRLRYRWQEQSCSLEPSAPEDLL

SEQ ID NO: 4567 - protein, 593 aa, Homo sapiens
MKLQAVMETLLQRQQRARQELEARQQLPPDPPAAPPGRARAAPDEDREPESARMQRAQMAALAAMRAAAAGLGHPASPGGSEDGPPGSEEEDAAREGTPGSPGRGREGPGEEHFEDMASDEDMKPKWEEEEMEEDLGEDEEEEEEDYEDEEEEEDEEGLGPPGPASLGTTALFPRKAQPPQAFRGDGVPRVLGGQERPGPGPAHPGGAAHVAPQLQPPDHGDWTYEEQFKQLYELDGDPKRKEFLDDLFSFMQKRGTPVNRIPIMAKQVLDLFMLYVLVTEKGGLVEVINKKLWREITKGLNLPTSITSAAFTLRTQYMKYLYPYECEKRGLSNPNELQAAIDSNRREGRRQSFGGSLFAYSPGGAHGMLSSPKLPVSSLGLAASTNGSSITPAPKIKKEEDSAIPITVPGRLPVSLAGHPVVAAQAAAVQAAAAQAAVAAQAAALEQLREKLESAEPPEKKMALVADEQQRLMQRALQQNFLAMAAQLPMSIRINSQASESRQDSAVNLTGTNGSNSISMSVEINGIMYTGVLFAQPPAPTPTSAPNKGGGGGGGSSSNAGGRGGNTGTSGGQAGPAGLSTPSTSTSNNSLP

SEQ ID NO: 4568 - protein, 252 aa, Homo sapiens
MESEMETQSARAEEGFTQVTRKGGRRAKKRQAEQLSAAGEGGDAGRMDTEEARPAKRPVFPPLCGDGLLSGKEETRKIPVPANRYTPLKENWMKIFTPIVEHLGLQIRFNLKSRNVEIRTCKETKDVSALTKAADFVKAFILGFQVEDALALIRLDDLFLESFEITDVKPLKGDHLSRAIGRIAGKGGKTKFTIENVTRTRIVLADVKVHILGSFQNIKMARTAICNLILGNPPSKVYGNIRAVASRSADRF

SEQ ID NO: 4569 - protein, 926 aa, Homo sapiens
MTSRFRLPAGRTYNVRASELARDRQHTEVVCNILLLDNTVQAFKVNKHDQGQVLLDVVFKHLDLTEQDYFGLQLADDSTDNPRWLDPNKPIRKQLKRGSPYSLNFRVKFFVSDPNKLQEEYTRYQYFLQIKQDILTGRLPCPSNTAALLASFAVQSELGDYDQSENLSGYLSDYSFIPNQPQDFEKEIAKLHQQHIGLSPAEAEFNYLNTARTLELYGVEFHYARDQSNNEIMIGVMSGGILIYKNRVRMNTFPWLKIVKISFKCKQFFIQLRKELHESRETLLGFNMVNYRACKNLWKACVEHHTFFRLDRPLPPQKNFFAHYFTLGSKFRYCGRTEVQSVQYGKEKANKDRVFARSPSKPLARKLMDWEVVSRNSISDDRLETQSLPSRSPPGTPNHRNSTFTQEGTRLRPSSVGHLVDHMVHTSPSEVFVNQRSPSSTQANSIVLESSPSQETPGDGKPPALPPKQSKKNSWNQIHYSHSQQDLESHINETFDIPSSPEKPTPNGGIPHDNLVLIRMKPDENGRFGFNVKGGYDQKMPVIVSRVAPGTPADLCVPRLNEGDQVVLINGRDIAEHTHDQVVLFIKASCERHSGELMLLVRPNAVYDVVEEKLENEPDFQYIPEKAPLDSVHQDDHSLRESMIQLAEGLITGTVLTQFDQLYRKKPGMTMSCAKLPQNISKNRYRDISPYDATRVILKGNEDYINANYINMEIPSSSIINQYIACQGPLPHTCTDFWQMTWEQGSSMVVMLTTQVERGRVKCHQYWPEPTGSSSYGCYQVTCHSEEGNTAYIFRKMTLFNQEKNESRPLTQIQYIAWPDHGVPDDSSDFLDFVCHVRNKRAGKEEPVVVHCSAGIGRTGVLITMETAMCLIECNQPVYPLDIVRTMRDQRAMMIQTPSQYRFVCEAILKVYEEGFVKPLTTSTNK

SEQ ID NO: 4570 - protein, 561 aa, Homo sapiens
MAKERCLKKSFQDSLEDIKKRMKEKRNKNLAEIGKRRSFIAAPCQIITNTSTLLKNYQDNNKMLVLALENEKSKVKEAQDIILQLRKECYYLTCQLYALKGKLTSQQTVEPAQNQEICSSGMDPNSDDSSRNLFVKDLPQIPLEETELPGQGESFQIEDQIPTIPQDTLGVDFDSGEAKSTDNVLPRTVSVRSSLKKHCNSICQFDSLDDFETSHLAGKSFEFERVGFLDPLVNMHIPENVQHNACQWSKDQVNLSPKLIQPGTFTKTKEDILESKSEQTKSKQRDTQERKREEKRKANRRKSKRMSKYKENKSENKKTVPQKKMHKSVSSNDAYNFNLEEGVHLTPFRQKVSNDSNREENNESEVSLCESSGSGDDSDDLYLPTCKYIQNPTSNSDRPVTRPLAKRALKYTDEKETEGSKPTKTPTTTPPETQQSPHLSLKDITNVSLYPVVKIRRLSLSPKKNKASPAVALPKRRCTASVNYKEPTLASKLRRGDPFTDLCFLNSPIFKQKKDLRRSKKRALEVSPAKEAIFILYYVREFVSRFPDCRKCKLETHICLR

SEQ ID NO: 4571 - protein, 348 aa, Homo sapiens
MYTAIPQSGSPFPGSVQDPGLHVWRVEKLKPVPVAQENQGVFFSGDSYLVLHNGPEEVSHLHLWIGQQSSRDEQGACAVLAVHLNTLLGERPVQHREVQGNESDLFMSYFPRGLKYQEGGVESAFHKTSTGAPAAIKKLYQVKGKKNIRATERALNWDSFNTGDCFILDLGQNIFAWCGGKSNILERNKARDLALAIRDSERQGKAQVEIVTDGEEPAEMIQVLGPKPALKEGNPEEDLTADKANAQAAALYKVSDATGQMNLTKVADSSPFALELLISDDCFVLDNGLCGKIYIWKGRKANEKERQAALQVAEGFISRMQYAPNTQVEILPQGHESPIFKQFFKDWK

SEQ ID NO: 4572 - protein, 450 aa, Homo sapiens
MMQFAWQSYKRYAMGKNELRPLTKDGYEGNMFGGLSGATVIDSLDTLYLMELKEEFQEAKAWVGESFHLNVSGEASLFEVNIRYIGGLLSAFYLTGEEVFRIKAIRLGEKLLPAFNTPTGIPKGVVSFKSGNWGWATAGSSSILAEFGSLHLEFLHLTELSGNQVFAEKVRNIRKVLRKIEKPFGLYPNFLSPVSGNWVQHHVSVGGLGDSFYEYLIKSWLMSGKTDMEAKNMYYEALEAIETYLLNVSPGGLTYIAEWRGGILDHKMGHLACFSGGMIALGAEDAKEEKRAHYRELAAQITKTCHESYARSDTKLGPEAFWFNSGREAVATQLSESYYILRPEVVESYMYLWRQTHNPIYREWGWEVVLALEKYCRTEAGFSGIQDVYSSTPNHDNKQQSFFLAETLKYLYLLFSEDDLLSLEDWVFNTEAHPLPVNHSDSSGRAWGRH

SEQ ID NO: 4573 - protein, 482 aa, Homo sapiens
MRGSPGDAERRQRWGRLFEELDSNKDGRVDVHELRQGLARLGGGNPDPGAQQGISSEGDADPDGGLDLEEFSRYLQEREQRLLLMFHSLDRNQDGHIDVSEIQQSFRALGISISLEQAEKILHSMDRDGTMTIDWQEWRDHFLLHSLENVEDVLYFWKHSTLSSAGFSAWIKDSTAEQNRSKTTVLARRSGSHLKSQHFGRPKWADHEVLDIGECLTVPDEFSKQEKLTGMWWKQLVAGAVAGAVSRTGTAPLDRLKVFMQVHASKTNRLNILGGLRSMVLEGGIRSLWRGNGINVLKIAPESAIKFMAYEQIKRAILGQQETLHVQERFVAGSLAGATAQTIIYPMEVLKTRLTLRRTGQYKGLLDCARRILEREGPRAFYRGYLPNVLGIIPYAGIDLAVYETLKNWWLQQYSHDSADPGILVLLACGTISSTCGQIASYPLALVRTRMQAQGWSTVARFQITATSAFQVQAILLPQPPE

SEQ ID NO: 4574 - protein, 684 aa, Homo sapiens
MEENLISMREDHSFHVRYRMEASCLELALEGERLCKSGDCRAGVSFFEAAVQVGTEDLKTLSAIYSQLGNAYFYLHDYAKALEYHHHDLTLARTIGDQLGEAKASGNLGNTLKVLGNFDEAIVCCQRHLDISRELNDKVGEARALYNLGNVYHAKGKSFGCPGPQDVGEFPEEVRDALQAAVDFYEENLSLVTALGDRAAQGRAFGNLGNTHYLLGNFRDAVIAHEQRLLIAKEFGDKAAERRAYSNLGNAYIFLGEFETASEYYKKTLLLARQLKDRAVEAQSCYSLGNTYTLLQDYEKAIDYHLKHLAIAQELNDRIGEGRACWSLGNAYTALGNHDQAMHFAEKHLEISREVGDKSGELTARLNLSDLQMVLGLSYSTNNSIMSENTEIDSSLNGVRPKLGRRHSMENMELMKLTPEKVQNWNSEILAKQKPLIAKPSAKLLFVNRLKGKKYKTNSSTKVLQDASNSIDHRIPNSQRKISADTIGDEGFFDLLSRFQSNRMDDQRCCLQEKNCHTASTTTSSTPPKMMLKTSSVPVVSPNTDEFLDLLASSQSRRLDDQRASFSNLPGLRLTQNSQSVLSHLMTNDNKEADEDFFDILVKCQGSRLDDQRCAPPPATTKGPTVPDEDFFSLILRSQGKRMDEQRVLLQRDQNRDTDFGLKDFLQNNALLEFKNSGKKSADH

SEQ ID NO: 4575 - protein, 425 aa, Homo sapiens
MATAEVLNIGKKLYEGKTKEVYELLDSPGKVLLQSKDQITAGNAARKNHLEGKAAISNKITSCIFQLLQEAGIKTAFTRKCGETAFIAPQCEMIPIEWVCRRIATGSFLKRNPGVKEGYKFYPPKVELFFKDDANNDPQWSEEQLIAAKFCFAGLLIGQTEVDIMSHATQAIFEILEKSWLPQNCTLVDMKIEFGVDVTTKEIVLADVIDNDSWRLWPSGDRSQQKDKQSYRDLKEVTPEGLQMVKKNFEWVAERVELLLKSESQCRVVVLMGSTSDLGHCEKIKKACGNFGIPCELRVTSAHKGPDETLRIKAEYEGDGIPTVFVAVAGRSNGLGPVMSGNTAYPVISCPPLTPDWGVQDVWSSLRLPSGLGCSTVLSPEGSAQFAAQIFGLSNHLVWSKLRASILNTWISLKQADKKIRECNL

SEQ ID NO: 4576 - protein, 2590 aa, Homo sapiens
MNLLRRSGKRRRSESGSDSFSGSGGDSSASPQFLSGSVLSPPPGLGRCLKAAAAGECKPTVPDYERDKLLLANWGLPKAVLEKYHSFGVKKMFEWQAECLLLGQVLEGKNLVYSAPTSAGKTLVAELLILKRVLEMRKKALFILPFVSVAKEKKYYLQSLFQEVGIKVDGYMGSTSPSRHFSSLDIAVCTIERANGLINRLIEENKMDLLGMVVVDELHMLGDSHRGYLLELLLTKICYITRKSASCQADLASSLSNAVQIVGMSATLPNLELVASWLNAELYHTDFRPVPLLESVKVGNSIYDSSMKLVREFEPMLQVKGDEDHVVSLCYETICDNHSVLLFCPSKKWCEKLADIIAREFYNLHHQAEGLVKPSECPPVILEQKELLEVMDQLRRLPSGLDSVLQKTVPWGVAFHHAGLTFEERDIIEGAFRQGLIRVLAATSTLSSGVNLPARRVIIRTPIFGGRPLDILTYKQMVGRAGRKGVDTVGESILICKNSEKSKGIALLQGSLKPVRSCLQRREGEEVTGSMIRAILEIIVGGVASTSQDMHTYAACTFLAASMKEGKQGIQRNQESVQLGAIEACVMWLLENEFIQSTEASDGTEGKVYHPTHLGSATLSSSLSPADTLDIFADLQRAMKGFVLENDLHILYLVTPMFEDWTTIDWYRFFCLWEKLPTSMKRVAELVGVEEGFLARCVKGKVVARTERQHRQMAIHKRFFTSLVLLDLISEVPLREINQKYGCNRGQIQSLQQSAAVYAGMITVFSNRLGWHNMELLLSQFQKRLTFGIQRELCDLVRVSLLNAQRARVLYASGFHTVADLARANIVEVEVILKNAVPFKSARKAVDEEEEAVEERRNMRTIWVTGRKGLTEREAAALIVEEARMILQQDLVEMGVQWNPCALLHSSTCSLTHSESEVKEHTFISQTKSSYKKLTSKNKSNTIFSDSYIKHSPNIVQDLNKSREHTSSFNCNFQNGNQEHQTCSIFRARKRASLDINKEKPGASQNEGKTSDKKVVQTFSQKTKKAPLNFNSEKMSRSFRSWKRRKHLKRSRDSSPLKDSGACRIHLQGQTLSNPSLCEDPFTLDEKKTEFRNSGPFAKNVSLSGKEKDNKTSFPLQIKQNCSWNITLTNDNFVEHIVTGSQSKNVTCQATSVVSEKGRGVAVEAEKINEVLIQNGSKNQNVYMKHHDIHPINQYLRKQSHEQTSTITKQKNIIERQMPCEAVSSYINRDSNVTINCERIKLNTEENKPSHFQALGDDISRTVIPSEVLPSAGAFSKSEGQHENFLNISRLQEKTGTYTTNKTKNNHVSDLGLVLCDFEDSFYLDTQSEKIIQQMATENAKLGAKDTNLAAGIMQKSLVQQNSMNSFQKECHIPFPAEQHPLGATKIDHLDLKTVGTMKQSSDSHGVDILTPESPIFHSPILLEENGLFLKKNEVSVTDSQLNSFLQGYQTQETVKPVILLIPQKRTPTGVEGECLPVPETSLNMSDSLLFDSFSDDYLVKEQLPDMQMKEPLPSEVTSNHFSDSLCLQEDLIKKSNVNENQDTHQQLTCSNDESIIFSEMDSVQMVEALDNVDIFPVQEKNHTVVSPRALELSDPVLDEHHQGDQDGGDQDERAEKSKLTGTRQNHSFIWSGASFDLSPGLQRILDKVSSPLENEKLKSMTINFSSLNRKNTELNEEQEVISNLETKQVQGISFSSNNEVKSKIEMLENNANHDETSSLLPRKESNIVDDNGLIPPTPIPTSASKLTFPGILETPVNPWKTNNVLQPGESYLFGSPSDIKNHDLSPGSRNGFKDNSPISDTSFSLQLSQDGLQLTPASSSSESLSIIDVASDQNLFQTFIKEWRCKKRFSISLACEKIRSLTSSKTATIGSRFKQASSPQEIPIRDDGFPIKGCDDTLVVGLAVCWGGRDAYYFSLQKEQKHSEISASLVPPSLDPSLTLKDRMWYLQSCLRKESDKECSVVIYDFIQSYKILLLSCGISLEQSYEDPKVACWLLDPDSQEPTLHSIVTSFLPHELPLLEGMETSQGIQSLGLNAGSEHSGRYRASVESILIFNSMNQLNSLLQKENLQDVFRKVEMPSQYCLALLELNGIGFSTAECESQKHIMQAKLDAIETQAYQLAGHSFSFTSSDDIAEVLFLELKLPPNREMKNQGSKKTLGSTRRGIDNGRKLRLGRQFSTSKDVLNKLKALHPLPGLILEWRRITNAITKVVFPLQREKCLNPFLGMERIYPVSQSHTATGRITFTEPNIQNVPRDFEIKMPTLVGESPPSQAVGKGLLPMGRGKYKKGFSVNPRCQAQMEERAADRGMPFSISMRHAFVPFPGGSILAADYSQLELRILAHLSHDRRLIQVLNTGADVFRSIAAEWKMIEPESVGDDLRQQAKQICYGIIYGMGAKSLGEQMGIKENDAACYIDSFKSRYTGINQFMTETVKNCKRDGFVQTILGRRRYLPGIKDNNPYRKAHAERQAINTIVQGSAADIVKIATVNIQKQLETFHSTFKSHGHREGMLQSDQTGLSRKRKLQGMFCPIRGGFFILQLHDELLYEVAEEDVVQVAQIVKNEMESAVKLSVKLKVKVKIGASWGELKDFDV

SEQ ID NO: 4577 - protein, 1444 aa, Homo sapiens
MKNKGAKQKLKRKGAASAFGCDLTEYLESSGQDVPYVLKSCAEFIETHGIVDGIYRLSGVTSNIQRLRQEFGSDQCPDLTREVYLQDIHCVGSLCKLYFRELPNPLLTYELYEKFTEAVSHCPEEGQLARIQNVIQELPPSHYRTLEYLIRHLAHIASFSSKTNMHARNLALVWAPNLLRSKEIEATGCNGDAAFLAVRVQQVVIEFILNHVDQIFNNGAPGSLENDENRPIMKSLTLPALSLPMKLVSLEEAQARSLATNHPARKERRENSLPEIVPPMGTLFHTVLELPDNKRKLSSKSKKWKSIFNLGRSGSDSKSKLSRNGSVFVRGQRLSVEKATIRPAKSMDSLCSVPVEGKETKGNFNRTVTTGGFFIPATKMHSTGTGSSCDLTKQEGEWGQEGMPPGAEGGFDVSSDRSHLQGAQARPPPEQLKVFRPVEDPESEQTAPKMLGMFYTSNDSPSKSVFTSSLFQMEPSPRNQRKALNISEPFAVSVPLRVSAVISTNSTPCRTPPKELQSLSSLEEFSFHGSESGGWPEEEKPLGAETSAASVPKKAGLEDAKAVPEAPGTVECSKGLSQEPGAHLEEKKTPESSLSSQHLNELEKRPNPEKVVEEGREAGEMESSTLQESPRARAEAVLLHEMDEDDLANALIWPEIQQELKIIESEEELSSLPPPALKTSPIQPILESSLGPFIPSEPPGSLPCGSFPAPVSTPLEVWTRDPANQSTQGASTAASREKPEPEQGLHPDLASLAPLEIVPFEKASPQATVEVGGPGNLSPPLPPAPPPPTPLEESTPVLLSKGGPEREDSSRKLRTDLYIDQLKSQDSPEISSLCQGEEATPRHSDKQNSKNAASEGKGCGFPSPTREVEIVSQEEEDVTHSVQEPSDCDEDDTVTDIAQHGLEMVEPWEEPQWVTSPLHSPTLKDAHKAQVQGLQGHQLEKRLSHRPSLRQSHSLDSKPTVKSQWTLEVPSSSSCANLETERNSDPLQPQAPRREITGWDEKALRSFREFSGLKGAEAPPNQKGPSGVQPNPAETSPISLAEGKELGTHLGHSSPQIRQGGVPGPESSKESSPSVQDSTSPGEHPAKLQLKSTECGPPKGKNRPSSLNLDPAIPIADLFWFENVASFSSPGMQVSEPGDPKVTWMTSSYCKADPWRVYSQDPQDLDIVAHALTGRRNSAPVSVSAVRTSFMVKMCQARAVPVIPPKIQYTQIPQPLPSQSSGENGVQPLERSQEGPSSTSGTTQKPAKDDSPSSLESSKEEKPKQDPGAIKSSPVDATAPCMCEGPTLSPEPGSSNLLSTQDAVVQCRKRMSETEPSGDNLLSSKLERPSGGSKPFHRSRPGRPQSLILFSPPFPIMDHLPPSSTVTDSKVLLSPIRSPTQTVSPGLLCGELAENTWVTPEGVTLRNKMTIPKNGQRLETSTSCFYQPQRRSVILDGRSGRQIE

SEQ ID NO: 4578 - protein, 125 aa, Homo sapiens [sequence omitted]

SEQ ID NO: 4579 - protein, 222 aa, Homo sapiens
MEIPPTNYPASRAALVAQNYINYQQGTPHRVFEVQKVKQASMEDIPGRGHKYHLKFAVEEIIQKQVKVNCTAEVLYPSTGQETAPEVNFTFEGETGKNPDEEDNTFYQRLKSMKEPLEAQNIPDNFGNVSPEMTLVLHLAWVACGYIIWQNSTEDTWYKMVKIQTVKQVQRNDDFIELDYTILLHNIASQEIIPWQMQVLWHPQYGTKVKHNSRLPKEVQLE

SEQ ID NO: 4580 - protein, 1022 aa, Homo sapiens
MYFCWGADSRELQRRRTAGSPGAELLQAASGERHSLLLLTNHRVLSCGDNSRGQLGRRGAQRGELPEPIQALETLIVDLVSCGKEHSLAVCHKGRVFAWGAGSEGQLGIGEFKEISFTPKKIMTLNDIKIIQVSCGHYHSLALSKDSQVFSWGKNSHGQLGLGKEFPSQASPQRVRSLEGIPLAQVAAGGAHSFALSLCGTSFGWGSNSAGQLALSGRNVPVQSNKPLSVGALKNLGVVYISCGDAHTAVLTQDGKVFTFGDNRSGQLGYSPTPEKRGPQLVERIDGLVSQIDCGSYHTLAYVHTTGQVVSFGHGPSDTSKPTHPEALTENFDISCLISAEDFVDVQVKHIFAGTYANFVTTHQDTSSTRAPGKTLPEISRISQSMAEKWIAVKRRSTEHEMAKSEIRMIFSSPACLTASFLKKRGTGETTSIDVDLEMARDTFKKLTKKEWISSMITTCLEDDLLRALPCHSPHQEALSVFLLLPECPVMHDSKNWKNLVVPFAKAVCEMSKQSLQVLKKCWAFLQESSLNPLIQMLKAAIISQLLHQTKTEQDHCNVKALLGMMKELHKVNKANCRLPENTFNINELSNLLNFYIDRGRQLFRDNHLIPAETPSPVIFSDFPFIFNSLSKIKLLQADSHIKMQMSEKKAYMLMHETILQKKDEFPPSPRFILRVRRSRLVKDALRQLSQAEATDFCKVLVVEFINEICPESGGVSSEFFHCMFEEMTKPEYGMFMYPEMGSCMWFPAKPKPEKKRYFLFGMLCGLSLFNLNVANLPFPLALYKKLLDQKPSLEDLKELSPRLGKSLQEVLDDAADDIGDALCIRFSIHWDQNDVDLIPNGISIPVDQTNKRDYVSKYIDYIFNVSVKAVYEEFQRGFYRVCEKEILRHFYPEELMTAIIGNTDYDWKQFEQNSKYEQGYQKSHPTIQLFWKAFHKLTLDEKKKFLFFLTGRDRLHARGIQKMEIVFRCPETFSERDHPTSITCHNILSLPKYSTMERMEEALQVAINNNRGFVSPMLTQS

SEQ ID NO: 4581 - protein, 473 aa, Homo sapiens
MPQTPPFSAMFDSSGYNRNLYQSAEDSCGGLYYHDNNLLSGSLEALIQHLVPNVDYYPDRTYIFTFLLSSRLFMHPYELMAKVCHLCVEHQRLSDPDSDKNQMRKIAPKILQLLTEWTETFPYDFRDERMMRNLKDLAHRIASGEEQTYRKNVQQMMQCLIRKLAALSQYEEVLAKISSTSTDRLTVLKTKPQSIQRDIITVCNDPYTLAQQLTHIELERLNYIGPEEFVQAFVQKDPLDNDKSCYSERKKTRNLEAYVEWFNRLSYLVATEICMPVKKKHRARMIEYFIDVARECFNIGNFNSLMAIISGMNMSPVSRLKKTWAKVKTAKFDILEHQMDPSSNFYNYRTALRGAAQRSLTAHSSREKIVIPFFSLLIKDIYFLNEGCANRLPNGHVNFEKFWELAKQVSEFMTWKQVECPFERDRKILQYLLTVPVFSEDALYLASYESEGPENHIEKDRWKSLRSSLLGRV

SEQ ID NO: 4582 - protein, 726 aa, Homo sapiens
MSEETVPEAASPPPPQGQPYFDRFSEDDPEYMRLRNRAADLRQDFNLMEQKKRVTMILQSPSFREELEGLIQEQMKKGNNSSNIWALRQIADFMASTSHAVFPTSSMNVSMMTPINDLHTADSLNLAKGERLMRCKISSVYRLLDLYGWAQLSDTYVTLRVSKEQDHFLISPKGVSCSEVTASSLIKVNILGEVVEKGSSCFPVDTTGFCLHSAIYAARPDVRCIIHLHTPATAAVSAMKWGLLPVSHNALLVGDMAYYDFNGEMEQEADRINLQKCLGPTCKILVLRNHGVVALGDTVEEAFYKIFHLQAACEIQVSALSSAGGVENLILLEQEKHRPHEVGSVQWAGSTFGPMQKSRLGEHEFEALMRMLDNLGYRTGYTYRHPFVQEKTKHKSEVEIPATVTAFVFEEDGAPVPALRQHAQKQQKEKTRWLNTPNTYLRVNVADEVQRSMGSPRPKTTWMKADEVEKSSSGMPIRIENPNQFVPLYTDPQEVLEMRNKIREQNRQDVKSAGPQSQLLASVIAEKSRSPSTESQLMSKGDEDTKDDSEETVPNPFSQLTDQELEEYKKEVERKKLELDGEKETAPEEPGSPAKSAPASPVQSPAKEAETKSPLVSPSKSLEEGTKKTETSKAATTEPETTQPEGVVVNGREEEQTAEEILSKGLSQMTTSADTDVDTSKDKTESVTSGPMSPEGSPSKSPSKKKKKFRTPSFLKKSKKKEKVES

SEQ ID NO: 4583 - protein, 288 aa, Homo sapiens
LVGVGGGDVEDVTPRPGGCQISGRGARGCNGIPGAAAWEAALPRRRPRRHPSVNPRSRAAGSPRTRGRRTEERPSGSRLGDRGRGRALPGGRLGGRGRGRAPERVGGRGRGRGTAAPRAAPAARGSRPGPAGTMAAGSITTLPALPEDGGSGAFPPGHFKDPKRLYCKNGGFFLRIHPDGRVDGVREKSDPHIKLQLQAEERGVVSIKGVCANRYLAMKEDGRLLASKCVTDECFFFERLESNNYNTYRSRKYTSWYVALKRTGQYKLGSKTGPGQKAILFLPMSAKS

SEQ ID NO: 4584 - protein, 222 aa, Homo sapiens
MNSNVENLPPHIIRLVYKEVTTLTADPPDGIKVFPNEEDLTDLQVTIEGPEGTPYAGGLFRMKLLLGKDFPASPPKGYFLTKIFHPNVGANGEICVNVLKRDWTAELGIRHVLLTIKCLLIHPNPESALNEEAGRLLLENYEEYAARARLLTEIHGGAGGPSGRAEAGRALASGTEASSTDPGAPGGPGGAEGPMAKKHAGERDKKLAAKKKTDKKRALRRL

SEQ ID NO: 4585 - protein, 605 aa, Homo sapiens
MVEGPGCTLNGEKIRARVLPGQAVTGVRGSALRSLQGRALRLAASTVVVSPQAAALNNDSSQNVLSLFNGYVYSGVETLGKELFMYFGPKALRIHFGMKGFIMINPLEYKYKNGASPVLEVQLTKDLICFFDSSVELRNSMESQQRIRMMKELDVCSPEFSFLRAESEVKKQKGRMLGDVLMDQNVLPGVGNIIKNEALFDSGLHPAVKVCQLTDEQIHHLMKMIRDFSILFYRCRKAGLALSKHYKVYKRPNCGQCHCRITVCRFGDNNRMTYFCPHCQKENPQHVDICKLPTRNTIISWTSSRVDHVMDSVARKSEEHWTCVVCTLINKPSSKACDACLTSRPIDSVLKSEENSTVFSHLMKYPCNTFGKPHTEVKINRKTAFGTTTLVLTDFSNKSSTLERKTKQNQILDEEFQNSPPASVCLNDIQHPSKKTTNDITQPSSKVNISPTISSESKLFSPAHKKPKTAQYSSPELKSCNPGYSNSELQINMTDGPRTLNPDSPRCSKHNRLCILRVVGKDGENKGRQFYACPLPREAQCGFFEWADLSFPFCNHGKRSTMKTVLKIGPNNGKNFFVCPLGKEKQCNFFQWAENGPGIKIIPGC

SEQ ID NO: 4586 - protein, 529 aa, Homo sapiens
MEHRIVGPGPYRATRLWNETVELFRAKMPLRKHRCRFKSYEHCFTAAEAVDWLHELLRCSQNFGPEVTRKQTVQLLKKFLKNHVIEDIKGKWGEEDFEDNRHLYRFPPSSPLKPYPKKPPNQKDVIKFPEWNDLPPGTSQENIPVRPVVMNSEMWYKRHSIAIGEVPACRLVHRRQLTEANVEEIWKSMTLSYLQKILGLDSLEEVLDVKLVNSKFIIHNVYSVSKQGVVILDDKSKELPHWVLSAMKCLANWPNCSDLKQPMYLGFEKDVFKTIADYYGHLKEPLLTFHLFDAFVSVLGLLQKEKVAVEAFQICCLLLPPENRRKLQLLMRMMARICLNKEMPPLCDGFGTRTLMVQTFSRCILCSKDEVDLDELLAARLVTFLMDNYQEILKVPLALQTSIEERVAHLRRVQIKYPGADMDITLSAPSFCRQISPEEFEYQRSYGSQEPLAALLEEVITDAKLSNKEKKKKLKQFQKSYPEVYQERFPTPESAALLFPEKPKPKPQLLMWALKKPFQPFQRTRSFRM

SEQ ID NO: 4587 - protein, 904 aa, Homo sapiens
MAESSESFTMASSPAQRRRGNDPLTSSPGRSSRRTDALTSSPGRDLPPFEDESEGLLGTEGPLEEEEDGEELIGDGMERDYRAIPELDAYEAEGLALDDEDVEELTASQREAAERAMRQRDREAGRGLGRMRRGLLYDSDEEDEERPARKRRQVERATEDGEEDEEMIESIENLEDLKGHSVREWVSMAGPRLEIHHRFKNFLRTHVDSHGHNVFKERISDMCKENRESLVVNYEDLAAREHVLAYFLPEAPAELLQIFDEAALEVVLAMYPKYDRITNHIHVRISHLPLVEELRSLRQLHLNQLIRTSGVVTSCTGVLPQLSMVKYNCNKCNFVLGPFCQSQNQEVKPGSCPECQSAGPFEVNMEETIYQNYQRIRIQESPGKVAAGRLPRSKDAILLADLVDSCKPGDEIELTGIYHNNYDGSLNTANGFPVFATVILANHVAKKDNKVAVGELTDEDVKMITSLSKDQQIGEKIFASIAPSIYGHEDIKRGLALALFGGEPKNPGGKHKVRGDINVLLCGDPGTAKSQFLKYIEKVSSRAIFTTGQGASAVGLTAYVQRHPVSREWTLEAGALVLADRGVCLIDEFDKMNDQDRTSIHEAMEQQSISISKAGIVTSLQARCTVIAAANPIGGRYDPSLTFSENVDLTEPIISRFDILCVVRDTVDPVQDEMLARFVVGSHVRHHPSNKEEEGLANGSAAEPAMPNTYGVEPLPQEVLKKYIIYAKERVHPKLNQMDQDKVAKMYSDLRKESMATGSIPITVRHIESMIRMAEAHARIHLRDYVIEDDVNMAIRVMLESFIDTQKFSVMRSMRKTFARYLSFRRDNNELLLFILKQLVAEQVTYQRNRFGAQQDTIEVPEKDLVDKARQINIHNLSAFYDSELFRMNKFSHDLKRKMILQQF

SEQ ID NO: 4588 - protein, 145 aa, Homo sapiens
MKFNPFVTSDRSKNRKRHFNAPSHVRRKIMSSPLSKELRQKYNVRSMPIRKDDEVQVVRGHYKGQQIGKVVQVYRKKYVIYIERVQREKANGTTVHVGIHPSKVVITRLKLDKDRKKILERKAKSRQVGKEKGKYKEELIEKMQE

SEQ ID NO: 4589 - protein, 2701 aa, Homo sapiens
MAEEGAVAVCVRVRPLNSREESLGETAQVYWKTDNNVIYQVDGSKSFNFDRVFHGNETTKNVYEEIAAPIIDSAIQGYNGTIFAYGQTASGKTYTMMGSEDHLGVIPRAIHDIFQKIKKFPDREFLLRVSYMEIYNETITDLLCGTQKMKPLIIREDVNRNVYVADLTEEVVYTSEMALKWITKGEKSRHYGETKMNQRSSRSHTIFRMILESREKGEPSNCEGSVKVSHLNLVDLAGSERAAQTGAAGVRLKEGCNINRSLFILGQVIKKLSDGQVGGFINYRDSKLTRILQNSLGGNAKTRIICTITPVSFDETLTALQFASTAKYMKNTPYVNEVSTDEALLKRYRKEIMDLKKQLEEVSLETRAQAMEKDQLAQLLEEKDLLQKVQNEKIENLTRMLVTSSSLTLQQELKAKRKRRVTWCLGKINKMKNSNYADQFNIPTNITTKTHKLSINLLREIDESVCSESDVFSNTLDTLSEIEWNPATKLLNQENIESELNSLRADYDNLVLDYEQLRTEKEEMELKLKEKNDLDEFEALERKTKKDQEMQLIHEISNLKNLVKHAEVYNQDLENELSSKVELLREKEDQIKKLQEYIDSQKLENIKMDLSYSLESIEDPKQMKQTLFDAETVALDAKRESAFLRSENLELKEKMKELATTYKQMENDIQLYQSQLEAKKKMQVDLEKELQSAFNEITKLTSLIDGKVPKDLLCNLELEGKITDLQKELNKEVEENEALREEVILLSELKSLPSEVERLRKEIQDKSEELHIITSEKDKLFSEVVHKESRVQGLLEEIGKTKDDLATTQSNYKSTDQEFQNFKTLHMDFEQKYKMVLEENERMNQEIVNLSKEAQKFDSSLGALKTELSYKTQELQEKTREVQERLNEMEQLKEQLENRDSTLQTVEREKTLITEKLQQTLEEVKTLTQEKDDLKQLQESLQIERDQLKSDIHDTVNMNIDTQEQLRNALESLKQHQETINTLKSKISEEVSRNLHMEENTGETKDEFQQKMVGIDKKQDLEAKNTQTLTADVKDNEIIEQQRKIFSLIQEKNELQQMLESVIAEKEQLKTDLKENIEMTIENQEELRLLGDELKKQQEIVAQEKNHAIKKEGELSRTCDRLAEVEEKLKEKSQQLQEKQQQLLNVQEEMSEMQKKINEIENLKNELKNKELTLEHMETERLELAQKLNENYEEVKSITKERKVLKELQKSFETERDHLRGYIREIEATGLQTKEELKIAHIHLKEHQETIDELRRSVSEKTAQIINTQDLEKSHTKLQEEIPVLHEEQELLPNVKEVSETQETMNELELLTEQSTTKDSTTLARIEMERLRLNEKFQESQEEIKSLTKERDNLKTIKEALEVKHDQLKEHIRETLAKIQESQSKQEQSLNMKEKDNETTKIVSEMEQFKPKDSALLRIEIEMLGLSKRLQESHDEMKSVAKEKDDLQRLQEVLQSESDQLKENIKEIVAKHLETEEELKVAHCCLKEQEETINELRVNLSEKETEISTIQKQLEAINDKLQNKIQEIYEKEEQFNIKQISEVQEKVNELKQFKEHRKAKDSALQSIESKMLELTNRLQESQEEIQIMIKEKEEMKRVQEALQIERDQLKENTKEIVAKMKESQEKEYQFLKMTAVNETQEKMCEIEHLKEQFETQKLNLENIETENIRLTQILHENLEEMRSVTKERDDLRSVEETLKVERDQLKENLRETITRDLEKQEELKIVHMHLKEHQETIDKLRGIVSEKTNEISNMQKDLEHSNDALKAQDLKIQEELRIAHMHLKEQQETIDKLRGIVSEKTDKLSNMQKDLENSNAKLQEKIQELKANEHQLITLKKDVNETQKKVSEMEQLKKQIKDQSLTLSKLEIENLNLAQKLHENLEEMKSVMKERDNLRRVEETLKLERDQLKESLQETKARDLEIQQELKTARMLSKEHKETVDKLREKISEKTIQISDIQKDLDKSKDELQKKIQELQKKELQLLRVKEDVNMSHKKINEMEQLKKQFEAQNLSMQSVRMDNFQLTKKLHESLEEIRIVAKERDELRRIKESLKMERDQFIATLREMIARDRQNHQVKPEKRLLSDGQQHLTESLREKCSRIKELLKRYSEMDDHYECLNRLSLDLEKEIEFQKELSMRVKANLSLPYLQTKHIEKLFTANQRCSMEFHRIMKKLKYVLSYVTKIKEEQHESINKFEMDFIDEVEKQKELLIKIQHLQQDCDVPSRELRDLKLNQNMDLHIEEILKDFSESEFPSIKTEFQQVLSNRKEMTQFLEEWLNTRFDIEKLKNGIQKENDRICQVNNFFNNRIIAIMNESTEFEERSATISKEWEQDLKSLKEKNEKLFKNYQTLKTSLASGAQVNPTTQDNKNPHVTSRATQLTTEKIRELENSLHEAKESAMHKESKIIKMQKELEVTNDIIAKLQAKVHESNKCLEKTKETIQVLQDKVALGAKPYKEEIEDLKMKLVKIDLEKMKNAKEFEKEISATKATVEYQKEVIRLLRENLRRSQQAQDTSVISEHTDPQPSNKPLTCGGGSGIVQNTKALILKSEHIRLEKEISKLKQQNEQLIKQKNELLSNNQHLSNEVKTWKERTLKREAHKQVTCENSPKSPKVTGTASKKKQITPSQCKERNLQDPVPKESPKSCFFDSRSKSLPSPHPVRYFDNSSLGLCPEVQNAGAESVDSQPGPWHASSGKDVPECKTQ

SEQ ID NO: 4590 - protein, 293 aa, Homo sapiens
MSSASGLRRGHPAGGEENMTETDAFYKREMFDPAEKYKMDHRRRGIALIFNHERFFWHLTLPERRGTCADRDNLTRRFSDLGFEVKCFNDLKAEELLLKIHEVSTVSHADADCFVCVFLSHGEGNHIYAYDAKIEIQTLTGLFKGDKCHSLVGKPKIFIIQACRGNQHDVPVIPLDVVDNQTEKLDTNITEVDAASVYTLPAGADFLMCYSVAEGYYSHRETVNGSWYIQDLCEMLGKYGSSLEFTELLTLVNRKVSQRRVDFCKDPSAIGKKQVPCFASMLTKKLHFFPKSN

SEQ ID NO: 4591 - protein, 443 aa, Homo sapiens
MEEDSLEDSNLPPKVWHSEMTVSVTGEPPSTVEEEGIPKETDIEIIPEIPETLEPLSLPDVLRISAVLEDTTDQLSILNYIMPVQYEGRQSICVKSREMNLEGTNLDKLPMASTITKIPSPLITEEGPNLPEIRHRGRFAVEFNKMQDLVFKKPTRQTIMTTETLKKIQIDRQFFSDVIADTIKELQDSATYNSLLQALSKERENKMHFYDIIAREEKGRKQIISLQKQLINVKKEWQFEVQSQNEYIANLKDQLQEMKAKSNLENRYMKTNTELQIAQTQKKCNRTEELLVEEIEKLRMKTEEEARTHTEIEMFLRKEQQKLEERLEFWMEKYDKDTEMKQNELNALKATKASDLAHLQDLAKMIREYEQVIIEDRIEKERSKKKVKQDLLELKSVIKLQAWWRGTMIRREIGGFKMPKDKVDSKDSKGKGKGKDKRRGKKK

SEQ ID NO: 4592 - protein, 605 aa, Homo sapiens
MEADIITNLRCRLKEAEEERLKAAQYGLQLVESQNELQNQLDKCRNEMMTMTESYEQEKYTLQREVELKSRMLESLSCECEAIKQQQKMHLEKLEEQLSRSHGQEVNELKTKIEKLKVELDEARLSEKQLKHQVDHQKELLSCKSEELRVMSERVQESMSSEMLALQIELTEMESMKTTLKEEVNELQYRQEQLELLITNLMRQVDRLKEEKEEREKEAVSYYNALEKARVANQDLQVQLDQALQQALDPNSKGNSLFAEVEDRRAAMERQLISMKVKYQSLKKQNVFNREQMQRMKLQIATLLQMKGSQTEFEQQERLLAMLEQKNGEIKHLLGEIRNLEKFKNLYDSMESKPSVDSGTLEDNTYYTDLLQMKLDNLNKEIESTKGELSIQRMKALFESQRALDIERKLFANERCLQLSESENMKLRAKLDELKLKYEPEETVEVPVLKKRREVLPVDITTAKDACVNNSALGGEVYRLPPQKEETQSCPNSLEDNNLQLEKSVSIYTPVVSLSPHKNLPVDMQLKKEKKCVKLIGVPADAEALSERSGNTPNSPRLAAESKLQTEVKEGKETSSKLEKETCKKLHPILYVSSKSTPETQCPQQ

SEQ ID NO: 4593 - protein, 283 aa, Homo sapiens
MAVPPTYADLGKSARDVFTKGYGFGLIKLDLKTKSENGLEFTSSGSANTETTKVTGSLETKYRWTEYGLTFTEKWNTDNTLGTEITVEDQLARGLKLTFDSSFSPNTGKKNAKIKTGYKREHINLGCDMDFDIAGPSIRGALVLGYEGWLAGYQMNFETAKSRVTQSNFAVGYKTDEFQLHTNVNDGTEFGGSIYQKVNKKLETAVNLAWTAGNSNTRFGIAAKYQIDPDACFSAKVNNSSLIGLGYTQTLKPGIKLTLSALLDGKNVNAGGHKLGLGLEFQA

SEQ ID NO: 4594 - protein, 1204 aa, Homo sapiens
MAMDQVNALCEQLVKAVTVMMDPNSTQRYRLEALKFCEEFKEKCPICVPCGLRLAEKTQVAIVRHFGLQILEHVVKFRWNGMSRLEKVYLKNSVMELIANGTLNILEEENHIKDALSRIVVEMIKREWPQHWPDMLIELDTLSKQGETQTELVMFILLRLAEDVVTFQTLPPQRRRDIQQTLTQNMERIFSFLLNTLQENVNKYQQVKTDTSQESKAQANCRVGVAALNTLAGYIDWVSMSHITAENCKLLEILCLLLNEQELQLGAAECLLIAVSRKGKLEDRKPLMVLFGDVAMHYILSAAQTADGGGLVEKHYVFLKRLCQVLCALGNQLCALLGADSDVETPSNFGKYLESFLAFTTHPSQFLRSSTQMTWGALFRHEILSRDPLLLAIIPKYLRASMTNLVKMGFPSKTDSPSCEYSRFDFDSDEDFNAFFNSSRAQQGEVMRLACRLDPKTSFQMAGEWLKYQLSTFLDAGSVNSCSAVGTGEGSLCSVFSPSFVQWEAMTLFLESVITQMFRTLNREEIPVNDGIELLQMVLNFDTKDPLILSCVLTNVSALFPFVTYRPEFLPQVFSKLFSSVTFETVEESKAPRTRAVRNVRRHACSSIIKMCRDYPQLVLPNFDMLYNHVKQLLSNELLLTQMEKCALMEALVLISNQFKNYERQKVFLEELMAPVASIWLSQDMHRVLSDVDAFIAYVGTDQKSCDPGLEDPCGLNRARMSFCVYSILGVVKRTCWPTDLEEAKAGGFVVGYTSSGNPIFRNPCTEQILKLLDNLLALIRTHNTLYAPEMLAKMAEPFTKALDMLDAEKSAILGLPQPLLELNDSPVFKTVLERMQRFFSTLYENCFHILGKAGPSMQQDFYTVEDLATQLLSSAFVNLNNIPDYRLRPMLRVFVKPLVLFCPPEHYEALVSPILGPLFTYLHMRLSQKWQVINQRSLLCGEDEAADENPESQEMLEEQLVRMLTREVMDLITVCCVSKKGADHSSAPPADGDDEEMMATEVTPSAMAELTDLGKCLMKHEDVCTALLITAFNSLAWKDTLSCQRTTSQLCWPLLKQVLSGTLLADAVTWLFTSVLKGLQMHGQHDGCMASLVHLAFQIYEALRPRYLEIRAVMEQIPEIQKDSLDQFDCKLLNPSLQKVADKRRKDQFKRLIAGCIGKPLGEQFRKEVHIKNLPSLFKKTKPMLETEVLDNDGGGLATIFEP

SEQ ID NO: 4595 - protein, 295 aa, Homo sapiens
MMAKKPPKPAPRRIFQERLKITALPLYFEGFLLIKRSGYREYEHYWTELRGTTLFFYTDKKSIIYVDKLDIVDLTCLTEQNSTEKNCAKFTLVLPKEEVQLKTENTESGEEWRGFILTVTELSVPQNVSLLPGQVIKLHEVLEREKKRRIETEQSTSVEKEKEPTEDYVDVLNPMPACFYTVSRKEATEMLQKNPSLGNMILRPGSDSRNYSITIRQEIDIPRIKHYKVMSVGQNYTIELEKPVTLPNLFSVIDYFVKETRGNLRPFICSTDENTGQEPSMEGRSEKLKKNPHIA

SEQ ID NO: 4596 - protein, 1124 aa, Homo sapiens
MDPFTEKLLERTRARRENLQRKMAERPTAAPRSMTHAKRARQPLSEASNQQPLSGGEEKSCTKPSPSKKRCSDNTEVEVSNLENKQPVESTSAKSCSPSPVSPQVQPQAADTISDSVAVPASLLGMRRGLNSRLEATAASSVKTRMQKLAEQRRRWDNDDMTDDIPESSLFSPMPSEEKAASPPRPLLSNASATPVGRRGRLANLAATICSWEDDVNHSFAKQNSVQEQPGTACLSKFSSASGASARINSSSVKQEATFCSQRDGDASLNKALSSSADDASLVNASISSSVKATSPVKSTTSITDAKSCEGQNPELLPKTPISPLKTGVSKPIVKSTLSQTVPSKGELSREICLQSQSKDKSTTPGGTGIKPFLERFGERCQEHSKESPARSTPHRTPIITPNTKAIQERLFKQDTSSSTTHLAQQLKQERQKELACLRGRFDKGNIWSAEKGGNSKSKQLETKQETHCQSTPLKKHQGVSKTQSLPVTEKVTENQIPAKNSSTEPKGFTECEMTKSSPLKITLFLEEDKSLKVTSDPKVEQKIEVIREIEMSVDDDDINSSKVINDLFSDVLEEGELDMEKSQEEMDQALAESSEEQEDALNISSMSLLAPLAQTVGVVSPESLVSTPRLELKDTSRSDESPKPGKFQRTRVPRAESGDSLGSEDRDLLYSIDAYRSQRFKETERPSIKQVIVRKEDVTSKLDEKNNAFPCQVNIKQKMQELNNEINMQQTVIYQASQALNCCVDEEHGKGSLEEAEAERLLLIATGKRTLLIDELNKLKNEGPQRKNKASPQSEFMPSKGSVTLSEIRLPLKADFVCSTVQKPDAANYYYLIILKAGAENMVATPLASTSNSLNGDALTFTTTFTLQDVSNDFEINIEVYSLVQKKDPSGLDKKKKTSKSKAITPKRLLTSITTKSNIHSSVMASPGGLSAVRTSNFALVGSYTLSLSSVGNTKFVLDKVPFLSSLEGHIYLKIKCQVNSSVEERGFLTIFEDVSGFGAWHRRWCVLSGNCISYWTYPDDEKRKNPIGRINLANCTSRQIEPANREFCARRNTFELITVRPQREDDRETLVSQCRDTLCVTKNWLSADTKEERDLWMQKLNQVLVDIRLWQPDACYKPIGKP

SEQ ID NO: 4597 - protein, 405 aa, Homo sapiens
MERLQKQPLTSPGSVSPSRDSSVPGSPSSIVAKMDNQVLGYKDLAAIPKDKAILDIERPDLMIYEPHFTYSLLEHVELPRSRERSLSPKSTSPPPSPEVWADSRSPGIISQASAPRTTGTPRTSLPHFHHPETSRPDSNIYKKPPIYKQRESVGGSPQTKHLIEDLIIESSKFPAAQPPDPNQPAKIETDYWPCPPSLAVVETEWRKRKASRRGAEEEEEEEDDDSGEEMKALRERQREELSKVTSNLGKMILKEEMEKSLPIRRKTRSLPDRTPFHTSLHQGTSKSSSLPAYGRTTLSRLQSTEFSPSGSETGSPGLQNGEGQRGRMDRGNSLPCVLEQKIYPYEMLVVTNKGRTKLPPGVDRMRLERHLSAEDFSRVFAMSPEEFGKLALWKRNELKKKASLF

SEQ ID NO: 4598 - protein, 596 aa, Homo sapiens
MGSVSSLISGHSFHSKHCRASQYKLRKSSHLKKLNRYSDGLLRFGFSQDSGHGKSSSKMGKSEDFFYIKVSQKARGSHHPDYTALSSGDLGGQAGVDFDPSTPPKLMPFSNQLEMGSEKGAVRPTAFKPVLPRSGAILHSSPESASHQLHPAPPDKPKEQELKPGLCSGALSDSGRNSMSSLPTHSTSSSYQLDPLVTPVGPTSRFGGSAHNITQGIVLQDSNMMSLKALSFSDGGSKLGHSNKADKGPSCVRSPISTDECSIQELEQKLLEREGALQKLQRSFEEKELASSLAYEERPRRCRDELEGPEPKGGNKLKQASQKSQRAQQVLHLQVLQLQQEKRQLRQELESLMKEQDLLETKLRSYEREKTSFGPALEETQWEVCQKSGEISLLKQQLKESQTEVNAKASEILGLKAQLKDTRGKLEGLELRTQDLEGALRTKGLELEVCENELQRKKNEAELLREKVNLLEQELQELRAQAALARDMGPPTFPEDVPALQRELERLRAELREERQGHDQMSSGFQHERLVWKEEKEKVIQYQKQLQQSYVAMYQRNQRLEKALQQLARGDSAGEPLEVDLEGADIPYEDIIATEI

SEQ ID NO: 4599 - protein, 454 aa, Homo sapiens
MLKQILSEMYIDPDLLAELSEEQKQILFFKMREEQIRRWKEREAAMERKESLPVKPRPKKENGKSVHWKLGADKEVWVWVMGEHHLDKPYDVLCNEIIAERARLKAEQEAEEPRKTHSEEFTNSLKTKSQYHDLQAPDNQQTKDIWKKVAEKEELEQGSRPAPTLEEEKIRSLSSSSRNIQQMLADSINRMKAYAFHQKKESMKKKQDEEINQIEEERTKQICKSWKEDSEWQASLRKSKAADEKRRSLAKQAREDYKRLSLGAQKGRGGERLQSPLRVPQKPERPPLPPKPQFLNSGAYPQKPLRNQGVVRTLSSSAQEDIIRWFKEEQLPLRAGYQKTSDTIAPWFHGILTLKKANELLLSTGMPGSFLIRVSERIKGYALSYLSEDGCKHFLIDASADAYSFLGVDQLQHATLADLVEYHKEEPITSLGKELLLYPCGQQDQLPDYLELFE

SEQ ID NO: 4600 - protein, 374 aa, Homo sapiens
MAKERRRAVLELLQRPGNARCADCGAPDPDWASYTLGVFICLSCSGIHRNIPQVSKVKSVRLDAWEEAQVEFMASHGNDAARARFESKVPSFYYRPTPSDCQLLREQWIRAKYERQEFIYPEKQEPYSAGYREGFLWKRGRDNGQFLSRKFVLTEREGALKYFNRNDAKEPKAVMKIEHLNATFQPAKIGHPHGLQVTYLKDNSTRNIFIYHEDGKEIVDWFNALRAARFHYLQVAFPGAGDADLVPKLSRNYLKEGYMEKTGPKQTEGFRKRWFTMDDRRLMYFKDPLDAFARGEVFIGSKESGYTVLHGFPPSTQGHHWPHGITIVTPDRKFLFACETESDQREWVAAFQKAVDRPMLPQEYAVEAHFKHKP

SEQ ID NO: 4601 - protein, 986 aa, Homo sapiens
MERMNWLSRLASRGPGHRIPQGANLQTPVMADPETCLMVFKNHWSQVVRILERQGPRAAPGGADDLSAVRNHTYQMLTLLAEDRAVPSAPTGPGPLLEFALHEDLLTRVLTWQLQWDELGDGVEERRAEQLKLFEMLVSEARQPLLRHGPVREALLTLLDACGRPVPSSPALDEGLVLLLSQLCVCVAQEPSLLEFFLQPPPEPGAAPRLLLFSRLVPFVHREGTLGQQARDALLLLMALSAGSPTVGRYIADHSYFCPVLATGLSALYSSLPRKIEVPGDDWHCLRREDWLGVPALALFMSSLEFCNAVIQVAHPLVQKQLVDYIHNGFLVPVMGPALHKTSVEEMIASTAYLELFLRSISEPALLRTFLRFLLLHRHDTHTILDTLVARIGSNSRLCMVSLSLFRTLLNLSCEDVLLQLVLRYLVPCNHVMLSQKPAVRDVDLYGRAADKFLSLIPRCCRHHAPSPPRPEHASWARGGPSRETGRREDITGPGSPSVDSSSVTTVPRPSTPSRLALFLRQQSLGGSESPGPAPCSPGLSASPASSPGRRPTPAEEPGELEDNYLEYLREARRGVDRCVRACRTWSAPYDGERPSPEPSPFGSRTKKRSLLPEEDRNNVGEGEEEELGRRGRAGGAGEGPGHLPPPQLNGVPGSWPEGAKKVRLVPKEGAGELLEGISEGMAGLEGFGQELRELEVALSNGGTGSESPLEPPLPLEEEEAYESFTCPPEPPGPFLSSPLRTLNQLPSQPFTGPFMAVLFAKLENMLQNSVYVNFLLTGLVAQLACHPQPLLRSFLLNTNMVFQPSVKSLLQVLGSVKNKIENFAASQEDFPALLSKAKKYLIARGKLDWAEGPAAGPAPRRSDPLVKSRRPSLGELLLRHAHSPTRARQAAQLVLQPGRDGAGLGLSGGSPGASTPVLLTRGGAPERQGEALRVKNAVYCAVIFPEFLKELAAISQAHAVTSPFLLETSEEGSGPLISGCGPLNP

SEQ ID NO: 4602 - protein, 698 aa, Homo sapiens
MQDDLLMDKSKTQPQPQQQQRQQQQPQPESSVSEAPSTPLSSETPKPEENSAVPALSPAAAPPAPNGPDKMQMESPLLPGLSFHQPPQQPPPPQEPAAPGASLSPSFGSTWSTGTTNAVEDSFFQGITPVNGTMLFQNFPHHVNPVFGGTFSPQIGLAQTQHHQQPPPPAPAPQPAQPAQPPQAQPPQQRRSPASPSQAPYAQRSAAAAYGHQPIMTSKPSSSSAVAAAAAAAAASSASSSWNTHQSVNAAWSAPSNPWGGLQAGRDPRRAVGVGVGVGVGVPSPLNPISPLKKPFSSNVIAPPKFPRAAPLTSKSWMEDNAFRTDNGNNLLPFQDRSRPYDTFNLHSLENSLMDMIRTDHEPLKGKHYPPSGPPMSFADIMWRNHFAGRMGINFHHPGTDNIMALNNAFLDDSHGDQALSSGLSSPTRCQNGERVERYSRKVFVGGLPPDIDEDEITASFRRFGPLVVDWPHKAESKSYFPPKGYAFLLFQEESSVQALIDACLEEDGKLYLCVSSPTIKDKPVQIRPWNLSDSDFVMDGSQPLDPRKTIFVGGVPRPLRAVELAMIMDRLYGGVCYAGIDTDPELKYPKGAGRVAFSNQQSYIAAISARFVQLQHNDIDKRVEVKPYVLDDQMCDECQGTRCGGKFAPFFCANVTCLQYYCEYCWASIHSRAGREFHKPLVKEGGDRPRHVPFRWS

SEQ ID NO: 4603 - protein, 1145 aa, Homo sapiens
MAVPARTCGASRPGPARTARPWPGCGPHPGPGTRRPTSGPPRPLWLLLPLLPLLAAPGASAYSFPQQHTMQHWARRLEQEVDGVMRIFGGVQQLREIYKDNRNLFEVQENEPQKLVEKVAGDIESLLDRKVQALKRLADAAENFQKAHRWQDNIKEEDIVYYDAKADAELDDPESEDVERGSKASTLRLDFIEDPNFKNKVNYSYAAVQIPTDIYKGSTVILNELNWTEALENVFMENRRQDPTLLWQVFGSATGVTRYYPATPWRAPKKIDLYDVRRRPWYIQGASSPKDMVIIVDVSGSVSGLTLKLMKTSVCEMLDTLSDDDYVNVASFNEKAQPVSCFTHLVQANVRNKKVFKEAVQGMVAKGTTGYKAGFEYAFDQLQNSNITRANCNKMIMMFTDGGEDRVQDVFEKYNWPNRTVRVFTFSVGQHNYDVTPLQWMACANKGYYFEIPSIGAIRINTQEYLDVLGRPMVLAGKEAKQVQWTNVYEDALGLGLVVTGTLPVFNLTQDGPGEKKNQLILGVMGIDVALNDIKRLTPNYTLGANGYVFAIDLNGYVLLHPNLKPQTTNFREPVTLDFLDAELEDENKEEIRRSMIDGNKGHKQIRTLVKSLDERYIDEVTRNYTWVPIRSTNYSLGLVLPPYSTFYLQANLSDQILQVKYFEFLLPSSFESEGHVFIAPREYCKDLNASDNNTEFLKNFIELMEKVTPDSKQCNNFLLHNLILDTGITQQLVERVWRDQDLNTYSLLAVFAATDGGITRVFPNKAAEDWTENPEPFNASFYRRSLDNHGYVFKPPHQDALLRPLELENDTVGILVSTAVELSLGRRTLRPAVVGVKLDLEAWAEKFKVLASNRTHQDQPQKCGPNSHCEMDCEVNNEDLLCVLIDDGGFLVLSNQNHQWDQVGRFFSEVDANLMLALYNNSFYTRKESYDYQAACAPQPPGNLGAAPRGVFVPTVADFLNLAWWTSAAAWSLFQQLLYGLIYHSWFQADPAEAEGSPETRESSCVMKQTQYYFGSVNASYNAIIDCGNCSRLFHAQRLTNTNLLFVVAEKPLCSQCEAGRLLQKETHCPADGPEQCELVQRPRYRRGPHICFDYNATEDTSDCGRGASFPPSLGVLVSLQLLLLLGLPPRPQPQVLVHASRRL

SEQ ID NO: 4604 - protein, 423 aa, Homo sapiens
MAGKVKWVTDIEKSVLINNFEKRGWVQVTENEDWNFYWMSVQTIRNVFSVEAGYRLSDDQIVNHFPNHYELTRKDLMVKNIKRYRKELEKEGSPLAEKDENGKYLYLDFVPVTYMLPADYNLFVEEFRKSPSSTWIMKPCGKAQGKGIFLINKLSQIKKWSRDSKTSSFVSQSNKEAYVISLYINNPLLIGGRKFDLRLYVLVSTYRPLRCYMYKLGFCRFCTVKYTPSTSELDNMFVHLTNVAIQKHGEDYNHIHGGKWTVSNLRLYLESTRGKEVTSKLFDEIHWIIVQSLKAVAPVMNNDKHCFECYGYDIIIDDKLKPWLIEVNASPSLTSSTANDRILKYNLINDTLNIAVPNGEIPDCKWNKSPPKEVLGNYEILYDEELAQGDGADRELRSRQGQSLGPRAGRSRDSGRAVLTTWK

SEQ ID NO: 4605 - protein, 117 aa, Homo sapiens
MKFQYKEDHPFEYRKKEGEKIRKKYPDRVPVIVEKAPKARVPDLDKRKYLVPSDLTVGQFYFLIRKRIHLRPEDALFFFVNNTIPPTSATMGQLYEDNHEEDYFLYVAYSDESVYGK

SEQ ID NO: 4606 - protein, 487 aa, Homo sapiens
MPGPRVWGKYLWRSPHSKGCPGAMWWLLLWGVLQACPTRGSVLLAQELPQQLTSPGYPEPYGKGQESSTDIKAPEGFAVRLVFQDFDLEPSQDCAGDSVTISFVGSDPSQFCGQQGSPLGRPPGQREFVSSGRSLRLTFRTQPSSENKTAHLHKGFLALYQTVAVNYSQPISEASRGSEAINAPGDNPAKVQNHCQEPYYQAAAAGALTCATPGTWKDRQDGEEVLQCMPVCGRPVTPIAQNQTTLGSSRAKLGNFPWQAFTSIHGRGGGALLGDRWILTAAHTIYPKDSVSLRKNQSVNVFLGHTAIDEMLKLGNHPVHRVVVHPDYRQNESHNFSGDIALLELQHSIPLGPNVLPVCLPDNETLYRSGLLGYVSGFGMEMGWLTTELKYSRLPVAPREACNAWLQKRQRPEVFSDNMFCVGDETQRHSVCQGDSGSVYVVWDNHAHHWVATGIVSWGIGCGEGYDFYTKVLSYVDWIKGVMNGKN

SEQ ID NO: 4607 - protein, 129 aa, Homo sapiens
MAKSLRSKWKRKMRAEKRKKNAPKEASRLKSILKLDGDVLMKDVQEIATVVVPKPKHCQEKMQCEVKDEKDDMKMETDIKRNKKTLLDQHGQYPIWMNQRQRKRLKAKREKRKGKSKAKAVKVAKGLAW

SEQ ID NO: 4608 - protein, 401 aa, Homo sapiens
MRRAPAAERLLELGFPPRCGRQEPPFPLGVTRGWGRWPIQKRREGARPVPFSERSQEDGRGPAARSSGTLWRIRTRLSLCRDPEPPPPLCLLRVSLLCALRAGGRGSRWGEDGARLLLLPPARAAGNGEAEPSGGPSYAGRMLESSGCKALKEGVLEKRSDGLLQLWKKKCCILTEEGLLLIPPKQLQHQQQQQQQQQQQQQQQPGQGPAEPSQPSGPAVASLEPPVKLKELHFSNMKTVDCVERKGKYMYFTVVMAEGKEIDFRCPQDQGWNAEITLQMVQYKNRQAILAVKSTRQKQQHLVQQQPPSQPQPQPQLQPQPQPQPQPQPQPQSQPQPQPQPKPQPQQLHPYPHPHPHPHSHPHSHPHPHPHPHPHQIPHPHPQPHSQPHGHRLLRSTSNSA

SEQ ID NO: 4609 - protein, 694 aa, Homo sapiens
MQPAIQVWFGEDLPLSPRSPLTPRHGPGLANVCQYDEWIAVRHEATLLPMQEDLSIWLSGLLGIKVKAEKLLEELDNGVLLCQLIDVLQNMVKTCNSEESGNFPMRKVPCKKDAASGSFFARDNTANFLHWCRDIGVDETYLFESEGLVLHKDPRQVYLCLLEIGRIVSRYGVEPPVLVKLEKEIELEETLLNTSGPEDSISIPKSCCRHEELHEAVKHIAEDPPCSCSHRFSIEYLSEGRYRLGDKILFIRMLHGKHVMVRVGGGWDTLQGFLLKYDPCRILQFATLEQKILAFQKGVSNESVPDSPARTPQPPEMNPLSAVNMFQKQNSKPSVPVSIPKSKEKQGRPPGALVPASSLKGGNLGSMSVRSKLPNSPAASSHPKLKSSKGITKKPQAPSNNASSSLASLNPVGKNTSSPALPRTAPCISESPRKCISSPNTPKAKVIPAQNSADLPESTLLPNKCSGKTQPKYLKHNHISSRDNAVSHLAAHSNSSSKCPKLPKANIPVRPKPSFQSSAKMTKTSSKTIATGLGTQSQPSDGAPQAKPVPAQKLKSALNLNQPVSVSSVSPVKATQKSKDKNIVSATKKQPQNKSAFQKTGPSSLKSPGRTPLSIVSLPQSSTKTQTAPKSAQTVAKSQHSTKGPPRSGKTPASIRKPPSSVKDADSGDKKPTAKKKEDDDHYFVMTGSKKPRK

SEQ ID NO: 4610 - protein, 109 aa, Homo sapiens
MAQSINITELNLPQLEMLKNQLDQMYVPGKLHDVEHVLIDVGTGYYVEKTAEDAKDFFKRKIDFLTKQMEKIQPALQEKHAMKQAVMEMMSQKIQQLTALGAAQATAKA

SEQ ID NO: 4611 - protein, 497 aa, Homo sapiens
MPKKEKMAKTPLSDEKQLLLFQQKLLAEEEMAKKKERLLSQFLKDKLAKEEHNSALNLNKINTQWRTVLREVKTRELHKDIEILSQTFERVVDCKDNVIKSLAKDLSEAEEQYAHALRSHLHNVDQLLALQRHRLSLLEESYNMELEALTKEFETERKTIIDQHEKEIHYLQDIFMAMEQNYIDSEYESKLEFQSMWNDLKNMNLEEKHFLRLHLENRVEDLWRKFQDVLKNYTDATEDRKAAFETLQVKDEKSSKEIEVQMKKIQKLQDAITISKGKIMIHSRESEDENRYIRNDKELVLVQLRKLKAQRTQARAASQKNLVRLTLESNATLKALRKIVDKGEKILKLAEICRKFETEEEKVLPFYSSVLTPKEQEGIQKNNLEELTEELTKVMVDYIGMENFWKRYNKVKLEQLSLQHRRAQLLDINGKLREMLKQYLDGISVSDEVLSQLNPLFIVNYQSNLLQPLSIRIAHPGSTSPSAPWRDQRRSFFLGSS

SEQ ID NO: 4612 - protein, 1112 aa, Homo sapiens
MERHQPRLHHPAQGSAAGTPYPSSASLRGCRESKMPRRKGPQHPPPPSGPEEPGEKRPKFHLNIRTLTDDMLDKFASIRIPGSKKERPPLPNLKTAFASSDCSAAPLEMMENFPKPLSENELLELFEKMMEDMNLNEDKKAPLREKDFSIKKEMVMQYINTASKTGSLKRSRQISPQEFIHELKMGSADERLVTCLESLRVSLTSNPVSWVESFGHEGLGLLLDILEKLISGKIQEKVVKKNQHKVIQCLKALMNTQYGLERIMSEERSLSLLAKAVDPRHPNMMTDVVKLLSAVCIVGEESILEEVLEALTSAGEEKKIDRFFCIVEGLRHNSVQLQVACMQLINALVTSPDDLDFRLHIRNEFMRCGLKEILPNLKCIKNDGLDIQLKVFDEHKEEDLFELSHRLEDIRAELDEAYDVYNMVWSTVKETRAEGYFISILQHLLLIRNDYFIRQQYFKLIDECVSQIVLHRDGMDPDFTYRKRLDLDLTQFVDICIDQAKLEEFEEKASELYKKFEKEFTDHQETQAELQKKEAKINELQAELQAFKSQFGALPADCNIPLPPSKEGGTGHSALPPPPPLPSGGGVPPPPPPPPPPPLPGMRMPFSGPVPPPPPLGFLGGQNSPPLPILPFGLKPKKEFKPEISMRRLNWLKIRPHEMTENCFWIKVNENKYENVDLLCKLENTFCCQQKERREEEDIEEKKSIKKKIKELKFLDSKIAQNLSIFLSSFRVPYEEIRMMILEVDETRLAESMIQNLIKHLPDQEQLNSLSQFKSEYSNLCEPEQFVVVMSNVKRLRPRLSAILFKLQFEEQVNNIKPDIMAVSTACEEIKKSKSFSKLLELVLLMGNYMNAGSRNAQTFGFNLSSLCKLKDTKSADQKTTLLHFLVEICEEKYPDILNFVDDLEPLDKASKVSVETLEKNLRQMGRQLQQLEKELETFPPPEDLHDKFVTKMSRFVISAKEQYETLSKLHENMEKLYQSIIGYYAIDVKKVSVEDFLTDLNNFRTTFMQAIKENIKKREAEEKEKRVRIAKELAERERLERQQKKKRLLEMKTEGDETGVMDNLLEALQSGAAFRDRRKRTPMPKDVRQSLSPMSQRPVLKVCNHGNKPYL

SEQ ID NO: 4613 - protein, 605 aa, Homo sapiens
MDDLDALLADLESTTSHISKRPVFLSEETPYSYPTGNHTYQEIAVPPPVPPPPSSEALNGTILDPLDQWQPSSSRFIHQQPQSSSPVYGSSAKTSSVSNPQDSVGSPCSRVGEEEHVYSFPNKQKSAEPSPTVMSTSLGSNLSELDRLLLELNAVQHNPPGFPADEANSSPPLPGALSPLYGVPETNSPLGGKAGPLTKEKPKRNGGRGLEDVRPSVESLLDELESSVPSPVPAITVNQGEMSSPQRVTSTQQQTRISASSATRELDELMASLSDFKGSWPLEEVVLLVSISSSVQEGEKYPHPCAARHRTPSLRSPDQPPPCPQFMAQGKTGSSSPPGGPPKPGSQLDSMLGSLQSDLNKLGVATVAKGVCGACKKPIAGQVVTAMGKTWHPEHFVCTHCQEEIGSRNFFERDGQPYCEKDYHNLFSPRCYYCNGPILDKVVTALDRTWHPEHFFCAQCGAFFGPEGFHEKDGKAYCRKDYFDMFAPKCGGCARAILENYISALNTLWHPECFVCRECFTPFVNGSFFEHDGQPYCEVHYHERRGSLCSGCQKPITGRCITAMAKKFHPEHFVCAFCLKQLNKGTFKEQNDKPYCQNCFLKLFC

SEQ ID NO: 4614 - protein, 414 aa, Homo sapiens
MQTFLKGKRVGYWLSEKKIKKLNFQAFAELCRKRGMEVVQLNLSRPIEEQGPLDVIIHKLTDVILEADQNDSQSLELVHRFQEYIDAHPETIVLDPLPAIRTLLDRSKSYELIRKIEAYMEDDRICSPPFMELTSLCGDDTMRLLEKNGLTFPFICKTRVAHGTNSHEMAIVFNQEGLNAIQPPCVVQNFINHNAVLYKVFVVGESYTVVQRPSLKNFSAGTSDRESIFFNSHNVSKPESSSVLTELDKIEGVFERPSDEVIRELSRALRQALGVSLFGIDIIINNQTGQHAVIDINAFPGYEGVSEFFTDLLNHIATVLQGQSTAMAATGDVALLRHSKLLAEPAGGLVGERTCSASPGCCGSMMGQDAPWKAEADAGGTAKLPHQRLGCNAGVSPSFQQHCVASLATKASSQ

SEQ ID NO: 4615 - protein, 662 aa, Homo sapiens
MMEPEEYRERGREMVDYICQYLSTVRERRVTPDVQPGYLRAQLPESAPEDPDSWDSIFGDIERIIMPGVVHWQSPHMHAYYPALTSWPSLLGDMLADAINCLGFTWASSPACTELEMNVMDWLAKMLGLPEHFLHHHPSSQGGGVLQSTVSESTLIALLAARKNKILEMKTSEPDADESCLNARLVAYASDQAHSSVEKAGLISLVKMKFLPVDDNFSLRGEALQKAIEEDKQRGLVPVFVCATLGTTGVCAFDCLSELGPICAREGLWLHIDAAYAGTAFLCPEFRGFLKGIEYADSFTFNPSKWMMVHFDCTGFWVKDKYKLQQTFSVNPIYLRHANSGVATDFMHWQIPLSRRFRSVKLWFVIRSFGVKNLQAHVRHGTEMAKYFESLVRNDPSFEIPAKRHLGLVVFRLKGPNCLTENVLKEIAKAGRLFLIPATIQDKLIIRFTVTSQFTTRDDILRDWNLIRDAATLILSQHCTSQPSPRVGNLISQIRGARAWACGTSLQSVSGAGDDPVQARKIIKQPQRVGAGPMKRENGLHLETLLDPVDDCFSEEAPDATKHKLSSFLFSYLSVQTKKKTVRSLSCNSVPVSAQKPLPTEASVKNGGSSRVRIFSRFPEDMMMLKKSAFKKLIKFYSVPSFPECSSQCGLQLPCCPLQAMV

SEQ ID NO: 4616 - protein, 339 aa, Homo sapiens
MAMQMQLEANADTSVEEESFGPQPISRLEQCGINANDVKKLEEAGFHTVEAVAYAPKKELINIKGISEAKADKILAEAAKLVPMGFTTATEFHQRRSEIIQITTGSKELDKLLQGGIETGSITEMFGEFRTGKTQICHTLAVTCQLPIDRGGGEGKAMYIDTEGTFRPERLLAVAERYGLSGSDVLDNVAYARAFNTDHQTQLLYQASAMMVESRYALLIVDSATALYRTDYSGRGELSARQMHLARFLRMLLRLADEFGVAVVITNQVVAQVDGAAMFAADPKKPIGGNIIAHASTTRLYLRKGRGETRICKIYDSPCLPEAEAMFAINADGVGDAKD

SEQ ID NO: 4617 - protein, 175 aa, Homo sapiens
MTDCEFGYIYRLAQDYLQCVLQIPQPGSGPSKTSRVLQNVAFSVQKEVEKNLKSCLDNVNVVSVDTARTLFNQVMEKEFEDGIINWGRIVTIFAFEGILIKKLLRQQIAPDVDTYKEISYFVAEFIMNNTGEWIRQNGGWENGFVKKFEPKSGWMTFLEVTGKICEMLSLLKQYC

SEQ ID NO: 4618 - protein, 641 aa, Homo sapiens
MLSGIEAAAGEYEDSELRCRVAVEELSPGGQPRRRQALRTAELSLGRNERRELMLRLQAPGPAGRPRCFPLRAARLFTRFAEAGRSTLRLPAHDTPGAGAVQLLLSDCPPDRLRRFLRTLRLKLAAAPGPGPASARAQLLGPRPRDFVTISPVQPEERRLRAATRVPDTTLVKRPVEPQAGAEPSTEAPRWPLPVKRLSLPSTKPQLSEEQAAVLRAVLKGQSIFFTGSAGTGKSYLLKRILGSLPPTGTVATASTGVAACHIGGTTLHAFAGIGSGQAPLAQCVALAQRPGVRQGWLNCQRLVIDEISMVEADLFDKLEAVARAVRQQNKPFGGIQLIICGDFLQLPPVTKGSQPPRFCFQSKSWKRCVPVTLELTKVWRQADQTFISLLQAVRLGRCSDEVTRQLQATASHKVGRDGIVATRLCTHQDDVALTNERRLQELPGKVHRFEAMDSNPELASTLDAQCPVSQLLQLKLGAQVMLVKNLSVSRGLVNGARGVVVGFEAEGRGLPQVRFLCGVTEVIHADRWTVQATGGQLLSRQQLPLQLAWAMSIHKSQGMTLDCVEISLGRVFASGQAYVALSRARSLQGLRVLDFDPMAVRCDPRVLHFYATLRRGRSLSLESPDDDEAASDQENMDPIL

SEQ ID NO: 4619 - protein, 1910 aa, Homo sapiens
MACCHKVMLLLDTAGGAARHSRVRRAALRLLTYLSCRFGLARVHWAFKFFDSQGARSRPSRVSDFRELGSRSWEDFEEELEARLEDRAHLPGPAPRATHTHGALMETLLDYQWDRPEITSPTKPILRSSGRRLLDVESEAKEAEAALGGLVNAVFLLAPCPHSQRELLQFVSGCEAQAQRLPPTPKQVMEKLLPKRVREVMVARKITFYWVDTTEWSKLWESPDHLGYWTVCELLHHGGGTVLPSESFSWDFAQAGEMLLRSGIKLSSEPHLSPWISMLPTDATLNRLLYNSPEYEASFPRMEGMLFLPVEAGKEIQETWTVTLEPLAMHQRHFQKPVRIFLKGSVAQWSLPTSSTLGTDSWMLGSPEESTATQRLLFQQLVSRLTAEELHLVADVDPGEGRPPITGVISPLSASAMILTVCRTKEAEFQRHVLQTAVADSPRDTASLFSDVVDSILNQTHDSLADTASAASPVPEWAQQELGHTTPWSPAVVEKWFPFCNISGASSDLMESFGLLQAASANKEESSKTEGELIHCLAELYQRKSREESTIAHQEDSKKKRGVPRTPVRQKMNTMCRSLKMLNVARLNVKAQKLHPDGSPDVAGEKGIQKIPSGRTVDKLEDRGRTLRSSKPKDFKTEEELLSYIRENYQKTVATGEIMLYACARNMISTVKMFLKSKGTKELEVNCLNQVKSSLLKTSKSLRQNLGKKLDKEDKVRECQLQVFLRLEMCLQCPSINESTDDMEQVVEEVTDLLRMVCLTEDSAYLAEFLEEILRLYIDSIPKTLGNLYNSLGFVIPQKLAGVLPTDFFSDDSMTQENKSPLLSVPFLSSARRSVSGSPESDELQELRTRSAKKRRKNALIRHKSIAEVSQNLRQIEIPKVSKRATKKENSHPAPQQPSQPVKDTVQEVTKVRRNLFNQELLSPSKRSLKRGLPRSHSVSAVDGLEDKLDNFKKNKGYHKLLTKSVAETPVHKQISKRLLHRQIKGRSSDPGPDIGVVEESPEKGDEISLRRSPRIKQLSFSRTHSASFYSVSQPKSRSVQRVHSFQQDKSDQRENSPVQSIRSPKSLLFGAMSEMISPSEKGSARMKKRSRNTLDSEVPAAYQTPKKSHQKSLSFSKTTPRRISHTPQTPLYTPERLQKSPAKMTPTKQAAFKESLKDSSSPGHDSPLDSKITPQKRHTQAGEGTSLETKTPRTPKRQGTQPPGFLPNCTWPHSVNSSPESPSCPAPPTSSTAQPRRECLTPIRDPLRTPPRAAAFMGTPQNQTHQQPHVLRAARAEEPAQKLKDKAIKTPKRPGNSTVTSSPPVTPKKLFTSPLCDVSKKSPFRKSKIECPSPGELDQKEPQMSPSVAASLSCPVPSTPPELSQRATLDTVPPPPPSKVGKRCRKTSDPRRSIVECQPDASATPGVGTADSPAAPTDSRDDQKGLSLSPQSPPERRGYPGPGLRSDWHASSPLLITSDTEHVTLLSEAEHHGIGDLKSNVLSVEEGEGLRTADAEKSSLSHPGIPPSPPSCGPGSPLMPSRDVHCTTDGRQCQASAQLDNLPASAWHSTDSASPQTYEVELEMQASGLPKLRIKKIDPSSSLEAEPLSKEESSLGEESFLPALSMPRASRSLSKPEPTYVSPPCPRLSHSTPGKSRGQTYICQACTPTHGPSSTPSPFQTDGVPWTPSPKHSGKTTPDIIKDWPRRKRAVGCGAGSSSGRGEVGADLPGSLSLLESEGKDHGLELSIHRTPILEDFELEGVCQLPDQSPPRNSMPKAEEASSWGQFGLSSRKRVLLAKEEADRGAKRICDLREDSEVSKSKEGSPSWSAWQLPSTGDEEVFVSGSTPPPSCAVRSCLSASALQALTQSPLLFQGKTPSSQSKDPRDEDVDVLPSTVEDSPFSRAFSRRRPISRTYTRKKLMGTWLEDL

SEQ ID NO: 4620 - protein, 949 aa, Homo sapiens
MASNHPAFSFHQKQVLRQELTQIQSSLNGGGGHGGKGAPGPGGALPTCPACHKITPRTEAPVSSVSNSLENALHTSAHSTEESLPKRPLGKHSKVSVEKIDLKGLSHTKNDRNVECSFEVLWSDSSITSVTKSSSEVTEFISKLCQLYPEENLEKLIPCLAGPDAFYVERNHVDLDSGLRYLASLPSHVLKNDHVRRFLSTSSPPQQLQSPSPGNPSLSKVGTVMGVSGRPVCGVAGIPSSQSGAQHHGQHPAGSAAPLPHCSHAGSAGSALAYRTQMDTSPAILMPSSLQTPQTQEQNGILDWLRKLRLHKYYPVFKQLSMEKFLSLTEEDLNKFESLTMGAKKKLKTQLELEKEKSERRCLNPSAPPLVTSSGVARVPPTSHVGPVQSGRGSHAAELRVEVEQPHHQLPREGSSSEYSSSSSSPMGVQAREESSDSAEENDRRVEIHLESSDKEKPVMLLNHFTSSSARPTAQVLPVQNEASSNPSGHHPLPPQMLSAASHITPIRMLNSVHKPERGSADMKLLSSSVHSLLSLEERNKGSGPRSSMKVDKSFGSAMMDVLPASAPHQPVQVLSGLSESSSMSPTVSFGPRTKVVHASTLDRVLKTAQQPALVVETSTAATGTPSTVLHAARPPIKLLLSSSVPADSAISGQTSCPNNVQISVPPAIINPRTALYTANTKVAFSAMSSMPVGPLQGGFCANSNTASPSSHPSTSFANMATLPSCPAPSSSPALSSVPESSFYSSSGGGGSTGNIPASNPNHHHHHHHQQPPAPPQPAPPPPGCIVCTSCGCSGSCGSSGLTVSYANYFQHPFSGPSVFTFPFLPFSPMCSSGYVSAQQYGGGSTFPVVHAPYSSSGTPDPVLSGQSTFAVPPMQNFMAGTAGVYQTQGLVGSSNGSSHKKSGNLSCYNCGATGHRAQDCKQPSMDFNRPGTFRLKYAPPAESLDSTD

SEQ ID NO: 4621 - protein, 426 aa, Homo sapiens
MCDRNGGRRLRQWLIEQIDSSMYPGLIWENEEKSMFRIPWKHAGKQDYNQEVDASIFKAWAVFKGKFKEGDKAEPATWKTRLRCALNKSPDFEEVTDRSQLDISEPYKVYRIVPEEEQKCKLGVATAGCVNEVTEMECGRSEIDELIKEPSVDDYMGMIKRSPSPPEACRSQLLPDWWAQQPSTGVPLVTGYTTYDAHHSAFSQMVISFYYGGKLVGQATTTCPEGCRLSLSQPGLPGTKLYGPEGLELVRFPPADAIPSERQRQVTRKLFGHLERGVLLHSSRQGVFVKRLCQGRVFCSGNAVVCKGRPNKLERDEVVQVFDTSQFFRELQQFYNSQGRLPDGRVVLCFGEEFPDMAPLRSKLILVQIEQLYVRQLAEEAGKSCGAGSVMQAPEEPPPDQVFRMFPDICASHQRSFFRENQQITV

SEQ ID NO: 4622 - protein, 478 aa, Homo sapiens
MAPKKKGKKGKAKGTPIVDGLAPEDMSKEQVEEHVSRIREELDREREERNYFQLERDKIHTFWEITRRQLEEKKAELRNKDREMEEAEERHQVEIKVYKQKVKHLLYEHQNNLTEMKAEGTVVMKLAQKEHRIQESVLRKDMRALKVELKEQELASEVVVKNLRLKHTEEITRMRNDFERQVREIEAKYDKKMKMLRDELDLRRKTELHEVEERKNGQIHTLMQRHEEAFTDIKNYYNDITLNNLALINSLKEQMEDMRKKEDHLEREMAEVSGQNKRLADPLQKAREEMSEMQKQLANYERDKQILLCTKARLKVREKELKDLQWEHEVLEQRFTKVQQERDELYRKFTAAIQEVQQKTGFKNLVLERKLQALSAAVEKKEVQFNEVLAASNLDPAALTLVSRKLEDVLESKNSTIKDLQYELAQVCKAHNDLLRTYEAKLLAFGIPLDNVGFKPLETAVIGQTLGQGPAGLVGTPT

SEQ ID NO: 4623 - protein, 412 aa, Homo sapiens [sequence omitted]

SEQ ID NO: 4624 - protein, 345 aa, Homo sapiens
MQLEIQVALNFIISYLYNKLPRRRVNIFGEELERLLKKKYEGHWYPEKPYKGSGFRCIHIGEKVDPVIEQASKESGLDIDDVRGNLPQDLSVWIDPFEVSYQIGEKGPVKVLYVDDNNENGCELDKEIKNSFNPEAQVFMPISDPASSVSSSPSPPFGHSAAVSPTFMPRSTQPLTFTTATFAATKFGSTKMKNSGRSNKVARTSPINLGLNVNDLLKQKAISSSMHSLYGLGLGSQQQPQQQQQPAQPPPPPPPPQQQQQQKTSALSPNAKEFIFPNMQGQGSSTNGMFPGDSPLNLSPLQYSNAFDVFAAYGGLNEKSFVDGLNFSLNNMQYSNQQFQPVMAN

SEQ ID NO: 4625 - protein, 862 aa, Homo sapiens
MPAGLTEPAGAAPPAAVSASGTVTMAPAGALPVRVESTPVALGAVTKAPVSVCVEPTASQPLRSPVGTLVTKVAPVSAPPKVSSGPRLPAPQIVAVKAPNTTTIQFPANLQLPPGTVLIKSNSGPLMLVSPQQTVTRAETTSNITSRPAVPANPQTVKICTVPNSSSQLIKKVAVTPVKKLAQIGTTVVTTVPKPSSVQSVAVPTSVVTVTPGKPLNTVTTLKPSSLGASSTPSNEPNLKAENSAAVQINLSPTMLENVKKCKNFLAMLIKLACSGSQSPEMGQNVKKLVEQLLDAKIEAEEFTRKLYVELKSSPQPHLVPFLKKSVVALRQLLPNSQSFIQQCVQQTSSDMVIATCTTTVTTSPVVTTTVSSSQSEKSIIVSGATAPRTVSVQTLNPLAGPVGAKAGVVTLHSVGPTAATGGTTAGTGLLQTSKPLVTSVANTVTTVSLQPEKPVVSGTAVTLSLPAVTFGETSGAAICLPSVKPVVSSAGTTSDKPVIGTPVQIKLAQPGPVLSQPAGIPQAVQVKQLVVQQPSGGNEKQVTTISHSSTLTIQKCGQKTMPVNTIIPTSQFPPASILKQITLPGNKILSLQASPTQKNRIKENVTSCFRDEDDINDVTSMAGVNLNEENACILATNSELVGTLIQSCKDEPFLFIGALQKRILDIGKKHDITELNSDAVNLISQATQERLRGLLEKLTAIAQHRMTTYKASENYILCSDTRSQLKFLEKLDQLEKQRKDLEEREMLLKAAKSRSNKEDPEQLRLKQKAKELQQLELAQIQHRDANLTALAAIGPRKKRPLESGIEGLKDNLLASGTSSLTATKQLHRPRITRICLRDLIFCMEQEREMKYSRALYLALLK

SEQ ID NO: 4626 - protein, 288 aa, Homo sapiens
MKPSGEDQAALAAGPWEECFQAAVQLALRAGQIIRKALTEEKRVSTKTSAADLVTETDHLVEDLIISELRERFPSHRFIAEEAAASGAKCVLTHSPTWIIDPIDGTCNFVHRFPTVAVSIGFAVRQELEFGVIYHCTEERLYTGRRGRGAFCNGQRLRVSGETDLSKALVLTEIGPKRDPATLKLFLSNMERLLHAKAHGVRVIGSSTLALCHLASGAADAYYQFGLHCWDLAAATVIIREAGGIVIDTSGGPLDLMACRVVAASTREMAMLIAQALQTINYGRDDEK

SEQ ID NO: 4627 - protein, 1976 aa, Homo sapiens
MAQRTGLEDPERYLFVDRAVIYNPATQADWTAKKLVWIPSERHGFEAASIKEERGDEVMVELAENGKKAMVNKDDIQKMNPPKFSKVEDMAELTCLNEASVLHNLKDRYYSGLIYTYSGLFCVVINPYKNLPIYSENIIEMYRGKKRHEMPPHIYAISESAYRCMLQDREDQSILCTGESGAGKTENTKKVIQYLAHVASSHKGRKDHNIPGELERQLLQANPILESFGNAKTVKNDNSSRFGKFIRINFDVTGYIVGANIETYLLEKSRAVRQAKDERTFHIFYQLLSGAGEHLKSDLLLEGFNNYRFLSNGYIPIPGQQDKDNFQETMEAMHIMGFSHEEILSMLKVVSSVLQFGNISFKKERNTDQASMPENTVAQKLCHLLGMNVMEFTRAILTPRIKVGRDYVQKAQTKEQADFAVEALAKATYERLFRWLVHRINKALDRTKRQGASFIGILDIAGFEIFELNSFEQLCINYTNEKLQQLFNHTMFILEQEEYQREGIEWNFIDFGLDLQPCIDLIERPANPPGVLALLDEECWFPKATDKTFVEKLVQEQGSHSKFQKPRQLKDKADFCIIHYAGKVDYKADEWLMKNMDPLNDNVATLLHQSSDRFVAELWKDVDRIVGLDQVTGMTETAFGSAYKTKKGMFRTVGQLYKESLTKLMATLRNTNPNFVRCIIPNHEKRAGKLDPHLVLDQLRCNGVLEGIRICRQGFPNRIVFQEFRQRYEILTPNAIPKGFMDGKQACERMIRALELDPNLYRIGQSKIFFRAGVLAHLEEERDLKITDIIIFFQAVCRGYLARKAFAKKQQQLSALKVLQRNCAAYLKLRHWQWWRVFTKVKPLLQVTRQEEELQAKDEELLKVKEKQTKVEGELEEMERKHQQLLEEKNILAEQLQAETELFAEAEEMRARLAAKKQELEEILHDLESRVEEEEERNQILQNEKKKMQAHIQDLEEQLDEEEGARQKLQLEKVTAEAKIKKMEEEILLLEDQNSKFIKEKKLMEDRIAECSSQLAEEEEKAKNLAKIRNKQEVMISDLEERLKKEEKTRQELEKAKRKLDGETTDLQDQIAELQAQIDELKLQLAKKEEELQGALARGDDETLHKNNALKVVRELQAQIAELQEDFESEKASRNKAEKQKRDLSEELEALKTELEDTLDTTAAQQELRTKREQEVAELKKALEEETKNHEAQIQDMRQRHATALEELSEQLEQAKRFKANLEKNKQGLETDNKELACEVKVLQQVKAESEHKRKKLDAQVQELHAKVSEGDRLRVELAEKASKLQNELDNVSTLLEEAEKKGIKFAKDAASLESQLQDTQELLQEETRQKLNLSSRIRQLEEEKNSLQEQQEEEEEARKNLEKQVLALQSQLADTKKKVDDDLGTIESLEEAKKKLLKDAEALSQRLEEKALAYDKLEKTKNRLQQELDDLTVDLDHQRQVASNLEKKQKKFDQLLAEEKSISARYAEERDRAEAEAREKETKALSLARALEEALEAKEEFERQNKQLRADMEDLMSSKDDVGKNVHELEKSKRALEQQVEEMRTQLEELEDELQATEDAKLRLEVNMQAMKAQFERDLQTRDEQNEEKKRLLIKQVRELEAELEDERKQRALAVASKKKMEIDLKDLEAQIEAANKARDEVIKQLRKLQAQMKDYQRELEEARASRDEIFAQSKESEKKLKSLEAEILQLQEELASSERARRHAEQERDELADEITNSASGKSALLDEKRRLEARIAQLEEELEEEQSNMELLNDRFRKTTLQVDTLNAELAAERSAAQKSDNARQQLERQNKELKAKLQELEGAVKSKFKATISALEAKIGQLEEQLEQEAKERAAANKLVRRTEKKLKEIFMQVEDERRHADQYKEQMEKANARMKQLKRQLEEAEEEATRANASRRKLQRELDDATEANEGLSREVSTLKNRLRRGGPISFSSSRSGRRQLHLEGASLELSDDDTESKTSDVNETQPPQSE

SEQ ID NO: 4628 - protein, 211 aa, Homo sapiens
MQPGATTCTEDRIQHALERCLHGLSLSRRSTSWSAGLCLNCWSLQELVSRDPGHFLILLEQILQKTREVQEKGTYDLLTPLALLFYSTVLCTPHFPPDSDLLLKAASTYHRFLTWPVPYCSICQELLTFIDAELKAPGISYQRLVRAEQGLPIRSHRSSTVPRPWQSLRTSSRRPQRHRSWHLASGMLQRPGGGSGPSCRRWEKKLASLGC

SEQ ID NO: 4629 - protein, 136 aa, Homo sapiens
MPGKKARKNAQPSPARAPAGPAGTAGTARDQAGFAIGMQLRFTRGKKLLSSSLSSSPLALPRGHEEQVQVAGSRVCYSTQEIWRQTELPAETSESDIQTLLLRNLTASKTCMRGLLQKSFLRRCTFHQFEERLHCN

SEQ ID NO: 4630 - protein, 209 aa, Homo sapiens
MEQPRKAVVVTGFGPFGEHTVNASWIAVQELEKLGLGDSVDLHVYEIPVEYQTVQRLIPALWEKHSPQLVVHVGVSGMATTVTLEKCGHNKGYKGLDNCRFCPGSQCCVEDGPESIDSIIDMDAVCKRVTTLGLDVSVTISQDAGRYLCDFTYYTSLYQSHGRSAFVHVPPLGKPYNADQLGRALRAIIEEMLDLLEQSEGKINYCHKH

SEQ ID NO: 4631 - protein, 1518 aa, Homo sapiens
MAAVGSGGYARNDAGEKLPSVMAGVPARRGQSSPPPAPPICLRRRTRLSTASEETVQNRVSLEKVLGITAQNSSGLTCDPGTGHVAYLAGCVVVILDPKENKQQHIFNTARKSLSALAFSPDGKYIVTGENGHRPAVRIWDVEEKNQVAEMLGHKYGVACVAFSPNMKHIVSMGYQHDMVLNVWDWKKDIVVASNKVSCRVIALSFSEDSSYFVTVGNRHVRFWFLEVSTETKVTSTVPLVGRSGILGELHNNIFCGVACGRGRMAGSTFCVSYSGLLCQFNEKRVLEKWINLKVSLSSCLCVSQELIFCGCTDGIVRIFQAHSLHYLANLPKPHYLGVDVAQGLEPSFLFHRKAEAVYPDTVALTFDPIHQWLSCVYKDHSIYIWDVKDINRVGKVWSELFHSSYVWNVEVYPEFEDQRACLPSGSFLTCSSDNTIRFWNLDSSPDSHWQKNIFSNTLLKVVYVENDIQHLQDMSHFPDRGSENGTPMDVKAGVRVMQVSPDGQHLASGDRSGNLRIHELHFMDELVKVEAHDAEVLCLEYSKPETGLTLLASASRDRLIHVLNVEKNYNLEQTLDDHSSSITAIKFAGNRDIQMISCGADKSIYFRSAQQGSDGLHFVRTHHVAEKTTLYDMDIDITQKYVAVACQDRNVRVYNTVNGKQKKCYKGSQGDEGSLLKVHVDPSGTFLATSCSDKSISVIDFYSGECIAKMFGHSEIITSMKFTYDCHHLITVSGDSCVFIWHLGPEITNCMKQHLLEIDHRQQQQHTNDKKRSGHPRQDTYVSTPSEIHSLSPGEQTEDDLEEECEPEEMLKTPSKDSLDPDPRCLLTNGKLPLWAKRLLGDDDVADGLAFHAKRSYQPHGRWAERAGQEPLKTILDAQDLDCYFTPMKPESLENSILDSLEPQSLASLLSESESPQEAGRGHPSFLPQQKESSEASELILYSLEAEVTVTGTDSQYCRKEVEAGPGDQQGDSYLRVSSDSPKDQSPPEDSGESEADLECSFAAIHSPAPPPDPAPRFATSLPHFPGCAGPTEDELSLPEGPSVPSSSLPQTPEQEKFLRHHFETLTESPCRALGDVEASEAEDHFFNPRLSISTQFLSSLQKASRFTHTFPPRATQCLVKSPEVKLMDRGGSQPRAGTGYASPDRTHVLAAGKAEETLEAWRPPPPCLTSLASCVPASSVLPTDRNLPTPTSAPTPGLAQGVHAPSTCSYMEATASSRARISRSISLGDSEGPIVATLAQPLRRPSSVGELASLGQELQAITTATTPSLDSEGQEPALRSWGNHEARANLRLTLSSACDGLLQPPVDTQPGVTVPAVSFPAPSPVEESALRLHGSAFRPSLPAPESPGLPAHPSNPQLPEARPGIPGGTASLLEPTSGALGLLQGSPARWSEPWVPVEALPPSPLELSRVGNILHRLQTTFQEALDLYRVLVSSGQVDTGQQQARTELVSTFLWIHSQLEAECLVGTSVAPAQALPSPGPPSPPTLYPLASPDLQALLEHYSELLVQAVRRKARGH

SEQ ID NO: 4632 - protein, 197 aa, Homo sapiens
MLVLPSPCPQPLAFSSVETMEGPPRRTCRSPEPGPSSSIGSPQASSPPRPNHYLLIDTQGVPYTVLVDEESQREPGASGAPGQKKCYSCPVCSRVFEYMSYLQRHSITHSEVKPFECDICGKAFKRASHLARHHSIHLAGGGRPHGCPLCPRRFRDAGELAQHSRVHSGERPFQCPHCPRRFMEQNTLQKHTRWKHP

SEQ ID NO: 4633 - protein, 452 aa, Homo sapiens
MAAAALRSGWCRCPRRCLGSGIQFLSSHNLPHGSTYQMRRPGGELPLSKSYSSGNRKGFLSGLLDNVKQELAKNKEMKESIKKFRDEARRLEESDVLQEARRKYKTIESETVRTSEVLRKKLGELTGTVKESLHEVSKSDLGRKIKEGVEEAAKTAKQSAESVSKGGEKLGRTAAFRALSQGVESVKKEIDDSVLGQTGPYRRPQRLRKRTEFAGDKFKEEKVFEPNEEALGVVLHKDSKWYQQWKDFKENNVVFNRFFEMKMKYDESDNAFIRASRALTDKVTDLLGGLFSKTEMSEVLTEILRVDPAFDKDRFLKQCENDIIPNVLEAMISGELDILKDWCYEATYSQLAHPIQQAKALGLQFHSRILDIDNVDLAMGKMMEQGPVLIITFQAQLVMVVRNPKGEVVEGDPDKVLRMLYVWALCRDQDELNPYAAWRLLDISASSTEQIL

SEQ ID NO: 4634 - protein, 239 aa, Homo sapiens
MAATLLAARGAGPAPAWGPEAFTPDWESREVSTGTTIMAVQFDGGVVLGADSRTTTGSYIANRVTDKLTPIHDRIFCCRSGSAADTQAVADAVTYQLGFHSIELNEPPLVHTAASLFKEMCYRYREDLMAGIIIAGWDPQEGGQVYSVPMGGMMVRQSFAIGGSGSSYIYGYVDATYREGMTKEECLQFTANALALAMERDGSSGGVIRLAAIAESGVERQVLLGDQIPKFAVATLPPA

SEQ ID NO: 4635 - protein, 158 aa, Homo sapiens [sequence omitted]

SEQ ID NO: 4636 - protein, 156 aa, Homo sapiens
MGRSRRTGAHRAHSLARQMKAKRRRPDLDEIHRELRPQGSARPQPDPNAEFDPDLPGGGLHRCLACARYFIDSTNLKTHFRSKDHKKRYEGVRRGLMDGCSADRALTWSAPNSCFSFSQAEAAERRALQSGRGGEGSGYGILCAPQAAGSAHGSVH

SEQ ID NO: 4637 - protein, 970 aa, Homo sapiens
MATCIGEKIEDFKVGNLLGKGSFAGVYRAESIHTGLEVAIKMIDKKAMYKAGMVQRVQNEVKIHCQLKHPSILELYNYFEDSNYVYLVLEMCHNGEMNRYLKNRVKPFSENEARHFMHQIITGMLYLHSHGILHRDLTLSNLLLTRNMNIKIADFGLATQLKMPHEKHYTLCGTPNYISPEIATRSAHGLESDVWSLGCMFYTLLIGRPPFDTDTVKNTLNKVVLADYEMPSFLSIEAKDLIHQLLRRNPADRLSLSSVLDHPFMSRNSSTKSKDLGTVEDSIDSGHATISTAITASSSTSISGSLFDKRRLLIGQPLPNKMTVFPKNKSSTDFSSSGDGNSFYTQWGNQETSNSGRGRVIQDAEERPHSRYLRRAYSSDRSGTSNSQSQAKTYTMERCHSAEMLSVSKRSGGGENEERYSPTDNNANIFNFFKEKTSSSSGSFERPDNNQALSNHLCPGKTPFPFADPTPQTETVQQWFGNLQINAHLRKTTEYDSISPNRDFQGHPDLQKDTSKNAWTDTKVKKNSDASDNAHSVKQQNTMKYMTALHSKPEIIQQECVFGSDPLSEQSKTRGMEPPWGYQNRTLRSITSPLVAHRLKPIRQKTKKAVVSILDSEEVCVELVKEYASQEYVKEVLQISSDGNTITIYYPNGGRGFPLADRPPSPTDNISRYSFDNLPEKYWRKYQYASRFVQLVRSKSPKITYFTRYAKCILMENSPGADFEVWFYDGVKIHKTEDFIQVIEKTGKSYTLKSESEVNSLKEEIKMYMDHANEGHRICLALESIISEEERKTRSAPFFPIIIGRKPGSTSSPKALSPPPSVDSNYPTRERASFNRMVMHSAASPTQAPILNPSMVTNEGLGLTTTASGTDISSNSLKDCLPKSAQLLKSVFVKNVGWATQLTSGAVWVQFNDGSQLVVQAGVSSISYTSPNGQTTRYGENEKLPDYIKQKLQCLSSILLMFSNPTPNFH

SEQ ID NO: 4638 - protein, 464 aa, Homo sapiens
METLSFPRYNVAEIVIHIRNKILTGADGKNLTKNDLYPNPKPEVLHMIYMRALQIVYGIRLEHFYMMPVNSEVMYPHLMEGFLPFSNLVTHLDSFLPICRVNDFETADILCPKAKRTSRFLSGIINFIHFREACRETYMEFLWQYKSSADKMQQLNAAHQEALMKLERLDSVPVEEQEEFKQLSDGIQELQQSLNQDFHQKTIVLQEGNSQKKSNISEKTKRLNELKLSVVSLKEIQESLKTKIVDSPEKLKNYKEKMKDTVQKLKNARQEVVEKYEIYGDSVDCLPSCQLEVQLYQKKIQDLSDNREKLASILKESLNLEDQIESDESELKKLKTEENSFKRLMIVKKEKLATAQFKINKKHEDVKQYKRTVIEDCNKVQEKRGAVYERVTTINQEIQKIKLGIQQLKDAAEREKLKSQEIFLNLKTALEKYHDGIEKAAEDSYAKIDEKTAELKRKMFKMST

SEQ ID NO: 4639 - protein, 196 aa, Homo sapiens
MAAIRKKLVVVGDGACGKTCLLIVFSKDEFPEVYVPTVFENYVADIEVDGKQVELALWDTAGQEDYDRLRPLSYPDTDVILMCFSVDSPDSLENIPEKWVPEVKHFCPNVPIILVANKKDLRSDEHVRTELARMKQEPVRTDDGRAMAVRIQAYDYLECSAKTKEGVREVFETATRAALQKRYGSQNGCINCCKVL

SEQ ID NO: 4640 - protein, 371 aa, Homo sapiens
MDARRVPQKDLRVKKNLKKFRYVKLISMETSSSSDDSCDSFASDNFANTRLQSVREGCRTRSQCRHSGPLRVAMKFPARSTRGATNKKAESRQPSENSVTDSNSDSEDESGMNFLEKRALNIKQNKAMLAKLMSELESFPGSFRGRHPLPGSDSQSRRPRRRTFPGVASRRNPERRARPLTRSRSRILGSLDALPMEEEEEEDKYMLVRKRKTVDGYMNEDDLPRSRRSRSSVTLPHIIRPVEEITEEELENVCSNSREKIYNRSLGSTCHQCRQKTIDTKTNCRNPDCWGVRGQFCGPCLRNRYGEEVRDALLDPNWHCPPCRGICNCSFCRQRDGRCATGVLVYLAKYHGFGNVHAYLKSLKQEFEMQA

SEQ ID NO: 4641 - protein, 558 aa, Homo sapiens
MALKGQEDYIYLFKDSTHPVDFLDAFRTFYLDGLFTDITLQCPSGIIFHCHRAVLAACSNYFKAMFTADMKEKFKNKIKLSGIHHDILEGLVNYAYTSQIEITKRNVQSLLEAADLLQFLSVKKACERFLVRHLDIDNCIGMHSFAEFHVCPELEKESRRILCSKFKEVWQQEEFLEISLEKFLFILSRKNLSVWKEEAIIEPVIKWTAHDVENRIECLYNLLSYINIDIDPVYLKTALGLQRSCLLTENKIRSLIYNALNPMHKEISQRSTATMYIIGGYYWHPLSEVHIWDPLTNVWIQGAEIPDYTRESYGVTCLGPNIYVTGGYRTDNIEALDTVWIYNSESDEWTEGLPMLNARYYHCAVTLGGCVYALGGYRKGAPAEEAEFYDPLKEKWIPIANMIKGVGNATACVLHDVIYVIGGHCGYRGSCTYDKVQSYNSDINEWSLITSSPHPEYGLCSVPFENKLYLVGGQTTITECYDPEQNEWREIAPMMERRMECGAVIMNGCIYVTGGYSYSKGTYLQSIEKYDPDLNKWEIVGNLPSAMRSHGCVCVYNV

SEQ ID NO: 4642 - protein, 183 aa, Homo sapiens
MTTASTSQVRQNYHQDSEAAINRQINLELYASYVYLSMSYYFDRDDVALKNFAKYFLHQSHEEREHAEKLMKLQNQRGGRIFLQDIKKPDCDDWESGLNAMECALHLEKNVNQSLLELHKLATDKNDPHLCDFIETHYLNEQVKAIKELGDHVTNLRKMGAPESGLAEYLFDKHTLGDSDNES

SEQ ID NO: 4643 - protein, 432 aa, Homo sapiens
MLGNSAPGPATREAGSALLALQQTALQEDQENINPEKAAPVQQPRTRAALAVLKSGNPRGLAQQQRPKTRRVAPLKDLPVNDEHVTVPPWKANSKQPAFTIHVDEAEKEAQKKPAESQKIEREDALAFNSAISLPGPRKPLVPLDYPMDGSFESPHTMDMSIILEDEKPVSVNEVPDYHEDIHTYLREMEVKCKPKVGYMKKQPDITNSMRAILVDWLVEVGEEYKLQNETLHLAVNYIDRFLSSMSVLRGKLQLVGTAAMLLASKFEEIYPPEVAEFVYITDDTYTKKQVLRMEHLVLKVLTFDLAAPTVNQFLTQYFLHQQPANCKVESLAMFLGELSLIDADPYLKYLPSVIAGAAFHLALYTVTGQSWPESLIRKTGYTLESLKPCLMDLHQTYLKAPQHAQQSIREKYKNSKYHGVSLLNPPETLNL

SEQ ID NO: 4644 - protein, 230 aa, Homo sapiens
MPLPDTMFCAQQIHIPPELPDILKQFTKAAIRTQPADVLRWSAGYFSALSRGDPLPVKDRMEMPTATQKTDTGLTQGLLKVLHKQCHHKRYVELTDLEQKWKNLCLPKEKFKALLQLDPCENKIKWINFLALGCSMLGGSLNTALKHLCEILTDDPEGGPARIPFKTFSYVYRYLARLDSDVSPLETESYLASLKENIDARKNGMIGLSDFFFPKRKLLESIENSEDVGH

SEQ ID NO: 4645 - protein, 97 aa, Homo sapiens [sequence omitted]

SEQ ID NO: 4646 - protein, 544 aa, Homo sapiens
MATAPGPAGIAMGSVGSLLERQDFSPEELRAALAGSRGSRQPDGLLRKGLGQREFLSYLHLPKKDSKSTKNTKRAPRNEPADYATLYYREHSRAGDFSKTSLPERGRFDKCRIRPSVFKPTAGNGKGFLSMQSLASHKGQKLWRSNGSLHTLACHPPLSPGPRASQARAQLLHALSLDEGGPEPEPSLSDSSSGGSFGRSPGTGPSPFSSSLGHLNHLGGSLDRASQGPKEAGPPAVLSCLPEPPPPYEFSCSSAEEMGAVLPETCEELKRGLGDEDGSNPFTQVLEERQRLWLAELKRLYVERLHEVTQKAERSERNLQLQLFMAQQEQRRLRKELRAQQGLAPEPRAPGTLPEADPSARPEEEARWEVCQKTAEISLLKQQLREAQAELAQKLAEIFSLKTQLRGSRAQAQAQDAELVRLREAVRSLQEQAPREEAPGSCETDDCKSRGLLGEAGGSEARDSAEQLRAELLQERLRGQEQALRFEQERRTWQEEKERVLRYQREIQGGYMDMYRRNQALEQELRALREPPTPWSPRLESSKI

SEQ ID NO: 4647 - protein, 500 aa, Homo sapiens
MNQRRSESRPGNHRLQAYAEPGKGDSGGAGPLSGSARRGRGGGGAIRVRRPCWSGGAGRGGGPAWAVRLPTVTAGWTWPALRTLSSLRAGPSEPHSPGRRPPRAGRPLCQADPQPGKAARRSLEPDPAQTGPRPARAAGMSEARKGPDEAEESQYDSGIESLRSLRSLPESTSAPASGPSDGSPQPCTHPPGPVKEPQEKEDADGERADSTYGSSSLTYTLSLLGGPEAEDPAPRLPLPHVGALSPQQLEALTYISEDGDTLVHLAVIHEAPAVLLCCLALLPQEVLDIQNNLYQTALHLAVHLDQPGAVRALVLKGASRALQDRHGDTALHVACQRQHLACARCLLEGRPEPGRGTSHSLDLQLQNWQGLACLHIATLQKNQPLMELLLRNGADIDVQEGTSGKTALHLAVETQERGLVQFLLQAGAQVDARMLNGCTPLHLAAGRGLMGISSTLCKAGADSLLRNVEDETPQDLTEESLVLLPFDDLKISGKLLLCTD

SEQ ID NO: 4648 - protein, 626 aa, Homo sapiens
MEGPRENQDPPPRSLARHLSDADRLRKVIQELVDTEKSYVKDLSCLFELYLEPLQNETFLTQDEMESLFGSLPEMLEFQKVFLETLEDGISASSDFNTLETPSQFRKLLFSLGGSFLYYADHFKLYSGFCANHIKVQKVLERAKTDKAFKAFLDARNPTKQHSSTLESYLIKPVQRVLKYPLLLKELVSLTDQESEEHYHLTEALKAMEKVASHINEMQKIYEDYGTVFDQLVAEQSGTEKEVTELSMGELLMHSTVSWLNPFLSLGKARKDLELTVFVFKRAVILVYKENCKLKKKLPSNSRPAHNSTDLDPFKFRWLIPISALQVRLGNPAGTENNSIWELIHTKSEIEGRPETIFQLCCSDSESKTNIVKVIRSILRENFRRHIKCELPLEKTCKDRLVPLKNRVPVSAKLASSRSLKVLKNSSSNEWTGETGKGTLLDSDEGSLSSGTQSSGCPTAEGRQDSKSTSPGKYPHPGLADFADNLIKESDILSDEDDDHRQTVKQGSPTKDIEIQFQRLRISEDPDVHPEAEQQPGPESGEGQKGGEQPKLVRGHFCPIKRKANSTKRDRGTLLKAQIRHQSLDSQSENATIDLNSVLEREFSVQSLTSVVSEECFYETESHGKS

SEQ ID NO: 4649 - protein, 252 aa, Homo sapiens
MSGRRTRSGGAAQRSGPRAPSPTKPLRRSQRKSGSELPSILPEIWPKTPSAAAVRKPIVLKRIVAHAVEVPAVQSPRRSPRISFFLEKENEPPGRELTKEDLFKTHSVPATPTSTPVPNPEAESSSKEGELDARDLEMSKKVRRSYSRLETLGSASTSTPGRRSCFGFEGLLGAEDLSGVSPVVCSKLTEVPRVCAKPWAPDMTLPGISPPPEKQKRKKKKMPEILKTELDEWAAAMNAEFEAAEQFDLLVE

SEQ ID NO: 4650 - protein, 531 aa, Homo sapiens
MAAVKTLNPKAEVARAQAALAVNISAARGLQDVLRTNLGPKGTMKMLVSGAGDIKLTKDGNVLLHEMQIQHPTASLIAKVATAQDDITGDGTTSNVLIIGELLKQADLYISEGLHPRIITEGFEAAKEKALQFLEEVKVSREMDRETLIDVARTSLRTKVHAELADVLTEAVVDSILAIKKQDEPIDLFMIEIMEMKHKSETDTSLIRGLVLDHGARHPDMKKRVEDAYILTCNVSLEYEKTEVNSGFFYKSAEEREKLVKAERKFIEDRVKKIIELKRKVCGDSDKGFVVINQKGIDPFSLDALSKEGIVALRRAKRRNMERLTLACGGVALNSFDDLSPDCLGHAGLVYEYTLGEEKFTFIEKCNNPRSVTLLIKGPNKHTLTQIKDAVRDGLRAVKNAIDDGCVVPGAGAVEVAMAEALIKHKPSVKGRAQLGVQAFADALLIIPKVLAQNSGFDLQETLVKIQAEHSESGQLVGVDLNTGEPMVAAEVGVWDNYCVKKQLLHSCTVIATNILLVDEIMRAGMSSLKG

SEQ ID NO: 4651 - protein, 225 aa, Homo sapiens
MVSHSELRKLFYSADAVCFDVDSTVIREEGIDELAKICGVEDAVSEMTRRAMGGAVPFKAALTERLALIQPSREQVQRLIAEQPPHLTPGIRELVSRLQERNVQVFLISGGFRSIVEHVASKLNIPATNVFANRLKFYFNGEYAGFDETQPTAESGGKGKVIKLLKEKFHFKKIIMIGDGATDMEACPPADAFIGFGGNVIRQQVKDNAKWYITDFVELLGELEE

SEQ ID NO: 4652 - protein, 243 aa, Homo sapiens
MSSGTELLWPGAALLVLLGVAASLCVRCSRPGAKRSEKIYQQRSLREDQQSFTGSRTYSLVGQAWPGPLADMAPTRKDKLLQFYPSLEDPASSRYQNFSKGSRHGSEEAYIDPIAMEYYNWGRFSKPPEDDDANSYENVLICKQKTTETGAQQEGIGGLCRGDLSLSLALKTGPTSGLCPSASPEEDEESEDYQNSASIHQWRESRKVMGQLQREASPGPVGSPDEEDGEPDYVNGEVAATEA

SEQ ID NO: 4653 - protein, 486 aa, Homo sapiens
MKGRRRRRREYCKFALLLVLYTLVLLLVPSVLDGGRDGDKGAEHCPGLQRSLGVWSLEAAAAGEREQGAEARAAEEGGANQSPRFPSNLSGAVGEAVSREKQHIYVHATWRTGSSFLGELFNQHPDVFYLYEPMWHLWQALYPGDAESLQGALRDMLRSLFRCDFSVLRLYAPPGDPAARAPDTANLTTAALFRWRTNKVICSPPLCPGAPRARAEVGLVEDTACERSCPPVAIRALEAECRKYPVVVIKDVRLLDLGVLVPLLRDPGLNLKVVQLFRDPRAVHNSRLKSRQGLLRESIQVLRTRQRGDRFHRVLLAHGVGARPGGQSRALPAAPRADFFLTGALEVICEAWLRDLLFARGAPAWLRRRYLRLRYEDLVRQPRAQLRRLLRFSGLRALAALDAFALNMTRGAAYGADRPFHLSARDAREAVHAWRERLSREQVRQVEAACAPAMRLLAYPRSGEEGDAEQPREGETPLEMDADGAT

SEQ ID NO: 4654 - protein, 761 aa, Homo sapiens
MDSGGGSLGLHTPDSRMAHTMIMQDFVAGMAGTAHIDGDHIVVSVPEAVLVSDVVTDDGITLDHGLAAEVVHGPDIITETDVVTEGVIVPEAVLEADVAIEEDLEEDDGDHILTSELITETVRVPEQVFVADLVTGPNGHLEHVVQDCVSGVDSPTMVSEEVLVTNSDTETVIQAAGGVPGSTVTIKTEDDDDDDVKSTSEDYLMISLDDVGEKLEHMGNTPLKIGSDGSQEDAKEDGFGSEVIKVYIFKAEAEDDVEIGGTEIVTESEYTSGHSVAGVLDQSRMQREKMVYMAVKDSSQEEDDIRDERRVSRRYEDCQASGNTLDSALESRSSTAAQYLQICDGINTNKVLKQKAKKRRRGETRQWQTAVIIGPDGQPLTVYPCHICTKKFKSRGFLKRHMKNHPDHLMRKKYQCTDCDFTTNKKVSFHNHLESHKLINKVDKTHEFTEYTRRYREASPLSSNKLILRDKEPKMHKCKYCDYETAEQGLLNRHLLAVHSKNFPHVCVECGKGFRHPSELKKHMRTHTGEKPYQCQYCIFRCADQSNLKTHIKSKHGNNLPYKCEHCPQAFGDERELQRHLDLFQGHKTHQCPHCDHKSTNSSDLKRHIISVHTKDFPHKCEVCDKGFHRPSELKKHSDIHKGRKIHQCRHCDFKTSDPFILSGHILSVHTKDQPLKCKRCKRGFRQQNELKKHMKTHTGRKIYQCEYCEYSTTDASGFKRHVISIHTKDYPHRCEFCKKGFRRPSEKNQHIMRHHKEALM

SEQ ID NO: 4655 - protein, 1810 aa, Homo sapiens
METLDSQRVQDRLLAAPGCSSPSGQQELFSSHVMQEESANDMECEQLPAEILRQVTVHRDPIYGFGFVAGSERPVVVRSVRPGGPSENKLLAGDQIVAINEEDVSEAPRERLIELIRSAKEFIVLTVLHTHQSPKSAFISAAKKAKLRSNPVKVRFSEQVAVGETDAKMMKKEALLLIPNVLKVFLENGQIKSFTFDGRTTVKDVMLTLQDRLSLRFIEHFALVLEYAGPEQNHKFLLLQDKQPLAYVVQRTHYHGMKCLFRISFFPKDPVELLRRDPAAFEYLYIQSRNDVIRERFGMDPKPEMLLGLAALHIYITVSATRPSQKISLKNVEKEWGLEPFLPPSLLQVIKEKNLRKSLSQQLKAHQTHPSCGTKGSAIQAKLQYLRILNELPTFTGVLFNTVGLDEKQSATTLLVGPRHGISHVIDLKTNLTTVLSEFSKISKIQLFRENQGVARVETSIMDAKPLVLLMEWPEATNFACLIAGYCRLLLDSRKMVFSRPASQPLPPPMIKADYMHSAHRPVTGGHLGKKESSYVGSVGTSPRKSSRCTPPPADSELVSFCYLHMREQRKEQESRTDVNENLIFFEETRPRTKSDPTSKSSGQGYEVVPDDFDAASLDHEPCASRARSYTLDNSLGAEALNFYCDSCKAKLQEQLGPRKGGKPGSSRDNIVDLMSLPPPGSEEEEEEEDETTSLLPAIAAPPPGFRDNSSDEDDPKRRAVQSQEQGRHLRGLLYDEIPVTLIDSVQTRTVRDHAQELDDALVSTLQALEALAASEDGPHPPPPQTAGLIVLATITPESSLDSGHETNSSELTDMSEMMSAMKQHQNTTYFLAQHLNKDSLLARKDLPFRIQSCAAQAVLTAPYSLGRPDPNPSLQPIATGQSPGPPGARRKLPQSEGQVQGERTYSLAVHPALSPQLSEQKNLSLLSPVPEDKGPGHTRAGLEMSLRAATSSLSEEQVSELRDNLPKEVRLSPKLILDPKSSVTPAIISAALQQVVHNKSLVTAGGALGNPPSRGERRLEASMGRPEVSMMSSSASKNLKFKISPSAPETSWNSQHQLGAEVSSSPRAPTGSRADSLHLSQQEDSLPVQNFPPKSYLLRTSRESVGKQATGEVAGKGGPVGGKPTLQKQGTISSQGEKAQLESTPKRSKLEETSLVPRATYPMALQSPSCQSRSHSPSCQPHGHSPSSQSRGQSPSCQPRGQSPLRSQAASRQVSTMPSRKLETTLNGAHSTSEGPAKPKSSRGPFRLRNLFSATFPTRQKKETDERQAQLQKVKQYELEFLEELLKPPSQGELPGTEYLQPPAPGRCSCQLRSSPVQQGPGMSREQRRSCDCKRICRGGRPQATQTPVPSLRGRERDRVLPSQRQPEAGPGVSLSSPINVQRIRSTSLESRECRSDPESGVSCLTTCASGGECLGAPNYRKLMRRYSISELDQGDRASLTSDVYPHPPLGMLPREAKEVEASLPIALGPKSRSLESPTLGDPSYVQVAPETKGPRQMAVFSLPEEVYRKPAELDEDSESSKCCSIRYCFYYRKCDMADDASDGKDELSYSIPMKILPGMKLDEQVVPVVSRTLQVLDAATCSSSSPEASRTQEIDLRVSTFEGSLAKINALRAHAYGLPDGFLAARLDTNELLTVLRQCVASPEARAPKPYVSQISEYKLELALKFKELRASCRRVANVDKSPTHMLAAITGSFQVLSSLIETFVRLVFIVRSEAQRQELLAKVEEVVRNYTFLLRAAEESTARNLNQQQQQQQQQQQQQQQQQQQQQQQQQQQVAAAAGAATEHPPGSPTSATVMSTFTHSLKTLIK

SEQ ID NO: 4656 - protein, 412 aa, Homo sapiens
MGDGAVKQGFLYLQQQQTFGKKWRRFGASLYGGSDCALARLELQEGPEKPRRCEAARKVIRLSDCLRVAEAGGEASSPRDTSAFFLETKERLYLLAAPAAERGDWVQAICLLAFPGQRKELSGPEGKQSRPCMEENELYSSAVTVGPHKEFAVTMRPTEASERCHLRGSYTLRAGESALELWGGPEPGTQLYDWPYRFLRRFGRDKVTFSFEAGRRCVSGEGNFEFETRQGNEIFLALEEAISAQKNAAPATPQPQPATIPASLPRPDSPYSRPHDSLPPPSPTTPVPAPRPRGQEGEYAVPFDAVARSLGKNFRGILAVPPQLLADPLYDSIEETLPPRPDHIYDEPEGVAALSLYDSPQEPRGEAWRRQATADRDPAGLQHVQPAGQDFSASGWQPGTEYDNVVLKKGPK

SEQ ID NO: 4657 - protein, 674 aa, Homo sapiens
MSSDASQGVITTPPPPSMPHKERYFDRINENDPEYIRERNMSPDLRQDFNMMEQRKRVTQILQSPAFREDLECLIQEQMKKGHNPTGLLALQQIADYIMANSFSGFSSPPLSLGMVTPINDLPGADTSSYVKGEKLTRCKLASLYRLVDLFGWAHLANTYISVRISKEQDHIIIIPRGLSFSEATASNLVKVNIIGEVVDQGSTNLKIDHTGFSPHAAIYSTRPDVKCVIHIHTLATAAVSSMKCGILPISQESLLLGDVAYYDYQGSLEEQEERIQLQKVLGPSCKVLVLRNHGVVALGETLEEAFHYIFNVQLACEIQVQALAGAGGVDNLHVLDFQKYKAFTYTVAASGGGGVNMGSHQKWKVGEIEFEGLMRTLDNLGYRTGYAYRHPLIREKPRHKSDVEIPATVTAFSFEDDTVPLSPLKYMAQRQQREKTRWLNSPNTYMKVNVPEESRNGETSPRTKITWMKAEDSSKVSGGTPIKIEDPNQFVPLNTNPNEVLEKRNKIREQNRYDLKTAGPQSQLLAGIVVDKPPSTMQFEDDDHGPPAPPNPFSHLTEGELEEYKRTIERKQQGLEENHELFSKSFISMEVPVMVVNGKDDMHDVEDELAKRVSRLSTSTTIENIEITIKSPEKIEEVLSPEGSPSKSPSKKKKKFRTPSFLKKNKKKEKVEA

SEQ ID NO: 4658 - protein, 488 aa, Homo sapiens
MTSPVLVDIREEVTCPICLELLTEPLSIDCGHSFCQACITPNGRESVIGQEGERSCPVCQTSYQPGNLRPNRHLANIVRRLREVVLGPGKQLKAVLCADHGEKLQLFCQEDGKVICWLCERSQEHRGHHTFLVEEVAQEYQEKFQESLKKLKNEEQEAEKLTAFIREKKTSWKNQMEPERCRIQTEFNQLRNILDRVEQRELKKLEQEEKKGLRIIEEAENDLVHQTQSLRELISDLERRCQGSTMELLQDVSDVTERSEFWTLRKPEALPTKLRSMFRAPDLKRMLRVCRELTDVQSYWVDVTLNPHTANLNLVLAKNRRQVRFVGAKVSGPSCLEKHYDCSVLGSQHFSSGKHYWEVDVAKKTAWILGVCSNSLGPTFSFNHFAQNHSAYSRYQPQSGYWVIGLQHNHEYRAYEDSSPSLLLSMTVPPRRVGVFLDYEAGTVSFYNVTNHGFPIYTFSKYYFPTTLCPYFNPCNCVIPMTLRRPSS

SEQ ID NO: 4659 - protein, 259 aa, Homo sapiens
MAVQISKKRKFVADGIFKAELNEFLTRELAEDGYSGVEVRVTPTRTEIIILATRTQNVLGEKGRRIRELTAVVQKRFGFPEGSVELKIMVMVTGYPLLPLKLYAEKVATRGLCAIAQAESLRYKLLGGLAVRRACYGVLRFIMESGAKGCEVVVSGKLRGQRAKSMKFVDGLMIHSGDPVNYYVDTAVRHVLLRQGVLGIKVKIMLPWDPTGKIGPKKPLPDHVSIVEPKDEILPTTPISEQKGGKPEPPAMPQPVPTA

SEQ ID NO: 4660 - protein, 914 aa, Homo sapiens
MGTTAPGPIHLLELCDQKLMEFLCNMDNKDLVWLEEIQEEAERMFTREFSKEPELMPKTPSQKNRRKKRRISYVQDENRDPIRRRLSRRKSRSSQLSSRRLRSKDSVEKLATVVGENGSVLRRVTRAAAAAAAATMALAAPSSPTPESPTMLTKKPEDNHTQCQLVPVVEIGISERQNAEQHVTQLMSTEPLPRTLSPTPASATAPTSQGIPTSDEESTPKKSKARILESITVSSLMATPQDPKGQGVGTGRSASKLRIAQVSPGPRDSPAFPDSPWRERVLAPILPDNFSTPTGSRTDSQSVRHSPIAPSSPSPQVLAQKYSLVAKQESVVRRASRRLAKKTAEEPAASGRIICHSYLERLLNVEVPQKVGSEQKEPPEEAEPVAAAEPEVPENNGNNSWPHNDTEIANSTPNPKPAASSPETPSAGQQEAKTDQADGPREPPQSARRKRSYKQAVSELDEEQHLEDEELQPPRSKTPSSPCPASKVVRPLRTFLHTVQRNQMLMTPTSAPRSVMKSFIKRNTPLRMDPKEKERQRLENLRRKEEAEQLRRQKVEEDKRRRLEEVKLKREERLRKVLQARERVEQMKEEKKKQIEQKFAQIDEKTEKAKEERLAEEKAKKKAAAKKMEEVEARRKQEEEARRLRWLQQEEEERRHQELLQKKKEEEQERLRKAAEAKRLAEQREQERREQERREQERREQERREQERREQERQLAEQERRREQERLQAERELQEREKALRLQKEQLQRELEEKKKKEEQQRLAERQLQEEQEKKAKEAAGASKALNVTVDVQSPACTSYQMTPQGHRAPPKINPDNYGMDLNSDDSTDDEAHPRKPIPTWARGTPLSQAIIHQYYHPPNLLELFGTILPLDLEDIFKKSKPRYHKRTSSAVWNSPPLQGARVPSSLAYSLKKH

SEQ ID NO: 4661 - protein, 442 aa, Homo sapiens
MAVPFVEDWDLVQTLGEGAYGEVQLAVNRVTEEAVAVKIVDMKRAVDCPENIKKEICINKMLNHENVVKFYGHRREGNIQYLFLEYCSGGELFDRIEPDIGMPEPDAQRFFHQLMAGVVYLHGIGITHRDIKPENLLLDERDNLKISDFGLATVFRYNNRERLLNKMCGTLPYVAPELLKRREFHAEPVDVWSCGIVLTAMLAGELPWDQPSDSCQEYSDWKEKKTYLNPWKKIDSAPLALLHKILVENPSARITIPDIKKDRWYNKPLKKGAKRPRVTSGGVSESPSGFSKHIQSNLDFSPVNSASSEENVKYSSSQPEPRTGLSLWDTSPSYIDKLVQGISFSQPTCPDHMLLNSQLLGTPGSSQNPWQRLVKRMTRFFTKLDADKSYQCLKETCEKLGYQWKKSCMNQGDGLEFKRHFLKIKGKLIDIVSSQKIWLPAT

SEQ ID NO: 4662 - protein, 392 aa, Homo sapiens
MEAPLVSLDEEFEDLRPSCSEDPEEKPQCFYGSSPHHLEDPSLSELENFSSEIISFKSMEDLVNEFDEKLNVCFRNYNAKTENLAPVKNQLQIQEEEETLQDEEVWDALTDNYIPSLSEDWRDPNIEALNGNCSDTEIHEKEEEEFNEKSENDSGINEEPLLTADQVIEEIEEMMQNSPDPEEEEEVLEEEDGGETSSQADSVLLQEMQALTQTFNNNWSYEGLRHMSGSELTELLDQVEGAIRDFSEELVQQLARRDELEFEKEVKNSFITVLIEVQNKQKEQRELMKKRRKEKGLSLQSSRIEKGNQMPLKRFSMEGISNILQSGIRQTFGSSGTDKQYLNTVIPYEKKASPPSVEDLQMLTNILFAMKEDNEKVPTLLTDYILKVLCPT

SEQ ID NO: 4663 - protein, 381 aa, Homo sapiens
MIDTLRPVPFASEMAISKTVAWLNEQLELGNERLLLMDCRPQELYESSHIESAINVAIPGIMLRRLQKGNLPVRALFTRGEDRDRFTRRCGTDTVVLYDESSSDWNENTGGESVLGLLLKKLKDEGCRAFYLEGGFSKFQAEFSLHCETNLDGSCSSSSPPLPVLGLGGLRISSDSSSDIESDLDRDPNSATDSDGSPLSNSQPSFPVEILPFLYLGCAKDSTNLDVLEEFGIKYILNVTPNLPNLFENAGEFKYKQIPISDHWSQNLSQFFPEAISFIDEARGKNCGVLVHCLAGISRSVTVTVAYLMQKLNLSMNDAYDIVKMKKSNISPNFNFMGQLLDFERTLGLSSPCDNRVPAQQLYFTTPSNQNVYQVDSLQST

SEQ ID NO: 4664 - protein, 181 aa, Homo sapiens
MQDEERYMTLNVQSKKRSSAQTSQLTFKDYSVTLHWYKILLGISGTVNGILTLTLISLILLVLCQSEWLKYQGKCYWFSNEMKSWSDSYVYCLERKSHLLIIHDQLEMAFIQKNLRQLNYVWIGLNFTSLKMTWTWVDGSPIDSKIFFIKGPAKENSCAAIKESKIFSETCSSVFKWICQY

SEQ ID NO: 4665 - protein, 303 aa, Homo sapiens
MSEAGEATTTTTTTLPQAPTEAAAAAPQDPAPKSPVGSGAPQAAAPAPAAHVAGNPGGDAAPAATGTAAAASLATAAGSEDAEKKVLATKVLGTVKWFNVRNGYGFINRNDTKEDVFVHQTAIKKNNPRKYLRSVGDGETVEFDVVEGEKGAEAANVTGPDGVPVEGSRYAADRRRYRRGYYGRRRGPPRNAGEIGEMKDGVPEGAQLQGPVHRNPTYRPRYRSRGPPRPRPAPAVGEAEDKENQQATSGPNQPSVRRGYRRPYNYRRRPRPPNAPSQDGKEAKAGEAPTENPAPPTQQSSAE

SEQ ID NO: 4666 - protein, 211 aa, Homo sapiens
MEEPPVREEEEEEGEEDEERDEVGPEGALGKSPFQLTAEDVYDISYLLGRELMALGSDPRVTQLQFKVVRVLEMLEALVNEGSLALEELKMERDHLRKEVEGLRRQSPPASGEVNLGPNKMVVDLTDPNRPRFTLQELRDVLQERNKLKSQLLVVQEELQCYKSGLIPPREGPGGRREKDAVVTSAKNAGRNKEEKTIIKKLFFFRSGKQT

SEQ ID NO: 4667 - protein, 431 aa, Homo sapiens
MFHSPRRLCSALLQRDAPGLRRLPAPGLRRPLSPPAAVPRPASPRLLAAASAASGAARSCSRTVCSMGTGTSRLYSALAKTLNSSAASQHPEYLVSPDPEHLEPIDPKELLEECRAVLHTRPPRFQRDFVDLRTDCPSTHPPIRVMQWNILAQALGEGKDNFVQCPVEALKWEERKCLILEEILAYQPDILCLQEVDHYFDTFQPLLSRLGYQGTFFPKPWSPCLDVEHNNGPDGCALFFLQNRFKLVNSANIRLTAMTLKTNQVAIAQTLECKESGRQFCIAVTHLKARTGWERFRSAQGCDLLQNLQNITQGAKIPLIVCGDFNAEPTEEVYKHFASSSLNLNSAYKLLSADGQSEPPYTTWKIRTSGECRHTLDYIWYSKHALNVRSALDLLTEEQIGPNRLPSFNYPSDHLSLVCDFSFTEESDGLS

SEQ ID NO: 4668 - protein, 67 aa, Homo sapiens
MEVHGKPKASPSCSSPTRDSSGVPVSKELLTAGSDGRGGIWDRLLINSQPKSRKTSTLQTVRIERSP

SEQ ID NO: 4669 - protein, 2319 aa, Homo sapiens
MLTMSVTLSPLRSQDLDPMATDASPMAINMTPTVEQGEGEEAMKDMDSDQQYEKPPPLHTGADWKIVLHLPEIETWLRMTSERVRDLTYSVQQDSDSKHVDVHLVQLKDICEDISDHVEQIHALLETEFSLKLLSYSVNVIVDIHAVQLLWHQLRVSVLVLRERILQGLQDANGNYTRQTDILQAFSEETKEGRLDSLTEVDDSGQLTIKCSQNYLSLDCGITAFELSDYSPSEDLLSGLGDMTSSQVKTKPFDSWSYSEMEKEFPELIRSVGLLTVAADSISTNGSEAVTEEVSQVSLSVDDKGGCEEDNASAVEEQPGLTLGVSSSSGEALTNAAQPSSETVQQESSSSSHHDAKNQQPVPCENATPKRTIRDCFNYNEDSPTQPTLPKRGLFLKEETFKNDLKGNGGKRQMVDLKPEMSRSTPSLVDPPDRSKLCLVLQSSYPNSPSAASQSYECLHKVGNGNLENTVKFHIKEISSSLGRLNDCYKEKSRLKKPHKTSEEVPPCRTPKRGTGSGKQAKNTKSSAVPNGELSYTSKAIEGPQTNSASTSSLEPCNQRSWNAKLQLQSETSSSPAFTQSSESSVGSDNIMSPVPLLSKHKSKKGQASSPSHVTRNGEVVEAWYGSDEYLALPSHLKQTEVLALKLENLTKLLPQKPRGETIQNIDDWELSEMNSDSEIYPTYHVKKKHTRLGRVSPSSSSDIASSLGESIESGPLSDILSDEESSMPLAGMKKYADEKSERASSSEKNESHSATKSALIQKLMQDIQHQDNYEAIWEKIEGFVNKLDEFIQWLNEAMETTENWTPPKAEMDDLKLYLETHLSFKLNVDSHCALKEAVEEEGHQLLELIASHKAGLKDMLRMIASQWKELQRQIKRQHSWILRALDTIKAEILATDVSVEDEEGTGSPKAEVQLCYLEAQRDAVEQMSLKLYSEQYTSSSKRKEEFADMSKVHSVGSNGLLDFDSEYQELWDWLIDMESLVMDSHDLMMSEEQQQHLYKRYSVEMSIRHLKKTELLSKVEALKKGGVLLPNDLLEKVDSINEKWELLGKTLGEKIQDTMAGHSGSSPRDLLSPESGSLVRQLEVRIKELKGWLRDTELFIFNSCLRQEKEGTMNTEKQLQYFKSLCREIKQRRRGVASILRLCQHLLDDRETCNLNADHQPMQLIIVNLERRWEAIVMQAVQWQTRLQKKMGKESETLNVIDPGLMDLNGMSEDALEWDEMDISNKLISLNEESNDLDQELQPVIPSLKLGETSNEDPGYDEEADNHGGSQYASNITAPSSPHIYQVYSLHNVELYEDNHMPFLKNNPKVTGMTQPNVLTKSLSKDSSFSSTKSLPDLLGGSNLVKPCACHGGDMSQNSGSESGIVSEGDTETTTNSEMCLLNAVDGSPSNLETEHLDPQMGDAVNVLKQKFTDEGESIKLPNSSQSSISPVGCVNGKVGDLNSITKHTPDCLGEELQGKHDVFTFYDYSYLQGSKLKLPMIMKQSQSEKAHVEDPLLRGFYFDKKSCKSKHQTTELQPDVPPHERILASASHEMDRISYKSGNIEKTFTGMQNAKQLSLLSHSSSIESLSPGGDLFGLGIFKNGSDSLQRSTSLESWLTSYKSNEDLFSCHSSGDISVSSGSVGELSKRTLDLLNRLENIQSPSEQKIKRSVSDITLQSSSQKMSFTGQMSLDIASSINEDSAASLTELSSSDELSLCSEDIVLHKNKIPESNASFRKRLTRSVADESDVNVSMIVNVSCTSACTDDEDDSDLLSSSTLTLTEEELCIKDEDDDSSIATDDEIYEDCTLMSGLDYIKNELQTWIRPKLSLTRDKKRCNVSDEMKGSKDISSSEMTNPSDTLNIETLLNGSVKRVSENNGNGKNSSHTHELGTKRENKKTIFKVNKDPYVADMENGNIEGIPERQKGKPNVTSKVSENLGSHGKEISESEHCKCKALMDSLDDSNTAGKEFVSQDVRHLPKKCPNHHHFENQSTASTPTEKSFSELALETRFNNRQDSDALKSSDDAPSMAGKSAGCCLALEQNGTEENASISNISCCNCEPDVFHQKDAEDCSVHNFVKEIIDMASTALKSKSQPENEVAAPTSLTQIKEKVLEHSHRPIQLRKGDFYSYLSLSSHDSDCGEVTNYIEEKSSTPLPLDTTDSGLDDKEDIECFFEACVEGDSDGEEPCFSSAPPNESAVPSEAAMPLQATACSSEFSDSSLSADDADTVALSSPSSQERAEVGKEVNGLPQTSSGCAENLEFTPSKLDSEKESSGKPGESGMPEEHNAASAKSKVQDLSLKANQPTDKAALHPSPKTLTCEENLLNLHEKRHRNMHR

SEQ ID NO: 4670 - protein, 1094 aa, Homo sapiens
MAESSSESDHFRCRDRLSPWAARSTHRGTRSLPTVEVTEKVNTITSTLQDTSRNLRQVDQMLGRYREYSNGQAGAIEHLKESLEQSIDQLRSQRLLRNSGGRSISVTSLSASDLDGGTGSELHHFPPTSPLKDYGDPQGIKRMRSRTGVRFVQETDDMTQLHGFHQSLRDLSSEQIRLGDDFNRELSRRSRSDAETKRALEELTEKLNEAQKQEVVSDRVERRLQELEREMRTERELVERRQDQLGLMSLQLQEALKKQEAKADEHEGAIKNKLRQTETEKNQLEQELELSRRLLNQSEGSRETLLHQVEELRTQLTKAEGDRKGLQHQVSQISKQQSNYQDEQGEDWRFRRGVEREKQDLEKQMSDLRVQLNFSAMASELEEVKRCMERKDKEKAHLASQVENLTRELENGEKQQLQMLDRLKEIQNHFDTCEAERKHADLQISELTRHAEDATKQAERYLSELQQSEALKEEAEKRREDLKLKAQESIRQWKLKHKKLERALEKQSETVDELTGKNNQILKEKDELKTQLYAALQQIENLRKELNDVLTKRALQEEELHSKEEKLRDIKSHQADLELEVKNSLDTIHRLESELKKQSKIQSQMKVEKAHLEEEIAELKKSQAQDKAKLLEMQESIKDLSAIRADLANKLAEEERAKKAVLKDLSDLTAQAKSRDEETATIITQLKLERDVHQRELKDLTSSLQSVKTKHEQNIQELMKHFKKEKSEAENHIRTLKAESLEEKNMAKIHRGQLEKLKSQCDRLTEELTQNENENKKLKLKYQCLKDQLEEREKHISIEEEHLRRMEEARLQLKDQLLCLETEQESILGVIGKEIDAACKTFSKDSVEKLKVFSSGPDIHYDPHRWLAESKTKLQWLCEELKERENREKNLRHQLMLCRQQLRNLTENKESELQCLFQQIERQEQLLDEIHREKRDLLEETQRKDEEMGSLQDRVIALETSTQVALDHLESVPEKLSLLEDFKDFRDSCSSSERTDGRYSKYRVRRNSLQHHQDDTKYRTKSFKGDRTFLEGSHTRGLDHSSSWQDHSRFLSSPRFSYVNSFTKRTVAPDSASNKEDATMNGTSSQPKKEEYGS

SEQ ID NO: 4671 - protein, 418 aa, Homo sapiens
MAPRGRRRPRPHRSEGARRSKNTLERTHSMKDKAGQKCKPIDVFDFPDNSDVSSIGRLGENEKDEETYETFDPPLHSTAIYADEEEFSKHCGLSLSSTPPGKEAKRSSDTSGNEASEIESVKISAKKPGRKLRPISDDSESIEESDTRRKVKSAEKISTQRHEVIRTTASSELSEKPAESVTSKKTGPLSAQPSVEKENLAIESQSKTQKKGKISHDKRKKSRSKAIGSDTSDIVHIWCPEGMKTSDIKELNIVLPEFEKTHLEHQQRIESKVCKAAIATFYVNVKEQFIKMLKESQMLTNLKRKNAKMISDIEKKRQRMIEVQDELLRLEPQLKQLQTKYDELKERKSSLRNAAYFLSNLKQLYQDYSDVQAQEPNVKETYDSSSLPALLFKARTLLGAESHLRNINHQLEKLLDQG

SEQ ID NO: 4672 - protein, 854 aa, Homo sapiens
MGMCSRQERIQKDIDVVIQKSRAEKDCLFADFRYSDSTFTFTYVGGPRSVSYSVHVSEDYPDNTYVSSSENDEDVLVTTEPIPVIFHRIATELRKTNDINCCLSIKSKLQKENGEESRQNSTVEEDSEGDNDSEEFYYGGQVNYDGELHKHPQLEADLSAVREIYGPHAVSLREYGAIDDVDIDLHIDVSFLDEEIAVAWEVIRTEPIIVRLHCSLTQYLNGPVPTVDVFQISTKERFGLGHQLKKIMQTFVTQQWKQSKEKSNCLHNKKLSEKKVKSPLHLFSTLRRSPSYPPPGCGKSKSKLKSEQDGISKTHKLLRRTCSSTVKTDDVCVTKSHRTFGRSLSSDPRAEQAMTAIKSHKLLNRPCPAAVKSEECLTLKSHRLLTRSCSGDPRCEHNTNLKPHKLLSRSYSSNLRMEELYGLKNHKLLSKSYSSAPKSSKTELFKEPNAEGRRLSLTSGLIGILTPSSSSSSQLAPNGAKCIPVRDRGFLVQTIEFAEQRIPVLNEYCVVCDEPHVFQNGPMLRPTVCERELCVFAFQTLGVMNEAADEIATGAQVVDLLVSMCRSALESPRKVVIFEPYPSVVDPNDPQMLAFNPRKKNYDRVMKALDSITSIREMTQAPYLEIKKQMDKQDPLAHPLLQWVISSNRSHIVKLPVNRQLKFMHTPHQFLLLSSPPAKESNFRAAKKLFGSTFAFHGSHIENWHSILRNGLVVASNTRLQLHGAMYGSGIYLSPMSSISFGYSGMNKKQKVSAKDEPASSSKSSNTSQSQKKGQQSQFLQSRNLKCIALCEVITSSDLHKHGEIWVVPNTDHVCTRFFFVYEDGQVGDANINTQEGGIHKEILRVIGNQTATG

SEQ ID NO: 4673 - protein, 589 aa, Homo sapiens
MPTVSVKRDLLFQALGRTYTDEEFDELCFEFGLELDEITSEKEIISKEQGNVKAAGASDVVLYKIDVPANRYDLLCLEGLVRGLQVFKERIKAPVYKRVMPDGKIQKLIITEETAKIRPFAVAAVLRNIKFTKDRYDSFIELQEKLHQNICRKRALVAIGTHDLDTLSGPFTYTAKRPSDIKFKPLNKTKEYTACELMNIYKTDNHLKHYLHIIENKPLYPVIYDSNGVVLSMPPIINGDHSRITVNTRNIFIECTGTDFTKAKIVLDIIVTMFSEYCENQFTVEAAEVVFPNGKSHTFPELAYRKEMVRADLINKKVGIRETPENLAKLLTRMYLKSEVIGDGNQIEIEIPPTRADIIHACDIVEDAAIAYGYNNIQMTLPKTYTIANQFPLNKLTELLRHDMAAAGFTEALTFALCSQEDIADKLGVDISATKAVHISNPKTAEFQVARTTLLPGLLKTIAANRKMPLPLKLFEISDIVIKDSNTDVGAKNYRHLCAVYYNKNPGFEIIHGLLDRIMQLLDVPPGEDKGGYVIKASEGPAFFPGRCAEIFARGQSVGKLGVLHPDVITKFELTMPCSSLEINVGPFL

SEQ ID NO: 4674 - protein, 158 aa, Homo sapiens
MAAQGVGPGPGSAAPPGLEAARQKLALRRKKVLSTEEMELYELAQAAGGAIDPDVFKILVDLLKLNVAPLAVFQMLKSMCAGQRLASEPQDPAAVSLPTSSVPETRGRNKGSAALGGALALAERSSREGSSQRMPRQPSATRLPKGGGPGKSPTRGST

SEQ ID NO: 4675 - protein, 224 aa, Homo sapiens
MVEDELALFDKSINEFWNKFKSTDTSCQMAGLRDTYKDSIKAFAEKLSVKLKEEERMVEMFLEYQNQISRQNKLIQEKKDNLLKLIAEVKGKKQELEVLTANIQDLKEEYSRKKETISTANKANAERLKRLQKSADLYKDRLGLEIRKIYGEKLQFIFTNIDPKNPESPFMFSLHLNEARDYEVSDSAPHLEGLAEFQENVRKTNNFSAFLANVRKAFTATVYN

SEQ ID NO: 4676 - protein, 494 aa, Homo sapiens
MSTTLLSAFYDVDFLCKTEKSLANLNLNNMLDKKAVGTPVAAAPSSGFAPGFLRRHSASNLHALAHPAPSPGSCSPKFPGAANGSSCGSAAAGGPTSYGTLKEPSGGGGTALLNKENKFRDRSFSENGDRSQHLLHLQQQQKGGGGSQINSTRYKTELCRPFEESGTCKYGEKCQFAHGFHELRSLTRHPKYKTELCRTFHTIGFCPYGPRCHFIHNADERRPAPSGGASGDLRAFGTRDALHLGFPREPRPKLHHSLSFSGFPSGHHQPPGGLESPLLLDSPTSRTPPPPSCSSASSCSSSASSCSSASAASTPSGAPTCCASAAAAAAAALLYGTGGAEDLLAPGAPCAACSSASCANNAFAFGPELSSLITPLAIQTHNFAAVAAAAYYRSQQQQQQQGLAPPAQPPAPPSATLPAGAAAPPSPPFSFQLPRRLSDSPVFDAPPSPPDSLSDRDSYLSGSLSSGSLSGSESPSLDPGRRLPIFSRLSISDD

SEQ ID NO: 4677 - protein, 90 aa, Homo sapiens
MSSGYSSLEEDAEDFFFTARTSFFRRAPQGKPRSGQQDVEKEKETHSYLSKEEIKEKVHKYNLAVTDKLKMTLSTPASSQTGNIHSTCVW

SEQ ID NO: 4678 - protein, 78 aa, Homo sapiens
MDCCTENACSKPDDDILDIPLDDPGANAAAAKIQASFRGHMARKKIKSGERGRKGPGPGGPGGAGVARGGAGGGPSGD

SEQ ID NO: 4679 - protein, 223 aa, Homo sapiens [sequence omitted]

SEQ ID NO: 4680 - protein, 252 aa, Homo sapiens
MKNEIAAVVFFFTRLVRKHDKLKKEAVERFAEKLTLILQEKYKNHWYPEKPSKGQAYRCIRVNKFQRVDPDVLKACENSCILYSDLGLPKELTLWVDPCEVCCRYGEKNNAFIVASFENKDENKDEISRKVTRALDKVTSDYHSGSSSSDEETSKEMEVKPSSVTAAASPVYQISELIFPPLPMWHPLPRKKPGMYRGNGHQNHYPPPVPFGYPNQGRKNKPYRPIPVTWVPPPGMHCDRNHWINPHMLAPH

SEQ ID NO: 4681 - protein, 897 aa, Homo sapiens
MEANHCSLGVYPSYPDLVIDVGEVTLGEENRKKLQKTQRDQERARVIRAACALLNSGGGVIQMEMANRDERPTEMGLDLEESLRKLIQYPYLQAFFETKQHGRCFYIFVKSWSGDPFLKDGSFNSRICSLSSSLYCRSGTSVLHMNSRQAFDFLKTKERQSKYNLINEGSPPSKIMKAVYQNISESNPAYEVFQTDTIEYGEILSFPESPSIEFKQFSTKHIQQYVENIIPEYISAFANTEGGYLFIGVDDKSRKVLGCAKEQVDPDSLKNVIARAISKLPIVHFCSSKPRVEYSTKIVEVFCGKELYGYLCVIKVKAFCCVVFSEAPKSWMVREKYIRPLTTEEWVEKMMDADPEFPPDFAEAFESQLSLSDSPSLCRPVYSKKGLEHKADLQQHLFPVPPGHLECTPESLWKELSLQHEGLKELIHKQMRPFSQGIVILSRSWAVDLNLQEKPGVICDALLIAQNSTPILYTILREQDAEGQDYCTRTAFTLKQKLVNMGGYTGKVCVRAKVLCLSPESSAEALEAAVSPMDYPASYSLAGTQHMEALLQSLVIVLLGFRSLLSDQLGCEVLNLLTAQQYEIFSRSLRKNRELFVHGLPGSGKTIMAMKIMEKIRNVFHCEAHRILYVCENQPLRNFISDRNICRAETRETFLREKFEHIQHIVIDEAQNFRTEDGDWYRKAKTITQREKDCPGVLWIFLDYFQTSHLGHSGLPPLSAQYPREELTRVVRNADEIAEYIQQEMQLIIENPPINIPHGYLAILSEAKWVPGVPGNTKIIKNFTLEQIVTYVADTCRCFFERGYSPKDVAVLVSTVTEVEQYQSKLLKAMRKKMVVQLSDACDMLGVHIVLDSVRRFSGLERSIVFGIHPRTADPAILPNILICLASRAKQHLYIFL

SEQ ID NO: 4682 - protein, 255 aa, Homo sapiens
MASSDLEQLCSHVNEKIGNIKKTLSLRNCGQEPTLKTVLNKIGDEIIVINELLNKLELEIQYQEQTNNSLKELCESLEEDYKDIEHLKENVPSHLPQVTVTQSCVKGSDLDPEEPIKVEEPEPVKKPPKEQRSIKEMPFITCDEFNGVPSYMKSRLTYNQINDVIKEINKAVISKYKILHQPKKSMNSVTRNLYHRFIDEETKDTKGRYFIVEADIKEFTTLKADKKFHVLLNILRHCRRLSEVRGGGLTRYVIT

SEQ ID NO: 4683 - protein, 130 aa, Homo sapiens
MSVVRSSVHARWIVGKVIGTKMQKTAKVRVTRLVLDPYLLKYFNKRKTYFAHDALQQCTVGDIVLLRALPVPRAKHVKHELAEIVFKVGKVIDPVTGKPCAGTTYLESPLSSETTQLSKNLEELNISSAQ

SEQ ID NO: 4684 - protein, 204 aa, Homo sapiens
MSSASGLRRGHPAVSTVSHADADCFVCVFLSHGEGNHIYAYDAKIEIQTLTGLFKGDKCHSLVGKPKIFIIQACRGNQHDVPVIPLDVVDNQTEKLDTNITEVDAASVYTLPAGADFLMCYSVAEGYYSHRETVNGSWYIQDLCEMLGKYGSSLEFTELLTLVNRKVSQRRVDFCKDPSAIGKKQVPCFASMLTKKLHFFPKSN

SEQ ID NO: 4685 - protein, 260 aa, Homo sapiens
MSHHWGYGKHNGPEHWHKDFPIAKGERQSPVDIDTHTAKYDPSLKPLSVSYDQATSLRILNNGHAFNVEFDDSQDKAVLKGGPLDGTYRLIQFHFHWGSLDGQGSEHTVDKKKYAAELHLVHWNTKYGDFGKAVQQPDGLAVLGIFLKVGSAKPGLQKVVDVLDSIKTKGKSADFTNFDPRGLLPESLDYWTYPGSLTTPPLLECVTWIVLKEPISVSSEQVLKFRKLNFNGEGEPEELMVDNWRPAQPLKNRQIKASFK

SEQ ID NO: 4686 - protein, 480 aa, Homo sapiens
MLNFGASLQQTAEERMEMISERPKESMYSWNKTAEKSDFEAVEALMSMSCSWKSDFKKYVENRPVTPVSDLSEEENLLPGTPDFHTIPAFCLTPPYSPSDFEPSQVSNLMAPAPSTVHFKSLSDTAKPHIAAPFKEEEKSPVSAPKLPKAQATSVIRHTADAQLCNHQTCPMKAASILNYQNNSFRRRTHLNVEAARKNIPCAAVSPNRSKCERNTVADVDEKASAALYDFSVPSSETVICRSQPAPVSPQQKSVLVSPPAVSAGGVPPMPVICQMVPLPANNPVVTTVVPSTPPSQPPAVCPPVVFMGTQVPKGAVMFVVPQPVVQSSKPPVVSPNGTRLSPIAPAPGFSPSAAKVTPQIDSSRIRSHICSHPGCGKTYFKSSHLKAHTRTHTGEKPFSCSWKGCERRFARSDELSRHRRTHTGEKKFACPMCDRRFMRSDHLTKHARRHLSAKKLPNWQMEVSKLNDIALPPTPAPTQ

SEQ ID NO: 4687 - protein, 193 aa, Homo sapiens
MAAIRKKLVIVGDGACGKTCLLIVFSKDQFPEVYVPTVFENYIADIEVDGKQVELALWDTAGQEDYDRLRPLSYPDTDVILMCFSIDSPDSLENIPEKWTPEVKHFCPNVPIILVGNKKDLRQDEHTRRELAKMKQEPVRSEEGRDMANRISAFGYLECSAKTKEGVREVFEMATRAGLQVRKNKRRRGCPIL

SEQ ID NO: 4688 - protein, 955 aa, Homo sapiens
MEDSSTDTEKEEEEEKDEKDQEPIYAIVPTINIQDERFVDLSETPAFIFLHELHAMGKLPGTRMAALKAKYTLLHDAVMSTQESEVQLLQNAKRFTEQIQQQQFHLQQADNFPEAFSTEVSKMREQLLKYQNEYNAVKEREFHNQYRLNSLKEEKIIIVKEFEKITKPGEMEKKMKILRESTEELRKEIMQKKLEIKNLREDLASKQKQLLKEQKELEELLGHQVVLKDEVAHHQTIPVQIGKEIEKITRKKVEMEKKKIVLEQEVKTLNDSLKKVENKVSAIVDEKENVIKEVEGKRALLEIKEREHNQLVKLLELARENEATSLTERGILDLNLRNSLIDKQNYHDELSRKQREKERDFRNLRKMELLLKVSWDALRQTQALHQRLLLEMEAIPKDDSTLSERRRELHKEVEVAKRNLAQQKIISEMESKLVEQQLAEENKLLKEQENMKELVVNLLRMTQIKIDEKEQKSKDFLKAQQKYTNIVKEMKAKDLEIRIHKKKKCEIYRRLREFAKLYDTIRNERNKFVNLLHKAHQKVNEIKERHKMSLNELEILRNSAVSQERKLQNSMLKHANNVTIRESMQNDVRKIVSKLQEMKEKKEAQLNNIDRLANTITMIEEEMVQLRKRYEKAVQHRNESGVQLIEREEEICIFYEKINIQEKMKLNGEIEIHLLEEKIQFLKMKIAEKQRQICVTQKLLPAKRSLDADLAVLQIQFSQCTDRIKDLEKQFVKPDGENRARFLPGKDLTEKEMIQKLDKLELQLAKKEEKLLEKDFIYEQVSRLTDRLCSKTQGCKQDTLLLAKKMNGYQRRIKNATEKMMALVAELSMKQALTIELQKEVREKEDFIFTCNSRIEKGLPLNKEIEKEWLKVLRDEEMHALAIAEKSQEFLEADNRQLPNGVYTTAEQRPNAYIPEADATLPLPKPYGALAPFKPSEPGANMRHIRKPVIKPVEI

SEQ ID NO: 4689 - protein, 125 aa, Homo sapiens
MPHSSDSSDSSFSRSPPPGKQDSSDDVRRVQRREKNRIAAQKSRQRQTQKADTLHLESEDLEKQNAALRKEIKQLTEELKYFTSVLNSHEPLCSVLAASTPSPPEVVYSAHAFHQPHVSSPRFQP

SEQ ID NO: 4690 - protein, 649 aa, Homo sapiens
MSLMVSAGRGLGAVWSPTHVQVTVLQARGLRAKGPGGTSDAYAVIQVGKEKYATSVSERSLGAPVWREEATFELPSLLSSGPAAAATLQLTVLHRALLGLDKFLGRAEVDLRDLHRDQGRRKTQWYKLKSKPGKKDKERGEIEVDIQFMRNNMTASMFDLSMKDKSRNPFGKLKDKIKGKNKDSGSDTASAIIPSTTPSVDSDDESVVKDKKKKSKIKTLLSKSNLQKTPLSQSMSVLPTSKPEKVLLRPGDFQSQWDEDDNEDESSSASDVMSHKRTASTDLKQLNQVNFTLPKKEGLSFLGGLRSKNDVLSRSNVCINGNHVYLEQPEAKGEIKDSSPSSSPSPKGFRKKHLFSSTENLAAGSWKEPAEGGGLSSDRQLSESSTKDSLKSMTLPSYRPAPLVSGDLRENMAPANSEATKEAKESKKPESRRSSLLSLMTGKKDVAKGSEGENPLTVPGREKEGMLMGVKPGEDASGPAEDLVRRSEKDTAAVVSRQGSSLNLFEDVQITEPEAEPESKSEPRPPISSPRAPQTRAVKPRLHPVKPMNAMATKVANCSLGTATIISENLNNEVMMKKYSPSDPAFAYAQLTHDELIQLVLKQKETISKKEFQVRELEDYIDNLLVRVMEETPNILRIPTQVGKKAGKM

SEQ ID NO: 4691 - protein, 1050 aa, Homo sapiens
MAAVKKEGGALSEAMSLEGDEWELSKENVQPLRQGRIMSTLQGALAQESACNNTLQQQKRAFEYEIRFYTGNDPLDVWDRYISWTEQNYPQGGKESNMSTLLERAVEALQGEKRYYSDPRFLNLWLKLGRLCNEPLDMYSYLHNQGIGVSLAQFYISWAEEYEARENFRKADAIFQEGIQQKAEPLERLQSQHRQFQARVSRQTLLALEKEEEEEVFESSVPQRSTLAELKSKGKKTARAPIIRVGGALKAPSQNRGLQNPFPQQMQNNSRITVFDENADEASTAELSKPTVQPWIAPPMPRAKENELQAGPWNTGRSLEHRPRGNTASLIAVPAVLPSFTPYVEETARQPVMTPCKIEPSINHILSTRKPGKEEGDPLQRVQSHQQASEEKKEKMMYCKEKIYAGVGEFSFEEIRAEVFRKKLKEQREAELLTSAEKRAEMQKQIEEMEKKLKEIQTTQQERTGDQQEETMPTKETTKLQIASESQKIPGMTLSSSVCQVNCCARETSLAENIWQEQPHSKGPSVPFSIFDEFLLSEKKNKSPPADPPRVLAQRRPLAVLKTSESITSNEDVSPDVCDEFTGIEPLSEDAIITGFRNVTICPNPEDTCDFARAARFVSTPFHEIMSLKDLPSDPERLLPEEDLDVKTSEDQQTACGTIYSQTLSIKKLSPIIEDSREATHSSGFSGSSASVASTSSIKCLQIPEKLELTNETSENPTQSPWCSQYRRQLLKSLPELSASAELCIEDRPMPKLEIEKEIELGNEDYCIKREYLICEDYKLFWVAPRNSAELTVIKVSSQPVPWDFYINLKLKERLNEDFDHFCSCYQYQDGCIVWHQYINCFTLQDLLQHSEYITHEITVLIIYNLLTIVEMLHKAEIVHGDLSPRCLILRNRIHDPYDCNKNNQALKIVDFSYSVDLRVQLDVFTLSGFRTVQILEGQKILANCSSPYQVDLFGIADLAHLLLFKEHLQVFWDGSFWKLSQNISELKDGELWNKFFVRILNANDEATVSVLGELAAEMNGVFDTTFQSHLNKALWKVGKLTSPGALLFQ

SEQ ID NO: 4692 - protein, 398 aa, Homo sapiens
MALLRRPTVSSDLENIDTGVNSKVKSHVTIRRTVLEEIGNRVTTRAAQVAKKAQNTKVPVQPTKTTNVNKQLKPTASVKPVQMEKLAPKGPSPTPEDVSMKEENLCQAFSDALLCKIEDIDNEDWENPQLCSDYVKDIYQYLRQLEVLQSINPHFLDGRDINGRMRAILVDWLVQVHSKFRLLQETLYMCVGIMDRFLQVQPVSRKKLQLVGITALLLASKYEEMFSPNIEDFVYITDNAYTSSQIREMETLILKELKFELGRPLPLHFLRRASKAGEVDVEQHTLAKYLMELTLIDYDMVHYHPSKVAAAASCLSQKVLGQGKWNLKQQYYTGYTENEVLEVMQHMAKNVVKVNENLTKFIAIKNKYASSKLLKISMIPQLNSKAVKDLASPLIGRS

SEQ ID NO: 4693 - protein, 1108 aa, Homo sapiens
MGSKGVYQYHWQSHNVKHSGVDDMVLLSKITENSIVENLKKRYMDDYIFTYIGSVLISVNPFKQMPYFGEKEIEMYQGAAQYENPPHIYALADNMYRNMIIDRENQCVIISGESGAGKTVAAKYIMSYISRVSGGGTKVQHVKDIILQSNPLLEAFGNAKTVRNNNSSRFGKYFEIQFSPGGEPDGGKISNFLLEKSRVVMRNPGERSFHIFYQLIEGASAEQKHSLGITSMDYYYYLSLSGSYKVDDIDDRREFQETLHAMNVIGIFAEEQTLVLQIVAGILHLGNISFKEVGNYAAVESEEFLAFPAYLLGINQDRLKEKLTSRQMDSKWGGKSESIHVTLNVEQACYTRDALAKALHARVFDFLVDSINKAMEKDHEEYNIGVLDIYGFEIFQKNGFEQFCINFVNEKLQQIFIELTLKAEQEEYVQEGIRWTPIEYFNNKIVCDLIENKVNPPGIMSILDDVCATMHAVGEGADQTLLQKLQMQIGSHEHFNSWNQGFIIHHYAGKVSYDMDGFCERNRDVLFMDLIELMQSSELPFIKSLFPENLQADKKGRPTTAGSKIKKQANDLVSTLMKCTPHYIRCIKPNETKKPRDWEESRVKHQVEYLGLKENIRVRRAGYAYRRIFQKFLQRYAILTKATWPSWQGEEKQGVLHLLQSVNMDSDQFQLGRSKVFIKAPESLFLLEEMRERKYDGYARVIQKSWRKFVARKKYVQMREEASDLLLNKKERRRNSINRNFIGDYIGMEEHPELQQFVGKREKIDFADTVTKYDRRFKGVKRDLLLTPKCLYLIGREKVKQGPDKGLVKEVLKRKIEIERILSVSLSTMQDDIFILHEQEYDSLLESVFKTEFLSLLAKRYEEKTQKQLPLKFSNTLELKLKKENWGPWSAGGSRQVQFHQGFGDLAVLKPSNKVLQVSIGPGLPKNSRPTRRNTTQNTGYSSGTQNANYPVRAAPPPPGYHQNGVIRNQYVPYPHAPGSQRSNQKSLYTSMARPPLPRQQSTSSDRVSQTPESLDFLKVPDQGAAGVRRQTTSRPPPAGGRPKPQPKPKPQVPQCKALYAYDAQDTDELSFNANDIIDIIKEDPSGWWTGRLRGKQGLFPNNYVTKI

SEQ ID NO: 4694 - protein, 96 aa, Homo sapiens
MSESSSKSSQPLASKQEKDGTEKRGRGRPRKQPPKEPSEVPTPKRPRGRPKGSKNKGAAKTRKTTTTPGRKPRGRPKKLEKEEEEGISQESSEEEQ

SEQ ID NO: 4695 - protein, 175 aa, Homo sapiens [sequence omitted]

SEQ ID NO: 4696 - protein, 314 aa, Homo sapiens
MGLEAARELECAALGTLLRDPREAERTLLLDCRPFLAFCRRHVRAARPVPWNALLRRRARGPPAAVLACLLPDRALRTRLVRGELARAVVLDEGSASVAELRPDSPAHVLLAALLHETRAGPTAVYFLRGGFDGFQGCCPDLCSEAPAPALPPTGDKTSRSDSRAPVYDQGGPVEILPYLFLGSCSHSSDLQGLQACGITAVLNVSASCPNHFEGLFRYKSIPVEDNQMVEISAWFQEAIGFIDWVKNSGGRVLVHCQAGISRSATICLAYLMQSRRVRLDEAFDFVKQRRGVISPNFSFMGQLLQFETQVLCH

SEQ ID NO: 4697 - protein, 126 aa, Homo sapiens
MPEPTKSAPAPKKGSKKAVTKAQKKDGKKRKRSRKESYSVYVYKVLKQVHPDTGISSKAMGIMNSFVNDIFERIAGEASRLAHYNKRSTITSREIQTAVRLLLPGELAKHAVSEGTKAVTKYTSSK

SEQ ID NO: 4698 - protein, 539 aa, Homo sapiens
MGHCRLCHGKFSSRSLRSISERAPGASMERPSAEERVLVRDFQRLLGVAVRQDPTLSPFVCKSCHAQFYQCHSLLKSFLQRVNASPAGRRKPCAKVGAQPPTGAEEGACLVDLITSSPQCLHGLVGWVHGHAASCGALPHLQRTLSSEYCGVIQVVWGCDQGHDYTMDTSSSCKAFLLDSALAVKWPWDKETAPRLPQHRGWNPGDAPQTSQGRGTGTPVGAETKTLPSTDVAQPPSDSDAVGPRSGFPPQPSLPLCRAPGQLGEKQLPSSTSDDRVKDEFSDLSEGDVLSEDENDKKQNAQSSDESFEPYPERKVSGKKSESKEAKKSEEPRIRKKPGPKPGWKKKLRCEREELPTIYKCPYQGCTAVYRGADGMKKHIKEHHEEVRERPCPHPGCNKVFMIDRYLQRHVKLIHTEVRNYICDECGQTFKQRKHLLVHQMRHSGAKPLQCEVCGFQCRQRASLKYHMTKHKAETELDFACDQCGRRFEKAHNLNVHMSMVHPLTQTQDKALPLEAEPPPGPPSPSVTTEGQAVKPEPT

SEQ ID NO: 4699 - protein, 277 aa, Homo sapiens
MSSCSRVALVTGANRGIGLAIARELCRQFSGDVVLTARDVARGQAAVQQLQAEGLSPRFHQLDIDDLQSIRALRDFLRKEYGGLNVLVNNAAVAFKSDDPMPFDIKAEMTLKTNFFATRNMCNELLPIMKPHGRVVNISSLQCLRAFENCSEDLQERFHSETLTEGDLVDLMKKFVEDTKNEVHEREGWPNSPYGVSKLGVTVLSRILARRLDEKRKADRILVNACCPGPVKTDMDGKDSIRTVEEGAETPVYLALLPPDATEPQGQLVHDKVVQNW

SEQ ID NO: 4700 - protein, 385 aa, Homo sapiens
MDSPSSVSSYSSYSLSSSFPTSPVNSDFGFPSDSEREDKGAHGPRPDTVGQRGGSRPSPGPIRCRHRSKVSGNQHTPSHPKQRGSASPMAGSGAKRSRDGELETSLNTQGCTTEGDLLFAQKCKELQGFIPPLTDLLNGLKMGRFERGLSSFQQSVAMDRIQRIVGVLQKPQMGERYLGTLLQVEGMLKTWFPQIAAQKSSLGGGKHQLTKHFPSHHSDSAASSPASPMEKMDQTQLGHLALKPKQPWHLTQWPAMNLTWIHTTPICNPPLSSPGTISFSHGPLGTGTGIGVILFLQHGVQPFTHSAPTTPVPPTTASPVIPGEPMKLSGEGPRCYSLPVTLPSDWSYTLSPPSLPTLARKMTIGHREQQRSHPPVAADAHLLNL

SEQ ID NO: 4701 - protein, 390 aa, Homo sapiens
MSVRVARVAWVRGLGASYRRGASSFPVPPPGAQGVAELLRDATGAEEEAPWAATERRMPGQCSVLLFPGQGSQVVGMGRGLLNYPRVRELYAAARRVLGYDLLELSLHGPQETLDRTVHCQPAIFVASLAAVEKLHHLQPSVIENCVAAAGFSVGEFAALVFAGAMEFAEGLYAVKIRAEAMQEASEAVPSGMLSVLGQPQSKFNFACLEAREHCKSLGIENPVCEVSNYLFPDCRVISGHQEALRFLQKNSSKFHFRRTRMLPVSGAFHTRLMEPAVEPLTQALKAVDIKKPLVSVYSNVHAHRYRHPGHIHKLLAQQLVSPVKWEQTMHAIYERKKGRGFPQTFEVGPGRQLGAILKSCNMQAWKSYSAVDVLQTLEHVDLDPQEPPR

SEQ ID NO: 4702 - protein, 264 aa, Homo sapiens
MEAFLGSRSGLWAGGPAPGQFYRIPSTPDSFMDPASALYRGPITRTQNPMVTGTSVLGVKFEGGVVIAADMLGSYGSLARFRNISRIMRVNNSTMLGASGDYADFQYLKQVLGQMVIDEELLGDGHSYSPRAIHSWLTRAMYSRRSKMNPLWNTMVIGGYADGESFLGYVDMLGVAYEAPSLATGYGAYLAQPLLREVLEKQPVLSQTEARDLVERCMRVLYYRDARSYNRFQIATVTEKGVEIEGPLSTETNWDIAHMISGFE

SEQ ID NO: 4703 - protein, 158 aa, Homo sapiens
MSHGKGTDMLPEIAAAVGFLSSLLRTRGCVSEQRLKVFSGALQEALTEHYKHHWFPEKPSKGSGYRCIRINHKMDPIISRVASQIGLSQPQLHQLLPSELTLWVDPYEVSYRIGEDGSICVLYEEAPLAASCGLLTCKNQVLLGRSSPSKNYVMAVSS

SEQ ID NO: 4704 - protein, 548 aa, Homo sapiens
MAHIPSGGAPAAGAAPMGPQYCVCKVELSVSGQNLLDRDVTSKSDPFCVLFTENNGRWIEYDRTETAINNLNPAFSKKFVLDYHFEEVQKLKFALFDQDKSSMRLDEHDFLGQFSCSLGTIVSSKKITRPLLLLNDKPAGKGLITIAAQELSDNRVITLSLAGRRLDKKDLFGKSDPFLEFYKPGDDGKWMLVHRTEVIKYTLDPVWKPFTVPLVSLCDGDMEKPIQVMCYDYDNDGGHDFIGEFQTSVSQMCEARDSVPLEFECINPKKQRKKKNYKNSGIIILRSCKINRDYSFLDYILGGCQLMFTVGIDFTASNGNPLDPSSLHYINPMGTNEYLSAIWAVGQIIQDYDSDKMFPALGFGAQLPPDWKVSHEFAINFNPTNPFCSGVDGIAQAYSACLPHIRFYGPTNFSPIVNHVARFAAQATQQRTATQYFILLIITDGVISDMEETRHAVVQASKLPMSIIIVGVGNADFAAMEFLDGDSRMLRSHTGEEAARDIVQFVPFREFRNAAKETLAKAVLAELPQQVVQYFKHKNLPPTNSEPA

SEQ ID NO: 4705 - protein, 423 aa, Homo sapiens
MQQEGGPVRSAPCRTGTLEGSRQGSPGHRKRASPKGSLSSAQPHSWMLTPSPLNSHCAHREPISSSPQPVANGPKQKKKSNWRSTTRLRIIRLRDRLEPRPLAILEDYADPFDVQETGEGSAGASGAPEKVPENDGYMEPYEAQKMMAEIRGSKETATQPLPLYDTPYEPEEDGATAEGEGAPWPRESRLPEDDERPPEEYDQPWEWKKERISKAFAVDIKVIKDLPWPPPVGQLDSSPSLPDGDRDISGPASPLPEPSLEDSSAQFEGPEKSCLSPGREEKGRLPPRLSAGNPKSAKPLSMEPSSPLGEWTDPALPLENQVWYHGAISRTDAENLLRLCKEASYLVRNSETSKNDFSLSLKSSQGFMHMKLSRTKEHKYVLGQNSPPFSSVPEIVHHYASRKLPIKGAEHMSLLYPVAIRTL

SEQ ID NO: 4706 - protein, 230 aa, Homo sapiens
MGKVRGLRARVHQAAVRPKGEAAPGPAPPAPEATPPPASAAGKDWAFINTNIFARTKIDPSALVQKLELDVRSVTSVRRGEAGSSARSVPSIRRGAEAKTVLPKKEKMKLRREQWLQKIEAIKLAEQKHREERRRRATVVVGDLHPLRDALPELLGLEAGSRRQARSRESNKPRPSELSRMSAAQRQQLLEEERTRFQELLASPAYRASPLVAIGQTLARQMQLEDGGQL

SEQ ID NO: 4707 - protein, 92 aa, Homo sapiens
MSELEKAMVALIDVFHQYSGREGDKHKLKKSELKELINNELSHFLEEIKEQEVVDKVMETLDNDGDGECDFQEFMAFVAMVTTACHEFFEHE

SEQ ID NO: 4708 - protein, 610 aa, Homo sapiens
MPSARGKSKSKAPITFGDLAIYFSQEEWEWLSPIQKDLYEDVMLENYRNLVSLGLSFRRPNVITLLEKGKAPWMVEPVRRRRAPDSGSKCETKKLPPNQCNKSGQSICQKLVSAQQKAPTRKSGCNKNSVLVKPKKGHSGKKPLKCNDCGKTFSRSFSLKLHQNIHTGEKPFECSNCRKAFRQISSILLHQRIHSGKKSHECNKCGESFNQRTTLILHMRIHDGKEILDCGKALSQCQSFNIHQKIHVVGNVCQCRKCGKAFNQMSSLLLHKKIHNGKKTHKYNKCGRGFKKKSVFVVHKRIHAGEKIPENAKALSQSLQQRSHHLENPFKCRKCGKLFNRISPLMLHQRIHTSEKPYKCDKCDKFFRRLSTLILHLRIHNGEKLYRCNKCEKVCNRHSSLIQHQKVHTKKKKLFECKECGKMFSGTANLKIHQNIHSEEKPFKCNKCSKVFGRQSFLIEHQRIHTGEKPYQCEECGKAFSHRISLTRHKRIHTEDRPYECDQCGKAFSQSAHLAQHERIHTGEKPYTCKTCGKAFSQRTSLILHERSHTGEKPYECNECGKAFSSGSDLIRHQRSHSSEKPYECSKCGKAYSRSSSLIRHQNTHSEEKA

SEQ ID NO: 4709 - protein, 634 aa, Homo sapiens
METPSQRRATRSGAQASSTPLSPTRITRLQEKEDLQELNDRLAVYIDRVRSLETENAGLRLRITESEEVVSREVSGIKAAYEAELGDARKTLDSVAKERARLQLELSKVREEFKELKARNTKKEGDLIAAQARLKDLEALLNSKEAALSTALSEKRTLEGELHDLRGQVAKLEAALGEAKKQLQDEMLRRVDAENRLQTMKEELDFQKNIYSEELRETKRRHETRLVEIDNGKQREFESRLADALQELRAQHEDQVEQYKKELEKTYSAKLDNARQSAERNSNLVGAAHEELQQSRIRIDSLSAQLSQLQKQLAAKEAKLRDLEDSLARERDTSRRLLAEKEREMAEMRARMQQQLDEYQELLDIKLALDMEIHAYRKLLEGEEERLRLSPSPTSQRSRGRASSHSSQTQGGGSVTKKRKLESTESRSSFSQHARTSGRVAVEEVDEEGKFVRLRNKSNEDQSMGNWQIKRQNGDDPLLTYRFPPKFTLKAGQVVTIWAAGAGATHSPPTDLVWKAQNTWGCGNSLRTALINSTGEGSHCSSSGDPAEYNLRSRTVLCGTCGQPADKASASGSGAQVGGPISSGSSASSVTVTRSYRSVGGSGGGSFGDNLVTRSYLLGNSSPRTQSPQNCSIM

SEQ ID NO: 4710 - protein, 223 aa, Homo sapiens
MEVQKEAQRIMTLSVWKMYHSRMQRGGLRLHRSLQLSLVMRSARELYLSAKVEALEPEVSLPAALPSDPRLHPPREAESTAETATPDGEHPFPEPMDTQEAPTAEETSACCAPRPAKVSRKRRSSSLSDGGDAGLVPSKKARLEEKEEEEGASSEVADRLQPPPAQAEGAFPNLARVLQRRFSGLLNCSPAAPPTAPPACEAKPACRPADSMLNVLVRAVVAF

SEQ ID NO: 4711 - protein, 671 aa, Homo sapiens
MAATFQLPGHQEMPLTFQDVAVYFSQAEGRQLGPQQRALYRDVMLENYGNVASLGFPVPKPELISQLEQGKELWVLNLLGAEEPDILKSCQKDSEVGTKKELSILNQKFSEEVKTPEFVSRRLLRDNAQAAEFREAWGREGKLKERVGNSAGQSLNKPNIHKRVLTEATVGRERSLGERTQECSAFDRNLNLDQNVVRLQRNKTGERVFKCDICSKTFKYNSDLSRHQRSHTGEKPYECGRCGRAFTHSSNLVLHHHIHTGNKPFKCDECGKTFGLNSHLRLHRRIHTGEKPFGCGECGKAFSRSSTLIQHRIIHTGEKPYKCNECGRGFSQSPQLTQHQRIHTGEKPHECSHCGKAFSRSSSLIQHERIHTGEKPHKCNQCGKAFSQSSSLFLHHRVHTGEKPYVCNECGRAFGFNSHLTEHVRIHTGEKPYVCNECGKAFRRSSTLVQHRRVHTGEKPYQCVECGKAFSQSSQLTLHQRVHTGEKPYDCGDCGKAFSRRSTLIQHQKVHSGETRKCRKHGPAFVHGSSLTADGQIPTGEKHGRAFNHGANLILRWTVHTGEKSFGCNEYGKAFSPTSRPTEDQIMHAGEKPYKCQECGNAFSGKSTLIQHQVTHTGQKPCHCSVYGKAFSQSSQLTPPQQTRVGEKPALNDGSKRYFIHIKKIFQERHF

SEQ ID NO: 4712 - protein, 491 aa, Homo sapiens
MASRCWRWWGWSAWPRTRLPPAGSTPSFCHHFSTQEKTPQICVVGSGPAGFYTAQHLLKHPQAHVDIYEKQPVPFGLVRFGVAPDHPEVKNVINTFTQTAHSGRCAFWGNVEVGRDVTVPELQEAYHAVVLSYGAEDHRALEIPGEELPGVCSARAFVGWYNGLPENQELEPDLSCDTAVILGQGNVALDVARILLTPPEHLERTDITKAALGVLRQSRVKTVWLVGRRGPLQVAFTIKELREMIQLPGARPILDPVDFLGLQDKIKEVPRPRKRLTELLLRTATEKPGPAEAARQASASRAWGLRFFRSPQQVLPSPDGRRAAGVRLAVTRLEGVDEATRAVPTGDMEDLPCGLVLSSIGYKSRPVDPSVPFDSKLGVIPNVEGRVMDVPGLYCSGWVKRGPTGVIATTMTDSFLTGQMLLQDLKAGLLPSGPRPGYAAIQALLSSRGVRPVSFSDWEKLDAEEVARGQGTGKPREKLVDPQEMLRLLGH

SEQ ID NO: 4713 - protein, 190 aa, Homo sapiens
MEKVPGEMEIERRERSEELSEAERKAVQAMWARLYANCEDVGVAILVRFFVNFPSAKQYFSQFKHMEDPLEMERSPQLRKHACRVMGALNTVVENLHDPDKVSSVLALVGKAHALKHKVEPVYFKILSGVILEVVAEEFASDFPPETQRAWAKLRGLIYSHVTAAYKEVGWVQQVPNATTPPATLPSSGP

SEQ ID NO: 4714 - protein, 790 aa, Homo sapiens
MPLPGGLWWLLCCRRGFTLLHRDYGDGELSGDGDEDEDEETFELRTPSPAGGGRGPLEVTLTQPVRSGPVSNRLQSWEETWSLIPEKGLPEDDPDIVVKGWLYREPRGGGARPWLPPRRAWFVLTRDSLDQFSSSGKGARRLGSLVLTSLCSVTGPERRRKETGLWSVTVSGRKHSVRLCSPRQAEAERWGVALREVIASKAPLETPTQLLLRDIQESCGDPEAVALIYLRNPILRHTSGALYAPLLPLPYGVSAPGPGYAPLREEAVRLFLALQALEGARRPGPLMQGVLQTCRDLPALRDELFLQLAKQTSGPAGPPGLPATQDPAALRYWQLLTCMSCTFRPGGAVRGHLLGHLERTEQALPDSELAEYARFIRKALGRTRGRELVPSLAEISALSQRQELLCTVHCPGAGACAVAIDSHTTAGEVARELVGRLGLARSRNAFALYEQRGAQERALAGGTLVADVLTSLAAEEAGLEDSPDSGWRLCLRLHGPLHPEGLSPDGHELPFLFEQAHALLLRGRPPPPDDTLRALAALRLQSLQRDFSPRVPLPRLDRLLPPPAPPREDPPRPTPRPPPSAALLAGALWSPGLAKRRAERARRGGAGRTAGSIAREGGGGAGTAAAVLGGWKRLRGMGRAEAMAAYLALAAQCPGFGAARYDVLELSTEPGRGAPQKLCLGLGAKAMSLSRPGETEPIHSVSYGHVAACQLMGPHTLALRVGESQLLLQSPQVEEIMQLVNAYLANPSPERPCSSSSPPCQDLPDTSPPSQRPGLDEPQGQSGCLGQLQD

SEQ ID NO: 4715 - protein, 486 aa, Homo sapiens
MTCGSYCGGRAFSCISACGPRPGRCCITAAPYRGISCYRGLTGGFGSHSVCGGFRAGSCGRSFGYRSGGVCGPSPPCITTVSVNESLLTPLNLEIDPNAQCVKQEEKEQIKSLNSRFAAFIDKVRFLEQQNKLLETKLQFYQNRECCQSNLEPLFEGYIETLRREAECVEADSGRLASELNHVQEVLEGYKKKYEEEVSLRATAENEFVALKKDVDCAYLRKSDLEANVEALIQEIDFLRRLYEEEIRVLQSHISDTSVVVKLDNSRDLNMDCIIAEIKAQYDDIVTRSRAEAESWYRSKCEEMKATVIRHGETLRRTKEEINELNRMIQRLTAEVENAKCQNSKLEAAVAQSEQQGEAALSDARCKLAELEGALQKAKQDMACLIREYQEVMNSKLGLDIEIATYRRLLEGEEQRLCEGVGSVNVCVSSSRGGVVCGDLCASTTAPVVSTRVSSVPSNSNVVVGTTNACAPSARVGVCGGSCKRC

SEQ ID NO: 4716 - protein, 218 aa, Homo sapiens
MERQGVDVPHVKCKDQEPQPLGESKEHPRWEENCEEEAGGGPASASCQLTVLEGKSGLYFSSLDSSIDILQKRAQELIENINKSRQKDHALMTNFRNSLKTKVSDLTEKLEERIYQIYNDHNKIIQEKLQEFTQKMAKISHLETELKQVCHSVETVYKDLCLQPEQSLRLRWGPDHSRGKSPPRPGNSQPPDVFVSSVAETTSQATASEVQTNRDGEC

SEQ ID NO: 4717 - protein, 476 aa, Homo sapiens
MDAVAFEDVAVNFTQEEWALLGPSQKNLYRYVMQETIRNLDCIRMIWEEQNTEDQYKNPRRNLRCHMVERFSESKDSSQCGETFSLIRDSIVNNSICPGEDPCQSAECEEVIMGHLSLNSHIRVDSGHKPHEYQEYGEKPHTHKQRGKAFSYHHSFQSRGRPHTGKKRYECKECGKTFSSRRNLRRHMVVQGGNRPYKCKLCGKAFFWPSLLRMHERTHTGEKPYECKQCSKAFPFYSSYRRHERMHTGEKPYECKQCSKALPDSSSYIRHERTHTGEKPYTCKQCGKAFSVSSSLRRHETTHSAEKPYECKQCGKTFHHLGSFQIHMKRHTGDRPHKCKICGKGFDRPSLVRYHERIHTGEKPYECKQCGKTLSHSSSFRRHMIMHTGGGPHKCKICGKAFVYPSVCQRHEKSHSGEKPYECKQCGKALSHSSSFRRHMVMHTGDGPNKCKVCGKAFVYPSVCQRHEKTHWRETI

SEQ ID NO: 4718 - protein, 406 aa, Homo sapiens
MSASQDSRSRDNGPDGMEPEGVIESNWNEIVDSFDDMNLSESLLRGIYAYGFEKPSAIQQRAILPCIKGYDVIAQAQSGTGKTATFAISILQQIELDLKATQALVLAPTRELAQQIQKVVMALGDYMGASCHACIGGTNVRAEVQKLQMEAPHIIVGTPGRVFDMLNRRYLSPKYIKMFVLDEADEMLSRGFKDQIYDIFQKLNSNTQVVLLSATMPSDVLEVTKKFMRDPIRILVKKEELTLEGIRQFYINVEREEWKLDTLCDLYETLTITQAVIFINTRRKVDWLTEKMHARDFTVSAMHGDMDQKERDVIMREFRSGSSRVLITTDLLARGIDVQQVSLVINYDLPTNRENYIHRIGRGGRFGRKGVAINMVTEEDKRTLRDIETFYNTSIEEMPLNVADLI

SEQ ID NO: 4719 - protein, 59 aa, Homo sapiens
MGSGGVVHCRCAKCFCYPTKRRIRRRPRNLTILSLPEDVLFHILKWLSVEDILAVRAGC

SEQ ID NO: 4720 - protein, 246 aa, Homo sapiens
MVKIYRHESLLGFFKGMSFPIASIAVVNSVLFGVYSNTLLVLTATSHQERRAQPPSYMHIFLAGCTGGFLQAYCLAPFDLIKVRLQNQTEPRAQPGSPPPRYQGPVHCAASIFREEGPRGLFRGAWALTLRDTPTVGIYFITYEGLCRQYTPEGQNPSSATVLVAGGFAGIASWVAATPLDMIKSRMQMDGLRRRVYQGMLDCMVSSIRQEGLGVFFRGVTINSARAFPVNAVTFLSYEYLLRWWG

SEQ ID NO: 4721 - protein, 159 aa, Homo sapiens [sequence omitted]

SEQ ID NO: 4722 - protein, 460 aa, Homo sapiens
MAGYLSESDFVMVEEGFSTRDLLKELTLGASQATTDEVAAFFVADLGAIVRKHFCFLKCLPRVRPFYAVKCNSSPGVLKVLAQLGLGFSCANKAEMELVQHIGIPASKIICANPCKQIAQIKYAAKHGIQLLSFDNEMELAKVVKSHPSAKMVLCIATDDSHSLSCLSLKFGVSLKSCRHLLENAKKHHVEVVGVSFHIGSGCPDPQAYAQSIADARLVFEMGTELGHKMHVLDLGGGFPGTEGAKVRFEEIASVINSALDLYFPEGCGVDIFAELGRYYVTSAFTVAVSIIAKKEVLLDQPGREEENGSTSKTIVYHLDEGVYGIFNSVLFDNICPTPILQKKPSTEQPLYSSSLWGPAVDGCDCVAEGLWLPQLHVGDWLVFDNMGAYTVGMGSPFWGTQACHITYAMSRVAWEALRRQLMAAEQEDDVEGVCKPLSCGWEITDTLCVGPVFTPASIM

SEQ ID NO: 4723 - protein, 1892 aa, Homo sapiens
MANRRVGRGCWEVSPTERRPPAGLRGPAAEEEASSPPVLSLSHFCRSPFLCFGDVLLGASRTLSLALDNPNEEVAEVKISHFPAADLGFSVSQRCFVLQPKEKIVISVNWTPLKEGRVREIMTFLVNDVLKHQAILLGNAEEQKKKKRSLWDTIKKKKISASTSHNRRVSNIQNVNKTFSVSQKVDRVRSPLQACENLAMNEGGPPTENNSLILEENKIPISPISPAFNECHGATCLPLSVRRSTTYSSLHASENRELLNVHSANVSKVSFNEKAVTETSFNSVNVNGQRGENSKLSLTPNCSSTLNITQSQIHFLSPDSFVNNSHGANNELELVTCLSSDMFMKDNSQPVHLESTIAHEIYQKILSPDSFIKDNYGLNQDLESESVNPILSPNQFLKDNMAYMCTSQQTCKVPLSNENSQVPQSPEDWRKSEVSPRIPECQGSKSPKAIFEELVEMKSNYYSFIKQNNPKFSAVQDISSHSHNKQPKRRPILSATVTKRKATCTRENQTEINKPKAKRCLNSAVGEHEKVINNQKEKEDFHSYLPIIDPILSKSKSYKNEVTPSSTTASVARKRKSDGSMEDANVRVAITEHTEVREIKRIHFSPSEPKTSAVKKTKNVTTPISKRISNREKLNLKKKTDLSIFRTPISKTNKRTKPIIAVAQSSLTFIKPLKTDIPRHPMPFAAKNMFYDERWKEKQEQGFTWWLNFILTPDDFTVKTNISEVNAATLLLGIENQHKISVPRAPTKEEMSLRAYTARCRLNRLRRAACRLFTSEKMVKAIKKLEIEIEARRLIVRKDRHLWKDVGERQKVLNWLLSYNPLWLRIGLETTYGELISLEDNSDVTGLAMFILNRLLWNPDIAAEYRHPTVPHLYRDGHEEALSKFTLKKLLLLVCFLDYAKISRLIDHDPCLFCKDAEFKASKEILLAFSRDFLSGEGDLSRHLGLLGLPVNHVQTPFDEFDFAVTNLAVDLQCGVRLVRTMELLTQNWDLSKKLRIPAISRLQKMHNVDIVLQVLKSRGIELSDEHGNTILSKDIVDRHREKTLRLLWKIAFAFQVDISLNLDQLKEEIAFLKHTKSIKKTISLLSCHSDDLINKKKGKRDSGSFEQYSENIKLLMDWVNAVCAFYNKKVENFTVSFSDGRVLCYLIHHYHPCYVPFDAICQRTTQTVECTQTGSVVLNSSSESDDSSLDMSLKAFDHENTSELYKELLENEKKNFHLVRSAVRDLGGIPAMINHSDMSNTIPDEKVVITYLSFLCARLLDLRKEIRAARLIQTTWRKYKLKTDLKRHQEREKAARIIQLAVINFLAKQRLRKRVNAALVIQKYWRRVLAQRKLLMLKKEKLEKVQNKAASLIQAMWRRYRAKKYLCKVKAACKIQAWYRCWRAHKEYLAILKAVKIIQGCFYTKLERTRFLNVRASAIIIQRKWRAILPAKIAHEHFLMIKRHRAACLIQAHYRGYKGRQVFLRQKSAALIIQKYIRAREAGKHERIKYIEFKKSTVILQALVRGWLVRKRFLEQRAKIRLLHFTAAAYYHLNAVRIQRAYKLYLAVKNANKQVNSVICIQRWFRARLQEKRFIQKYHSIKKIEHEGQECLSQRNRAASVIQKAVRHFLLRKKQEKFTSGIIKIQALWRGYSWRKKNDCTKIKAIRLSLQVVNREIREENKLYKRTALALHYLLTYKHLSAILEALKHLEVVTRLSPLCCENMAQSGAISKIFVLIRSCNRSIPCMEVIRYAVQVLLNVSKYEKTTSAVYDVENCIDILLELLQIYREKPGNKVADKGGSIFTKTCCLLAILLKTTNRASDVRSRSKVVDRIYSLYKLTAHKHKMNTERILYKQKKNSSISIPFIPETPVRTRIVSRLKPDWVLRRDNMEEITNPLQAIQMVMDTLGIPY

SEQ ID NO: 4724 - protein, 206 aa, Homo sapiens
MNFQQRLQSLWTLARPFCPPLLATASQMQMVVLPCLGFTLLLWSQVSGAQGQEFHFGPCQVKGVVPQKLWEAFWAVKDTMQAQDNITSARLLQQEVLQNVSDAESCYLVHTLLEFYLKTVFKNYHNRTVEVRTLKSFSTLANNFVLIVSQLQPSQENEMFSIRDSAHRRFLLFRRAFKQLDVEAALTKALGEVDILLTWMQKFYKL

SEQ ID NO: 4725 - protein, 707 aa, Homo sapiens
MSRGYSENNNFLNNNNQMVLDMILYPLIGIPQTINWETIARLVPGLTPKECAKRFDELKSSGSSPVDNQYNSLMAAGESPVETLATYIKSSLLDIHGEFQETPVGHDAVSKTGRHSIASTRNCSSESENCTTHNGGEMTEESEGPNMVIHVCDEAKNLKEDFTCPRDLLISEMKYFAEYLSMDAQRWEEVDISVHCDVHIFNWLIKYIKRNTKENKDCEMPTLEPGNVISILISSEFLKMDSLVEQCIQYCHKNMNAIVATPCNMNCINANLLTRIADLFSHNEVDDLKDKKDKFKSKLFCKKIERLFDPEYLNPDSRSNAATLYRCCLCKKLLTKETERRIPCIPGKINVDRRGNIVYIHIRDKTWDVHEYLNSLFEELKSWRDVYWRLWGTINWLTCSRCYQAFLCIEFSHCQYHSETVVYPTAASSLNTVGTGIYPCCNQKVLRFDPTQLTKGCKVRDHMVTLRDQGEGGDLPSCPTARMLDDLHKYRDVIVVPFSKDTVSDVGVGLCDEKGIECDVLLEPNTPWGPKTGELNAFLSLKNWTLQLKQQSLFSEEEEYTTGSEVTEDEVGDEEEVSKKQRKKEKPKKFTRQPKKQVSSPCAQRKEKALEKSASRDVSPFVMSMQKNKWDATRSLRFNQDAQREDDQRRMTEITGHLIKMRLGDLDRVKSKEAKETDKLRPRDGTVSKSNRKSGLSSVLLMTVLLC

SEQ ID NO: 4726 - protein, 547 aa, Homo sapiens
MPGGGPQGAPAAAGGGGVSHRAGSRDCLPPAACFRRRRLARRPGYMRSSTGPGIGFLSPAVGTLFRFPGGVSGEESHHSESRARQCGLDSRGLLVRSPVSKSAAAPTVTSVRGTSAHFGIQLRGGTRLPDRLSWPCGPGSAGWQQEFAAMDSSETLDASWEAACSDGARRVRAAGSLPSAELSSNSCSPGCGPEVPPTPPGSHSAFTSSFSFIRLSLGSAGERGEAEGCPPSREAESHCQSPQEMGAKAASLDGPHEDPRCLSRPFSLLATRVSADLAQAARNSSRPERDMHSLPDMDPGSSSSLDPSLAGCGGDGSSGSGDAHSWDTLLRKWEPVLRDCLLRNRRQMEVISLRLKLQKLQEDAVENDDYDKAETLQQRLEDLEQEKISLHFQLPSRQPALSSFLGHLAAQVQAALRRGATQQASGDDTHTPLRMEPRLLEPTAQDSLHVSITRRDWLLQEKQQLQKEIEALQARMFVLEAKDQQLRREIEEQEQQLQWQGCDLTPLVGQLSLGQLQEVSKALQDTLASAGQIPFHAEPPETIRRCV

SEQ ID NO: 4727 - protein, 184 aa, Homo sapiens
MWVFGYGSLIWKVDFPYQDKLVGYITNYSRRFWQGSTDHRGVPGKPGRVVTLVEDPAGCVWGVAYRLPVGKEEEVKAYLDFREKGGYRTTTVIFYPKDPTTKPFSVLLYIGTCDNPDYLGPAPLEDIAEQIFNAAGPSGRNTEYLFELANSIRNLVPEEADEHLFALEKLVKERLEGKQNLNCI

SEQ ID NO: 4728 - protein, 686 aa, Homo sapiens
MQLGEQLLVSSVNLPGAHFYPLESARGGSGGSAGHLPSAAPSPQKLDLDKASKKFSGSLSCEAVSGEPAAASAGAPAAMLSDTDAGDAFASAAAVAKPGPPDGRKGSPCGEEELPSAAAAAAAAAAAAAATARYSMDSLSSERYYLQSPGPQGSELAAPCSLFPYQAAAGAPHGPVYPAPNGARYPYGSMLPPGGFPAAVCPPGRAQFGPGAGAGSGAGGSSGGGGGPGTYQYSQGAPLYGPYPGAAAAGSCGGLGGLGVPGSGFRAHVYLCNRPLWLKFHRHQTEMIITKQGRRMFPFLSFNINGLNPTAHYNVFVEVVLADPNHWRFQGGKWVTCGKADNNMQGNKMYVHPESPNTGSHWMRQEISFGKLKLTNNKGANNNNTQMIVLQSLHKYQPRLHIVEVTEDGVEDLNEPSKTQTFTFSETQFIAVTAYQNTDITQLKIDHNPFAKGFRDNYDSSHQIVPGGRYGVQSFFPEPFVNTLPQARYYNGERTVPQTNGLLSPQQSEEVANPPQRWLVTPVQQPGTNKLDISSYESEYTSSTLLPYGIKSLPLQTSHALGYYPDPTFPAMAGWGGRGSYQRKMAAGLPWTSRTSPTVFSEDQLSKEKVKEEIGSSWIETPPSIKSLDSNDSGVYTSACKRRRLSPSNSSNENSPSIKCEDINAEEYSKDTSKGMGGYYAFYTTP

SEQ ID NO: 4729 - protein, 905 aa, Homo sapiens [sequence omitted]

SEQ ID NO: 4730 - protein, 174 aa, Homo sapiens
MACLGFQRHKAQLNLATRTWPCTLLFFLLFIPVFCKAMHVAQPAVVLASSRGIASFVCEYASPGKATEVRVTVLRQADSQVTEVCAATYMMGNELTFLDDSICTGTSSGNQVNLTIQGLRAMDTGLYICKVELMYPPPYYLGIGNGTQIYVIAKEKKPSYNRGLCENAPNRARM

SEQ ID NO: 4731 - protein, 212 aa, Homo sapiens
MLCPWRTANLGLLLILTIFLVAVNTSWPVKMATNAVLCCPPIALRNLIIITWEIILRGQPSCTKAYKKETNETKETNCTDERITWVSRPDQNSDLQIRTVAITHDGYYRCIMVTPDGNFHRGYHLQVLVTPEVTLFQNRNRTAVCKAVAGKPAAHISWIPEGDCATKQEYWSNGTVTVKSTCHWEVHNVSTVTCHVSHLTGNKSLYIELLPG

SEQ ID NO: 4732 - protein, 593 aa, Homo sapiens
MTAEDSTAAMSSDSAAGSSAKVPEGVAGAPNEAALLALMERTGYSMVQENGQRKYGGPPPGWEGPHPQRGCEVFVGKIPRDVYEDELVPVFEAVGRIYELRLMMDFDGKNRGYAFVMYCHKHEAKRAVRELNNYEIRPGRLLGVCCSVDNCRLFIGGIPKMKKREEILEEIAKVTEGVLDVIVYASAADKMKNRGFAFVEYESHRAAAMARRKLMPGRIQLWGHQIAVDWAEPEIDVDEDVMETVKILYVRNLMIETTEDTIKKSFGQFNPGCVERVKKIRDYAFVHFTSREDAVHAMNNLNGTELEGSCLEVTLAKPVDKEQYSRYQKAARGGGAAEAAQQPSYVYSCDPYTLAYYGYPYNALIGPNRDYFVKAGSIRGRGRGAAGNRAPGPRGSYLGGYSAGRGIYSRYHEGKGKQQEKGYELVPNLEIPTVNPVAIKPGTVAIPAIGAQYSMFPAAPAPKMIEDGKIHTVEHMISPIAVQPDPASAAAAAAAAAAAAAAVIPTVSTPPPFQGRPITPVYTVAPNVQRIPTAGIYGASYVPFAAPATATIATLQKNAAAAAAMYGGYAGYIPQAFPAAAIQVPIPDVYQTY

SEQ ID NO: 4733 - protein, 1119 aa, Homo sapiens
MSTAAFHISSLLEKMTSSDKDFRFMATSDLMSELQKDSIQLDEDSERKVVKMLLRLLEDKNGEVQNLAVKWLGVPLGAFHASLLHCLLPQLSSPRLAVRKRAVGALGHLAAACSTDLFVELADHLLDRLPGPRVPTSPTAIRTLIQCLGSVGRQAGHRLGAHLDRLVPLVEDFCNLDDDELRESCLQAFEAFLRKCPKEMGPHVPNVTSLCLQYIKHDPNYNYDSDEDEEQMETEDSEFSEQESEDEYSDDDDMSWKVRRAAAKCIAALISSRPDLLPDFHCTLAPVLIRRFKEREENVKADVFTAYIVLLRQTQPPKGWLEAMEEPTQTGSNLHMLRGQVPLVVKALQRQLKDRSVRARQGCFSLLTELAGVLPGSLAEHMPVLVSGIIFSLADRSSSSTIRMDALAFLQGLLGTEPAEAFHPHLPILLPPVMACVADSFYKIAAEALVVLQELVRALWPLHRPRMLDPEPYVGEMSAVTLARLRATDLDQEVKERAISCMGHLVGHLGDRLGDDLEPTLLLLLDRLRNEITRLPAIKALTLVAVSPLQLDLQPILAEALHILASFLRKNQRALRLATLAALDALAQSQGLSLPPSAVQAVLAELPALVNESDMHVAQLAVDFLATVTQAQPASLVEVSGPVLSELLRLLRSPLLPAGVLAAAEGFLQALVGTRPPCVDYAKLISLLTAPVYEQAVDGGPGLHKQVFHSLARCVAALSAACPQEAASTASRLVCDARSPHSSTGVKVLAFLSLAEVGQVAGPGHQRELKAVLLEALGSPSEDVRAAASYALGRVGAGSLPDFLPFLLEQIEAEPRRQYLLLHSLREALGAAQPDSLKPYAEDIWALLFQRCEGAEEGTRGVVAECIGKLVLVNPSFLLPRLRKQLAAGRPHTRSTVITAVKFLISDQPHPIDPLLKSFIAVHNKPSLVRDLLDDILPLLYQETKIRRDLIREVEMGPFKHTVDDGLDVRKAAFECMYSLLESCLGQLDICEFLNHVEDGLKDHYDIRMLTFIMVARLATLCPAPVLQRVDRLIEPLRATCTAKVKAGSVKQEFEKQDELKRSAMRAVAALLTIPEVGKSPIMADFSSQIRSNPELAALFESIQKDSASAPSTDSMELS

SEQ ID NO: 4734 - protein, 765 aa, Homo sapiens
MAGFKRGYDGKIAGLYDLDKTLGRGHFAVVKLARHVFTGEKVAVKVIDKTKLDTLATGHLFQEVRCMKLVQHPNIVRLYEVIDTQTKLYLILELGDGGDMFDYIMKHEEGLNEDLAKKYFAQIVHAISYCHKLHVVHRDLKPENVVFFEKQGLVKLTDFGFSNKFQPGKKLTTSCGSLAYSAPEILLGDEYDAPAVDIWSLGVILFMLVCGQPPFQEANDSETLTMIMDCKYTVPSHVSKECKDLITRMLQRDPKRRASLEEIENHPWLQGVDPSPATKYNIPLVSYKNLSEEEHNSIIQRMVLGDIADRDAIVEALETNRYNHITATYFLLAERILREKQEKEIQTRSASPSNIKAQFRQSWPTKIDVPQDLEDDLTATPLSHATVPQSPARAADSVLNGHRSKGLCDSAKKDDLPELAGPALSTVPPASLKPTASGRKCLFRVEEDEEEDEEDKKPMSLSTQVVLRRKPSVTNRLTSRKSAPVLNQIFEEGESDDEFDMDENLPPKLSRLKMNIASPGTVHKRYHRRKSQGRGSSCSSSETSDDDSESRRRLDKDSGFTYSWHRRDSSEGPPGSEGDGGGQSKPSNASGGVDKASPSENNAGGGSPSSGSGGNPTNTSGTTRRCAGPSNSMQLASRSAGELVESLKLMSLCLGSQLHGSTKYIIDPQNGLSFSSVKVQEKSTWKMCISSTGNAGQVPAVGGIKFFSDHMADTTTELERIKSKNLKNNVLQLPLCEKTISVNIQRNPKEGLLCASSPASCCHVI

SEQ ID NO: 4735 - protein, 299 aa, Homo sapiens
MAELGLNEHHQNEVINYMRFARSKRGLRLKTVDSCFQDLKESRLVEDTFTIDEVSEVLNGLQAVVHSEVESELINTAYTNVLLLRQLFAQAEKWYLKLQTDISELENRELLEQVAEFEKAEITSSNKKPILDVTKPKLAPLNEGGTAELLNKEILRLQEENEKLKSRLKTIEIQATNALDEKSKLEKALQDLQLDQGNQKDFIKAQDLSNLENTVAALKSEFQKTLNDKTENQKSLEENLATAKHDLLRVQEQLHMAEKELEKKFQQTAAYRNMKEILTKKNDQIKDLRKRLAQYEPED

SEQ ID NO: 4736 - protein, 51 aa, Homo sapiens
MSSHKTFTIKRFLAKKQKQNRPIPQWIQMKPGSKIRYNSKRRHWRRTKLGL

SEQ ID NO: 4737 - protein, 457 aa, Homo sapiens
MAFASIYKLDNLVAILDINRLGQSDPAPLQHQMDIYQKRCEAFGWHAIIVDGHSVEELCKAFGQAKHQPTAIIAKTFKGRGITGVEDKESWHGKPLPKNMAEQIIQEIYSQIQSKKKILATPPQEDAPSVDIANIRMPSLPSYKVGDKIATRKAYGQALAKLGHASDRIIALDGDTKNSTFSEIFKKEHPDRFIECYIAEQNMVSIAVGCATRNRTVPFCSTFAAFFTRAFDQIRMAAISESNINLCGSHCGVSIGEDGPSQMALEDLAMFRSVPTSTVFYPSDGVATEKAVELAANTKGICFIRTSRPENAIIYNNNEDFQVGQAKVVLKSKDDQVTVIGAGVTLHEALAAAELLKKEKINIRVLDPFTIKPLDRKLILDSARATKGRILTVEDHYYEGGIGEAVSSAVVGEPGITVTHLAVNRVPRSGKPAELLKMFGIDRDAIAQAVRGLITKA

SEQ ID NO: 4738 - protein, 128 aa, Homo sapiens
MAGGKAGKDSGKAKTKAVSRSQRAGLQFPVGRIHRHLKSRTTSHGRVGATAAVYSAAILEYLTAEVLELAGNASKDLKVKRITPRHLQLAIRGDEELDSLIKATIAGGGVIPHIHKSLIGKKGQQKTV

SEQ ID NO: 4739 - protein, 407 aa, Homo sapiens
MAAPCAEDPSLERHFKGHRDAVTCVDFSINTKQLASGSMDSCLMVWHMKPQSRAYRFTGHKDAVTCVNFSPSGHLLASGSRDKTVRIWVPNVKGESTVFRAHTATVRSVHFCSDGQSFVTASDDKTVKVWATHRQKFLFSLSQHINWVRCAKFSPDGRLIVSASDDKTVKLWDKSSRECVHSYCEHGGFVTYVDFHPSGTCIAAAGMDNTVKVWDVRTHRLLQHYQLHSAAVNGLSFHPSGNYLITASSDSTLKILDLMEGRLLYTLHGHQGPATTVAFSRTGEYFASGGSDEQVMVWKSNFDIVDHGEVTKVPRPPATLASSMGNLPEVDFPVPPGRGRSVESVQSQPQEPVSVPQTLTSTLEHIVGQLDVLTQTVSILEQRLTLTEDKLKQCLENQQLIMQRATP

SEQ ID NO: 4740 - protein, 209 aa, Homo sapiens
MGKGDPNKPRGKMSSYAFFVQTCREEHKKKHPDSSVNFAEFSKKCSERWKTMSAKEKSKFEDMAKSDKARYDREMKNYVPPKGDKKGKKKDPNAPKRPPSAFFLFCSEHRPKIKSEHPGLSIGDTAKKLGEMWSEQSAKDKQPYEQKAAKLKEKYEKDIAAYRAKGKSEAGKKGPGRPTGSKKKNEPEDEEEEEEEEDEDEEEEDEDEE

SEQ ID NO: 4741 - protein, 143 aa, Homo sapiens [sequence omitted]

SEQ ID NO: 4742 - protein, 189 aa, Homo sapiens
MPQNEYIELHRKRYGYRLDYHEKKRKKESREAHERSKKAKKMIGLKAKLYHKQRHAEKIQMKKTIKMHEKRNTKQKNDEKTPQGAVPAYLLDREGQSRAKVLSNMIKQKRKEKAGKWEVPLPKVRAQGETEVLKVIRTGKRKKKAWKRMVTKVCFVGDGFTRKPPKYERFIRPMENMPRLPTILKMMDV

SEQ ID NO: 4743 - protein, 294 aa, Homo sapiens
MEDSMDMDMSPLRPQNYLFGCELKADKDYHFKVDNDENEHQLSLRTVSLGAGAKDELHIVEAEAMNYEGSPIKVTLATLKMSVQPTVSLGGFEITPPVVLRLKCGSGPVHISGQHLVAVEEDAESEDEEEEDVKLLSISGKRSAPGGGSKVPQKKVKLAADEDDDDDDEEDDDEDDDDDDFDDEEAEEKAPVKKSIRDTPAKNAQKSNQNGKDSKPSSTPRSKGQESFKKQEKTPKTPKGPSSVEDIKAKMQASIEKGGSLPKVEAKFINYVKNCFRMTDQEAIQDLWQWRKSL

SEQ ID NO: 4744 - protein, 639 aa, Homo sapiens
MPQPSVSGMDPPFGDAFRSHTFSEQTLMSTDLLANSSDPDFMYELDREMNYQQNPRDNFLSLEDCKDIENLESFTDVLDNEGALTSNWEQWDTYCEDLTKYTKLTSCDIWGTKEVDYLGLDDFSSPYQDEEVISKTPTLAQLNSEDSQSVSDSLYYPDSLFSVKQNPLPSSFPGKKITSRAAAPVCSSKTLQAEVPLSDCVQKASKPTSSTQIMVKTNMYHNEKVNFHVECKDYVKKAKVKINPVQQSRPLLSQIHTDAAKENTCYCGAVAKRQEKKGMEPLQGHATPALPFKETQELLLSPLPQEGPGSLAAGESSSLSASTSVSDSSQKKEEHNYSLFVSDNLGEQPTKCSPEEDEEDEEDVDDEDHDEGFGSEHELSENEEEEEEEEDYEDDKDDDISDTFSEPGYENDSVEDLKEVTSISSRKRGKRRYFWEYSEQLTPSQQERMLRPSEWNRDTLPSNMYQKNGLHHGKYAVKKSRRTDVEDLTPNPKKLLQIGNELRKLNKVISDLTPVSELPLTARPRSRKEKNKLASRACRLKKKAQYEANKVKLWGLNTEYDNLLFVINSIKQEIVNRVQNPRDERGPNMGQKLEILIKDTLGLPVAGQTSEFVNQVLEKTAEGNPTGGLVGLRIPTSKV

SEQ ID NO: 4745 - protein, 210 aa, Homo sapiens
MALGLKCFRMVHPTFRNYLAASIRPVSEVTLKTVHERQHGHRQYMAYSAVPVRHFATKKAKGSLDKIAVVTADGKLALNQISQISMKSPQLILVNMASFPECTAAAIKAIRESGMNLNPEVEGTLIRVPIPQVTREHREMLVKLAKQNTNKAKDSLRKVRTNSMNKLKKSKDTVSEDTIRLIEKQISQMADDTVAELDRHLAVKTKELLG

SEQ ID NO: 4746 - protein, 166 aa, Homo sapiens
MAMSQESLTFKDVFVDFTLEEWQQLDSAQKNLYRDVMLENYSHLVSVGYLVAKPDVIFRLGPGEESWMADGGTPVRTCAEVWQVDEQIDHYKESQDKLPWQAAFIGKETLKDESGQESRTCRKSIYLSTEFDSVRQRLPKYYSWEKAFKTSFKLSWSKWKLCKKER

SEQ ID NO: 4747 - protein, 35 aa, Homo sapiens
MDPIRSFCGKLRSLASTLDCETARLQRALDGEESG

SEQ ID NO: 4748 - protein, 108 aa, Homo sapiens
MSNKVPVVQHPHHVHPLTPLITYSNEHFTPGNPPPHLPADVDPKTGIPRPPHPPDISPYYPLSPGTVGQIPHPLGWLVPQQGQPVYPITTGGFRHPYPTALTVNASMS

SEQ ID NO: 4749 - protein, 439 aa, Homo sapiens
MNLLPNIESPVTRQEKMATVWDEAEQDGIGEEVLKMSTEEIIQRTRLLDSEIKIMKSEVLRVTHELQAMKDKIKENSEKIKVNKTLPYLVSNVIELLDVDPNDQEEDGANIDLDSQRKGKCAVIKTSTRQTYFLPVIGLVDAEKLKPGDLVGVNKDSYLILETLPTEYDSRVKAMEVDERPTEQYSDIGGLDKQIQELVEAIVLPMNHKEKFENLGIQPPKGVLMYGPPGTGKTLLARACAAQTKATFLKLAGPQLVQMFIGDGAKLVRDAFALAKEKAPSIIFIDELDAIGTKRFDSEKAGDREVQRTMLELLNQLDGFQPNTQVKVIAATNRVDILDPALLRSGRLDRKIEFPMPNEEARARIMQIHSRKMNVSPDVNYEELARCTDDFNGAQCKAVCVEAGMIALRRGATELTHEDYMEGILEVQAKKKANLQYYA

SEQ ID NO: 4750 - protein, 519 aa, Homo sapiens
MPFNGEKQCVGEDQPSDSDSSRFSESMASLSDYECSRQSFASDSSSKSSSPASTSPPRVVTFDEVMATARNLSNLTLAHEIAVNENFQLKQEALPEKSLAGRVKHIVHQAFWDVLDSELNADPPEFEHAIKLFEEIREILLSFLTPGGNRLRNQICEVLDTDLIRQQAEHSAVDIQGLANYVISTMGKLCAPVRDNDIRELKATGNIVEVLRQIFHVLDLMQMDMANFTIMSLRPHLQRQLVEYERTKFQEILEETPSALDQTTEWIKESVNEELFSLSESALTPGAENTSKPSLSPTLVLNNSYLKLLQWDYQKKELPETLMTDGARLQELTEKLNQLKIIACLSLITNNMVGAITGGLPELASRLTRISAVLLEGMNKETFNLKEVLNSIGIQTCVEVNKTLMERGLPTLNAEIQANLIGQFSSIEEEDNPIWSLIDKRIKLYMRRLLCLPSPQKCMPPMPGGLAVIQQELEALGSQYANIVNLNKQVYGPFYANILRKLLFNEEAMGKVDASPPTN

SEQ ID NO: 4751 - protein, 190 aa, Homo sapiens
HVWSPGSRSVAGTGSGSVSHAIIRTIAPTGHLHTVEFHQQRAEKAREEFQEHRVGRWVTVRTQDVCRSGFGVSHVADAVFLDIPSPWEAVGHAWDALKVEGGRFCSFSPCIEQVQRTCQALAARGFSELSTLEVLPQVYNVRTVSLPPPDLGTGTDGPAGSDTSPFRSGTPMKEAVGHTGYLTFATKTPG

SEQ ID NO: 4752 - protein, 956 aa, Homo sapiens
MAAAVGVRGRYELPPCSGPGWLLSLSALLSVAARGAFATTHWVVTEDGKIQQQVDSPMNLKHPHDLVILMRQEATVNYLKELEKQLVAQKIHIEENEDRDTGLEQRHNKEDPDCIKAKVPLGDLDLYDGTYITLESKDISPEDYIDTESPVPPDPEQPDCTKILELPYSIHAFQHLRGVQERVNLSAPLLPKEDPIFTYLSKRLGRSIDDIGHLIHEGLQKNTSSWVLYNMASFYWRIKNEPYQVVECAMRALHFSSRHNKDIALVNLANVLHRAHFSADAAVVVHAALDDSDFFTSYYTLGNIYAMLGEYNHSVLCYDHALQARPGFEQAIKRKHAVLCQQKLEQKLEAQHRSLQRTLNELKEYQKQHDHYLRQQEILEKHKLIQEEQILRNIIHETQMAKEAQLGNHQICRLVNQQHSLHCQWDQPVRYHRGDIFENVDYVQFGEDSSTSSMMSVNFDVQSNQSDINDSVKSSPVAHSILWIWGRDSDAYRDKQHILWPKRADCTESYPRVPVGGELPTYFLPPENKGLRIHELSSDDYSTEEEAQTPDCSITDFRKSHTLSYLVKELEVRMDLKAKMPDDHARKILLSRINNYTIPEEEIGSFLFHAINKPNAPIWLILNEAGLYWRAVGNSTFAIACLQRALNLAPLQYQDVPLVNLANLLIHYGLHLDATKLLLQALAINSSEPLTFLSLGNAYLALKNISGALEAFRQALKLTTKCPECENSLKLIRCMQFYPFLYNITSSVCSGNCHEKTLDNSHDKQKYFDNSQSLDAAEEEPSERGTEEDPVFSVENSGRDSDALRLESTVVEESNGSDEMENSDETKMSEEILALVDEFQQAWPLEGFGGALEMKGRRLDLQGIRVLKKGPQDGVARSSCYGDCRSEDDEATEWITFQVKRVKKPKGDHKKTPGKKVETGQIENGHRYQANLEITGPKVASPGPQGLLDWKTRKVP

SEQ ID NO: 4753 - protein, 104 aa, Homo sapiens
MAGKAHRLSAEERDQLLPNLRAVGWNELEGRDAIFKQFHFKDFNRAFGFMTRVALQAEKLDHHPEWFNVYNKVHITLSTHECAGLSERDINLASFIEQVAVSMT

SEQ ID NO: 4754 - protein, 535 aa, Homo sapiens
MASLSLAPVNIFKAGADEERAETARLTSFIGAIAIGDLVKSTLGPKGMDKILLSSGRDASLMVTNDGATILKNIGVDNPAAKVLVDMSRVQDDEVGDGTTSVTVLAAELLREAESLIAKKIHPQTIIAGWREATKAAREALLSSAVDHGSDEVKFRQDLMNIAGTTLSSKLLTHHKDHFTKLAVEAVLRLKGSGNLEAIHIIKKLGGSLADSYLDEGFLLDKKIGVNQPKRIENAKILIANTGMDTDKIKIFGSRVRVDSTAKVAEIEHAEKEKMKEKVERILKHGINCFINRQLIYNYPEQLFGAAGVMAIEHADFAGVERLALVTGGEIASTFDHPELVKLGSCKLIEEVMIGEDKLIHFSGVALGEACTIVLRGATQQILDEAERSLHDALCVLAQTVKDSRTVYGGGCSEMLMAHAVTQLANRTPGKEAVAMESYAKALRMLPTIIADNAGYDSADLVAQLRAAHSEGNTTAGLDMREGTIGDMAILGITESFQVKRQVLLSAAEAAEVILRVDNIIKAAPRKRVPDHHPC

SEQ ID NO: 4755 - protein, 282 aa, Homo sapiens
MGGAVSAGEDNDELIDNLKEAQYIRTELVEQAFRAIDRADYYLEEFKENAYKDLAWKHGNIHLSAPCIYSEVMEALDLQPGLSFLNLGSGTGYLSSMVGLILGPFGVNHGVELHSDVIEYAKQKLDFFIRTSDSFDKFDFCEPSFVTGNCLEISPDCSQYDRVYCGAGVQKEHEEYMKNLLKVGGILVMPLEEKLTKITRTGPSAWETKKILAVSFAPLIQPCHSESGKSRLVQLRSPSFVQGWSVVVLSQLTAASTFQAEAILPSQSPTWLTLQVLATMPN

SEQ ID NO: 4756 - protein, 204 aa, Homo sapiens
MDETVAEFIKRTILKIPMNELTTILKAWDFLSENQLQTVNFRQRKESVVQHLIHLCEEKRASISDAALLDIIYMQFHQHQKVWEVFQMSKGPGEDVDLFDMKQFKNSFKKILQRALKNVTVSFRETEENAVWIRIAWGTQYTKPNQYKPTYVVYYSQTPYAFTSSSMLRRNTPLLGQELEATGKIYLRQEEIILDITEMKKACN

SEQ ID NO: 4757 - protein, 203 aa, Homo sapiens
MARPRPREYKAGDLVFAKMKGYPHWPARIDELPEGAVKPPANKYPIFFFGTHETAFLGPKDLFPYKEYKDKFGKSNKRKGFNEGLWEIENNPGVKFTGYQAIQQQSSSETEGEGGNTADASSEEEGDRVEEDGKGKRKNEKAGSKRKKSYTSKKSSKQSRKSPGDEDDKDCKEEENKSSSEGGDAGNDTRNTTSDLQKTSEGT

SEQ ID NO: 4758 - protein, 272 aa, Homo sapiens
MRRSRSSAAAKLRGQKRSGASAAPAASAAAALAPSATRTRRSASQAGSKSQAVEKPPSEKPRLRRSSPRAQEEGPGEPPPPELALLPPPPPPPPTPATPTSSASNLDLGEQRERWETFQKRQKLTSEGAAKLLLDTFEYQGLVKHTGGCHCGAVRFEVWASADLHIFDCNCSICKKKQNRHFIVPASRFKLLKGAEHITTYTFNTHKAQHTFCKRCGVQSFYTPRSNPGGFGIAPHCLDEGTVRSMVTEEFNGSDWEKAMKEHKTIKNMSKE

SEQ ID NO: 4759 - protein, 891 aa, Homo sapiens
MSLRIDVDTNFPECVVDAGKVTLGTQQRQEMDPRLREKQNEIILRAVCALLNSGGGIIKAEIENKGYNYERHGVGLDVPPIFRSHLDKMQKENHFLIFVKSWNTEAGVPLATLCSNLYHRERTSTDVMDSQEALAFLKCRTQTPTNINVSNSLGPQAAQGSVQYEGNINVSAAALFDRKRLQYLEKLNLPESTHVEFVMFSTDVSHCVKDRLPKCVSAFANTEGGYVFFGVHDETCQVIGCEKEKIDLTSLRASIDGCIKKLPVHHFCTQRPEIKYVLNFLEVHDKGALRGYVCAIKVEKFCCAVFAKVPSSWQVKDNRVRQLPTREWTAWMMEADPDLSRCPEMVLQLSLSSATPRSKPVCIHKNSECLKEQQKRYFPVFSDRVVYTPESLYKELFSQHKGLRDLINTEMRPFSQGILIFSQSWAVDLGLQEKQGVICDALLISQNNTPILYTIFSKWDAGCKGYSMIVAYSLKQKLVNKGGYTGRLCITPLVCVLNSDRKAQSVYSSYLQIYPESYNFMTPQHMEALLQSLVIVLLGFKSFLSEELGSEVLNLLTNKQYELLSKNLRKTRELFVHGLPGSGKTILALRIMEKIRNVFHCEPANILYICENQPLKKLVSFSKKNICQPVTRKTFMKNNFEHIQHIIIDDAQNFRTEDGDWYGKAKFITQTARDGPGVLWIFLDYFQTYHLSCSGLPPPSDQYPREEINRVVRNAGPIANYLQQVMQEARQNPPPNLPPGSLVMLYEPKWAQGVPGNLEIIEDLNLEEILIYVANKCRFLLRNGYSPKDIAVLFTKASEVEKYKDRLLTAMRKRKLSQLHEESDLLLQIGDASDVLTDHIVLDSVCRFSGLERNIVFGINPGVAPPAGAYNLLLCLASRAKRHLYILKASV

SEQ ID NO: 4760 - protein, 111 aa, Homo sapiens
MVRTKADSVPGTYRKVVAARAPRKVLGSSTSATNSTSVSSRKAENKYAGGNPVCVRPTPKWQKGIGEFFRLSPKDSEKENQIPEEAGSSGLGKAKRKACPLQPDHTNDEKE

SEQ ID NO: 4761 - protein, 603 aa, Homo sapiens
MSAAVTAGKLARAPADPGKAGVPGVAAPGAPAAAPPAKEIPEVLVDPRSRRRYVRGRFLGKGGFAKCFEISDADTKEVFAGKIVPKSLLLKPHQREKMSMEISIHRSLAHQHVVGFHGFFEDNDFVFVVLELCRRRSLLELHKRRKALTEPEARYYLRQIVLGCQYLHRNRVIHRDLKLGNLFLNEDLEVKIGDFGLATKVEYDGERKKTLCGTPNYIAPEVLSKKGHSFEVDVWSIGCIMYTLLVGKPPFETSCLKETYLRIKKNEYSIPKHINPVAASLIQKMLQTDPTARPTINELLNDEFFTSGYIPARLPITCLTIPPRFSIAPSSLDPSNRKPLTVLNKGLENPLPERPREKEEPVVRETGEVVDCHLSDMLQQLHSVNASKPSERGLVRQEEAEDPACIPIFWVSKWVDYSDKYGLGYQLCDNSVGVLFNDSTRLILYNDGDSLQYIERDGTESYLTVSSHPNSLMKKITLLKYFRNYMSEHLLKAGANITPREGDELARLPYLRTWFRTRSAIILHLSNGSVQINFFQDHTKLILCPLMAAVTYIDEKRDFRTYRLSLLEEYGCCKELASRLRYARTMVDKLLSSRSASNRLKAS

SEQ ID NO: 4762 - protein, 293 aa, Homo sapiens
MNPFWSMSTSSVRKRSEGEEKTLTGDVKTSPPRTAPKKQLPSIPKNALPITKPTSPAPAAQSTNGTHASYGPFYLEYSLLAEFTLVVKQKLPGVYVQPSYRSALMWFGVIFIRHGLYQDGVFKFTVYIPDNYPDGDCPRLVFDIPVFHPLVDPTSGELDVKRAFAKWRRNHNHIWQVLMYARRVFYKIDTASPLNPEAAVLYEKDIQLFKSKVVDSVKVCTARLFDQPKIEDPYAISFSPWNPSVHDEAREKMLTQKKKPEEQHNKSVHVAGLSWVKPGSVQPFSKEEKTVAT

SEQ ID NO: 4763 - protein, 747 aa, Homo sapiens
MSQVKSSYSYDAPSDFINFSSLDDEGDTQNIDSWFEEKANLENKLLGKNGTGGLFQGKTPLRKANLQQAIVTPLKPVDNTYYKEAEKENLVEQSIPSNACSSLEVEAAISRKTPAQPQRRSLRLSAQKDLEQKEKHHVKMKAKRCATPVIIDEILPSKKMKVSNNKKKPEEEGSAHQDTAEKNASSPEKAKGRHTVPCMPPAKQKFLKSTEEQELEKSMKMQQEVVEMRKKNEEFKKLALAGIGQPVKKSVSQVTKSVDFHFRTDERIKQHPKNQEEYKEVNFTSELRKHPSSPARVTKGCTIVKPFNLSQGKKRTFDETVSTYVPLAQQVEDFHKRTPNRYHLRSKKDDINLLPSKSSVTKICRDPQTPVLQTKHRARAVTCKSTAELEAEELEKLQQYKFKARELDPRILEGGPILPKKPPVKPPTEPIGFDLEIEKRIQERESKKKTEDEHFEFHSRPCPTKILEDVVGVPEKKVLPITVPKSPAFALKNRIRMPTKEDEEEDEPVVIKAQPVPHYGVPFKPQIPEARTVEICPFSFDSRDKERQLQKEKKIKELQKGEVPKFKALPLPHFDTINLPEKKVKNVTQIEPFCLETDRRGALKAQTWKHQLEEELRQQKEAACFKARPNTVISQEPFVPKKEKKSVAEGLSGSLVQEPFQLATEKRAKERQELEKRMAEVEAQKAQQLEEARLQEEEQKKEELARLRRELVHKANPIRKYQGLEIKSSDQPLTVPVSPKFSTRFHC

SEQ ID NO: 4764 - protein, 615 aa, Homo sapiens
MAVYVGMLRLGRLCAGSSGVLGARAALSRSWQEARLQGVRFLSSREVDRMVSTPIGGLSYVQGCTKKHLNSKTVGQCLETTAQRVPEREALVVLHEDVRLTFAQLKEEVDKAASGLLSIGLCKGDRLGMWGPNSYAWVLMQLATAQAGIILVSVNPAYQAMELEYVLKKVGCKALVFPKQFKTQQYYNVLKQICPEVENAQPGALKSQRLPDLTTVISVDAPLPGTLLLDEVVAAGSTRQHLDQLQYNQQFLSCHDPINIQFTSGTTGSPKGATLSHYNIVNNSNILGERLKLHEKTPEQLRMILPNPLYHCLGSVAGTMMCLMYGATLILASPIFNGKKALEAISRERGTFLYGTPTMFVDILNQPDFSSYDISTMCGGVIAGSPAPPELIRAIINKINMKDLVVAYGTTENSPVTFAHFPEDTVEQKAESVGRIMPHTEARIMNMEAGTLAKLNTPGELCIRGYCVMLGYWGEPQKTEEAVDQDKWYWTGDVATMNEQGFCKIVGRSKDMIIRGGENIYPAELEDFFHTHPKVQEVQVVGVKDDRMGEEICACIRLKDGEETTVEEIKAFCKGKISHFKIPKYIVFVTNYPLTISGKIQKFKLREQMERHLNL

SEQ ID NO: 4765 - protein, 743 aa, Homo sapiens
MGLLTFRDVAVEFSLEEWEHLEPAQKNLYQDVMLENYRNLVSLGLVVSKPDLITFLEQRKEPWNVKSEETVAIQPDVFSHYNKDLLTEHCTEASFQKVISRRHGSCDLENLHLRKRWKREECEGHNGCYDEKTFKYDQFDESSVESLFHQQILSSCAKSYNFDQYRKVFTHSSLLNQQEEIDIWGKHHIYDKTSVLFRQVSTLNSYRNVFIGEKNYHCNNSEKTLNQSSSPKNHQENYFLEKQYKCKEFEEVFLQSMHGQEKQEQSYKCNKCVEVCTQSLKHIQHQTIHIRENSYSYNKYDKDLSQSSNLRKQIIHNEEKPYKCEKCGDSLNHSLHLTQHQIIPTEEKPCKWKECGKVFNLNCSLYLTKQQQIDTGENLYKCKACSKSFTRSSNLIVHQRIHTGEKPYKCKECGKAFRCSSYLTKHKRIHTGEKPYKCKECGKAFNRSSCLTQHQTTHTGEKLYKCKVCSKSYARSSNLIMHQRVHTGEKPYKCKECGKVFSRSSCLTQHRKIHTGENLYKCKVCAKPFTCFSNLIVHERIHTGEKPYKCKECGKAFPYSSHLIRHHRIHTGEKPYKCKACSKSFSDSSGLTVHRRTHTGEKPYTCKECGKAFSYSSDVIQHRRIHTGQRPYKCEECGKAFNYRSYLTTHQRSHTGERPYKCEECGKAFNSRSYLTTHRRRHTGERPYKCDECGKAFSYRSYLTTHRRSHSGERPYKCEECGKAFNSRSYLIAHQRSHTREKL

SEQ ID NO: 4766 - protein, 70 aa, Homo sapiens
MSNNMAKIAEARKTVEQLKLEVNIDRMKVSQAAAELLAFCETHAKDDPLVTPVPAAENPFRDKRLFCVLL

SEQ ID NO: 4767 - protein, 82 aa, Homo sapiens
AQGLQRELDGERERREKPGGLKDGIPTRLPRLVPPWLKVMWPPSTDASSSLRRSWTGLRNDWPRPCRSWRRQKKLQMRVREE

SEQ ID NO: 4768 - protein, 400 aa, Homo sapiens
MASEKPLAAVTCTAPVNIAVIKYWGKRDEELVLPINSSLSVTLHQDQLKTTTTAVISKDFTEDRIWLNGREEDVGQPRLQACLREIRCLARKRRNSRDGDPLPSSLSCKVHVASVNNFPTAAGLASSAAGYACLAYTLARVYGVESDLSEVARRGSGSACRSLYGGFVEWQMGEQADGKDSIARQVAPESHWPELRVLILVVSAEKKLTGSTVGMRASVETSPLLRFRAESVVPARMAEMARCIRERDFPSFAQLTMKDSNQFHATCLDTFPPISYLNAISWRIIHLVHRFNAHHGDTKVAYTFDAGPNAVIFTLDDTVAEFVAAVWHGFPPGSNGDTFLKGLQVRPAPLSAELQAALAMEPTPGGVKYIIVTQVGPGPQILDDPCAHLLGPDGLPKPAA

SEQ ID NO: 4769 - protein, 546 aa, Homo sapiens
MEQRRVTDFFARRRPGPPRIAPPKLACRTPSPARPALRAPASATSGSRKRARPPAAPGRDQARPPARRRLRLSVDEVSSPSTPEAPDIPACPSPGQKIKKSTPAAGQPPHLTSAQDQDTISELASCLQRARELGARVRALKASAQDAGESCTPEAEGRPEEPCGEKAPAYQRFHALAQPGLPGLVLPYKYQVLAEMFRSMDTIVGMLHNRSETPTFAKVQRGVQDMMRRRFEECNVGQIKTVYPASYRFRQERSVPTFKDGTRRSDYQLTIEPLLEQEADGAAPQLTASRLLQRRQIFSQKLVEHVKEHHKAFLASLSPAMVVPEDQLTRWHPRFNVDEVPDIEPAALPQPPATEKLTTAQEVLARARNLISPRMEKALSQLALRSAAPSSPGSPRPALPATPPATPPAASPSALKGVSQDLLERIRAKEAQKQLAQMTRCPEQEQRLQRLERLPELARVLRSVFVSERKPALSMEVACARMVGSCCTIMSPGEMEKHLLLLSELLPDWLSLHRIRTDTYVKLDKAADLAHITARLAHQTRAEEGL

SEQ ID NO: 4770 - protein, 449 aa, Homo sapiens
MRECISIHVGQAGVQIGNACWELYCLEHGIQPDGQMPSDKTIGGGDDSFNTFFSETGAGKHVPRAVFVDLEPTVIDEVRTGTYRQLFHPEQLITGKEDAANNYARGHYTIGKEIIDLVLDRIRKLADQCTGLQGFLVFHSFGGGTGSGFTSLLMERLSVDYGKKSKLEFSIYPAPQVSTAVVEPYNSILTTHTTLEHSDCAFMVDNEAIYDICRRNLDIERPTYTNLNRLISQIVSSITASLRFDGALNVDLTEFQTNLVPYPRIHFPLATYAPVISAEKAYHEQLTVAEITNACFEPANQMVKCDPRHGKYMACCLLYRGDVVPKDVNAAIATIKTKRTIQFVDWCPTGFKVGINYQPPTVVPGGDLAKVQRAVCMLSNTTAVAEAWARLDHKFDLMYAKRAFVHWYVGEGMEEGEFSEAREDMAALEKDYEEVGADSADGEDEGEEY

SEQ ID NO: 4771 - protein, 804 aa, Homo sapiens
MAAHRPGPLKQQNKAHKGGRHRGRGSAQRDGKGRLALKTLSKKVRKELSRVDQRHRASQLRKQKKEAVLAEKRQLGGKDGPPHQVLVVPLHSRISLPEAMQLLQDRDTGTVHLNELGNTQNFMLLCPRLKHRWFFTSARPGDLHVVLDMAKVADTILFLLDPLEGWDSTGDYCLSCLFAQGLPTYTLAVQGISGLPLKKQIDTRKKLSKAVEKRFPHDKLLLLDTQQEAGMLLRQLANQKQQHLAFRDRRAYLFAHAVDFVPSEENNLVGTLKISGYVRGQTLNVNRLLHIVGYGDFQMKQIDAPGDPFPLNPRGIKPQKDPDMAMEICATDAVDDMEEGLKVLMKADPGRQESLQAEVIPDPMEGEQTWPTEEELSEAKDFLKESSKVVKKVPKGTSSYQAEWILDGGSQSGGEGDEYEYDDMEHEDFMEEESQDESSEEEEEYETMTIGESVHDDLYDKKVDEEAEAKMLEKYKQERLEEMFPDEVDTPRDVAARIRFQKYRGLKSFRTSPWDPKENLPQDYARIFQFQNFTNTRKSIFKEVEEKEVEGAEVGWYVTLHVSEVPVSVVECFRQGTPLIAFSLLPHEQKMSVLNMVVRRDPGNTEPVKAKEELIFHCGFRRFRASPLFSQHTAADKHKLQRFLTADMALVATVYAPITFPPASVLLFKQKSNGMHSLIATGHLMSVDPDRMVIKRVVLSGHPFKIFTKMAVVRYMFFNREDVLWFKPVELRTKWGRRGHIKEPLGTHGHMKCSFDGKLKSQDTVLMNLYKRVFPKWTYDPYVPEPVPWLKSEISSTVPQGGME

SEQ ID NO: 4772 - protein, 468 aa, Homo sapiens
MRGSPGDAERRQRWGRLFEELDSNKDGRVDVHELRQGLARLGGGNPDPGAQQGISSEGDADPDGGLDLEEFSRYLQEREQRLLLMFHSLDRNQDGHIDVSEIQQSFRALGISISLEQAEKILHSMDRDGTMTIDWQEWRDHFLLHSLENVEDVLYFWKHSTVLDIGECLTVPDEFSKQEKLTGMWWKQLVAGAVAGAVSRTGTAPLDRLKVFMQVHASKTNRLNILGGLRSMVLEGGIRSLWRGNGINVLKIAPESAIKFMAYEQIKRAILGQQETLHVQERFVAGSLAGATAQTIIYPMEVLKTRLTLRRTGQYKGLLDCARRILEREGPRAFYRGYLPNVLGIIPYAGIDLAVYETLKNWWLQQYSHDSADPGILVLLACGTISSTCGQIASYPLALVRTRMQAQASIEGGPQLSMLGLLRHILSQEGMRGLYRGIAPNFMKVIPAVSISYVVYENMKQALGVTSR

SEQ ID NO: 4773 - protein, 165 aa, Homo sapiens
MGAPTLPPAWQPFLKDHRISTFKNWPFLEGCACTPERMAEAGFIHCPTENEPDLAQCFFCFKELEGWEPDDDPIGPGTVAYACNTSTLGGRGGRITREEHKKHSSGCAFLSVKKQFEELTLGEFLKLDRERAKNKIAKETNNKKKEFEETAEKVRRAIEQLAAMD

SEQ ID NO: 4774 - protein, 234 aa, Homo sapiens
MSCINLPTVLPGSPSKTRGQIQVILGPMFSGKSTELMRRVRRFQIAQYKCLVIKYAKDTRYSSSFCTHDRNTMEALPACLLRDVAQEALGVAVIGIDEGQFFPDIVEFCEAMANAGKTVIVAALDGTFQRKPFGAILNLVPLAESVVKLTAVCMECFREAAYTKRLGTEKEVEVIGGADKYHSVCRLCYFKKASGQPAGPDNKENCPVPGKPGEAVAARKLFAPQQILQCSPAN

SEQ ID NO: 4775 - protein, 277 aa, Homo sapiens
MPSVSKAAAAALSGSPPQTEKPTHYRYLKEFRTEQCPLFSQHKCAQHRPFTCFHWHFLNQRRRRPLRRRDGTFNYSPDVYCSKYNEATGVCPDGDECPYLHRTTGDTERKYHLRYYKTGTCIHETDARGHCVKNGLHCAFAHGPLDLRPPVCDVRELQAQEALQNGQLGGGEGVPDLQPGVLASQAMIEKILSEDPRWQDANFVLGSYKTEQCPKPPRLCRQGYACPHYHNSRDRRRNPRRFQYSWQLGRRVLRLSPRANNPRVALPRVHTGPSSTA

SEQ ID NO: 4776 - protein, 550 aa, Homo sapiens
MWKASAGHAVSIAQDDAGADDWETDPDFVNDVSEKEQRWGAKTVQGSGHQEHINIHKLRENVFQEHQTLKEKELETGPKASHGYGGKFGVEQDRMDKSAVGHEYQSKLSKHCSQVDSVRGFGGKFGVQMDRVDQSAVGFEYQGKTEKHASQKDYSSGFGGKYGVQADRVDKSAVGFDYQGKTEKHESQRDYSKGFGGKYGIDKDKVDKSAVGFEYQGKTEKHESQKDYVKGFGGKFGVQTDRQDKCALGWDHQEKLQLHESQKDYKTGFGGKFGVQSERQDSAAVGFDYKEKLAKHESQQDYSKGFGGKYGVQKDRMDKNASTFEDVTQVSSAYQKTVPVEAVTSKTSNIRANFENLAKEKEQEDRRKAEAERAQRMAKERQEQEEARRKLEEQARAKTQTPPVSPAPQPTEERLPSSPVYEDAASFKAELSYRGPVSGTEPEPVYSMEAADYREASSQQGLAYATEAVYESAEAPGHYPAEDSTYDEYENDLGITAVALYDYQAAGDDEISFDPDDIITNIEMIDDGWWRGVCKGRYGLFPANYVELRQ

SEQ ID NO: 4777 - protein, 1303 aa, Homo sapiens
MPGPRGAAGGLAPEMRGAGAAGLLALLLLLLLLLLGLGGRVEGGPAGERGAGGGGALARERFKVVFAPVICKRTCLKGQCRDSCQQGSNMTLIGENGHSTDTLTGSGFRVVVCPLPCMNGGQCSSRNQCLCPPDFTGRFCQVPAGGAGGGTGGSGPGLSRTGALSTGALPPLAPEGDSVASKHAIYAVQVIADPPGPGEGPPAQHAAFLVPLGPGQISAEVQAPPPVVNVRVHHPPEASVQVHRIESSNAESAAPSQHLLPHPKPSHPRPPTQKPLGRCFQDTLPKQPCGSNPLPGLTKQEDCCGSIGTAWGQSKCHKCPQLQYTGVQKPGPVRGEVGADCPQGYKRLNSTHCQDINECAMPGVCRHGDCLNNPGSYRCVCPPGHSLGPSRTQCIADKPEEKSLCFRLVSPEHQCQHPLTTRLTRQLCCCSVGKAWGARCQRCPTDGTAAFKEICPAGKGYHILTSHQTLTIQGESDFSLFLHPDGPPKPQQLPESPSQAPPPEDTEEERGVTTDSPVSEERSVQQSHPTATTTPARPYPELISRPSPPTMRWFLPDLPPSRSAVEIAPTQVTETDECRLNQNICGHGECVPGPPDYSCHCNPGYRSHPQHRYCVDVNECEAEPCGPGRGICMNTGGSYNCHCNRGYRLHVGAGGRSCVDLNECAKPHLCGDGGFCINFPGHYKCNCYPGYRLKASRPPVCEDIDECRDPSSCPDGKCENKPGSFKCIACQPGYRSQGGGACRDVNECAEGSPCSPGWCENLPGSFRCTCAQGYAPAPDGRSCLDVDECEAGDVCDNGICSNTPGSFQCQCLSGYHLSRDRSHCEDIDECDFPAACIGGDCINTNGSYRCLCPQGHRLVGGRKCQDIDECSQDPSLCLPHGACKNLQGSYVCVCDEGFTPTQDQHGCEEVEQPHHKKECYLNFDDTVFCDSVLATNVTQQECCCSLGAGWGDHCEIYPCPVYSSAEFHSLCPDGKGYTQDNNIVNYGIPAHRDIDECMLFGSEICKEGKCVNTQPGYECYCKQGFYYDGNLLECVDVDECLDESNCRNGVCENTRGGYRCACTPPAEYSPAQRQCLSPEEMDVDECQDPAACRPGRCVNLPGSYRCECRPPWVPGPSGRDCQLPESPAERAPERRDVCWSQRGEDGMCAGPLAGPALTFDDCCCRQGRGWGAQCRPCPPRGAGSHCPTSQSESNSFWDTSPLLLGKPPRDEDSSEEDSDECRCVSGRCVPRPGGAVCECPGGFQLDASRARCVDIDECRELNQRGLLCKSERCVNTSGSFRCVCKAGFARSRPHGACVPQRRR

SEQ ID NO: 4778 - protein, 322 aa, Homo sapiens
MEGISNFKTPSKLSEKKKSVLCSTPTINIPASPFMQKLGFGTGVNVYLMKRSPRGLSHSPWAVKKINPICNDHYRSVYQKRLMDEAKILKSLHHPNIVGYRAFTEANDGSLCLAMEYGGEKSLNDLIEERYKASQDPFPAAIILKVALNMARGLKYLHQEKKLLHGDIKSSNVVIKGDFETIKICDVGVSLPLDENMTVTDPEACYIGTEPWKPKEAVEENGVITDKADIFAFGLTLWEMMTLSIPHINLSNDDDDEDKTFDESDFDDEAYYAALGTRPPINMEELDESYQKVIELFSVCTNEDPKDRPSAAHIVEALETDV

SEQ ID NO: 4779 - protein, 174 aa, Homo sapiens
MAPISSLSLQTIGAAFVAKVMSVGDRTVTLGIWDTAGSERYEAMSRIYYRGAKAAIVCYDLTDSSSFERAKFWVKELRSLEEGCQIYLCGTKSDLLEEDRRRRRVDFHDVQDYADNIKAQLFETSSKTGQSVDELFQKVAEDYVSVAAFQVMTEDKGVDLGQKPNPYFYSCCHH

SEQ ID NO: 4780 - protein, 520 aa, Homo sapiens
MRVESGSAQERGILLESLSTLLEKTTASHEGRAPGNRELTDLLPPEVCSLLNPAAIYANNEISLRDVEVYGFDYDYTLAQYADALHPEIFSTARDILIEHYKYPEGIRKYDYNPSFAIRGLHYDIQKSLLMKIDAFHYVQLGTAYRGLQPVPDEEVIELYGGTQHIPLYQMSGFYGKGPSIKQFMDIFSLPEMALLSCVVDYFLGHSLEFDQAHLYKDVTDAIRDVHVKGLMYQWIEQDMEKYILRGDETFAVLSRLVAHGKQLFLITNSPFSFVDKGMRHMVGPDWRQLFDVVIVQADKPSFFTDRRKPFRKLDEKGSLQWDRITRLEKGKIYRQGNLFDFLRLTEWRGPRVLYFGDHLYSDLADLMLRHGWRTGAIIPELEREIRIINTEQYMHSLTWQQALTGLLERMQTYQDAESRQVLAAWMKERQELRCITKALFNAQFGSIFRTFHNPTYFSRRLVRFSDLYMASLSCLLNYRVDFTFYPRRTPLQHEAPLWMDQLCTGCMKTPFLGDMAHIR

SEQ ID NO: 4781 - protein, 1213 aa, Homo sapiens
MKQPIMADGPRCKRRKQANPRRKNVVNYDNVVDTGSETDEEDKLHIAEDDGIANPLDQETSPASVPNHESSPHVSQALLPREEEEDEIREGGVEHPWHNNEILQASVDGPEMKEDYDTMGPEATIQTAINNGTVKNANCTSDFEEYFAKRKLEERDGHAVSIEEYLQRSDTAIIYPEAPEELSRLGTPEANGQEENDLPPGTPDAFAQLLTCPYCDRGYKRLTSLKEHIKYRHEKNEENFSCPLCSYTFAYRTQLERHMVTHKPGTDQHQMLTQGAGNRKFKCTECGKAFKYKHHLKEHLRIHSGEKPYECPNCKKRFSHSGSYSSHISSKKCIGLISVNGRMRNNIKTGSSPNSVSSSPTNSAITQLRNKLENGKPLSMSEQTGLLKIKTEPLDFNDYKVLMATHGFSGTSPFMNGGLGATSPLGVHPSAQSPMQHLGVGMEAPLLGFPTMNSNLSEVQKVLQIVDNTVSRQKMDCKAEEISKLKGYHMKDPCSQPEEQGVTSPNIPPVGLPVVSHNGATKSIIDYTLEKVNEAKACLQSLTTDSRRQISNIKKEKLRTLIDLVTDDKMIENHNISTPFSCQFCKESFPGPIPLHQHERYLCKMNEEIKAVLQPHENIVPNKAGVFVDNKALLLSSVLSEKGMTSPINPYKDHMSVLKAYYAMNMEPNSDELLKISIAVGLPQEFVKEWFEQRKVYQYSNSRSPSLERSSKPLAPNSNPPTKDSLLPRSPVKPMDSITSPSIAELHNSVTNCDPPLRLTKPSHFTNIKPVEKLDHSRSNTPSPLNLSSTSSKNSHSSSYTPNSFSSEELQAEPLDLSLPKQMKEPKSIIATKNKTKASSISLDHNSVSSSSENSDEPLNLTFIKKEFSNSNNLDNKSTNPVFSMNPFSAKPLYTALPPQSAFPPATFMPPVQTSIPGLRPYPGLDQMSFLPHMAYTYPTGAATFADMQQRRKYQRKQGFQGELLDGAQDYMSGLDDMTDSDSCLSRKKIKKTESGMYACDLCDKTFQKSSSLLRHKYEHTGKRPHQCQICKKAFKHKHHLIEHSRLHSGEKPYQCDKCGKRFSHSGSYSQHMNHRYSYCKREAEEREAAEREAREKGHLEPTELLMNRAYLQSITPQGYSDSEERESMPRDGESEKEHEKEGEDGYGKLGRQDGDEEFEEEEEESENKSMDTDPETIRDEEETGDHSMDDSSEDGKMETKSDHEEDNMEDGM

SEQ ID NO: 4782 - protein, 1085 aa, Homo sapiens
MDTPENVLQMLEAHMQSYKGNDPLGEWERYIQWVEENFPENKEYLITLLEHLMKEFLDKKKYHNDPRFISYCLKFAEYNSDLHQFFEFLYNHGIGTLSSPLYIAWAGHLEAQGELQHASAVLQRGIQNQAEPREFLQQQYRLFQTRLTETHLPAQARTSEPLHNVQVLNQMITSKSNPGNNMACISKNQGSELSGVISSACDKESNMERRVITISKSEYSVHSSLASKVDVEQVVMYCKEKLIRGESEFSFEELRAQKYNQRRKHEQWVNEDRHYMKRKEANAFEEQLLKQKMDELHKKLHQVVETSHEDLPASQERSEVNPARMGPSVGSQQELRAPCLPVTYQQTPVNMEKNPREAPPVVPPLANAISAALVSPATSQSIAPPVPLKAQTVTDSMFAVASKDAGCVNKSTHEFKPQSGAEIKEGCETHKVANTSSFHTTPNTSLGMVQATPSKVQPSPTVHTKEALGFIMNMFQAPTLPDISDDKDEWQSLDQNEDAFEAQFQKNVRSSGAWGVNKIISSLSSAFHVFEDGNKENYGLPQPKNKPTGARTFGERSVSRLPSKPKEEVPHAEEFLDDSTVWGIRCNKTLAPSPKSPGDFTSAAQLASTPFHKLPVESVHILEDKENVVAKQCTQATLDSCEENMVVPSRDGKFSPIQEKSPKQALSSHMYSASLLRLSQPAAGGVLTCEAELGVEACRLTDTDAAIAEDPPDAIAGLQAEWMQMSSLGTVDAPNFIVGNPWDDKLIFKLLSGLSKPVSSYPNTFEWQCKLPAIKPKTEFQLGSKLVYVHHLLGEGAFAQVYEATQGDLNDAKNKQKFVLKVQKPANPWEFYIGTQLMERLKPSMQHMFMKFYSAHLFQNGSVLVGELYSYGTLLNAINLYKNTPEKVMPQGLVISFAMRMLYMIEQVHDCEIIHGDIKPDNFILGNGFLEQDDEDDLSAGLALIDLGQSIDMKLFPKGTIFTAKCETSGFQCVEMLSNKPWNYQIDYFGVAATVYCMLFGTYMKVKNEGGECKPEGLFRRLPHLDMWNEFFHVMLNIPDCHHLPSLDLLRQKLKKVFQQHYTNKIRALRNRLIVLLLECKRSRK

SEQ ID NO: 4783 - protein, 394 aa, Homo sapiens
MSGEDEQQEQTIAEDLVVTKYKMGGDIANRVLRSLVEASSSGVSVLSLCEKGDAMIMEETGKIFKKEKEMKKGIAFPTSISVNNCVCHFSPLKSDQDYILKEGDLVKIDLGVHVDGFIANVAHTFVVDVAQGTQVTGRKADVIKAAHLCAEAALRLVKPGNQNTQVTEAWNKVAHSFNCTPIEGMLSHQLKQHVIDGEKTIIQNPTDQQKKDHEKAEFEVHEVYAVDVLVSSGEGKAKDAGQRTTIYKRDPSKQYGLKMKTSRAFFSEVERRFDAMPFTLRAFEDEKKARMGVVECAKHELLQPFNVLYEKEGEFVAQFKFTVLLMPNGPMRITSGPFEPDLYKSEMEVQDAELKALLQSSASRKTQKKKKKKASKTAENATSGETLEENEAGD

SEQ ID NO: 4784 - protein, 194 aa, Homo sapiens [sequence omitted]

SEQ ID NO: 4785 - protein, 389 aa, Homo sapiens
MLSLRVPLAPITDPQQLQLSPLKGLSLVDKENTPPALSGTRVLASKTARRIFQEPTEPKTKAAAPGVEDEPLLRENPRRFVIFPIEYHDIWQMYKKAEASFWTAEEVDLSKDIQHWESLKPEERYFISHVLAFFAASDGIVNENLVERFSQEVQITEARCFYGFQIAMENIHSEMYSLLIDTYIKDPKEREFLFNAIETMPCVKKKADWALRWIGDKEATYGERVVAFAAVEGIFFSGSFASIFWLKKRGLMPGLTFSNELISRDEGLHCDFACLMFKHLVHKPSEERVREIIINAVRIEQEFLTEALPVKLIGMNCTLMKQYIEFVADRLMLELGFSKVFRVENPFDFMENISLEGKTNFFEKRVGEYQRMGVMSSPTENSFTLDADF

SEQ ID NO: 4786 - protein, 44 aa, Homo sapiens
MTTTTTFKGVDPNSRNSSRDTGSCHVAQAGLELLGSSDDPALAS

SEQ ID NO: 4787 - protein, 395 aa, Homo sapiens
MNGQLNGFHEAFIEEGTFLFTSESVGEGHPDKICDQISDAVLDAHLQQDPDAKVACETVAKTGMILLAGEITSRAAVDYQKVVREAVKHIGYDDSSKGFDYKTCNVLVALEQQSPDIAQGVHLDRNEEDIGAGDQGLMFGYATDETEECMPLTIVLAHKLNAKLAELRRNGTLPWLRPDSKTQVTVQYMQDRGAVLPIRVHTIVISVQHDEEVCLDEMRDALKEKVIKAVVPAKYLDEDTIYHLQPSGRFVIGGPQGDAGLTGRKIIVDTYGGWGAHGGGAFSGKDYTKVDRSAAYAARWVAKSLVKGGLCRRVLVQVSYAIGVSHPLSISIFHYGTSQKSERELLEIVKKNFDLRPGVIVRDLDLKKPIYQRTAAYGHFGRDSFPWEVPKKLKY

SEQ ID NO: 4788 - protein, 803 aa, Homo sapiens
MEVKPVGEPTQEVSKFKLSTKVESTGHWLVEDHVRIWEVLKTEESSIQDWGEEVEEGAVYHVTLKRVQIQQAANKGARWLGVEGDQLPPGHTVSQYETCKIRTIKAGTLEKLVENLLTAFGDNDFTYISIFLSTYRGFASTKEVLELLLDRYGNLTSPNCEEDGSQSSSESKMVIRNAIASILRAWLDQCAEDFREPPHFPCLQKLLDYLTRMMPGSDPERRAQNLLEQFQKQEVETDNGLPNTISFSLEEEEELEGGESAEFTCFSEDLVAEQLTYMDAQLFKKVVPHHCLGCIWSRRDKKENKHLAPTIRATISQFNTLTKCVVSTILGGKELKTQQRAKIIEKWINIAHECRLLKNFSSLRAIVSALQSNSIYRLKKTWAAVPRDRMLMFEELSDIFSDHNNHLTSRELLMKEGTSKFANLDSSVKENQKRTQRRLQLQKDMGVMQGTVPYLGTFLTDLTMLDTALQDYIEGGLINFEKRRREFEVIAQIKLLQSACNSYCMTPDQKFIQWFQRQQLLTEEESYALSCEIEAAADASTTSPKPRKSMVKRLSLLFLGSDMITSPTPTKEQPKSTASGSSGESMDSVSVSSCESNHSEAEEGSITPMDTPDEPQKKLSESSSSCSSIHSMDTNSSGMSSLINPLSSPPSCNNNPKIHKRSVSVTSITSTVLPPVYNQQNEDTCIIRISVEDNNGNMYKSIMLTSQDKTPAVIQRAMLKHNLDSDPAEEYELVQVISEDKELVIPDSANVFYAMNSQVNFDFILRKKNSMEEQVKLRSRTSLTLPRTAKRGCWSNRHSKITL

SEQ ID NO: 4789 - protein, 555 aa, Homo sapiens
MERPAPGEVVMSQAIQPAHATARGELSAGQLLKWIDTTACLAAEKHAGVSCVTASVDDIQFEETARVGQVITIKAKVTRAFSTSMEISIKVMVQDMLTGIEKLVSVAFSTFVAKPVGKEKIHLKPVTLLTEQDHVEHNLAAERRKVRLQHEDTFNNLMKESSKFDDLIFDEEEGAVSTRGTSVQSIELVLPPHANHHGNTFGGQIMAWMETVATISASRLCWAHPFLKSVDMFKFRGPSTVGDRLVFTAIVNNTFQTCVEVGVRVEAFDCQEWAEGRGRHINSAFLIYNAADDKENLITFPRIQPISKDDFRRYRGAIARKRIRLGRKYVISHKEEVPLCIHWDISKQASLSDSNVEALKKLAAKRGWEVTSTVEKIKIYTLEEHDVLSVWVEKHVGSPAHLAYRLLSDFTKRPLWDPHFVSCEVIDWVSEDDQLYHITCPILNDDKPKDLVVLVSRRKPLKDGNTYTVAVKSVILPSVPPSPQYIRSEIICAGFLIHAIDSNSCIVSYFNHMSASILPYFAGNLGGWSKSIEETAASCIQFLENPPDDGFVSTF

SEQ ID NO: 4790 - protein, 347 aa, Homo sapiens
MCTKMEQPFYHDDSYTATGYGRAPGGLSLHDYKLLKPSLAVNLADPYRSLKAPGARGPGPEGGGGGSYFSGQGSDTGASLKLASSELERLIVPNSNGVITTTPTPPGQYFYPRGGGSGGGAGGAGGGVTEEQEGFADGFVKALDDLHKMNHVTPPNVSLGATGGPPAGPGGVYAGPEPPPVYTNLSSYSPASASSGGAGAAVGTGSSYPTTTISYLPHAPPFAGGHPAQLGLGRGASTFKEEPQTVPEARSRDATPPVSPINMEDQERIKVERKRLRNRLAATKCRKRKLERIARLEDKVKTLKAENAGLSSTAGLLREQVAQLKQKVMTHVSNGCQLLLGVKGHAF

SEQ ID NO: 4791 - protein, 130 aa, Homo sapiens
MSGRGKQGGKARAKAKTRSSRAGLQFPVGRVHRLLRKGNYSERVGAGAPVYLAAVLEYLTAEILELAGNAARDNKKTRIIPRHLQLAIRNDEELNKLLGRVTIAQGGVLPNIQAVLLPKKTESHHKAKGK

SEQ ID NO: 4792 - protein, 524 aa, Homo sapiens
MELGPEPPHRRRLLFACSPPPASQPVVKALFGASAAGGLSPVTNLTVTMDQLQGLGSDYEQPLEVKNNSNLQRMGSSESTDSGFCLDSPGPLDSKENLENPMRRIHSLPQKLLGCSPALKRSHSDSLDHDIFQLIDPDENKENEAFEFKKPVRPVSRGCLHSHGLQEGKDLFTQRQNSAPARMLSSNERDSSEPGNFIPLFTPQSPVTATLSDEDDGFVDLLDGENLKNEEETPSCMASLWTAPLVMRTTNLDNRCKLFDSPSLCSSSTRSVLKRPERSQEESPPGSTKRRKSMSGASPKESTNPEKAHETLHQSLSLASSPKGTIENILDNDPRDLIGDFSKGYLFHTVAGKHQDLKYISPEIMASVLNGKFANLIKEFVIIDCRYPYEYEGGHIKGAVNLHMEEEVEDFLLKKPIVPTDGKRVIVVFHCEFSSERGPRMCRYVRERDRLGNEYPKLHYPELYVLKGGYKEFFMKCQSYCEPPSYRPMHHEDFKEDLKKFRTKSRTWAGEKSKREMYSRLKKL

SEQ ID NO: 4793 - protein, 297 aa, Homo sapiens
MAELTALESLIEMGFPRGRAEKALALTGNQGIEAAMDWLMEHEDDPDVDEPLETPLGHILGREPTSSEQGGLEGSGSAAGEGKPALSEEERQEQTKRMLELVAQKQREREEREEREALERERQRRRQGQELSAARQRLQEDEMRRAAEERRREKAEELAARQRVREKIERDKAERAKKYGGSVGSQPPPVAPEPGPVPSSPSQEPPTKREYDQCRIQVRLPDGTSLTQTFRAREQLAAVRLYVELHRGEELGGGQDPVQLLSGFPRRAFSEADMERPLQELGLVPSAVLIVAKKCPS

SEQ ID NO: 4794 - protein, 126 aa, Homo sapiens
MADEIAKAQVARPGGDTIFGKIIRKEIPAKIIFEDDRCLAFHDISPQAPTHFLVIPKKHISQISVAEDDDESLLGHLMIVGKKCAADLGLNKGYRMVVNEGSDGGQSVYHVHLHVLGGRQMHWPPG

SEQ ID NO: 4795 - protein, 184 aa, Homo sapiens
MDLQAAGAQAQGAAEPSRGPPLPSARGAPPSPEAGFATADHSSQERETEKAMDRLARGTQSIPNDSPARGEGTHSEEEGFAMDEEDSDGELNTWELSEGTNCPPKEQPGDLFNEDWDSELKADQGNPYDADDIQESISQELKPWVCCAPQGDMIYDPSWHHPPPLIPYYSKMVFETGQFDDAED

SEQ ID NO: 4796 - protein, 203 aa, Homo sapiens
MSGQRVDVKVVMLGKEYVGKTSLVERYVHDRFLVGPYQNTIGAAFVAKVMSVGDRTVTLGIWDTAGSERYEAMSRIYYRGAKAAIVCYDLTDSSSFERAKFWVKELRSLEEGCQIYLCGTKSDLLEEDRRRRRVDFHDVQDYADNIKAQLFETSSKTGQSVDELFQKVAEDYVSVAAFQVMTEDKGVDLGQKPNPYFYSCCHH

SEQ ID NO: 4797 - protein, 2511 aa, Homo sapiens
MEEVVIAGMSGKLPESENLQEFWDNLIGGVDMVTDDDRRWKAGLYGLPRRSGKLKDLSRFDASFFGVHPKQAHTMDPQLRLLLEVTYEAIVDGGINPDSLRGTHTGVWVGVSGSETSEALSRDPETLVGYSMVGCQRAMMANRLSFFFDFRGPSIALDTACSSSLMALQNAYQAIHSGQCPAAIVGGINVLLKPNTSVQFLRLGMLSPEGTCKAFDTAGNGYCRSEGVVAVLLTKKSLARRVYATILNAGTNTDGFKEQGVTFPSGDIQEQLIRSLYQSAGVAPESFEYIEAHGTGTKVGDPQELNGITRALCATRQEPLLIGSTKSNMGHPEPASGLAALAKVLLSLEHGLWAPNLHFHSPNPEIPALLDGRLQVVDQPLPVRGGNVGINSFGFGGSNVHIILRPNTQPPPAPAPHATLPRLLRASGRTPEAVQKLLEQGLRHSQDLAFLSMLNDIAAVPATAMPFRGYAVLGGERGGPEVQQVPAGERPLWFICSGMGTQWRGMGLSLMRLDRFRDSILRSDEAVKPFGLKVSQLLLSTDESTFDDIVHSFVSLTAIQIGLIDLLSCMGLRPDGIVGHSLGEVACGYADGCLSQEEAVLAAYWRGQCIKEAHLPPGAMAAVGLSWEECKQRCPPGVVPACHNSKDTVTISGPQAPVFEFVEQLRKEGVFAKEVRTGGMAFHSYFMEAIAPPLLQELKKVIREPKPRSARWLSTSIPEAQWHSSLARTSSAEYNVNNLVSPVLFQEALWHVPEHAVVLEIAPHALLQAVLKRGLKPSCTIIPLMKKDHRDNLEFFLAGIGRLHLSGIDANPNALFPPVEFPAPRGTPLISPLIKWDHSLAWDVPAAEDFPNGSGSPSAAIYNIDTSSESPDHYLVDHTLDGRVLFPATGYLSIVWKTLARALGLGVEQLPVVFEDVVLHQATILPKTGTVSLEVRLLEASRAFEVSENGNLVVSGKVYQWDDPDPRLFDHPESPTPNPTEPLFLAQAEVYKELRLRGYDYGPHFQGILEASLEGDSGRLLWKDNWVSFMDTMLQMSILGSAKHGLYLPTRVTAIHIDPATHRQKLYTLQDKAQVADVVVSRWLRVTVAGGVHISGLHTESAPRRQQEQQVPILEKFCFTPHTEEGCLSERAALQEELQLCKGLVQALQTKVTQQGLKMVVPGLDGAQIPRDPSQQELPRLLSAACRLQLNGNLQLELAQVLAQERPKLPEDPLLSGLLDSPALKACLDTAVENMPSLKMKVVEVLAGHGHLYSRIPGLLSPHPLLQLSYTATDRHPQALEAAQAELQQHDVAQGQWDPADPAPSALGSADLLVCNCAVAALGDPASALSNMVAALREGGFLLLHTLLRGHPLGDIVAFLTSTEPQYGQGILSQDAWESLFSRVSLRLVGLKKSFYGSTLFLCRRPTPQDSPIFLPVDDTSFRWVESLKGILADEDSSRPVWLKAINCATSGVVGLVNCLRREPGGNRLRCVLLSNLSSTSHVPEVDPGSAELQKVLQGDLVMNVYRDGAWGAFRHFLLEEDKPEEPTAHAFVSTLTRGDLSSIRWVCSSLRHAQPTCPGAQLCTVYYASLNFRDIMLATGKLSPDAIPGKWTSQDSLLGMEFSGRDASGKRVMGLVPAKGLATSVLLSPDFLWDVPSNWTLEEAASVPVVYSTAYYALVVRGRVRPGETLLIHSGSGGVGQAAIAIALSLGCRVFTTVGSAEKRAYLQARFPQLDSTSFANSRDTSFEQHVLWHTGGKGVDLVLNSLAEEKLQASVRCLATHGRFLEIGKFDLSQNHPLGMAIFLKNVTFHGVLLDAFFNESSADWREVWALVQAGIRDGVVRPLKCTVFHGAQVEDAFRYMAQGKHIGKVVVQVLAEEPEAVLKGAKPKLMSAISKTFCPAHKSYIIAGGLGGFGLELAQWLIQRGVQKLVLTSRSGIRTGYQAKQVRRWRRQGVQVQVSTSNISSLEGARGLIAEAAQLGPVGGVFNLAVVLRDGLLENQTPEFFQDVCKPKYSGTLNLDRVTREACPELDYFVVFSSVSCGRGNAGQSNYGFANSAMERICEKRRHEGLPGLAVQWGAIGDVGILVETMSTNDTIVSGTLPQRMASCLEVLDLFLNQPHMVLSSFVLAEKAAAYRDRDSQRDLVEAVAHILGIRDLAAVNLDSSLADLGLDSLMSVEVRQTLERELNLVLSVREVRQLTLRKLQELSSKADEASELACPTPKEDGLAQQQTQLNLRSLLVNPEGPTLMRLNSVQSSERPLFLVHPIEGSTTVFHSLASRLSIPTYGLQCTRAAPLDSIHSLAAYYIDCIRQVQPEGPYRVAGYSYGACVAFEMCSQLQAQQSPAPTHNSLFLFDGSPTYVLAYTQSYRAKLTPGCEAEAETEAICFFVQQFTDMEHNRVLEALLPLKGLEERVAAAVDLIIKSHQGLDRQELSFAARSFYYKLRAAEQYTPKAKYHGNVMLLRAKTGGAYGEDLGADYNLSQVCDGKVSVHVIEGDHRTLLEGSGLESIISIIHSSLAEPRVSVREG

SEQ ID NO: 4798 - protein, 552 aa, Homo sapiens
MALSVPGYSPGFRKPPEVVRLRRKRARSRGAAASPPRELTEPAARRAALVAGLPLRPFPAAGGRGGGSGGGPAAARRNPFARLDNRPRVAAEPPDGPAREQPEAPVPFLDSNQENDLLWEEKFPERTTVTELPQTSHVSFSEPDIPSSKSTELPVDWSIKTRLLFTSSQPFTWADHLKAQEEAQGLVQHCRATEVTLPKSIQSLIYWLHPALSWLPLFPRIGADRKMAGKTSPWSNDATLQHVLMSDWSVSFTSLYNLLKTKLCPYFYVCTYQFTVLFRAAGLAGSDLITALISPTTRGLREAMRNEGIEFSLPLIKESGHKKETASGTSLGYGEEQAISDEDEEESFSWLEEMGVQDKIKKPDILSIKLRKEKHEVQMDHRPESVVLVKGINTFTLLNFLINSKSLVATSGPQAGLPPTLLSPVAFRGATMQMLKARSVNVKTQALSGYRDQFSLEITGPIMPHSLHSLTMLLKSSQSGSFSAVLYPHEPTAVFNICLQMDKVLDMEVVHKELTNCGLHPNTLEQLSQIPLLGKSSLRNVVLRDYIYNWRS

SEQ ID NO: 4799 - protein, 341 aa, Homo sapiens
MPKRKVTFQGVGDEEDEDEIIVPKKKLVDPVAGSGGPGSRFKGKHSLDSDEEEDDDDGGSSKYDILASEDVEGQEAATLPSEGGVRITPFNLQEEMEEGHFDADGNYFLNRDAQIRDSWLDNIDWVKIRERPPGQRQASDSEEEDSLGQTSMSAQALLEGLLELLLPRETVAGALRRLGARGGGKGRKGPGQPSSPQRLDRLSGLADQMVARGNLGVYQETRERLAMRLKGLGCQTLGPHNPTPPPSLDMFAEELAEEELETPTPTQRGEAESRGDGLVDVMWEYKWENTGDAELYGPFTSAQMQTWVSEGYFPDGVYCRKLDPPGGQFYNSKRIDFDLYT

SEQ ID NO: 4800 - protein, 146 aa, Homo sapiens
MHPLLNPLLLALGLMALLLTTVIALTCLGGFASPGPVPPSTALRELIEELVNITQNQKAPLCNGSMVWSINLTAGMYCAALESLINVSGCSAIEKTQRMLSGFCPHKVSAGQFSSLHVRDTKIEVAQFVKDLLLHLKKLFREGQFN

SEQ ID NO: 4801 - protein, 856 aa, Homo sapiens
MKSARAKTPRKPTVKKGSQTNLKDPVGVYCRVRPLGFPDQECCIEVINNTTVQLHTPEGYRLNRNGDYKETQYSFKQVFGTHTTQKELFDVVANPLVNDLIHGKNGLLFTYGVTGSGKTHTMTGSPGEGGLLPRCLDMIFNSIGSFQAKRYVFKSNDRNSMDIQCEVDALLERQKREAMPNPKTSSSKRQVDPEFADMITVQEFCKAEEVDEDSVYGVFVSYIEIYNNYIYDLLEEVPFDPIKPKPPQSKLLREDKNHNMYVAGCTEVEVKSTEEAFEVFWRGQKKRRIANTHLNRESSRSHSVFNIKLVQAPLDADGDNVLQEKEQITISQLSLVDLAGSERTNRTRAEGNRLREAGNINQSLMTLRTCMDVLRENQMYGTNKMVPYRDSKLTHLFKNYFDGEGKVRMIVCVNPKAEDYEENLQVMRFAEVTQEVEVARPVDKAICGLTPGRRYRNQPRGPVGNEPLVTDVVLQSFPPLPSCEILDINDEQTLPRLIEALEKRHNLRQMMIDEFNKQSNAFKALLQEFDNAVLSKENHMQGKLNEKEKMISGQKLEIERLEKKNKTLEYKIEILEKTTTIYEEDKRNLQQELETQNQKLQRQFSDKRRLEARLQGMVTETTMKWEKECERRVAAKQLEMQNKLWVKDEKLKQLKAIVTEPKTEKPERPSRERDREKVTQRSVSPSPVPLLFQPDQNAPPIRLRHRRSRSAGDRWVDHKPASNMQTETVMQPHVPHAITVSVANEKALAKCEKYMLTHQELASDGEIETKLIKGDIYKTRGGGQSVQFTDIETLKQESPNGSRKRRSSTVAPAQPDGAESEWTDVETRCSVAVEMRAGSQLGPGYQHHAQPKRKKP

SEQ ID NO: 4802 - protein, 160 aa, Homo sapiens
MYTITKGPSKLVAQRRTGPTQQQVEGRLGELLKCRQPAPPTSQPPRAQPFAQPPGPWPLSSPGPRLVFNRVNGRRAPSTSPSFEGTQETYTVAHEENVRFVSEAWQQVQQQLDGGPAGEGGPRPVQYVERTPNPRLQNFVPIDLDEWWAQQFLARITSCS

SEQ ID NO: 4803 - protein, 745 aa, Homo sapiens
MVGPGPTAAAAVEERQRKLQEYLAAKGKLKSQNTKPYLKSKNNCQNQPPSKSTIRPKNDVTNHVVLPVKPKRSISIKLQPRPPNTAGSQKPKLEPPKLLGKRLTSECVSSNPYSKPSSKSFQQCEAGSSTTGELSRKPVGSLNIEQLKTTKQQLTDQGNGKCIDFMNNIHVENESLDNFLKETNKENLLDILTEPERKPDPKLYTRSKPKTDSYNQTKNSLVPKQALGKSSVNSAVLKDRVNKQFVGETQSRTFPVKSQQLSRGADLARPGVKPSRTVPSHFIRTLSKVQSSKKPVVKNIKDIKVNRSQYERPNETKIRSYPVTEQRVKHTKPRTYPSLLQGEYNNRHPNIKQDQKSSQVCIPQTSCVLQKSKAISQRPNLTVGRFNSAIPSTPSIRPNGTSGNKHNNNGFQQKAQTLDSKLKKAVPQNHFLNKTAPKTQADVTTVNGTQTNPNIKKKATAEDRRKQLEEWQKSKGKTYKRPPMELKTKRKVIKEMNISFWKSIEKEEEEKKAQLELSSKINNTLTECLNLIEGGVPSNEILNILSSIPEAEKFAKFWICKAKLLASKGTFDVIGLYEEAIKNGATPIQELRKVVLNILQDSNRTTEGITSDSLVAETSITSVEELAKKMESVKSCLSPKEREQVTATPRIAKAEQHNYPGIKLQIGPIPRINGMPEVQDMKFITPVRRSSRIERAVSRYPEMLQEHDLVVASLDELLEVEETKCFIFRRNEALPVTLGFQTPES

SEQ ID NO: 4804 - protein, 380 aa, Homo sapiens
MGIQGLAKLIADVAPSAIRENDIKSYFGRKVAIDASMSIYQFLIAVRQGGDVLQNEEGETTSHLMGMFYRTIRMMENGIKPVYVFDGKPPQLKSGELAKRSERRAEAEKQLQQAQAAGAEQEVEKFTKRLVKVTKQHNDECKHLLSLMGIPYLDAPSEAEASCAALVKAGKVYAAATEDMDCLTFGSPVLMRHLTASEAKKLPIQEFHLSRILQELGLNQEQFVDLCILLGSDYCESIRGIGPKRAVDLIQKHKSIEEIVRRLDPNKYPVPENWLHKEAHQLFLEPEVLDPESVELKWSEPNEEELIKFMCGEKQFSEERIRSGVKRLSKSRQGSTQGRLDDFFKVTGSLSSAKRKEPEPKGSTKKKAKTGAAGKFKRGK

SEQ ID NO: 4805 - protein, 1090 aa, Homo sapiens
MAEAELHKERLQAIAEKRKRQTEIEGKRQQLDEQILLLQHSKSKVLREKWLLQGIPAGTAEEEEARRRQSEEDEFRVKQLEDNIQRLEQEIQTLESEESQISAKEQIILEKLKETEKSFKDFQKGFSSTDGDAVNYISSQLPDLPILCSRTAEPSPGQDGTSRAAGVGWENVLLKEGESASNATETSGPDMTIKKPPQLSEDDIWLKSEGDNYSATLLEPAASSLSPDHKNMEIEVSVAECKSVPGITSTPHPMDHPSAFYSPPHNGLLTDHHESLDNDVAREIRYLDEVLEANCCDSAVDGTYNGTSSPEPGAVVLVGGLSPPVHEATQPEPTERTASRQAPPHIELSNSSPDPMAEAERTNGHSPSQPRDALGDSLQVPVSPSSTTSSRCSSRDGEFTLTTLKKEAKFELRAFHEDKKPSKLFEDDEHEKEQYCIRKVRPSEEMLELEKERRELIRSQAVKKNPGIAAKWWNPPQEKTIEEQLDEEHLESHKKYKERKERRAQQEQLLLQKQLQQQQQQPPSQLCTAPASSHERASMIDKAKEDIVTEQIDFSAARKQFQLMENSRQAVAKGQSTPRLFSIKPFYRPLGSVNSDKPLTNPRPPSVGGPPEDSGASAAKGQKSPGALETPSAAGSQGNTASQGKEGPYSEPSKRGPLSKLWAEDGEFTSARAVLTVVKDDDHGILDQFSRSVNVSLTQEELDSGLDELSVRSQDTTVLETLSNDFSMDNISDSGASNETTNALQENSLADFSLPQTPQTDNPSEGRGEGVSKSFSDHGFYSPSSTLGDSPLVDDPLEYQAGLLVQNAIQQAIAEQVDKAVSKTSRDGAEQQGPEATVEEAEAAAFGSEKPQSMFEPPQVSSPVQEKRDVLPKILPAEDRALRERGPPQPLPAVQPSGPINMEETRPEGSYFSKYSEAAELRSTASLLATQESDVMVGPFKLRSRKQRTLSMIEEEIRAAQEREEELKRQRQVLQSTQSPRTKNAPSLPSRTCYKTAPGKIEKVKPPPSPTTEGPSLQPDLAPEEAAGTQRPKNLMQTLMEDYETHKSKRRERMDDSSVLEATRVNRRKSALALRWEAGIYANQEEEDNE

SEQ ID NO: 4806 - protein, 543 aa, Homo sapiens
MEQVNELKEKGNKALSVGNIDDALQCYSEAIKLDPHNHVLYSNRSAAYAKKGDYQKAYEDGCKTVDLKPDWGKGYSRKAAALEFLNRFEEAKRTYEEGLKHEANNPQLKEGLQNMEARLAERKFMNPFNMPNLYQKLESDPRTRTLLSDPTYRELIEQLRNKPSDLGTKLQDPRIMTTLSVLLGVDLGSMDEEEEIATPPPPPPPKKETKPEPMEEDLPENKKQALKEKELGNDAYKKKDFDTALKHYDKAKELDPTNMTYITNQAAVYFEKGDYNKCRELCEKAIEVGRENREDYRQIAKAYARIGNSYFKEEKYKDAIHFYNKSLAEHRTPDVLKKCQQAEKILKEQERLAYINPDLALEEKNKGNECFQKGDYPQAMKHYTEAIKRNPKDAKLYSNRAACYTKLLEFQLALKDCEECIQLEPTFIKGYTRKAAALEAMKDYTKAMDVYQKALDLDSSCKEAADGYQRCMMAQYNRHDSPEDVKRRAMADPEVQQIMSDPAMRLILEQMQKDPQALSEHLKNPVIAQKIQKLMDVGLIAIR

SEQ ID NO: 4807 - protein, 380 aa, Homo sapiens
MMFSGFNADYEASSSRCSSASPAGDSLSYYHSPADSFSSMGSPVNAQDFCTDLAVSSANFIPTVTAISTSPDLQWLVQPALVSSVAPSQTRAPHPFGVPAPSAGAYSRAGVVKTMTGGRAQSIGRRGKVEQLSPEEEEKRRIRRERNKMAAAKCRNRRRELTDTLQAETDQLEDEKSALQTEIANLLKEKEKLEFILAAHRPACKIPDDLGFPEEMSVASLDLTGGLPEVATPESEEAFTLPLLNDPEPKPSVEPVKSISSMELKTEPFDDFLFPASSRPSGSETARSVPDMDLSGSFYAADWEPLHSGSLGMGPMATELEPLCTPVVTCTPSCTAYTSSFVFTYPEADSFPSCAAAHRKGSSSNEPSSDSLSSPTLLAL

SEQ ID NO: 4808 - protein, 100 aa, Homo sapiens
MELLGEYVGQEGKPQKLRVSCEAPGDGDPFQGLLSGVAQMKDMVTELFDPLVQGEVQHRVAAAPDEDLDGDDEDDAEDENNIDNRTNFDGPSAKRPKTPS

SEQ ID NO: 4809 - protein, 247 aa, Homo sapiens
MVDREQLVQKARLAEQAERYDDMAAAMKNVTELNEPLSNEERNLLSVAYKNVVGARRSSWRVISSIEQKTSADGNEKKIEMVRAYREKIEKELEAVCQDVLSLLDNYLIKNCSETQYESKVFYLKMKGDYYRYLAEVATGEKRATVVESSEKAYSEAHEISKEHMQPTHPIRLGLALNYSVFYYEIQNAPEQACHLAKTAFDDAIAELDTLNEDSYKDSTLIMQLLRDNLTLWTSDQQDDDGGEGNN

SEQ ID NO: 4810 - protein, 589 aa, Homo sapiens
MSVSVHENRKSRASSGSINIYLFHKSSYADSVLTHLNLLRQQRLFTDVLLHAGNRTFPCHRAVLAACSRYFEAMFSGGLKESQDSEVNFDNSIHPEVLELLLDYAYSSRVIINEENAESLLEAGDMLEFQDIRDACAEFLEKNLHPTNCLGMLLLSDAHQCTKLYELSWRMCLSNFQTIRKNEDFLQLPQDMVVQLLSSEELETEDERLVYESAINWISYDLKKRYCYLPELLQTVRLALLPAIYLMENVAMEELITKQRKSKEIVEEAIRCKLKILQNDGVVTSLCARPRKTGHALFLLGGQTFMCDKLYLVDQKAKEIIPKADIPSPRKEFSACAIGCKVYITGGRGSENGVSKDVWVYDTLHEEWSKAAPMLVARFGHGSAELKHCLYVVGGHTAATGCLPASPSVSLKQVEHYDPTINKWTMVAPLREGVSNAAVVSAKLKLFAFGGTSVSHDKLPKVQCYDQCENRWTVPATCPQPWRYTAAAVLGNQIFIMGGDTEFSACSAYKFNSETYQWTKVGDVTAKRMSCHAVASGNKLYVVGGYFGIQRCKTLDCYDPTLDVWNSITTVPYSLIPTAFVSTWKHLPS

SEQ ID NO: 4811 - protein, 1136 aa, Homo sapiens
MAKMEVKTSLLDNMIGVGDMVLLEPLNEETFINNLKKRFDHSEIYTYIGSVVISVNPYRSLPIYSPEKVEEYRNRNFYELSPHIFALSDEAYRSLRDQDKDQCILITGESGAGKTEASKLVMSYVAAVCGKGAEVNQVKEQLLQSNPVLEAFGNAKTVRNDNSSRFGKYMDIEFDFKGDPLGGVISNYLLEKSRVVKQPRGERNFHVFYQLLSGASEELLNKLKLERDFSRYNYLSLDSAKVNGVDDAANFRTVRNAMQIVGFMDHEAESVLAVVAAVLKLGNIEFKPESRVNGLDESKIKDKNELKEICELTGIDQSVLERAFSFRTVEAKQEKVSTTLNVAQAYYARDALAKNLYSRLFSWLVNRINESIKAQTKVRKKVMGVLDIYGFEIFEDNSFEQFIINYCNEKLQQIFIELTLKEEQEEYIREDIEWTHIDYFNNAIICDLIENNTNGILAMLDEECLRPGTVTDETFLEKLNQVCATHQHFESRMSKCSRFLNDTSLPHSCFRIQHYAGKVLYQVEGFVDKNNDLLYRDLSQAMWKASHALIKSLFPEGNPAKINLKRPPTAGSQFKASVATLMKNLQTKNPNYIRCIKPNDKKAAHIFNEALVCHQIRYLGLLENVRVRRAGYAFRQAYEPCLERYKMLCKQTWPHWKGPARSGVEVLFNELEIPVEEYSFGRSKIFIRNPRTLFKLEDLRKQRLEDLATLIQKIYRGWKCRTHFLLMKKSQIVIAAWYRRYAQQKRYQQTKSSALVIQSYIRGWKARKILRELKHQKRCKEAVTTIAAYWHGTQARRELRRLKEEARNKHAIAVIWAYWLGSKARRELKRLKEEARRKHAVAVIWAYWLGLKVRREYRKFFRANAGKKIYEFTLQRIVQKYFLEMKNKMPSLSPIDKNWPSRPYLFLDSTHKELKRIFHLWRCKKYRDQFTDQQKLIYEEKLEASELFKDKKALYPSSVGQPFQGAYLEINKNPKYKKLKDAIEEKIIIAEVVNKINRANGKSTSRIFLLTNNNLLLADQKSGQIKSEVPLVDVTKVSMSSQNDGFFAVHLKEGSEAASKGDFLFSSDHLIEMATKLYRTTLSQTKQKLNIEISDEFLVQFRQDKVCVKFIQGNQKNGSVPTCKRKNNRLLEVAVP

SEQ ID NO: 4812 - protein, 672 aa, Homo sapiens
MADGSLTGGGLEAAAMAPERMGWAVEQELASLEKGLFQDEDSCSDCSYRDKPGSSLQSFMPEGKTFFPEIFQTNQLLFYERFRAYQDYILADCKASEVQEFTAEFLEKVLEPSGWRAVWHTNVFKVLVEITDVDFAALKAVVRLAEPYLCDSQVSTFTMECMKELLDLKEHRLPLQELWVVFDDSGVFDQTALAIEHVRFFYQNIWRSWDEEEEDEYDYFVRCVEPRLRLHYDILEDRVPSGLIVDYHNLLSQCEESYRKFLNLRSSLSNCNSDSEQENISMVEGLKLYSEMEQLKQKLKLIENPLLRYVFGYQKNSNIQAKGVRSSGQKITHVVSSTMMAGLLRSLLTDRLCQEPGEEEREIQFHSDPLSAINACFEGDTVIVCPGHYVVHGTFSIADSIELEGYGLPDDIVIEKRGKGDTFVDCTGADIKISGIKFVQHDAVEGILIVHRGKTTLENCVLQCETTGVTVRTSAEFLMKNSDLYGAKGAGIEIYPGSQCTLSDNGIHHCKEGILIKDFLDEHYDIPKISMVNNIIHNNEGYGVVLVKPTIFSDLQENAEDGTEENKALKIQTSGEPDVAERVDLEELIECATGKMELCARTDPSEQVEGNCEIVNELIAASTQKGQIKKKRLSELGITQADDNLMSQEMFVGIVGNQFKWNGKGSFGTFLF

SEQ ID NO: 4813 - protein, 292 aa, Homo sapiens
MAKERCLKKSFQDSLEDIKKRMKEKRNKNLAEIGKRRSFIAAPCQIITNTSTLLKNYQDNNKMLVLALENEKSKVKEAQDIILQLRKECYYLTCQLYALKGKLTSQQTVEPAQNQEICSSGMDPNSDDSSRNLFVKDLPQIPLEETELPGQGESFQIEATPPETQQSPHLSLKDITNVSLYPVVKIRRLSLSPKKNKASPAVALPKRRCTASVNYKEPTLASKLRRGDPFTDLCFLNSPIFKQKKDLRRSKKRALEVSPAKEAIFILYYVREFVSRFPDCRKCKLETHICLR

SEQ ID NO: 4814 - protein, 450 aa, Homo sapiens
MDARRVPQKDLRVKKNLKKFRYVKLISMETSSSSDDSCDSFASDNFANTKPKFRSDISEELANVFYEDSDNESFCGFSESEVQDVLDHCGFLQKPRPDVTNELAGIFHADSDDESFCGFSESEIQDGMRLQSVREGCRTRSQCRHSGPLRVAMKFPARSTRGATNKKAESRQPSENSVTDSNSDSEDESGMNFLEKRALNIKQNKAMLAKLMSELESFPGSFRGRHPLPGSDSQSRRPRRRTFPGVASRRNPERRARPLTRSRSRILGSLDALPMEEEEEEDKYMLVRKRKTVDGYMNEDDLPRSRRSRSSVTLPHIIRPVEEITEEELENVCSNSREKIYNRSLGSTCHQCRQKTIDTKTNCRNPDCWGVRGQFCGPCLRNRYGEEVRDALLDPNWHCPPCRGICNCSFCRQRDGRCATGVLVYLAKYHGFGNVHAYLKSLKQEFEMQA

SEQ ID NO: 4815 - protein, 601 aa, Homo sapiens
MAALTPRKRKQDSLKCDSLLHFTENLFPSPNKKHCFYQNSDKNEENLHCSQQEHFVLSALKTTEINRLPSANQGSPFKSALSTVSFYNQNKWYLNPLERKLIKESRSTCLKTNDEDKSFPIVTEKMQGKPVCSKKNNKKPQKSLTAKYQPKYRHIKPVSRNSRNSKQNRVIYKPIVEKENNCHSAENNSNAPRVLSQKIKPQVTLQGGAAFFVRKKSSLRKSSLENEPSLGRTQKSKSEVIEDSDVETVSEKKTFATRQVPKCLVLEEKLKIGLLSASSKNKEKLIKDSSDDRVSSKEHKVDKNEAFSSEDSLGENKTISPKSTVYPIFSASSVNSKRSLGEEQFSVGSVNFMKQTNIQKNTNTRDTSKKTKDQLIIDAGQKHFGATVCKSCGMIYTASNPEDEMQHVQHHHRFLEGIKYVGWKKERVVAEFWDGKIVLVLPHDPSFAIKKVEDVQELVDNELGFQQVVPKCPNKIKTFLFISDEKRVVGCLIAEPIKQAFRVLSEPIGPESPSSTECPRAWQCSDVPEPAVCGISRIWVFRLKRRKRIARRLVDTLRNCFMFGCFLSTDEIAFSDPTPDGKLFATKYCNTPNFLVYNFNS

SEQ ID NO: 4816 - protein, 566 aa, Homo sapiens
MALSVPGYSPGFRKPPEVVRLRRKRARSRGAAASPPRELTEPAARRAALVAGLPLRPFPAAGGRGGGSGGGPAAARRNPFARLDNRPRVAAEPPDGPAREQPEAPVPFLDSNQENDLLWEEKFPERTTVTELPQTSHVSFSEPDIPSSKSTELPVDWSIKTRLLFTSSQPFTWADHLKAQEEAQGLVQHCRATEVTLPKSIQDPKLSSELRCTFQQSLIYWLHPALSWLPLFPRIGADRKMAGKTSPWSNDATLQHVLMSDWSVSFTSLYNLLKTKLCPYFYVCTYQFTVLFRAAGLAGSDLITALISPTTRGLREAMRNEGIEFSLPLIKESGHKKETASGTSLGYGEEQAISDEDEEESFSWLEEMGVQDKIKKPDILSIKLRKEKHEVQMDHRPESVVLVKGINTFTLLNFLINSKSLVATSGPQAGLPPTLLSPVAFRGATMQMLKARSVNVKTQALSGYRDQFSLEITGPIMPHSLHSLTMLLKSSQSGSFSAVLYPHEPTAVFNICLQMDKVLDMEVVHKELTNCGLHPNTLEQLSQIPLLGKSSLRNVVLRDYIYNWRS

SEQ ID NO: 4817 - protein, 342 aa, Homo sapiens
MAASQAVEEMRSRVVLGEFGVRNVHTTDFPGNYSGYDDAWDQDRFEKNFRVDVVHMDENSLEFDMVGIDAAIANAFRRILLAEVPTMAVEKVLVYNNTSIVQDEILAHRLGLIPIHADPRLFEYRNQGDEEGTEIDTLQFRLQVRCTRNPHAAKDSSDPNELYVNHKVYTRHMTWIPLGNQADLFPEGTIRPVHDDILIAQLRPGQEIDLLMHCVKGIGKDHAKFSPVATASYRLLPDITLLEPVEGEAAEELSRCFSPGVIEVQEVQGKKVARVANPRLDTFSREIFRNEKLKKVVRLARVRDHYICKKDLLAAVAHTCNPSTLGGQGEWITGSRERDHPG

SEQ ID NO: 4818 - protein, 147 aa, Homo sapiens
MTSPEIASLSWGQMKVKGSNTTYKDCKVWPGGSRTWDWRETGTEHSPGVQPADVKEVVEKGVQTLVIGRGMSEALKAPTQQLPSGVHVRAVVQFHLATASWHILERCKTGAGLSIKHVCELAMSHLSTFLYQIYDAIILKMHLYFMK

SEQ ID NO: 4819 - protein, 719 aa, Homo sapiens
MALKDYALEKEKVKKFLQEFYQDDELGKKQFKYGNQLVRLAHREQVALYVDLDDVAEDDPELVDSICENARRYAKLFADAVQELLPQYKEREVVNKDVLDVYIEHRLMMEQRSRDPGMVRSPQNQYPAELMRRFELYFQGPSSNKPRVIREVRADSVGKLVTVRGIVTRVSEVKPKMVVATYTCDQCGAETYQPIQSPTFMPLIMCPSQECQTNRSGGRLYLQTRGSRFIKFQEMKMQEHSDQVPVGNIPRSITVLVEGENTRIAQPGDHVSVTGIFLPILRTGFRQVVQGLLSETYLEAHRIVKMNKSEDDESGAGELTREELRQIAEEDFYEKLAASIAPEIYGHEDVKKALLLLLVGGVDQSPRGMKIRGNINICLMGDPGVAKSQLLSYIDRLAPRSQYTTGRGSSGVGLTAAVLRDSVSGELTLEGGALVLADQGVCCIDEFDKMAEADRTAIHEVMEQQTISIAKAGILTTLNARCSILAAANPAYGRYNPRRSLEQNIQLPAALLSRFDLLWLIQDRPDRDNDLRLAQHITYVHQHSRQPPSQFEPLDMKLMRRYIAMCREKQPMVPESLADYITAAYVEMRREAWASKDATYTSARTLLAILRLSTALARLRMVDVVEKEDVNEAIRLMEMSKDSLLGDKGQTARTQRPADVIFATVRELVSGGRSVRFSEAEQRCVSRGFTPAQFQAALDEYEELNVWQVNASRTRITFV

SEQ ID NO: 4820 - protein, 261 aa, Homo sapiens
MRESALERGPVPEAPAGGPVHAVTVVTLLEKLASMLETLRERQGGLARRQGGLAGSVRRIQSGLGALSRSHDTTSNTLAQLLAKAERVSSHANAAQERAVRRAAQVQRLEANHGLLVARGKLHVLLFKEEGEVPASAFQKAPEPLGPADQSELGPEQLEAEVGESSDEEPVESRAQRLRRTGLQKVQSLRRALSGRKGPAAPPPTPVKPPRLGPGRSAEAQPEAQPALEPTLEPEPPQDTEEDPGRPGAAEEALLQMESVA

SEQ ID NO: 4821 - protein, 219 aa, Homo sapiens
MSETAPAAPAAPAPAEKTPVKKKARKSAGAAKRKASGPPVSELITKAVAASKERSGVSLAALKKALAAAGYDVEKNNSRIKLGLKSLVSKGTLVQTKGTGASGSFKLNKKAASGEAKPKAKKAGAAKAKKPAGAAKKPKKATGAATPKKSAKKTPKKAKKPAAAAGAKKAKSPKKAKAAKPKKAPKSPAKAKAVKPKAAKPKTAKPKAAKPKKAAAKKK

SEQ ID NO: 4822 - protein, 718 aa, Homo sapiens
MESVRIEQMLSLPAEVSSDNLESAERGASAAQVDMGPHPKVAAEGPAPLPTREPEQEQSPGTSTPESKVLLTQADALASRGRIREALEVYRQLSERQQLVAEQLEQLVRCLAEKVPQGEALAPAPPDEGSTASGTVAAEETGAAAAAAATEVWDGFKCRKCHGFLSDPVSLSCGHTFCKLCLERGRAADRRCALCGVKLSALMVATGRARGARRAGQQPPPPLRVNVVLSGLLGKLFPGPARASQLRHEGNRLYRERQVEAALLKYNEAVKLAPNDHLLYSNRSQIYFTLESHENALHDAEIACKLRPMGFKDNLELPHCSSQEEAAARGDGSSLMDPAKVKGDGQQHHMKDQEEEEEKWDATSPKAASSKTGKCQEKKRKHCQIESQEETGMPNKASKQDPPTDQGDKPALSLPLASFDASDLECALCMRLFYEPVTTPCGHTFCLKCLERCLDHNAKCPLCKDGLSQCLASRKYSKNVIMEELIAKFLPEELKERRKLYEEEMEELSNLNKNVPIFVCTMAYPTVPCPLHIFEPCYRLMIRRCIETGTRQFGMCLGDPVKGFAEYGCILEIRNVQFFADGRSVVDSIGKRRFRVLHQSQRDGYNTADIEYIEDQKVQGEDCAELMGLHNCVYQQASLWFHSLKLSLKNRILNHFGPMPEKDADPQMNPNGPAWCWWMLAVLPLESRAQLPFLAMRSLKDRLNGIRRVLAFISRNQN

SEQ ID NO: 4823 - protein, 458 aa, Homo sapiens
MASTITGSQDCIVNHRGEVDGEPELDISPCQQWGEASSPISRNRDSVMTLQSGCFENIESETYLPLKVSSQIDTQDSSVKFCKNEPQDHQESRRLFVMEESTERKVIKGESCSENLQVKLVSDGQELASPLLNGEATCQNGQLKESLDPIDCNCKDIHGWKSQVVSCSQQRAHTEEKPCDHNNCGKILNTSPDGHPYEKIHTAEKQYECSQCGKNFSQSSELLLHQRDHTEEKPYKCEQCGKGFTRSSSLLIHQAVHTDEKPYKCDKCGKGFTRSSSLLIHHAVHTGEKPYKCDKCGKGFSQSSKLHIHQRVHTGEKPYECEECGMSFSQRSNLHIHQRVHTGERPYKCGECGKGFSQSSNLHIHRCIHTGEKPYQCYECGKGFSQSSDLRIHLRVHTGEKPYHCGKCGKGFSQSSKLLIHQRVHTGEKPYECSKCGKGFSQSSNLHIHQRVHKKDPR

SEQ ID NO: 4824 - protein, 361 aa, Homo sapiens
MGGAVSAGEDNDELIDNLKEAQYIRTELVEQAFRAIDRADYYLEEFKENAYKDLAWKHGNIHLSAPCIYSEVMEALDLQPGLSFLNLGSGTGYLSSMVGLILGPFGVNHGVELHSDVIEYAKQKLDFFIRTSDSFDKFDFCEPSFVTGNCLEISPDCSQYDRVYCGAGVQKEHEEYMKNLLKVGGILVMPLEEKLTKITRTGPSAWETKKILAVSFAPLIQPCHSESGKSRLVQLPPVAVRSLQDLARIAIRGTIKKIIHQETVSKNGNGLKNTPRFKRRRVRRRRMETIVFLDKEVFASRISNPSDDNSCEDLEEERREEEEKTPPETKPDPPVNFLRQKVLSLPLPDPLKYYLLYYREK

SEQ ID NO: 4825 - protein, 211 aa, Homo sapiens [sequence omitted]

SEQ ID NO: 4826 - protein, 858 aa, Homo sapiens
MVNFTVDQIRAIMDKKANIRNMSVIAHVDHGKSTLTDSLVCKAGIIASARAGETRFTDTRKDEQERCITIKSTAISLFYELSENDLNFIKQSKDGAGFLINLIDSPGHVDFSSEVTAALRVTDGALVVVDCVSGVCVQTETVLRQAIAERIKPVLMMNKMDRALLELQLEPEELYQTFQRIVENVNVIISTYGEGESGPMGNIMIDPVLGTVGFGSGLHGWAFTLKQFAEMYVAKFAAKGEGQLGPAERAKKVEDMMKKLWGDRYFDPANGKFSKSATSPEGKKLPRTFCQLILDPIFKVFDAIMNFKKEETAKLIEKLDIKLDSEDKDKEGKPLLKAVMRRWLPAGDALLQMITIHLPSPVTAQKYRCELLYEGPPDDEAAMGIKSCDPKGPLMMYISKMVPTSDKGRFYAFGRVFSGLVSTGLKVRIMGPNYTPGKKEDLYLKPIQRTILMMGRYVEPIEDVPCGNIVGLVGVDQFLVKTGTITTFEHAHNMRVMKFSVSPVVRVAVEAKNPADLPKLVEGLKRLAKSDPMVQCIIEESGEHIIAGAGELHLEICLKDLEEDHACIPIKKSDPVVSYRETVSEESNVLCLSKSPNKHNRLYMKARPFPDGLAEDIDKGEVSARQELKQRARYLAEKYEWDVAEARKIWCFGPDGTGPNILTDITKGVQYLNEIKDSVVAGFQWATKEGALCEENMRGVRFDVHDVTLHADAIHRGGGQIIPTARRCLYASVLTAQPRLMEPIYLVEIQCPEQVVGGIYGVLNRKRGHVFEESQVAGTPMFVVKAYLPVNESFGFTADLRSNTGGQAFPQCVFDHWQILPGDPFDNSSRPSQVVAETRKRKGLKEGIPALDNFLDKL

SEQ ID NO: 4827 - protein, 5537 aa, Homo sapiens
MSSGNASYRCSMSSSADFSDEDDFSQKSGSASPAPGDTLPWNLPKHERSKRKIQGGSVLDPAERAVLRIADERDKVQKKTFTKWINQHLMKVRKHVNDLYEDLRDGHNLISLLEVLSGDTLPREKGRMRFHRLQNVQIALDYLKRRQVKLVNIRNDDITDGNPKLTLGLIWTIILHFQISDIHVTGESEDMSAKERLLLWTQQATEGYAGIRCENFTTCWRDGKLFNAIIHKYRPDLIDMNTVAVQSNLANLEHAFYVAEKIGVIRLLDPEDVDVSSPDEKSVITYVSSLYDAFPKVPEGGEGIGANDVEVKWIEYQNMVNYLIQWIRHHVTTMSERTFPNNPVELKALYNQYLQFKETEIPPKETEKSKIKRLYKLLEIWIEFGRIKLLQGYHPNDIEKEWGKLIIAMLEREKALRPEVERLEMLQQIANRVQRDSVICEDKLILAGNALQSDSKRLESGVQFQNEAEIAGYILECENLLRQHVIDVQILIDGKYYQADQLVQRVAKLRDEIMALRNECSSVYSKGRILTTEQTKLMISGITQSLNSGFAQTLHPSLTSGLTQSLTPSLTSSSMTSGLSSGMTSRLTPSVTPAYTPGFPSGLVPNFSSGVEPNSLQTLKLMQIRKPLLKSSLLDQNLTEEEINMKFVQDLLNWVDEMQVQLDRTEWGSDLPSVESHLENHKNVHRAIEEFESSLKEAKISEIQMTAPLKLTYAEKLHRLESQYAKLLNTSRNQERHLDTLHNFVSRATNELIWLNEKEEEEVAYDWSERNTNIARKKDYHAELMRELDQKEENIKSVQEIAEQLLLENHPARLTIEAYRAAMQTQWSWILQLCQCVEQHIKENTAYFEFFNDAKEATDYLRNLKDAIQRKYSCDRSSSIHKLEDLVQESMEEKEELLQYKSTIANLMGKAKTIIQLKPRNSDCPLKTSIPIKAICDYRQIEITIYKDDECVLANNSHRAKWKVISPTGNEAMVPSVCFTVPPPNKEAVDLANRIEQQYQNVLTLWHESHINMKSVVSWHYLINEIDRIRASNVASIKTMLPGEHQQVLSNLQSRFEDFLEDSQESQVFSGSDITQLEKEVNVCKQYYQELLKSAEREEQEESVYNLYISEVRNIRLRLENCEDRLIRQIRTPLERDDLHESVFRITEQEKLKKELERLKDDLGTITNKCEEFFSQAAASSSVPTLRSELNVVLQNMNQVYSMSSTYIDKLKTVNLVLKNTQAAEALVKLYETKLCEEEAVIADKNNIENLISTLKQWRSEVDEKRQVFHALEDELQKAKAISDEMFKTYKERDLDFDWHKEKADQLVERWQNVHVQIDNRLRDLEGIGKSLKYYRDTYHPLDDWIQQVETTQRKIQENQPENSKTLATQLNQQKMLVSEIEMKQSKMDECQKYAEQYSATVKDYELQTMTYRAMVDSQQKSPVKRRRMQSSADLIIQEFMDLRTRYTALVTLMTQYIKFAGDSLKRLEEEEKSLEEEKKEHVEKAKELQKWVSNISKTLKDAEKAGKPPFSKQKISSEEISTKKEQLSEALQTIQLFLAKHGDKMTDEERNELEKQVKTLQESYNLLFSESLKQLQESQTSGDVKVEEKIVAERQQEYKEKLQGICDLLTQTENRLIGHQEAFMIGDGTVELKKYQSKQEELQKDMQGSAQALAEVVKNTENFLKENGEKLSQEDKALIEQKLNEAKIKCEQLNLKAEQSKKELDKVVTTAIKEETEKVAAVKQLEESKTKIENLLDWLSNVDKDSERAGTKHKQVIEQNGTHFQEGDGKSAIGEEDEVNGNLLETDVDGQVGTTQENLNQQYQKVKAQHEKIISQHQAVIIATQSAQVLLEKQGQYLSPEEKEKLQKNMKELKVHYETALAESEKKMKLTHSLQEELEKFDADYTEFEHWLQQSEQELENLEAGADDINGLMTKLKRQKSFSEDVISHKGDLRYITISGNRVLEAAKSCSKRDGGKVDTSATHREVQRKLDHATDRFRSLYSKCNVLGNNLKDLVDKYQHYEDASCGLLAGLQACEATASKHLSEPIAVDPKNLQRQLEETKALQGQISSQQVAVEKLKKTAEVLLDARGSLLPAKNDIQKTLDDIVGRYEDLSKSVNERNEKLQITLTRSLSVQDGLDEMLDWMGNVESSLKEQGQVPLNSTALQDIISKNIMLEQDIAGRQSSINAMNEKVKKFMETTDPSTASSLQAKMKDLSARFSEASHKHKETLAKMEELKTKVELFENLSEKLQTFLETKTQALTEVDVPGKDVTELSQYMQESTSEFLEHKKHLEVLHSLLKEISSHGLPSDKALVLEKTNNLSKKFKEMEDTIKEKKEAVTSCQEQLDAFQVLVKSLKSWIKETTKKVPIVQPSFGAEDLGKSLEDTKKLQEKWSLKTPEIQKVNNSGISLCNLISAVTTPAKAIAAVKSGGAVLNGEGTATNTEEFWANKGLTSIKKDMTDISHGYEDLGLLLKDKIAELNTKLSKLQKAQEESSAMMQWLQKMNKTATKWQQTPAPTDTEAVKTQVEQNKSFEAELKQNVNKVQELKDKLTELLEENPDTPEAPRWKQMLTEIDSKWQELNQLTIDRQQKLEESSNNLTQFQTVEAQLKQWLVEKELMVSVLGPLSIDPNMLNTQRQQVQILLQEFATRKPQYEQLTAAGQGILSRPGEDPSLRGIVKEQLAAVTQKWDSLTGQLSDRCDWIDQAIVKSTQYQSLLRSLSDKLSDLDNKLSSSLAVSTHPDAMNQQLETAQKMKQEIQQEKKQIKVAQALCEDLSALVKEEYLKAELSRQLEGILKSFKDVEQKAENHVQHLQSACASSHQFQQMSRDFQAWLDTKKEEQNKSHPISAKLDVLESLIKDHKDFSKTLTAQSHMYEKTIAEGENLLLKTQGSEKAALQLQLNTIKTNWDTFNKQVKERENKLKESLEKALKYKEQVETLWPWIDKCQNNLEEIKFCLDPAEGENSIAKLKSLQKEMDQHFGMVELLNNTANSLLSVCEIDKEVVTDENKSLIQKVDMVTEQLHSKKFCLENMTQKFKEFQEVSKESKRQLQCAKEQLDIHDSLGSQAYSNKYLTMLQTQQKSLQALKHQVDLAKRLAQDLVVEASDSKGTSDVLLQVETIAQEHSTLSQQVDEKCSFLETKLQGIGHFQNTIREMFSQFAEFDDELDSMAPVGRDAETLQKQKETIKAFLKKLEALMASNDNANKTCKMMLATEETSPDLVGIKRDLEALSKQCNKLLDRAQAREEQVEGTIKRLEEFYSKLKEFSILLQKAEEHEESQGPVGMETETINQQLNMFKVFQKEEIEPLQGKQQDVNWLGQGLIQSAAKSTSTQGLEHDLDDVNARWKTLNKKVAQRAAQLQEALLHCGRFQDALESLLSWMVDTEELVANQKPPSAEFKVVKAQIQEQKLLQRLLDDRKSTVEVIKREGEKIATTAEPADKVKILKQLSLLDSRWEALLNKAETRNRQLEGISVVAQQFHETLEPLNEWLTTIEKRLVNCEPIGTQASKLEEQIAQHKALEDDIINHNKHLHQAVSIGQSLKVLSSREDKDMVQSKLDFSQVWYIEIQEKSHSRSELLQQALCNAKIFGEDEVELMNWLNEVHDKLSKLSVQDYSTEGLWKQQSELRVLQEDILLRKQNVDQALLNGLELLKQTTGDEVLIIQDKLEAIKARYKDITKLSTDVAKTLEQALQLARRLHSTHEELCTWLDKVEVELLSYETQVLKGEEASQAQMRPKELKKEAKNNKALLDSLNEVSSALLELVPWRAREGLEKMVAEDNERYRLVSDTITQKVEEIDAAILRSQQFDQAADAELSWITETEKKLMSLGDIRLEQDQTSAQLQVQKTFTMEILRHKDIIDDLVKSGHKIMTACSEEEKQSMKKKLDKVLKNYDTICQINSERYLQLERAQSLVNQFWETYEELWPWLTETQSIISQLPAPALEYETLRQQQEEHRQLRELIAEHKPHIDKMNKTGPQLLELSPGEGFSIQEKYVAADTLYSQIKEDVKKRAVALDEAISQSTQFHDKIDQILESLERIVERLRQPPSISAEVEKIKEQISENKNVSVDMEKLQPLYETLKQRGEEMIARSGGTDKDISAKAVQDKLDQMVFIWENIHTLVEEREAKLLDVMELAEKFWCDHMSLIVTIKDTQDFIRDLEDPGIDPSVVKQQQEAAETIREEIDGLQEELDIVINLGSELIAACGEPDKPIVKKSIDELNSAWDSLNKAWKDRIDKLEEAMQAAVQYQDGLQAVFDWVDIAGGKLASMSPIGTDLETVKQQIEELKQFKSEAYQQQIEMERLNHQAELLLKKVTEESDKHTVQDPLMELKLIWDSLEERIINRQHKLEGALLALGQFQHALDELLAWLTHTEGLLSEQKPVGGDPKAIEIELAKHHVLQNDVLAHQSTVEAVNKAGNDLIESSAGEEASNLQNKLEVLNQRWQNVLEKTEQRKQQLDGALRQAKGFHGEIEDLQQWLTDTERHLLASKPLGGLPETAKEQLNVHMEVCAAFEAKEETYKSLMQKGQQMLARCPKSAETNIDQDINNLKEKWESVETKLNERKTKLEEALNLAMEFHNSLQDFINWLTQAEQTLNVASRPSLILDTVLFQIDEHKVFANEVNSHREQIIELDKTGTHLKYFSQKQDVVLIKNLLISVQSRWEKVVQRLVERGRSLDDARKRAKQFHEAWSKLMEWLEESEKSLDSELEIANDPDKIKTQLAQHKEFQKSLGAKHSVYDTTNRTGRSLKEKTSLADDNLKLDDMLSELRDKWDTICGKSVERQNKLEEALLFSGQFTDALQALIDWLYRVEPQLAEDQPVHGDIDLVMNLIDNHKAFQKELGKRTSSVQALKRSARELIEGSRDDSSWVKVQMQELSTRWETVCALSISKQTRLEAALRQAEEFHSVVHALLEWLAEAEQTLRFHGVLPDDEDALRTLIDQHKEFMKKLEEKRAELNKATTMGDTVLAICHPDSITTIKHWITIIRARFEEVLAWAKQHQQRLASALAGLIAKQELLEALLAWLQWAETTLTDKDKEVIPQEIEEVKALIAEHQTFMEEMTRKQPDVDKVTKTYKRRAADPSSLQSHIPVLDKGRAGRKRFPASSLYPSGSQTQIETKNPRVNLLVSKWQQVWLLALERRRKLNDALDRLEELREFANFDFDIWRKKYMRWMNHKKSRVMDFFRRIDKDQDGKITRQEFIDGILSSKFPTSRLEMSAVADIFDRDGDGYIDYYEFVAALHPNKDAYKPITDADKIEDEVTRQVAKCKCAKRFQVEQIGDNKYRFFLGNQFGDSQQLRLVRILRSTVMVRVGGGWMALDEFLVKNDPCRAKGRTNMELREKFILADGASQGMAAFRPRGRRSRPSSRGASPNRSTSVSSQAAQAASPQVPATTTPKILHPLTRNYGKPWLTNSKMSTPCKAAECSDFPVPSAEGTPIQGSKLRLPGYLSGKGFHSGEDSGLITTAAARVRTQFADSKKTPSRPGSRAGSKAGSRASSRRGSDASDFDISEIQSVCSDVETVPQTHRPTPRAGSRPSTAKPSKIPTPQRKSPASKLDKSSKR

SEQ ID NO: 4828 - protein, 659 aa, Homo sapiens
MAAVILESIFLKRSQQKKKTSPLNFKKRLFLLTVHKLSYYEYDFERGRRGSKKGSIDVEKITCVETVVPEKNPPPERQIPRRGEESSEMEQISIIERFPYPFQVVYDEGPLYVFSPTEELRKRWIHQLKNVIRYNSDLVQKYHPCFWIDGQYLCCSQTAKNAMGCQILENRNGSLKPGSSHRKTKKPLPPTPEEDQILKKPLPPEPAAAPVSTSELKKVVALYDYMPMNANDLQLRKGDEYFILEESNLPWWRARDKNGQEGYIPSNYVTEAEDSIEMYEWYSKHMTRSQAEQLLKQEGKEGGFIVRDSSKAGKYTVSVFAKSTGDPQGVIRHYVVCSTPQSQYYLAEKHLFSTIPELINYHQHNSAGLISRLKYPVSQQNKNAPSTAGLGYGSWEIDPKDLTFLKELGTGQFGVVKYGKWRGQYDVAIKMIKEGSMSEDEFIEEAKVMMNLSHEKLVQLYGVCTKQRPIFIITEYMANGCLLNYLREMRHRFQTQQLLEMCKDVCEAMEYLESKQFLHRDLAARNCLVNDQGVVKVSDFGLSRYVLDDEYTSSVGSKFPVRWSPPEVLMYSKFSSKSDIWAFGVLMWEIYSLGKMPYERFTNSETAEHIAQGLRLYRPHLASEKVYTIMYSCWHEKADERPTFKILLSNILDVMDEES

SEQ ID NO: 4829 - protein, 943 aa, Homo sapiens
MGLTKQYLRYVASAVFGVIGSQKGNIVFVTLRGEKGRYVAVPACEHVFIWDLRKGEKILILQGLKQEVTCLCPSPDGLHLAVGYEDGSIRIFSLLSGEGNVTFNGHKAAITTLKYDQLGGRLASGSKDTDIIVWDVINESGLYRLKGHKDAITQALFLREKNLLVTSGKDTMVKWWDLDTQHCFKTMVGHRTEVWGLVLLSEEKRLITGASDSELRVWDIAYLQEIEDPEEPDPKKIKGSSPGIQDTLEAEDGAFETDEAPEDRILSCRKAGSIMREGRDRVVNLAVDKTGRILACHGTDSVLELFCILSKKEIQKKMDKKMKKARKKAKLHSSKGEEEDPEVNVEMSLQDEIQRVTNIKTSAKIKSFDLIHSPHGELKAVFLLQNNLVELYSLNPSLPTPQPVRTSRITIGGHRSDVRTLSFSSDNIAVLSAAADSIKIWNRSTLQCIRTMTCEYALCSFFVPGDRQVVIGTKTGKLQLYDLASGNLLETIDAHDGALWSMSLSPDQRGFVTGGADKSVKFWDFELVKDENSTQKRLSVKQTRTLQLDEDVLCVSYSPNQKLLAVSLLDCTVKIFYVDTLKFFLSLYGHKLPVICMDISHDGALIATGSADRNVKIWGLDFGDCHKSLFAHDDSVMYLQFVPKSHLFFTAGKDHKIKQWDADKFEHIQTLEGHHQEIWCLAVSPSGDYVVSSSHDKSLRLWERTREPLILEEEREMEREAEYEESVAKEDQPAVPGETQGDSYFTGKKTIETVKAAERIMEAIELYREETAKMKEHKAICKAAGKEVPLPSNPILMAYGSISPSAYVLEIFKGIKSSELEESLLVLPFSYVPDILKLFNEFIQLGSDVELICRCLFFLLRIHFGQITSNQMLVPVIEKLRETTISKVSQVRDVIGFNMAGLDYLKRECEAKSEVMFFADATSHLEEKKRKRKKREKLILTLT

SEQ ID NO: 4830 - protein, 107 aa, Homo sapiens
MSESSSKSSQPLASKQEKDGTEKRGRGRPRKQPPVSPGTALVGSQKEPSEVPTPKRPRGRPKGSKNKGAAKTRKTTTTPGRKPRGRPKKLEKEEEEGISQESSEEEQ

SEQ ID NO: 4831 - protein, 827 aa, Homo sapiens
MLLCLSPAWLMKVPAPGQPGEAALLVSKAVSFHPGGLTFLDDFVPPRRATYFLAGLGLGPGRGREAAELARDLTCPTGASAELARLLEDRLLTRQLLAQQGGVAVPATLAFTYKPPGLLRGGDASLGLRLVELSGKEGQETLVKEEVEAFLRSEALGDILQVAVKLSGWRWRGRQAWRLHPRAELGAVVDTVLALLEKLEEEESVLVEAVYPPAQLPCSDGPSPGPGLAVRICAVVCRTQGDRPLLSKVVCGVGRGDRPLRHHNSLPRTLEVALAQCGLGEEAQVAAVRQRVKAAAEAALAAVLALEAGLSAEQRGGRRAHTDFLGVDFALTAAGGVLTPVALELNGGLCLEACGALEGLWAAPRLGPAADEAVAAPLVETMLRRSARCLMEGKQLLVVGAGGVSKKFVWEAARDYGLQLHLVESDPNHFASQLVQTFIHFDMTEHRRDEENARLLAELVRARGLKLDGCFSYWDDCLVLTALLCQELGLPCSSPAAMRLAKQKSLTQLHLLHHHGPPWPAPSLHAVPCCPLESEADVERAVHQVPLPGVMKLEFGAGAVGVRLVEDAPQCHEHFSRITRDLQGEADHPGIGLGWGNAMLLMEFVEGTEHDVDLVLFGGRLLAAFVSDNGPTRLPGFTETAACMPTGLAPEQEAQMVQAAFRCCLGCGLLDGVFNVELKLTGAGPRLIEINPRMGGFYLRDWILELYGVDLLLAAVMVACGLRPALPTRPRARGHLVGVMCLVSQHLQALSSTASRETLQALHDRGLLRLNLLEEALVPGEYEEPYCSVACAGPSPTEARLRLLGLCQGLGIDGPSYPVAHFLSHFK

SEQ ID NO: 4832 - protein, 339 aa, Homo sapiens
MAEASSDPGAEEREELLGPTAQWSVEDEEEAVHEQCQHERDRQLQAQDEEGGGHVPERPKQEMLLSLKPSEAPELDEDEGFGDWSQRPEQRQQHEGAQGALDSGEPPQCRSPEGEQEDRPGLHAYEKEDSDEVHLEELSLSKEGPGPEDTVQDNLGAAGAEEEQEEHQKCQQPRTPSPLVLEGTIEQSSPPLSPTTKLIDRTESLNRSIEKSNSVKKSQPDLPISKIDQWLEQYTQAIETAGRTPKLARQASIELPSMAVASTKSRWETGEVQAQSAAKTPSCKDIVAGDMSKKSLWEQKGGSKTSSTIKSTPSGKRYKFVATGHGKYEKVLVEGGPAP

SEQ ID NO: 4833 - protein, 128 aa, Homo sapiens
MAGGKAGKDSGKAKAKAVSRSQRAGLQFPVGRIHRHLKTRTTSHGRVGATAAVYSAAILEYLTAEVLELAGNASKDLKVKRITPRHLQLAIRGDEELDSLIKATIAGGGVIPHIHKSLIGKKGQQKTA

SEQ ID NO: 4834 - protein, 444 aa, Homo sapiens
MLQRIGLIFLHNIVVVSNCFYFQAFLDEFTNWSRINPNKARIPMAGDTQGVVGTVSKPCFTAYEMKIGAITFQVATGDIATEQVDVIVNSTARTFNRKSGVSRAILEGAGQAVESECAVLAAQPHRDFIITPGGCLKCKIIIHVPGGKDVRKTVTSVLEECEQRKYTSVSLPAIGTGNAGKNPITVADNIIDAIVDFSSQHSTPSLKTVKVVIFQPELLNIFYDSMKKRDLSASLNFQSTFSMTTCNLPEHWTDMNHQLFCMVQLEPGQSEYNTIKDKFTRTCSSYAIEKIERIQNAFLWQSYQVKKRQMDIKNDHKNNERLLFHGTDADSVPYVNQHGFNRSCAGKNAVSYGKGTYFAVDASYSAKDTYSKPDSNGRKHMYVVRVLTGVFTKGRAGLVTPPPKNPHNPTDLFDSVTNNTRSPKLFVVFFDNQAYPEYLITFTA

SEQ ID NO: 4835 - protein, 499 aa, Homo sapiens
MAQFAFESDLHSLLQLDAPIPNAPPARWQRKAKEAAGPAPSPMRAANRSHSAGRTPGRTPGKSSSKVQTTPSKPGGDRYIPHRSAAQMEVASFLLSKENQPENSQTPTKKEHQKAWALNLNGFDVEEAKILRLSGKPQNAPEGYQNRLKVLYSQKATPGSSRKTCRYIPSLPDRILDAPEIRNDYYLNLVDWSSGNVLAVALDNSVYLWSASSGDILQLLQMEQPGEYISSVAWIKEGNYLAVGTSSAEVQLWDVQQQKRLRNMTSHSARVGSLSWNSYILSSGSRSGHIHHHDVRVAEHHVATLSGHSQEVCGLRWAPDGRHLASGGNDNLVNVWPSAPGEGGWVPLQTFTQHQGAVKAVAWCPWQSNVLATGGGTSDRHIRIWNVCSGACLSAVDAHSQVCSILWSPHYKELISGHGFAQNQLVIWKYPTMAKVAELKGHTSRVLSLTMSPDGATVASAAADETLRLWRCFELDPARRREREKASAAKSSLIHQGIR

SEQ ID NO: 4836 - protein, 138 aa, Homo sapiens
MEEEAETEEQQRFSYQQRLKAAVHYTVGCLCEEVALDKEMQFSKQTIAAISELTFRQCENFAKDLEMFARHAKRTTINTEDVKLLARRSNSLLKYITDKSEEIAQINLERKAQKKKKSEDGSKNSRQPAEAGVVESEN

SEQ ID NO: 4837 - protein, 1755 aa, Homo sapiens
METRSSKTRRSLASRTNECQGTMWAPTSPPAGSSSPSQPTWKSSLYSSLAYSEAFHYSFAARPRRLTQLALAQRPEPQLLRLRPSSLRTQDISHLLTGVFRNLYSAEVIGDEVSASLIKARGSENERHEEFVDQLQQIRELYKQRLDEFEMLERHITQAQARAIAENERVMSQAGVQDLESLVRLPPVKSVSRWCIDSELLRKHHLISPEDYYTDTVPFHSAPKGISLPGCSKLTFSCEKRSVQKKELNKKLEDSCRKKLAEFEDELDHTVDSLTWNLTPKAKERTREPLKKASQPRNKNWMNHLRVPQRELDRLLLARMESRNHFLKNPRFFPPNTRYGGKSLVFPPKKPAPIGEFQSTEPEQSCADTPVFLAKPPIGFFTDYEIGPVYEMVIALQNTTTTSRYLRVLPPSTPYFALGLGMFPGKGGMVAPGMTCQYIVQFFPDCLGDFDDFILVETQSAHTLLIPLQARRPPPVLTLSPVLDCGYCLIGGVKMTRFICKNVGFSVGRFCIMPKTSWPPLSFKAIATVGFVEQPPFGILPSVFELAPGHAILVEVLFSPKSLGKAEQTFIIMCDNCQIKELVTIGIGQLIALDLIYISGEKSQPDPGELTDLTAQHFIRFEPENLRSTARKQLIIRNATHVELAFYWQIMKPNLQPLMPGETFSMDSIKCYPDKETAFSIMPRKGVLSPHTDHEFILSFSPHELRDFHSVLQMVLEEVPEPVSSEAESLGHSSYSVDDVIVLEIEVKGSVEPFQVLLEPYALIIPGENYIGINVKKAFKMWNNSKSPIRYLWGKISDCHIIEVEPGTGVIEPSEVGDFELNFTGGVPGPTSQDLLCEIEDSPSPVVLHIEAVFKGPALIINVSALQFGLLRLGQKATNSIQIRNVSQLPATWRMKESPVSLQERPEDVSPFDIEPSSGQLHSLGECRVDITLEALHCQHLETVLELEVENGAWSYLPVYAEVQKPHVYLQSSQVEVRNLYLGVPTKTTITLINGTLLPTQFHWGKLLGHQAEFCMVTVSPKHGLLGPSEECQLKLELTAHTQEELTHLALPCHVSGMKKPLVLGISGKPQGLQVAITISKESSDCSTEQWPGHPKELRLDFGSAVPLRTRVTRQLILTNRSPIRTRFSLKFEYFGSPQNSLSKKTSLPNMPPALLKTVRMQEHLAKREQLDFMESMLSHGKGAAFFPHFSQGMLGPYQQLCIDITGCANMWGEYWDNLICTVGDLLPEVIPVHMAAVGCPISSLRTTSYTIDQAQKEPAMRFGTQVSGGDTVTRTLRLNNSSPCDIRLDWETYVPEDKEDRLVELLVFYGPPFPLRDQAGNELVCPDTPEGGCLLWSPGPSSSSEFSHETDSSVEGSSSASNRVAQKLISVILQAHEGVPSGHLYCISPKQVVVPAGGSSTIYISFTPMVLSPEILHKVECTGYALGFMSLDSKVEREIPGKRHRLQDFAVGPLKLDLHSYVRPAQLSVELDYGGSMEFQCQASDLIPEQPCSGVLSELVTTHHLKLTNTTEIPHYFRLMVSRPFSVSQDGASQDHRAPGPGQKQECEEETASADKQLVLQAQENMLVNVSFSLSLELLSYQKLPADQTLPGVDIQQSASGEREMVFTQNLLLEYTNQTTQVVPLRAVVAVPELQLSTSWVDFGTCFVSQQRVREVYLMNLSGCRSYWTMLMGQQEPAKAAVAFRVSPNSGLLEARSANAPPTSIALQVFFTARSSELYESTMVVEGVLGEKSCTLRLRGQGSYDERYMLPHQP

SEQ ID NO: 4838 - protein, 485 aa, Homo sapiens
MCQVGEDYGEPAPEEPPPAPRPSREQKCVKCKEAQPVVVIRAGDAFCRDCFKAFYVHKFRAMLGKNRLIFPGEKVLLAWSGGPSSSSMVWQVLEGLSQDSAKRLRFVAGVIFVDEGAACGQSLEERSKTLAEVKPILQATGFPWHVVALEEVFSLPPSVLWCSAQELVGSEGAYKAAVDSFLQQQHVLGAGGGPGPTQGEEQPPQPPLDPQNLARPPAPAQTEALSQLFCSVRTLTAKEELLQTLRTHLILHMARAHGYSKVMTGDSCTRLAIKLMTNLALGRGAFLAWDTGFSDERHGDVVVVRPMRDHTLKEVAFYNRLFSVPSVFTPAVDTKAPEKASIHRLMEAFILRLQTQFPSTVSTVYRTSEKLVKGPRDGPAAGDSGPRCLLCMCALDVDAADSATAFGAQTSSRLSQMQSPIPLTETRTPPGPCCSPGVGWAQRCGQGACRREDPQACIEEQLCYSCRVNMKDLGLGLAGDPGLSD

SEQ ID NO: 4839 - protein, 507 aa, Homo sapiens
MAGRGSLVSWRAFHGCDSAEELPRVSPRFLRAWHPPPVSARMPTRRWAPGTQCITKCEHTRPKPGELAFRKGDVVTILEACENKSWYRVKHHTSGQEGLLAAGALREREALSADPKLSLMPWFHGKISGQEAVQQLQPPEDGLFLVRESARHPGDYVLCVSFGRDVIHYRVLHRDGHLTIDEAVFFCNLMDMVEHYSKDKGAICTKLVRPKRKHGTKSAEEELARAGWLLNLQHLTLGAQIGEGEFGAVLQGEYLGQKVAVKNIKCDVTAQAFLDETAVMTKMQHENLVRLLGVILHQGLYIVMEHVSKGNLVNFLRTRGRALVNTAQLLQFSLHVAEGMEYLESKKLVHRDLAARNILVSEDLVAKVSDFGLAKAERKGLDSSRLPVKWTAPEALKHGKFTSKSDVWSFGVLLWEVFSYGRAPYPKMSLKEVSEAVEKGYRMEPPEGCPGPVHVLMSSCWEAEPARRPPFRKLAEKLARELRSAGAPASVSGQDADGSTSPRSQEP

SEQ ID NO: 4840 - protein, 532 aa, Homo sapiens
MEELSSVGEQVFAAECILSKRLRKGKLEYLVKWRGWSSKHNSWEPEENILDPRLLLAFQKKEHEKEVQNRKRGKRPRGRPRKLTAMSSCSRRSKLKEPDAPSKSKSSSSSSSSTSSSSSSDEEDDSDLDAKRGPRGRETHPVPQKKAQILVAKPELKDPIRKKRGRKPLPPEQKATRRPVSLAKVLKTARKDLGAPASKLPPPLSAPVAGLAALKAHAKEACGGPSAMATPENLASLMKGMASSPGRGGISWQSSIVHYMNRMTQSQAQAASRLALKAQATNKCGLGLDLKVRTQKGELGMSPPGSKIPKAPSGGAVEQKVGNTGGPPHTHGASRVPAGCPGPQPAPTQELSLQVLDLQSVKNGMPGVGLLARHATATKGVPATNPAPGKGTGSGLIGASGATMPTDTSKSEKLASRAVAPPTPASKRDCVKGSATPSGQESRTAPGEARKAATLPEMSAGEESSSSDSDPDSASPPSTGQNPSVSVQTSQDWKPTRSLIEHVFVTDVTANLITVTVKESPTSVGFFNLRHY

SEQ ID NO: 4841 - protein, 296 aa, Homo sapiens
MLSPKDILRKDLKLVHGYPMTCAFASNWEKIEQFHSRPDDIVIATYPKSGTTWVSEIIDMILNDGDIEKCKRGFITEKVPMLEMTLPGLRTSGIEQLEKNPSPRIVKTHLPTDLLPKSFWENNCKMIYLARNAKDVSVSYYHFDLMNNLQPFPGTWEEYLEKFLTGKVAYGSWFTHVKNWWKKKEEHPILFLYYEDMKENPKEEIKKIIRFLEKNLNDEILDRIIHHTSFEVMKDNPLVNYTHLPTTVMDHSKSPFMRKGTAGDWKNYFTVAQNEKFDAIYETEMSKTALQFRTEI

SEQ ID NO: 4842 - protein, 778 aa, Homo sapiens
MSPCFSFIGCKLCSIVTRGCETVEMTLRRNGLGQLGFHVNFEGIVADVEPFGFAWKAGLRQGSRLVEICKVAVATLTHEQMIDLLRTSVTVKVVIIQPHDDGSPRRGCSELCRIPMVEYKLDSEGTPCEYKTPFRRNTTWHRVPTPALQPLSRASPIPGTPDRLPCQQLLQQAQAAIPRSTSFDRKLPDGTRSSPSNQSSSSDPGPGGSGPWRPQVGYDGCQSPLLLEHQGSGPLECDGAREREDTMEASRHPETKWHGPPSKVLGSYKERALQKDGSCKDSPNKLSHIGDKSCSSHSSSNTLSSNTSSNSDDKHFGSGDLMDPELLGLTYIKGASTDSGIDTAPCMPATILGPVHLAGSRSLIHSRAEQWADAADVSGPDDEPAKLYSVHGYASTISAGSAAEGSMGDLSEISSHSSGSHHSGSPSAHCSKSSGSLDSSKVYIVSHSSGQQVPGSMSKPYHRQGAVNKYVIGWKKSEGSPPPEEPEVTECPGMYSEMDVMSTATQHQTVVGDAVAETQHVLSKEDFLKLMLPDSPLVEEGRRKFSFYGNLSPRRSLYRTLSDESICSNRRGSSFGSSRSSVLDQALPNDILFSTTPPYHSTLPPRAHPAPSMGSLRNEFWFSDGSLSDKSKCADPGLMPLPDTATGLDWTHLVDAARAFEDQRVASFCTLTDMQHGQDLEGAQELPLCVDPGSGKEFMDTTGERSPSPLTGKVNQLELILRQLQTDLRKEKQDKAVLQAEVQHLRQDNMRLQEESQTATAQLRKFTEWFFTTIDKKS

SEQ ID NO: 4843 - protein, 404 aa, Homo sapiens
MSRRSSRLQAKQQPQPSQTESPQEAQIIQAKKRKTTQDVKKRREEVTKKHQYEIRNCWPPVLSGGISPCIIIETPHKEIGTSDFSRFTNYRFKNLFINPSPLPDLSWGCSKEVWLNMLKKESRYVHDKHFEVLHSDLEPQMRSILLDWLLEVCEVYTLHRETFYLAQDFFDRFMLTQKDINKNMLQLIGITSLFIASKLEEIYAPKLQEFAYVTDGACSEEDILRMELIILKALKWELCPVTIISWLNLFLQVDALKDAPKVLLPQYSQETFIQIAQLLDLCILAIDSLEFQYRILTAAALCHFTSIEVVKKASGLEWDSISECVDWMVPFVNVVKSTSPVKLKTFKKIPMEDRHNIQTHTNYLAMLEEVNYINTFRKGGQLSPVCNGGIMTPPKSTEKPPGKH

SEQ ID NO: 4844 - protein, 831 aa, Homo sapiens
MASSETEIRWAEPGLGKGPQRRRWAWAEDKRDVDRSSSQSWEEERLFPNATSPELLEDFRLAQQHLPPLEWDPHPQPDGHQDSESGETSGEEAEAEDVDSPASSHEPLAWLPQQGRQLDMTEEEPDGTLGSLEVEEAGESSSRLGYEAGLSLEGHGNTSPMALGHGQARGWVASGEQASGDKLSEHSEVNPSVELSPARSWSSGTVSLDHPSDSLDSTWEGETDGPQPTALAETLPEGPSHHLLSPDGRTGGSVARATPMEFQDSSAPPAQSPQHATDRWRRETTRFFCPQPKEHIWKQTKTSPKPLPSRFIGSISPLNPQPRPTRQGRPLPRQGATLAGRSSSNAPKYGRGQLNYPLPDFSKVGPRVRFPKDESYRPPKSRSHNRKPQAPARPLIFKSPAEIVQEVLLSSGEAALAKDTPPAHPITRVPQEFQTPEQATELVHQLQEDYHRLLTKYAEAENTIDQLRLGAKVNLFSDPPQPNHSIHTGMVPQGTKVLSFTIPQPRSAEWWPGPAEDPQASAASGWPSARGDLSPSSLTSMPTLGWLPENRDISEDQSSAEQTQALASQASQFLAKVESFERLIQAGRLMPQDQVKGFQRLKAAHAALEEEYLKACREQHPAQPLAGSKGTPGRFDPRRELEAEIYRLGSCLEELKEHIDQTQQEPEPPGSDSALDSTPALPCLHQPTHLPAPSGQAPMPAIKTSCPEPATTTAAASTGPCPLHVNVEVSSGNSEVEDRPQDPLARLRHKELQMEQVYHGLMERYLSVKSLPEAMRMEEEEEGEEEEEEEGGGDSLEVDGVAATPGKAEATRVLPRQCPVQAEKSHGAPLE

SEQ ID NO: 4845 - protein, 138 aa, Homo sapiens
MAKQPSDVSSECDREGRQLQPAERPPQLRPGAPTSLQTEPQDRSPAPMSCDKSTQTPSPPCQAFNHYLSAMASMRQAEPADMRPEIWIAQELRRIGDEFNAYYARRVFLNNYQAAEDHPRMVILRLLRYIVRLVWRMH

SEQ ID NO: 4846 - protein, 204 aa, Homo sapiens [sequence omitted]

SEQ ID NO: 4847 - protein, 335 aa, Homo sapiens
MVRPVRHKKPVNYSQFDHSDSDDDFVSATVPLNKKSRTAPKELKQDKPKPNLNNLRKEEIPVQEKTPKKRMALDDKLYQRDLEVALALSVKELPTVTTNVQNSQDKSIEKHGSSKIETMNKSPHISNCSVASDYLDLDKITVEDDVGGVQGKRKAASKAAAQQRKILLEGSDGDSANDTEPDFAPGEDSEDDSDFCESEDNDEDFSMRKSKVKEIKKKEVKVKSPVEKKEKKSKSKCNALVTSVDSAPAAVKSESQSLPKKVSLSSDTTRKPLEIRSPSAESKKPKWVPPAASGGSRSSSSPLVVVSVKSPNQSLRLGLSRLARVKPLHPNATST

SEQ ID NO: 4848 - protein, 295 aa, Homo sapiens
MGLPVSWAPPALWVLGCCALLLSLWALCTACRRPEDAVAPRKRARRQRARLQGSATAAEASLLRRTHLCSLSKSDTRLHELHRGPRSSRALRPASMDLLRPHWLEVSRDITGPQAAPSAFPHQELPRALPAAAATAGCAGLEATYSNVGLAALPGVSLAASPVVAEYARVQKRKGTHRSPQEPQQGKTEVTPAAQVDVLYSRVCKPKRRDPGPTTDPLDPKGQGAILALAGDLAYQTLPLRALDVDSGPLENVYESIRELGDPAGRSSTCGAGTPPASSCPSLGRGWRPLPASLP

SEQ ID NO: 4849 - protein, 572 aa, Homo sapiens
MSYQGKKNIPRITSDRLLIKGGKIVNDDQSFYADIYMEDGLIKQIGENLIVPGGVKTIEAHSRMVIPGGIDVHTRFQMPDQGMTSADDFFQGTKAALAGGTTMIIDHVVPEPGTSLLAAFDQWREWADSKSCCDYSLHVDISEWHKGIQEEMEALVKDHGVNSFLVYMAFKDRFQLTDCQIYEVLSVIRDIGAIAQVHAENGDIIAEEQQRILDLGITGPEGHVLSRPEEVEAEAVNRAITIANQTNCPLYITKVMSKSSAEVIAQARKKGTVVYGEPITASLGTDGSHYWSKNWAKAAAFVTSPPLSPDPTTPDFLNSLLSCGDLQVTGSAHCTFNTAQKAVGKDNFTLIPEGTNGTEERMSVIWDKAVVTGKMDENQFVAVTSTNAAKVFNLYPRKGRIAVGSDADLVIWDPDSVKTISAKTHNSSLEYNIFEGMECRGSPLVVISQGKIVLEDGTLHVTEGSGRYIPRKPFPDFVYKRIKARSRLAELRGVPRGLYDGPVCEVSVTPKTVTPASSAKTSPAKQQAPPVRNLHQSGFSLSGAQIDDNIPRRTTQRIVAPPGGRANITSLG

SEQ ID NO: 4850 - protein, 684 aa, Homo sapiens
MWVLLRSGYPLRILLPLRGEWMGRRGLPRNLAPGPPRRRYRKETLQALDMPVLPVTATEIRQYLRGHGIPFQDGHSCLRALSPFAESSQLKGQTGVTTSFSLFIDKTTGHFLCMTSLAEGSWEDFQASVEGRGDGAREGFLLSKAPEFEDSEEVRRIWNRAIPLWELPDQEEVQLADTMFGLTKVTDDTLKRFSVRYLRPARSLVFPWFSPGGSGLRGLKLLEAKCQGDGVSYEETTIPRPSAYHNLFGLPLISRRDAEVVLTSRELDSLALNQSTGLPTLTLPRGTTCLPPALLPYLEQFRRIVFWLGDDLRSWEAAKLFARKLNPKRCFLVRPGDQQPRPLEALNGGFNLSRILRTALPAWHKSIVSFRQLREEVLGELSNVEQAAGLRWSRFPDLNRILKGHRKGELTVFTGPTGSGKTTFISEYALDLCSQGVNTLWGSFEISNVRLARVMLTQFAEGRLEDQLDKYDHWADRFEDLPLYFMTFHGQQSIRTVIDTMQHAVYVYDICHVIIDNLQFMMGHEQLSTDRIAAQDYIIGVFRKFATDNNCHVTLVIHPRKEDDDKELQTASIFGSAKASQEADNVLILQDRKLVTGPGKRYLQVSKNRFDGDVGVFPLEFNKNSLTFSIPPKNKARLKKIKDDTGPVAKKPSSGKKGATTQNSEICSGQAPTPDQPDTSKRSK

SEQ ID NO: 4851 - protein, 189 aa, Homo sapiens
MTEYKLVVVGAGGVGKSALTIQLIQNHFVDEYDPTIEDSYRKQVVIDGETCLLDILDTAGQEEYSAMRDQYMRTGEGFLCVFAINNTKSFEDIHQYREQIKRVKDSDDVPMVLVGNKCDLAARTVESRQAQDLARSYGIPYIETSAKTRQGVEDAFYTLVREIRQHKLRKLNPPDESGPGCMSCKCVLS

SEQ ID NO: 4852 - protein, 632 aa, Homo sapiens
MDTMMLNVRNLFEQLVRRVEILSEGNEVQFIQLAKDFEDFRKKWQRTDHELGKYKDLLMKAETERSALDVKLKHARNQVDVEIKRRQRAEADCEKLERQIQLIREMLMCDTSGSIQLSEEQKSALAFLNRGQPSSSNAGNKRLSTIDESGSILSDISFDKTDESLDWDSSLVKTFKLKKREKRRSTSRQFVDGPPGPVKKTRSIGSAVDQGNESIVAKTTVTVPNDGGPIEAVSTIETVPYWTRSRRKTGTLQPWNSDSTLNSRQLEPRTETDSVGTPQSNGGMRLHDFVSKTVIKPESCVPCGKRIKFGKLSLKCRDCRVVSHPECRDRCPLPCIPTLIGTPVKIGEGMLADFVSQTSPMIPSIVVHCVNEIEQRGLTETGLYRISGCDRTVKELKEKFLRVKTVPLLSKVDDIHAICSLLKDFLRNLKEPLLTFRLNRAFMEAAEITDEDNSIAAMYQAVGELPQANRDTLAFLMIHLQRVAQSPHTKMDVANLAKVFGPTIVAHAVPNPDPVTMLQDIKRQPKVVERLLSLPLEYWSQFMMVEQENIDPLHVIENSNAFSTPQTPDIKVSLLGPVTTPEHQLLKTPSSSSLSQRVRSTLTKNTPRFGSKSKSATNLGRQGNFFASPMLK

SEQ ID NO: 4853 - protein, 456 aa, Homo sapiens
MKCEHCTRKECSKKTKTDDQENVSADAPSPAQENGEKGEFHKLADAKIFLSDCLACDSCMTAEEGVQLSQQNAKDFFRVLNLNKKCDTSKHKVLVVSVCPQSLPYFAAKFNLSVTDASRRLCGFLKSLGVHYVFDTTIAADFSILESQKEFVRRYRQHSEEERTLPMLTSACPGWVRYAERVLGRPITAHLCTAKSPQQVMGSLVKDYFARQQNLSPEKIFHVIVAPCYDKKLEALQESLPPALHGSRGADCVLTSGEIAQIMEQGDLSVRDAAVDTLFGDLKEDKVTRHDGASSDGHLAHIFRHAAKELFNEDVEEVTYRALRNKDFQEVTLEKNGEVVLRFAAAYGFRNIQNMILKLKKGKFPFHFVEVLACAGGCLNGRGQAQTPDGHADKALLRQMEGIYADIPVRRPESSAHVQELYQEWLEGINSPKAREVLHTTYQSQERGTHSLDIKW

SEQ ID NO: 4854 - protein, 579 aa, Homo sapiens
MEVNAGGVIAYISSSSSASSPASCHSEGSENSFQSSSSSVPSSPNSSNSDTNGNPKNGDLANIEGILKNDRIDCSMKTSKSSAPGMTKSHSGVTKFSGMVLLCKVCGDVASGFHYGVHACEGCKGFFRRSIQQNIQYKKCLKNENCSIMRMNRNRCQQCRFKKCLSVGMSRDAVRFGRIPKREKQRMLIEMQSAMKTMMNSQFSGHLQNDTLVEHHEQTALPAQEQLRPKPQLEQENIKSSSPPSSDFAKEEVIGMVTRAHKDTFMYNQEQQENSAESMQPQRGERIPKNMEQYNLNHDHCGNGLSSHFPCSESQQHLNGQFKGRNIMHYPNGHAICIANGHCMNFSNAYTQRVCDRVPIDGFSQNENKNSYLCNTGGRMHLVCPMSKSPYVDPHKSGHEIWEEFSMSFTPAVKEVVEFAKRIPGFRDLSQHDQVNLLKAGTFEVLMVRFASLFDAKERTVTFLSGKKYSVDDLHSMGAGDLLNSMFEFSEKLNALQLSDEEMSLFTAVVLVSADRSGIENVNSVEALQETLIRALRTLIMKNHPNEASIFTKLLLKLPDLRSLNNMHSEELLAFKVHP

SEQ ID NO: 4855 - protein, 271 aa, Homo sapiens
MFRDFGEPGPSSGNGGGYGGPAQPPAAAQAAQQKFHLVPSINTMSGSQELQWMVQPHFLGPSSYPRPLTYPQYSPPQPRPGVIRALGPPPGVRRRPCEQISPEEEERRRVRRERNKLAAAKCRNRRKELTDFLQAETDKLEDEKSGLQREIEELQKQKERLELVLEAHRPICKIPEGAKEGDTGSTSGTSSPPAPCRPVPCISLSPGPVLEPEALHTPTLMTTPSLTPFTPSLVFTYPSTPEPCASAHRKSSSSSGDPSSDPLGSPTLLAL

SEQ ID NO: 4856 - protein, 310 aa, Homo sapiens
MAQALGEDLVQPPELQDDSSSLGSDSELSGPGPYRQADRYGFIGGSSAEPGPGHPPADLIRQREMKWVEMTSHWEKTMSRRYKKVKMQCRKGIPSALRARCWPLLCGAHVCQKNSPGTYQELAEAPGDPQWMETIGRDLHRQFPLHEMFVSPQGHGRGSCRCSRPTPCIDRSRATARPRGPWLLCCSCTCPQRRPSGAWCRSVRSTSLGTTGPTWCQSTVPCGADTGAPGAGHCRAARGLPWPPGDTGSPSSHPPRAAAGGGLHVTGAQRGAVRAGPAAGDQGPAGPAARFRAGTPAPATGPPRRGPSHL

SEQ ID NO: 4857 - protein, 602 aa, Homo sapiens
MRSMKALQKALSRAGSHCGRGGWGHPSRSPLLGGGVRHHLSEAAAQGRETPHSHQPQHQDHDSSESGMLSRLGDLLFYTIAEGQERIPIHKFTTALKATGLQTSDPRLRDCMSEMHRVVQESSSGGLLDRDLFRKCVSSNIVLLTQAFRKKFVIPDFEEFTGHVDRIFEDVKELTGGKVAAYIPQLAKSNPDLWGVSLCTVDGQRHSVGHTKIPFCLQSCVKPLTYAISISTLGTDYVHKFVGKEPSGLRYNKLSLNEEGIPHNPMVNAGAIVVSSLIKMDCNKAEKFDFVLQYLNKMAGNEYMGFSNATFQSEKETGDRNYAIGYYLKEKKCFPKGVDMMAALDLYFQLCSVEVTCESGSVMAATLANGGICPITGESVLSAEAVRNTLSLMHSCGMYDFSGQFAFHVGLPAKSAVSGAILLVVPNVMGMMCLSPPLDKLGNSHRGTSFCQKLVSLFNFHNYDNLRHCARKLDPRREGAEIRNKTVVNLLFAAYSGDVSALRRFALSAMDMEQKDYDSRTALHVAAAEGHIEVVKFLIEACKVNPFAKDRWGNIPLDDAVQFNHLEVVKLLQDYQDSYTLSETQAEAAAEALSKENLESMV

SEQ ID NO: 4858 - protein, 1328 aa, Homo sapiens
MDQKILSLAAEKTADKLQEFLQTLREGDLTNLLQNQAVKGKVAGALLRAIFKGSPCSEEAGTLRRRKIYTCCIQLVESGDLQKEIASEIIGLLMLEAHHFPGPLLVELANEFISAVREGSLVNGKSLELLPIILTALATKKENLAYGKGVLSGEECKKQLINTLCSGRWDQQYVIQLTSMFKDVPLTAEEVEFVVEKALSMFSKMNLQEIPPLVYQLLVLSSKGSRKSVLEGIIAFFSALDKQHNEEQSGDELLDVVTVPSGELRHVEGTIILHIVFAIKLDYELGRELVKHLKVGQQGDSNNNLSPFSIALLLSVTRIQRFQDQVLDLLKTSVVKSFKDLQLLQGSKFLQNLVPHRSYVSTMILEVVKNSVHSWDHVTQGLVELGFILMDSYGPKKVLDGKTIETSPSLSRMPNQHACKLGANILLETFKIHEMIRQEILEQVLNRVVTRASSPISHFLDLLSNIVMYAPLVLQSCSSKVTEAFDYLSFLPLQTVQRLLKAVQPLLKVSMSMRDCLILVLRKAMFANQLDARKSAVAGFLLLLKNFKVLGSLSSSQCSQSLSVSQVHVDVHSHYNSVANETFCLEIMDSLRRCLSQQADVRLMLYEGFYDVLRRNSQLANSVMQTLLSQLKQFYEPKPDLLPPLKLEACILTQGDKISLQEPLDYLLCCIQHCLAWYKNTVIPLQQGEEEEEEEEAFYEDLDDILESITNRMIKSELEDFELDKSADFSQSTSIGIKNNICAFLVMGVCEVLIEYNFSISSFSKNRFEDILSLFMCYKKLSDILNEKAGKAKTKMANKTSDSLLSMKFVSSLLTALFRDSIQSHQESLSVLRSSNEFMRYAVNVALQKVQQLKETGHVSGPDGQNPEKIFQNLCDITRVLLWRYTSIPTSVEESGKKEKGKSISLLCLEGLQKIFSAVQQFYQPKIQQFLRALDVTDKEGEEREDADVSVTQRTAFQIRQFQRSLLNLLSSQEEDFNSKEALLLVTVLTSLSKLLEPSSPQFVQMLSWTSKICKENSREDALFCKSLMNLLFSLHVSYKSPVILLRDLSQDIHGHLGDIDQDVEVEKTNHFAIVNLRTAAPTVCLLVLSQAEKVLEEVDWLITKLKGQVSQETLSEEASSQATLPNQPVEKAIIMQLGTLLTFFHELVQTALPSGSCVDTLLKDLCKMYTTLTALVRYYLQVCQSSGGIPKNMEKLVKLSGSHLTPLCYSFISYVQNKSKSLNYTGEKKEKPAAVATAMARVLRETKPIPNLIFAIEQYEKFLIHLSKKSKVNLMQHMKLSTSRDFKIKGNILDMVLREDGEDENEEGTASEHGGQNKEPAKKKRKK

SEQ ID NO: 4859 - protein, 639 aa, Homo sapiens
MSCQISCKSRGRGGGGGGFRGFSSGSAVVSGGSRRSTSSFSCLSRHGGGGGGFGGGGFGSRSLVGLGGTKSISISVAGGGGGFGAAGGFGGRGGGFGGGSSFGGGSGFSGGGFGGGGFGGGRFGGFGGPGGVGGLGGPGGFGPGGYPGGIHEVSVNQSLLQPLNVKVDPEIQNVKAQEREQIKTLNNKFASFIDKVRFLEQQNQVLQTKWELLQQMNVGTRPINLEPIFQGYIDSLKRYLDGLTAERTSQNSELNNMQDLVEDYKKKYEDEINKRTAAENDFVTLKKDVDNAYMIKVELQSKVDLLNQEIEFLKVLYDAEISQIHQSVTDTNVILSMDNSRNLDLDSIIAEVKAQYEEIAQRSKEEAEALYHSKYEELQVTVGRHGDSLKEIKIEISELNRVIQRLQGEIAHVKKQCKNVQDAIADAEQRGEHALKDARNKLNDLEEALQQAKEDLARLLRDYQELMNVKLALDVEIATYRKLLEGEECRMSGDLSSNVTVSVTSSTISSNVASKAAFGGSGGRGSSSGGGYSSGSSSYGSGGRQSGSRGGSGGGGSISGGGYGSGGGSGGRYGSGGGSKGGSISGGGYGSGGGKHSSGGGSRGGSSSGGGYGSGGGGSSSVKGSSGEAFGSSVTFSFR

SEQ ID NO: 4860 - protein, 148 aa, Homo sapiens
MAAFTKLSIEPAFTPGPNIELQKDSDCCSCQEKWVGYRCNCYFISSEQKTWNESRHLCASQKSSLLQLQNTDELDFMSSSQQFYWIGLSYSEEHTAWLWENGSALSQYLFPSFETFNTKNCIAYNPNGNALDESCEDKNRYICKQQLI

SEQ ID NO: 4861 - protein, 510 aa, Homo sapiens
MEEPQAGDAARFSCPPNFTAKPPASESPRFSLEALTGPDTELWLIQAPADFAPECFNGRHVPLSGSQIVKGKLAGKRHRYRVLSSCPQAGEATLLAPSTEAGGGLTCASAPQGTLRILEGPQQSLSGSPLQPIPASPPPQIPPGLRPRFCAFGGNPPVTGPRSALAPNLLTSGKKKKEMQVTEAPVTQEAVNGHGALEVDMALGSPEMDVRKKKKKKNQQLKEPEAAGPVGTEPTVETLEPLGVLFPSTTKKRKKPKGKETFEPEDKTVKQEQINTEPLEDTVLSPTKKRKRQKGTEGMEPEEGVTVESQPQVKVEPLEEAIPLPPTKKRKKEKGQMAMMEPGTEAMEPVEPEMKPLESPGGTMAPQQPEGAKPQAQAALAAPKKKTKKEKQQDATVEPETEVVGPELPDDLEPQAAPTSTKKKKKKKERGHTVTEPIQPLEPELPGEGQPEARATPGSTKKRKKQSQESRMPETVPQEEMPGPPLNSESGEEAPTGRDKKRKQQQQQPV

SEQ ID NO: 4862 - protein, 151 aa, Homo sapiens [sequence omitted]

SEQ ID NO: 4863 - protein, 745 aa, Homo sapiens
MEVMNLMEQPIKVTEWQQTYTYDSGIHSGANTCVPSVSSKGIMEEDEACGRQYTLKKTTTYTQGVPPSQGDLEYQMSTTARAKRVREAMCPGVSGEDSSLLLATQVEGQATNLQRLAEPSQLLKSAIVHLINYQDDAELATRALPELTKLLNDEDPVVVTKAAMIVNQLSKKEASRRALMGSPQLVAAVVRTMQNTSDLDTARCTTSILHNLSHHREGLLAIFKSGGIPALVRMLSSPVESVLFYAITTLHNLLLYQEGAKMAVRLADGLQKMVPLLNKNNPKFLAITTDCLQLLAYGNQESKLIILANGGPQALVQIMRNYSYEKLLWTTSRVLKVLSVCPSNKPAIVEAGGMQALGKHLTSNSPRLVQNCLWTLRNLSDVATKQEGLESVLKILVNQLSVDDVNVLTCATGTLSNLTCNNSKNKTLVTQNSGVEALIHAILRAGDKDDITEPAVCALRHLTSRHPEAEMAQNSVRLNYGIPAIVKLLNQPNQWPLVKATIGLIRNLALCPANHAPLQEAAVIPRLVQLLVKAHQDAQRHVAAGTQQPYTDGVRMEEIVEGCTGALHILARDPMNRMEIFRLNTIPLFVQLLYSSVENIQRVAAGVLCELAQDKEAADAIDAEGASAPLMELLHSRNEGTATYAAAVLFRISEDKNPDYRKRVSVELTNSLFKHDPAAWEAAQSMIPINEPYGDDMDATYRPMYSSDVPLDPLEMHMDMDGDYPIDTYSDGLRPPYPTADHMLA

SEQ ID NO: 4864 - protein, 608 aa, Homo sapiens
MALRGPAGLGPGSRRPLDEAVAGAEGREAPALVAAGGAPEDDEEDDGRGRGLLRWDSFSAWLHCVCVVGFDLELGQAVEVIYPQHSKLTDREKTNICYLSFPDSNSGCLGDTQFCFRFRQSSGRRVSLHCLLDQFDKDLPVYLKKDPAYFYGYVYFRQVRDKTLKRGYFQKSLVLISKLPYIHFFHTVLKQIAPEYFEKNEPYLEAACNDVDRWPAPVPGKTLHLPIMGVVMKVRIPTCHDKPGTTQIVQLTQQVDTNISVILPTVHEVDIFRCFCPVFLHSQMLWELVLLGEPLVVMAPSPSESSETVLALVNCISPLKYFSDFRPYFTIHDSEFKEYTTRTQAPPSVILGVTNPFFAKTLQHWPHIIRIGDLKPTGEIPKQVKVKKLKNLKTLDSKPGVYTSYKPYLNRDEEIIKQLQKGVQQKRPSEAQSVILRRYFLELTQSFIIPLERYVASLMPLQKSISPWKSPPQLRQFLPEEFMKTLEKTGPQLTSRIKGDWIGLYRHFLKSPNFDGWFKTRRKEMTQKLEALHLEALCEEDLLLWIQKHTEVETVDLVLKLKNKLLQADREHLPVKPDTMEKLRTHIDAIILALPEDLQGILLKTGMT

SEQ ID NO: 4865 - protein, 427 aa, Homo sapiens [sequence omitted]

SEQ ID NO: 4866 - protein, 158 aa, Homo sapiens
MAAQGVGPGPGSAAPPGLEAARQKLALRRKKVLSTEEMELYELAQAAGGGIDPDVFKILVDLLKLNVAPLAVFQMLKSMCAGQRLASEPQDPAAVSLPTSSVPETRGRDKGSAALGGVLALAERSNHEGSSQRMPRQPSATRLPKGGGPGKSPTQGST

SEQ ID NO: 4867 - protein, 361 aa, Homo sapiens
MQEKDASSQGFLPHFQHFATQAIHVGQDPEQWTSRAVVPPISLSTTFKQGAPGQHSGFEYSRSGNPTRNCLEKAVAALDGAKYCLAFASGLAATVTITHLLKAGDQIICMDDVYGGTNRYFRQVASEFGLKISFVDCSKIKLLEAAITPETKRPLALGADISMYSATKYMNGHSDVVMGLVSVNCESLHNRLRFLQNSLGAVPSPIDCYLCNRGLKTLHVRMEKHFKNGMAVAQFLESNPWVEKVIYPGLPSHPQHELVKRQCTGCTGMVTFYIKGTLQHAEIFLKNLKLFTLAESLGGFESLAELPAIMTHASVLKNDRDVLGISDTLIRLSVGLEDEEDLLEDLDQALKAAHPPSGSHS

SEQ ID NO: 4868 - protein, 202 aa, Homo sapiens
MEAEAGGLEELTDEEMAALGKEELVRRLRREEAARLAALVQRGRLMQEVNRQLQGHLGEIRELKQLNRRLQAENRELRDLCCFLDSERQRGRRAARQWQLFGTQASRAVREDLGGCWQKLAELEGRQEELLRENLALKELCLALGEEWGPRGGPSGAGGSGAGPAPELALPPCGPRDLGDGSSSTGSVGSPDQLPLACSPDD

SEQ ID NO: 4869 - protein, 147 aa, Homo sapiens
MSSEPPPPPQPPTHQASVGLLDTPRSRERSPSPLRGNVVPSPLPTRRTRTFSATVRASQGPVYKGVCKCFCRSKGHGFITPADGGPDIFLHISDVEGEYVPVEGDEVTYKMCSIPPKNEKLQAVEVVITHLAPGTKHETWSGHVISS

SEQ ID NO: 4870 - protein, 846 aa, Homo sapiens
MGIQGLLQFIKEASEPIHVRKYKGQVVAVDTYCWLHKGAIACAEKLAKGEPTDRYVGFCMKFVNMLLSHGIKPILVFDGCTLPSKKEVERSRRERRQANLLKGKQLLREGKVSEARECFTRSINITHAMAHKVIKAARSQGVDCLVAPYEADAQLAYLNKAGIVQAIITEDSDLLAFGCKKVILKMDQFGNGLEIDQARLGMCRQLGDVFTEEKFRYMCILSGCDYLSSLRGIGLAKACKVLRLANNPDIVKVIKKIGHYLKMNITVPEDYINGFIRANNTFLYQLVFDPIKRKLIPLNAYEDDVDPETLSYAGQYVDDSIALQIALGNKDINTFEQIDDYNPDTAMPAHSRSHSWDDKTCQKSANVSSIWHRNYSPRPESGTVSDAPQLKENPSTVGVERVISTKGLNLPRKSSIVKRPRSAELSEDDLLSQYSLSFTKKTKKNSSEGNKSLSFSEVFVPDLVNGPTNKKSVSTPPRTRNKFATFLQRKNEESGAVVVPGTRSRFFCSSDSTDCVSNKVSIQPLDETAVTDKENNLHESEYGDQEGKRLVDTDVARNSSDDIPNNHIPGDHIPDKATVFTDEESYSFESSKFTRTISPPTLGTLRSCFSWSGGLGDFSRTPSPSPSTALQQFRRKSDSPTSLPENNMSDVSQLKSEESSDDESHPLREEACSSQSQESGEFSLQSSNASKLSQCSSKDSDSEESDCNIKLLDSQSDQTSKLRLSHFSKKDTPLRNKVPGLYKSSSADSLSTTKIKPLGPARASGLSKKPASIQKRKHHNAENKPGLQIKLNELWKNFGFKKDSEKLPPCKKPLSPVRDNIQLTPEAEEDIFNKPECGRVQRAIFQ

SEQ ID NO: 4871 - protein, 781 aa, Homo sapiens
MSNAMYNKMWHQTQEALGALLDKEPQKMIEPQRNQVFIFQTLATFYVKYVQIFRNLENVYDQFVHPQKRILIRKVLDGVMGRILELKNEMVELELTEFHYFDDILQDLKLAPQQLDIPIPKYFLKEKLEVIKGREKILAQILADSGIDTSDMKYPVKSIPFDEAVKLIQIAERARQGRLRALFMKQIYLQEYRAKQSKMLGKKVTDTWAAALRIQKVWRRFHQRKETEKLREEEMIFLGMNPPPLFNEVSATVIQAEKVDRLRNEVQIKHEEDYREALVTIKNDLKLIEGVDIKENLQDQIRHWFIECRNLTGTFPDYPDVEEGGSAIIFSDKTIQQEEDEKWKMSPSLFLPAMKEGCNAYKEIWMKKDESWNFSQDYDPELIKEEKRKELQSEIRIQVDELMRQELKNLKLAVDRERERPVKAGKKKDKKGKKGKKKEKKAKKDKDLTADRTIESLYKELVEEGLLIQALKVNLSDYIGEYSYLGTTLRQVSIEPMPSLLDVRQLITLYGIWPLGSAAVHEKAPLVKSLLLAGPSGVGKKMLVHAICTETGANLFNLSSSNIAGKYPGKNGLQMMLHAVFKVARQLQPSVVWIEDTEKTFYKKVPNAEKMNEPKRLKKHLPQILKLLKPDDRILIVGTTRRPFDAELQSFCKVYQKIILVPRPDYASRYVLWKQIIERNGGVLTSALNVSCLAKVTDGFTQGHIVEVVKGVLTDQRIRRQIHKPLTAVEFITAITSMNPVYKEEEESFKNWYAKTPLGKKRALAITGGSTEKAKDKGKRK

SEQ ID NO: 4872 - protein, 1020 aa, Homo sapiens
MMSFGGADALLGAPFAPLHGGGSLHYALARKGGAGGTRSAAGSSSGFHSWTRTSVSSVSASPSRFRGAGAASSTDSLDTLSNGPEGCMVAVATSRSEKEQLQALNDRFAGYIDKVRQLEAHNRSLEGEAAALRQQQAGRSAMGELYEREVREMRGAVLRLGAARGQLRLEQEHLLEDIAHVRQRLDDEARQREEAEAAARALARFAQEAEAARVDLQKKAQALQEECGYLRRHHQEEVGELLGQIQGSGAAQAQMQAETRDALKCDVTSALREIRAQLEGHAVQSTLQSEEWFRVRLDRLSEAAKVNTDAMRSAQEEITEYRRQLQARTTELEALKSTKDSLERQRSELEDRHQADIASYQEAIQQLDAELRNTKWEMAAQLREYQDLLNVKMALDIEIAAYRKLLEGEECRIGFGPIPFSLPEGLPKIPSVSTHIKVKSEEKIKVVEKSEKETVIVEEQTEETQVTEEVTEEEEKEAKEEEGKEEEGGEEEEAEGGEEETKSPPAEEAASPEKEAKSPVKEEAKSPAEAKSPEKEEAKSPAEVKSPEKAKSPAKEEAKSPPEAKSPEKEEAKSPAEVKSPEKAKSPAKEEAKSPAEAKSPEKAKSPVKEEAKSPAEAKSPVKEEAKSPAEVKSPEKAKSPTKEEAKSPEKAKSPEKEEAKSPEKAKSPVKAEAKSPEKAKSPVKAEAKSPEKAKSPVKEEAKSPEKAKSPVKEEAKSPEKAKSPVKEEAKTPEKAKSPVKEEAKSPEKAKSPEKAKTLDVKSPEAKTPAKEEARSPADKFPEKAKSPVKEEVKSPEKAKSPLKEDAKAPEKEIPKKEEVKSPVKEEEKPQEVKVKEPPKKAEEEKAPATPKTEEKKDSKKEEAPKKEAPKPKVEEKKEPAVEKPKESKVEAKKEEAEDKKKVPTPEKEAPAKVEVKEDAKPKEKTEVAKKEPDDAKAKEPSKPAEKKEAAPEKKDTKEEKAKKPEEKPKTEAKAKEDDKTLSKEPSKPKAEKAEKSSSTDQKDSKPPEKATEDKAAKGK

SEQ ID NO: 4873 - protein, 519 aa, Homo sapiens
FDDLLKFDDLDGTHALMSRMVQNEIPYFIWTTRRDVLDCRFLSKDQMINHYARAGSFTTKVGLCLNLRNLPWFDEVDANSFFPRCYCLGAEDDKKAFIEDFWLTAARNVLKLVVKSEWKSYPIQAVEEEASGDKQPKKQEKNPVLVSPEFVDEALCACEEYLSNLAHMDIDKDLEAPLYLTPEGWSLFLQRYYQVVHEGAELRHLDTQVQRCEDILQQLQAVVPQIDMEGDRNIWIVKPGAKSRGRGIMCMDHLEEMLKLVNGNPVVMKDGKWVVQKYIERPLLIFGTKFDLRQWFLVTDWNPLTVWFYRDSYIRFSTQPFSLKNLDNSVHLCNNSIQKHLENSCHRHPLLPPDNMWSSQRFQAHLQEMGAPNAWSTIIVPGMKDAVIHALQTSQDTVQCRKASFELYGADFVFGEDFQPWLIEINASPTMAPSTAVTARLCAGVQADTLRVVIDRMLDRNCDTGAFELIYKQPVTTSPASTPRPSCLLPMYSDTRARSSDDSTASWWALRPCRPQARP

SEQ ID NO: 4874 - protein, 372 aa, Homo sapiens
MRVGPVRSAMSGASQPRGPALLFPATRGVPAKRLLDADDAAAVAAKCPRLSECSSPPDYLSPPGSPCSPQPPPAAPGAGGGSGSAPGPSRIADYLLLPLAEREHVSRALCIHTGRELRCKVFPIKHYQDKIRPYIQLPSHSNITGIVEVILGETKAYVFFEKDFGDMHSYVRSRKRLREEEAARLFKQIVSAVAHCHQSAIVLGDLKLRKFVFSTEERTQLRLESLEDTHIMKGEDDALSDKHGCPAYVSPEILNTTGTYSGKAADVWSLGVMLYTLLVGRYPFHDSDPSALFSKIRRGQFCIPEHISPKARCLIRSLLRREPSERLTAPEILLHPWFESVLEPGYIDSEIGTSDQIVPEYQEDSDISSFFC

SEQ ID NO: 4875 - protein, 119 aa, Homo sapiens
MVKMTRSKTFQAYLPSCHRTYSCIHCRAHLANHDELISKSFQGSQGRAYLFNSVVNVGCGPAEERVLLTGLHAVADIYCENCKTTLGWKYEHAFESSQKYKEGKYIIELAHMIKDNGWD

SEQ ID NO: 4876 - protein, 373 aa, Homo sapiens
MGSQVSVESGALHVVIVGGGFGGIAAASQLQALNVPFMLVDMKDSFHHNVAALRASVETGFAKKTFISYSVTFKDNFRQGLVVGIDLKNQMVLLQGGEALPFSHLILATGSTGPFPGKFNEVSSQQAAIQAYEDMVRQVQRSRFIVVVGGGSAGVEMAAEIKTEYPEKEVTLIHSQVALADKELLPSVRQEVKEILLRKGVQLLLSERVSNLEELPLNEYREYIKVQTDKGTEVATNLVILCTGIKINSSAYRKAFESRLASSGALRVNEHLQVEGHSNVYAIGDCADVRTPKMAYLAGLHANIAVANIVNSVKQRPLQAYKPGALTFLLSMGRNDGVGQISGFYVGRLMVRLTKSRDLFVSTSWKTMRQSPP

SEQ ID NO: 4877 - protein, 587 aa, Homo sapiens
MEGESVKLSSQTLIQAGDDEKNQRTITVNPAHMGKAFKVMNELRSKQLLCDVMIVAEDVEIEAHRVVLAACSPYFCAMFTGDMSESKAKKIEIKDVDGQTLSKLIDYIYTAEIEVTEENVQVLLPAASLLQLMDVRQNCCDFLQSQLHPTNCLGIRAFADVHTCTDLLQQANAYAEQHFPEVMLGEEFLSLSLDQVCSLISSDKLTVSSEEKVFEAVISWINYEKETRLEHMAKLMEHVRLPLLPRDYLVQTVEEEALIKNNNTCKDFLIEAMKYHLLPLDQRLLIKNPRTKPRTPVSLPKVMIVVGGQAPKAIRSVECYDFEEDRWDQIAELPSRRCRAGVVFMAGHVYAVGGFNGSLRVRTVDVYDGVKDQWTSIASMQERRSTLGAAVLNDLLYAVGGFDGSTGLASVEAYSYKTNEWFFVAPMNTRRSSVGVGVVEGKLYAVGGYDGASRQCLSTVEQYNPATNEWIYVADMSTRRSGAGVGVLSGQLYATGGHDGPLVRKSVEVYDPGTNTWKQVADMNMCRRNAGVCAVNGLLYVVGGDDGSCNLASVEYYNPVTDKWTLLPTNMSTGRSYAGVAVIHKSL

SEQ ID NO: 4878 - protein, 480 aa, Homo sapiens
MSAEVIHQVEEALDTDEKEMLLFLCRDVAIDVVPPNVRDLLDILRERGKLSVGDLAELLYRVRRFDLLKRILKMDRKAVETHLLRNPHLVSDYRVLMAEIGEDLDKSDVSSLIFLMKDYMGRGKISKEKSFLDLVVELEKLNLVAPDQLDLLEKCLKNIHRIDLKTKIQKYKQSVQGAGTSYRNVLQAAIQKSLKDPSNNFRLHNGRSKEQRLKEQLGAQQEPVKKSIQESEAFLPQSIPEERYKMKSKPLGICLIIDCIGNETELLRDTFTSLGYEVQKFLHLSMHGISQILGQFACMPEHRDYDSFVCVLVSRGGSQSVYGVDQTHSGLPLHHIRRMFMGDSCPYLAGKPKMFFIQNYVVSEGQLEDSSLLEVDGPAMKNVEFKAQKRGLCTVHREADFFWSLCTADMSLLEQSHSSPSLYLQCLSQKLRQERKRPLLDLHIELNGYMYDWNSRVSAKEKYYVWLQHTLRKKLILSYT

SEQ ID NO: 4879 - protein, 484 aa, Homo sapiens
MPKKEKMAKTPLSDEKQLLLFQQKLLAEEEMAKKKERLLSQFLKDKLAKEEHNSALNLNKINTQWRTVLREVKTRELHKDIEILSQTFERVVDCKDNVIKSLAKDLSEAEEQYAHALRSHLHNVDQLLALQRHRLSLLEESYNMELEALTKEFETERKTIIDQHEKEIHYLQDIFMAMEQNYIDSEYESKLEFQSMWNDLKNMNLEEKHFLRLHLENRVEDLWRKFQDVLKNYTDATEDRKAAFETLQVKDEKSSKEIEVQMKKIQKLQDAITISKGKIMIHSRESEDENRYIRNDKELVLVQLRKLKAQRTQARAASQKNLVRLTLESNATLKALRKIVDKGEKILKLAEICRKFETEEEKVLPFYSSVLTPKEQEGIQKNNLEELTEELTKVMVDYIGMENFWKRYNKVKLEQLSLQHRRAQLLDINGKLREMLKQYLDGISVSDEVLSQLNPLFIVNYQSNLLQPLSIRIAHPGDKQHPTT

SEQ ID NO: 4880 - protein, 1339 aa, Homo sapiens
MTGEVGSEVHLEINDPNVISQEEADSPSDSGQGSYETIGPLSEGDSDEEIFVSKKLKNRKVLQDSDSETEDTNASPEKTTYDSAEEENKENLYAGKNTKIKRIYKTVADSDESYMEKSLYQENLEAQVKPCLELSLQSGNSTDFTTDRKSSKKHIHDKEGTAGKAKVKSKRRLEKEERKMEKIRQLKKKETKNQEDDVEQPFNDSGCLLVDKDLFETGLEDENNSPLEDEESLESIRAAVKNKVKKHKKKEPSLESGVHSFEEGSELSKGTTRKERKAARLSKEALKQLHSETQRLIRESALNLPYHMPENKTIHDFFKRKPRPTCHGNAMALLKSSKYQSSHHKEIIDTANTTEMNSDHHSKGSEQTTGAENEVETNALPVVSKETQIITGSDESCRKDLVKNEELEIQEKQKQSDIRPSPGDSSVLQQESNFLGNNHSEECQVGGLVAFEPHALEGEGPQNPEETDEKVEEPEQQNKSSAVGPPEKVRRFTLDRLKQLGVDVSIKPRLGADEDSFVILEPETNRELEALKQRFWKHANPAAKPRAGQTVNVNVIVKDMGTDGKEELKADVVPVTLAPKKLDGASHTKPGEKLQVLKAKLQEAMKLRRFEERQKRQALFKLDNEDGFEEEEEEEEEMTDESEEDGEEKVEKEEKEEELEEEEEKEEEEEEEGNQETAEFLLSSEEIETKDEKEMDKENNDGSSEIGKAVGFLSVPKSLSSDSTLLLFKDSSSKMGYFPTEEKSETDENSGKQPSKLDEDDSCSLLTKESSHNSSFELIGSTIPSYQPCNRQTGRGTSFFPTAGGFRSPSPGLFRASLVSSASKSSGKLSEPSLPIEDSQDLYNASPEPKTLFLGAGDFQFCLEDDTQSQLLDADGFLNVRNHRNQYQALKPRLPLASMDENAMDANMDELLDLCTGKFTSQAEKHLPRKSDKKENMEELLNLCSGKFTSQDASTPASSELNKQEKESSMGDPMEEALALCSGSFPTDKEEEDEEEEFGDFRLVSNDNEFDSDEDEHSDSGNDLALEDHEDDDEEELLKRSEKLKRQMRLRKYLEDEAEVSGSDVGSEDEYDGEEIDEYEEDVIDEVLPSDEELQSQIKKIHMKTMLDDDKRQLRLYQERYLADGDLHSDGPGRMRKFRWKNIDDASQMDLFHRDSDDDQTEEQLDESEARWRKERIEREQWLRDMAQQGKITAEEEEEIGEDSQFMILAKKVTAKALQKNASRPMVIQESKSLLRNPFEAIRPGSAQQVKTGSLLNQPKAVLQKLAALSDHNPSAPRNSRNFVFHTLSPVKAEAAKESSKSQVKKRGPSFMTSPSPKHLKTDDSTSGLTRSIFKYLES

SEQ ID NO: 4881 - protein, 975 aa, Homo sapiens
MEDYEQELCGVEDDFHNQFAAELEVLAELEGASTPSPSGVPLFTAGRPPRTFEEALARGDAASSPAPAASVGSSQGGARKRQVDADLQPAGSLPHAPRIKRPRLQVVKRLNFRSEEMEEPPPPDSSPTDITPPPSPEDLAELWGHGFSEAAADVGLTRASPAARNPVLRRPPILEDYVHVTSTEGVRAYLVLRADPMAPGVQGSLLHVPWRGGGQLDLLGVSLASLKKQVDGERRERLLQEAQKLSDTLHSLRSGEEEAAQPLGAPEEEPTDGQDASSHCLWVDEFAPRHYTELLSDDFTNRCLLKWLKLWDLVVFGHERPSRKPRPSVEPARVSKEATAPGKWKSHEQVLEEMLEAGLDPSQRPKQKVALLCGPPGLGKTTLAHVIARHAGYSVVEMNASDDRSPEVFRTRIEAATQMESVLGAGGKPNCLVIDEIDGAPVAAINVLLSILNRKGPQEVGPQGPAVPSGGGRRRRAEGGLLMRPIICICNDQFAPSLRQLKQQAFLLHFPPTLPSRLVQRLQEVSLRQGMRADPGVLAALCEKTDNDIRACINTLQFLYSRGQRELSVRDVQATRVGLKDQRRGLFSVWQEVFQLPRAQRRRVGQDPALPADTLLLGDGDAGSLTSASQRFYRVLHAAASAGEHEKVVQGLFDNFLRLRLRDSSLGAVCVALDWLAFDDLLAGAAHHSQSFQLLRYPPFLPVAFHVLFASSHTPRITFPSSQQEAQNRMSQMRNLIQTLVSGIAPATRSRATPQALLLDALCLLLDILAPKLRPVSTQLYSTREKQQLASLVGTMLAYSLTYRQERTPDGQYIYRLEPNVEELCRFPELPARKPLTYQTKQLIAREIEVEKMRRAEASARVENSPQVDGSPPGLEGLLGGIGEKGVHRPAPRNHEQRLEHIMRRAAREEQPEKDFFGRVVVRSTAVPSAGDTAPEQDSVERRMGTAVGRSEVWFRFNEGVSNAVRRSLYIRDLL

SEQ ID NO: 4882 - protein, 596 aa, Homo sapiens
MEALLSTPINPNNFPAKLWRLVNSPRYRSIRWDGRGEGLLIDQPLFEAELLSPPGPGGGGGTAGAGAEPELFKTTSFTSFIRQLNLYGFRKVVLGGPGGGKPAGNGPLHHFHNPHFRRDQPQLLVHLKRLTSANKAKLAAGLEVPCRPPNRFQRLLITSASAATAPLQHQQPPPPAGPRPEPHGPVAVGQFHRSFRRDSLSPYSCVSTPSHDHSTYPLKGLDRTPVPHRIWQNSLGMHPGQVETSPTFSDKGVPFPVLQRFPTEVTYTLQPSTTSVHVQQGPQTMVSSSQKYSNYTPSAQYSQAYYPTAVLQCCSPTHMDALSSCVTPTASSYAHCNYFQNPSMQSSYPVEFLPSNWPCSTTDENTKTEVNLEAVFQIVDELHSSPKLEMVKVEPVENQCPTSPSYRGQHILANSNNSNPCSASQASQLEPLTPVGSDIMSFVVGTEQAVACSLPQSPEYIYTIHTAQPVENSTIQESAAIQQAHVKLKEHLNHNPSPSSVVFVQEGPPFSTHQVDANIKCQTSSRENILPSEQMGFLISEMGPASKPSEDTGLATPARYREHRSNSQQGKSPDLHLLVDVACKQERFPKEEELKE

SEQ ID NO: 4883 - protein, 812 aa, Homo sapiens
MGRKLDPTKEKRGPGRKARKQKGAETELVRFLPAVSDENSKRLSSRARKRAAKRRLGSVEAPKTNKSPEAKPLPGKLPKGISAGAVQTAGKKGPQSLFNAPRGKKRPAPGSDEEEEEEDSEEDGMVNHGDLWGSEDDADTVDDYGADSNSEDEEEGEALLPIERAARKQKAREAAAGIQWSEEETEDEEEEKEVTPESGPPKVEEADGGLQINVDEEPFVLPPAGEMEQDAQAPDLQRVHKRIQDIVGILRDFGAQREEGRSRSEYLNRLKKDLAIYYSYGDFLLGKLMDLFPLSELVEFLEANEVPRPVTLRTNTLKTRRRDLAQALINRGVNLDPLGKWSKTGLVVYDSSVPIGATPEYLAGHYMLQGASSMLPVMALAPQEHERILDMCCAPGGKTSYMAQLMKNTGVILANDANAERLKSVVGNLHRLGVTNTIISHYDGRQFPKVVGGFDRVLLDAPCSGTGVISKDPAVKTNKDEKDILRCAHLQKELLLSAIDSVNATSKTGGYLVYCTCSITVEENEWVVDYALKKRNVRLVPTGLDFGQEGFTRFRERRFHPSLRSTRRFYPHTHNMDGFFIAKFKKFSNSIPQSQTGNSETATPTNVDLPQVIPKSENSSQPAKKAKGAAKTKQQLQKQQHPKKASFQKLNGISKGADSELSTVPSVTKTQASSSFQDSSQPAGKAEGIREPKVTGKLKQRSPKLQSSKKVAFLRQNAPPKGTDTQTPAVLSPSKTQATLKPKDHHQPLGRAKGVEKQQLPEQPFEKAAFQKQNDTPKGPQPPTVSPIRSSRPPPAKRKKSQSRGNSQLLLS

SEQ ID NO: 4884 - protein, 1338 aa, Homo sapiens
MSPVLHFYVRPSGHEGAAPGHTRRKLQGKLPELQGVETELCYNVNWTAEALPSAEETKKLMWLFGCPLLLDDVARESWLLPGSNDLLLEVGPRLNFSTPTSTNIVSVCRATGLGPVDRVETTRRYRLSFAHPPSAEVEAIALATLHDRMTEQHFPHPIQSFSPESMPEPLNGPINILGEGRLALEKANQELGLALDSWDLDFYTKRFQELQRNPSTVEAFDLAQSNSEHSRHWFFKGQLHVDGQKLVHSLFESIMSTQESSNPNNVLKFCDNSSAIQGKEVRFLRPEDPTRPSRFQQQQGLRHVVFTAETHNFPTGVCPFSGATTGTGGRIRDVQCTGRGAHVVAGTAGYCFGNLHIPGYNLPWEDPSFQYPGNFARPLEVAIEASNGASDYGNKFGEPVLAGFARSLGLQLPDGQRREWIKPIMFSGGIGSMEADHISKEAPEPGMEVVKVGGPVYRIGVGGGAASSVQVQGDNTSDLDFGAVQRGDPEMEQKMNRVIRACVEAPKGNPICSLHDQGAGGNGNVLKELSDPAGAIIYTSRFQLGDPTLNALEIWGAEYQESNALLLRSPNRDFLTHVSARERCPACFVGTITGDRRIVLVDDRECPVRRNGQGDAPPTPLPTPVDLELEWVLGKMPRKEFFLQRKPPMLQPLALPPGLSVHQALERVLRLPAVASKRYLTNKVDRSVGGLVAQQQCVGPLQTPLADVAVVALSHEELIGAATALGEQPVKSLLDPKVAARLAVAEALTNLVFALVTDLRDVKCSGNWMWAAKLPGEGAALADACEAMVAVMAALGVAVDGGKDSLSMAARVGTETVRAPGSLVISAYAVCPDITATVTPDLKHPEGRGHLLYVALSPGQHRLGGTALAQCFSQLGEHPPDLDLPENLVRAFSITQGLLKDRLLCSGHDVSDGGLVTCLLEMAFAGNCGLQVDVPVPRVDVLSVLFAEEPGLVLEVQEPDLAQVLKRYRDAGLHCLELGHTGEAGPHAMVRVSVNGAVVLEEPVGELRALWEETSFQLDRLQAEPRCVAEEERGLRERMGPSYCLPPTFPKASVPREPGGPSPRVAILREEGSNGDREMADAFHLAGFEVWDVTMQDLCSGAIGLDTFRGVAFVGGFSYADVLGSAKGWAAAVTFHPRAGAELRRFRKRPDTFSLGVCNGCQLLALLGWVGGDPNEDAAEMGPDSQPARPGLLLRHNLSGRYESRWASVRVGPGPALMLRGMEGAVLPVWSAHGEGYVAFSSPELQAQIEARGLAPLHWADDDGNPTEQYPLNPNGSPGGVAGICSCDGRHLAVMPHPERAVRPWQWAWRPPPFDTLTTSPWLQLFINARNWTLEGSC

SEQ ID NO: 4885 - protein, 1079 aa, Homo sapiens
MDDDDDSCLLDLIGDPQALNYFLHGPSNKSSNDDLTNAGYSAANSNSIFANSSNADPKSSLKGVSNQLGEGPSDGLPLSSSLQFLEDELESSPLPDLTEDQPFDILQKSLQEANITEQTLAEEAYLDASIGSSQQFAQAQLHPSSSASFTQASNVSNYSGQTLQPIGVTHVPVGASFASNTVGVQHGFMQHVGISVPSQHLSNSSQISGSGQIQLIGSFGNHPSMMTINNLDGSQIILKGSGQQAPSNVSGGLLVHRQTPNGNSLFGNSSSSPVAQPVTVPFNSTNFQTSLPVHNIIIQRGLAPNSNKVPINIQPKPIQMGQQNTYNVNNLGIQQHHVQQGISFASASSPQGSVVGPHMSVNIVNQQNTRKPVTSQAVSSTGGSIVIHSPMGQPHAPQSQFLIPTSLSVSSNSVHHVQTINGQLLQTQPSQLISGQVASEHVMLNRNSSNMLRTNQPYTGPMLNNQNTAVHLVSGQTFAASGSPVIANHASPQLVGGQMPLQQASPTVLHLSPGQSSVSQGRPGFATMPSVTSMSGPSRFPAVSSASTAHPSLGSAVQSGSSGSNFTGDQLTQPNRTPVPVSVSHRLPVSSSKSTSTFSNTPGTGTQQQFFCQAQKKCLNQTSPISAPKTTDGLRQAQIPGLLSTTLPGQDSGSKVISASLGTAQPQQEKVVGSSPGHPAVQVESHSGGQKRPAAKQLTKGAFILQQLQRDQAHTVTPDKSHFRSLSDAVQRLLSYHVCQGSMPTEEDLRKVDNEFETVATQLLKRTQAMLNKYRCLLLEDAMRINPSAEMVMIDRMFNQEERASLSRDKRLALVDPEGFQADFCCSFKLDKAAHETQFGRSDQHGSKASSSLQPPAKAQGRDRAKTGVTEPMNHDQFHLVPNHIVVSAEGNISKKTECLGRALKFDKVGLVQYQSTSEEKASRREPLKASQCSPGPEGHRKTSSRSDHGTESKLSSILADSHLEMTCNNSFQDKSLRNSPKNEVLHTDIMKGSGEPQPDLQLTKSLETTFKNILELKKAGRQPQSDPTVSGSVELDFPNFSPMASQENCLEKFIPDHSEGVVETDSILEAAVNSILEC

SEQ ID NO: 4886 - protein, 345 aa, Homo sapiens
MAQKENSYPWPYGRQTAPSGLSTLPQRVLRKEPVTPSALVLMSRSNVQPTAAPGQKVMENSSGTPDILTRRHFTIDDFEIGRPLGKGKFGNVYLAREKKSHFIVALKVLFKSQIEKEGVEHQLRREIEIQAHLHHPNILRLYNYFYDRRRIYLILEYAPRGELYKELQKSCTFDEQRTATIMEELADALMYCHGKKVIHRDIKPENLLLGLKGELKIADFGWSVHAPSLRRKTMCGTLDYLPPEMIEGRMHNEKVDLWCIGVLCYELLVGNPPFESASHNETYRRIVKVDLKFPASVPMGAQDLISKLLRHNPSERLPLAQVSAHPWVRANSRRVLPPSALQSVA

SEQ ID NO: 4887 - protein, 699 aa, Homo sapiens
MGPAPAGEQLRGATGEPEVMEPALEGTGKEGKKASSRKRTLAEPPAKGLLQPVKLSRAELYKEPTNEELNRLRETEILFHSSLLRLQVEELLKEVRLSEKKKDRIDAFLREVNQRVVRVPSVPETELTDQAWLPAGVRVPLHQVPYAVKGCFRFLPPAQVTVVGSYLLGTCIRPDINVDVALTMPREILQDKDGLNQRYFRKRALYLAHLAHHLAQDPLFGSVCFSYTNGCHLKPSLLLRPRGKDERLVTVRLHPCPPPDFFRPCRLLPTKNNVRSAWYRGQSPAGDGSPEPPTPRYNTWVLQDTVLESHLQLLSTILSSAQGLKDGVALLKVWLRQRELDKGQGGFTGFLVSMLVVFLVSTRKIHTTMSGYQVLRSVLQFLATTDLTVNGISLCLSSDPSLPALADFHQAFSVVFLDSSGHLNLCADVTASTYHQVQHEARLSMMLLDSRADDGFHLLLMTPKPMIRAFDHVLHLRPLSRLQAACHRLKLWPELQDNGGDYVSAALGPLTTLLEQGLGARLNLLAHSRPPVPEWDISQDPPKHKDSGTLTLGLLLRPEGLTSVLELGPEADQPEAAKFRQFWGSRSELRRFQDGAIREAVVWEAASMSQKRLIPHQVVTHLLALHADIPETCVHYVGGPLDALIQGLKEASSTKGRMVMSRGGELVMVPNVEAILEDFAVLGEGLVQTVEARSERWTV

SEQ ID NO: 4888 - protein, 733 aa, Homo sapiens
MTFPEADILLKSGECAGQTMLDTMEAPGHSRQLLLQLNNQRTKGFLCDVIIVVQNALFRAHKNVLAASSAYLKSLVVHDNLLNLDHDMVSPAVFRLVLDFIYTGRLADGAEAAAAAAVAPGAEPSLGAVLAAASYLQIPDLVALCKKRLKRHGKYCHLRGGGGGGGGYAPYGRPGRGLRAATPVIQACYPSPVGPPPPPAAEPPSGPEAAVNTHCAELYASGPGPAAALCASERRCSPLCGLDLSKKSPPGSAAPERPLAERELPPRPDSPPSAGPAAYKEPPLALPSLPPLPFQKLEEAAPPSDPFRGGSGSPGPEPPGRPDGPSLLYRWMKHEPGLGSYGDELGRERGSPSERCEERGGDAAVSPGGPPLGLAPPPRYPGSLDGPGAGGDGDDYKSSSEETGSSEDPSPPGGHLEGYPCPHLAYGEPESFGDNLYVCIPCGKGFPSSEQLNAHVEAHVEEEEALYGRAEAAEVAAGAAGLGPPFGGGGDKVAGAPGGLGELLRPYRCASCDKSYKDPATLRQHEKTHWLTRPYPCTICGKKFTQRGTMTRHMRSHLGLKPFACDACGMRFTRQYRLTEHMRIHSGEKPYECQVCGGKFAQQRNLISHMKMHAVGGAAGAAGALAGLGGLPGVPGPDGKGKLDFPEGVFAVARLTAEQLSLKQQDKAAAAELLAQTTHFLHDPKVALESLYPLAKFTAELGLSPDKAAEVLSQGAHLAAGPDGRTIDRFSPT

SEQ ID NO: 4889 - protein, 317 aa, Homo sapiens
MVVMNSLRVILQASPGKLLWRKFQIPRFMPARPCSLYTCTYKTRNRALHPLWESVDLVPGGDRQSPINIRWRDSVYDPGLKPLTISYDPATCLHVWNNGYSFLVEFEDSTDKSVIKGGPLEHNYRLKQFHFHWGAIDAWGSEHTVDSKCFPAELHLVHWNAVRFENFEDAALEENGLAVIGVFLKLGKHHKELQKLVDTLPSIKHKDALVEFGSFDPSCLMPTCPDYWTYSGSLTTPPLSESVTWIIKKQPVEVDHDQLEQFRTLLFTSEGEKEKRMVDNFRPLQPLMNRTVRSSFRHDYVLNVQAKPKPATSQATP

SEQ ID NO: 4890 - protein, 830 aa, Homo sapiens
MVEEENIRVVRCGGSELNFRRAVFSADSKYIFCVSGDFVKVYSTVTEECVHILHGHRNLVTGIQLNPNNHLQLYSCSLDGTIKLWDYIDGILIKTFIVGCKLHALFTLAQAEDSVFVIVNKEKPDIFQLVSVKLPKSSSQEVEAKELSFVLDYINQSPKCIAFGNEGVYVAAVREFYLSVYFFKKKTTSRFTLSSSRNKKHAKNNFTCVACHPTEDCIASGHMDGKIRLWRNFYDDKKYTYTCLHWHHDMVMDLAFSVTGTSLLSGGRESVLVEWRDATEKNKEFLPRLGATIEHISVSPAGDLFCTSHSDNKIIIIHRNLEASAVIQGLVKDRSIFTGLMIDPRTKALVLNGKPGHLQFYSLQSDKQLYNLDIIQQEYINDYGLIQIELTKAAFGCFGNWLATVEQRQEKETELELQMKLWMYNKKTQGFILNTKINMPHEDCITALCFCNAEKSEQPTLVTASKDGYFKVWILTDDSDIYKKAVGWTCDFVGSYHKYQATNCCFSEDGSLLAVSFEEIVTIWDSVTWELKCTFCQRAGKIRHLCFGRLTCSKYLLGATENGILCCWNLLSCALEWNAKLNVRVMEPDPNSENIAAISQSSVGSDLFVFKPSEPRPLYIQKGISREKVQWGVFVPRDVPESFTSEAYQWLNRSQFYFLTKSQSLLTFSTKSPEEKLTPTSKQLLAEESLPTTPFYFILGKHRQQQDEKLNETLENELVQLPLTENIPAISELLHTPAHVLPSAAFLCSMFVNSLLLSKETKSAKEIPEDVDMEEEKESEDSDEENDFTEKVQDTSNTGLGEDIIHQLSKSEEKELRKFRKIDYSWIAAL

SEQ ID NO: 4891 - protein, 255 aa, Homo sapiens
MASPGAGRAPPELPERNCGYREVEYWDQRYQGAADSAPYDWFGDFSSFRALLEPELRPEDRILVLGCGNSALSYELFLGGFPNVTSVDYSSVVVAAMQARHAHVPQLRWETMDVRKLDFPSASFDVVLEKGTLDALLAGERDPWTVSSEGVHTVDQVLSEVSRVLVPGGRFISMTSAAPHFRTRHYAQAYYGWSLRHATYGSGFHFHLYLMHKGGKLSVAQLALGAQILSPPRPPTSPCFLQDSDHEDFLSAIQL

SEQ ID NO: 4892 - protein, 339 aa, Homo sapiens
MVAMAEAEAGVAVEVRGLPPAVPDELLTLYFENRRRSGGGPVLSWQRLGCGGVLTFREPADVRVLEEQAQNLGLEGTLVSLARVPQARAVRVVGDGASVDLLLLELYLENERRSGGGPLEDLQRLPGPLGTVASFQQWQVAERVLQQEHRLQGSELSLVPHYDILEPEELAENTSGGDHPSTQGPRATKHALLRTGGLVTALQGAGTVTMGSGEEPGQSGASLRTGPMVQGRGIMTTGSGQEPGQSGTSLRTGPMGSLGQAEQVSSMPMGSLEHEGLVSLRPVGLQEQEGPMSLGPVGSAGPVETSKGLLGQEGLVEIAMDSPEQEGLVGPMEITMGSL

SEQ ID NO: 4893 - protein, 174 aa, Homo sapiens
MQAGKPILYSYFRSSCSWRVRIALALKGIDYETVPINLIKDGGQQFSKDFQALNPMKQVPTLKIDGITIHQSNLSVLKQVGEEMQLTWAQNAITCGFNALEQILQSTAGIYCVGDEVTMADLCLVPQVANAERFKVDLTPYPTISSINKRLLVLEAFQVSHPCRQPDTPTELRA

SEQ ID NO: 4894 - protein, 276 aa, Homo sapiens
MAAETRNVAGAEAPPPQKRYYRQRAHSNPMADHTLRYPVKPEEMDWSELYPEFFAPLTQNQSHDDPKDKKEKRAQAQVEFADIGCGYGGLLVELSPLFPDTLILGLEIRVKVSDYVQDRIRALRAAPAGGFQNIACLRSNAMKHLPNFFYKGQLTKMFFLFPDPHFKRTKHKWRIISPTLLAEYAYVLRVGGLVYTITDVLELHDWMCTHFEEHPLFERVPLEDLSEDPVVGHLGTSTEEGKKVLRNGGKNFPAIFRRIQDPVLQAVTSQTSLPGH

SEQ ID NO: 4895 - protein, 200 aa, Homo sapiens
MAQSKLDCRSPVGLDCCNCCLDLAHRSGLQRGSSGENNNPGSPTVSNFRQLQEKLVFENLNTDKLNSIMRQDSLEPVLRDPCYLINEGICNRNIDQTMLSILLFFHSASGASVVAIDNKIEQAMDLVKNHLMYAVREEVEILKEQIRELVEKNSQLERENTLLKTLASPEQLEKFQSCLSPEEPAPESPQVPEAPGGSAV

SEQ ID NO: 4896 - protein, 1011 aa, Homo sapiens
MMSDASDMLAAALEQMDGIIAGSKALEYSNGIFDCQSPTSPFMGSLRALHLVEDLRGLLEMMETDEKEGLRCQIPDSTAETLVEWLQSQMTNGHLPGNGDVYQERLARLENDKESLVLQVSVLTDQVEAQGEKIRDLEFCLEEHREKVNATEEMLQQELLSRTSLETQKLDLMAEISNLKLKLTAVEKDRLDYEDKFRDTEGLIQEINDLRLKVSEMDSERLQYEKKLKSTKSLMAKLSSMKIKVGQMQYEKQRMEQKWESLKDELASLKEQLEEKESEVKRLQEKLVCKMKGEGVEIVDRDIEVQKMKKAVESLMAANEEKDRKIEDLRQCLNRYKKMQDTVVLAQGKDGEYEELLNSSSISSLLDAQGFSDLEKSPSPTPVMGSPSCDPFNTSVPEEFHTTILQVSIPSLLPATVSMETSEKSKLTPKPETSFEENDGNIILGATVDTQLCDKLLTSSLQKSSSLGNLKKETSDGEKETIQKTSEDRAPAESRPFGTLPPRPPGQDTSMDDNPFGTRKVRSSFGRGFFKIKSNKRTASAPNLAETEKETAEHLDLAGASSRPKDSQRNSPFQIPPPSPDSKKKSRGIMKLFGKLRRSQSTTFNPDDMSEPEFKRGGTRATAGPRLGWSRDLGQSNSDLDMPFAKWTKEQVCNWLMEQGLGSYLNSGKHWIASGQTLLQASQQDLEKELGIKHSLHRKKLQLALQALGSEEETNHGKLDFNWVTRWLDDIGLPQYKTQFDEGRVDGRMLHYMTVDDLLSLKVVSVLHHLSIKRAIQVLRINNFEPNCLRRRPSDENTIAPSEVQKWTNHRVMEWLRSVDLAEYAPNLRGSGVHGGLMVLEPRFNVETMAQLLNIPPNKTLLRRHLATHFNLLIGAEAQHQKRDAMELPDYVLLTATAKVKPKKLAFSNFGNLRKKKQEDGEEYVCPMELGQASGSASKKGFKPGLDMRLYEEDDLDRLEQMEDSEGTVRQIGAFSEGINNLTHMLKEDDMFKDFAARSPSASITDEDSNV

SEQ ID NO: 4897 - protein, 279 aa, Homo sapiens
MPVAGSELPRRPLPPAAQERDAEPRPPHGELQYLGQIQHILRCGVRKDDRTGTGTLSVFGMQARYSLRDEFPLLTTKRVFWKGVLEELLWFIKGSTNAKELSSKGVKIWDANGSRDFLDSLGFSTREEGDLGPVYGFQWRHFGAEYRDMESDLPLMALPPCHALCQFYVVNSELSCQLYQRSGDMGLGVPFNIASYALLTYMIAHITGLKPGDFIHTLGDAHIYLNHIEPLKIQLQREPRPFPKLRILRKVEKIDDFKAEDFQIEGYNPHPTIKMEMAV

SEQ ID NO: 4898 - protein, 230 aa, Homo sapiens
MPVAGSELPRRPLPPAAQERDAEPRPPHGELQYLGQIQHILRCGVRKDDRTGTGTLSVFGMQARYSLRDYSGQGVDQLQRVIDTIKTNPDDRRIIMCAWNPRDLPLMALPPCHALCQFYVVNSELSCQLYQRSGDMGLGVPFNIASYALLTYMIAHITGLKPGDFIHTLGDAHIYLNHIEPLKIQLQREPRPFPKLRILRKVEKIDDFKAEDFQIEGYNPHPTIKMEMAV

SEQ ID NO: 4899 - protein, 335 aa, Homo sapiens
MAAPSGVHLLVRRGSHRIFSSPLNHIYLHKQSSSQQRRNFFFRRQRDISHSIVLPAAVSSAHPVPKHIKKPDYVTTGIVPDWGDSIEVKNEDQIQGLHQACQLARHVLLLAGKSLKVDMTTEEIDALVHREIISHNAYPSPLGYGGFPKSVCTSVNNVLCHGIPDSRPLQDGDIINIDVTVYYNGYHGDTSETFLVGNVDECGKKLVEVARRCRDEAIAACRAGAPFSVIGNTISHITHQNGFQVCPHFVGHGIGSYFHGHPEIWHHANDSDLPMEEGMAFTIEPIITEGSPEFKVLEDAWTVVSLDNQRSAQFEHTVLITSRGAQILTKLPHEA

SEQ ID NO: 4900 - protein, 245 aa, Homo sapiens
MAGLELLSDQGYRVDGRRAGELRKIQARMGVFAQADGSAYIEQGNTKALAVVYGPHEIRGSRARALPDRALVNCQYSSATFSTGERKRRPHGDRKSCEMGLQLRQTFEAAILTQLHPRSQIDIYVQVLQADGGTYAACVNAATLAVLDAGIPMRDFVCACSAGFVDGTALADLSHVEEAAGGPQLALALLPASGQIALLEMDARLHEDHLERVLEAAAQAARDVHTLLDRVVRQHVREASILLGD

SEQ ID NO: 4901 - protein, 313 aa, Homo sapiens
MPVAGSELPRRPLPPAAQERDAEPRPPHGELQYLGQIQHILRCGVRKDDRTGTGTLSVFGMQARYSLRDEFPLLTTKRVFWKGVLEELLWFIKGSTNAKELSSKGVKIWDANGSRDFLDSLGFSTREEGDLGPVYGFQWRHFGAEYRDMESDYSGQGVDQLQRVIDTIKTNPDDRRIIMCAWNPRDLPLMALPPCHALCQFYVVNSELSCQLYQRSGDMGLGVPFNIASYALLTYMIAHITGLKPGDFIHTLGDAHIYLNHIEPLKIQLQREPRPFPKLRILRKVEKIDDFKAEDFQIEGYNPHPTIKMEMAV

SEQ ID NO: 4902 - protein, 559 aa, Homo sapiens
MKVITCEIAWHNKEPVYSLDFQHGTAGRIHRLASAGVDTNVRIWKVEKGPDGKAIVEFLSNLARHTKAVNVVRFSPTGEILASGGDDAVILLWKVNDNKEPEQIAFQDEDEAQLNKENWTVVKTLRGHLEDVYDICWATDGNLMASASVDNTAIIWDVSKGQKISIFNEHKSYVQGVTWDPLGQYVATLSCDRVLRVYSIQKKRVAFNVSKMLSGIGAEGEARSYRMFHDDSMKSFFRRLSFTPDGSLLLTPAGCVESGENVMNTTYVFSRKNLKRPIAHLPCPGKATLAVRCCPVYFELRPVVETGVELMSLPYRLVFAVASEDSVLLYDTQQSFPFGYVSNIHYHTLSDISWSSDGAFLAISSTDGYCSFVTFEKDELGIPLKEKPVLNMRTPDTAKKTKSQTHRGSSPGPRPVEGTPASRTQDPSSPGTTPPQARQAPAPTVIRDPPSITPAVKSPLPGPSEEKTLQPSSQNTKAHPSRRVTLNTLQAWSKTTPRRINLTPLKTDTPPSSVPTSVISTPSTEEIQSETPGDAQGSPPELKRPRLDENKGGTESLDP

SEQ ID NO: 4903 - protein, 1778 aa, Homo sapiens
METRSSKTRRSLASRTNECQGTMWAPTSPPAGSSSPSQPTWKSSLYSSLAYSEAFHYSFAARPRRLTQLALAQRPEPQLLRLRPSSLRTQDISHLLTGVFRNLYSAEVIGDEVSASLIKARGSENERHEEFVDQLQQIRELYKQRLDEFEMLERHITQAQARAIAENERVMSQAGVQDLESLVRLPPVKSVSRWCIDSELLRKHHLISPEDYYTDTVPFHSAPKGISLPGCSKLTFSCEKRSVQKKELNKKLEDSCRKKLAEFEDELDHTVDSLTWNLTPKAKERTREPLKKASQPRNKNWMNHLRVPQRELDRLLLARMESRNHFLKNPRFFPPNTRYGGKSLVFPPKKPAPIGEFQSTEPEQSCADTPVFLAKPPIGFFTDYEIGPVYEMVIALQNTTTTSRYLRVLPPSTPYFALGLGMFPGKGGMVAPGMTCQYIVQFFPDCLGDFDDFILVETQSAHTLLIPLQARRPPPVLTLSPVLDCGYCLIGGVKMTRFICKNVGFSVGRFCIMPKTSWPPLSFKAIATVGFVEQPPFGILPSVFELAPGHAILVEVLFSPKSLGKAEQTFIIMCDNCQIKELVTIGIGQLIALDLIYISGEKSQPDPGELTDLTAQHFIRFEPENLRSTARKQLIIRNATHVELAFYWQIMKPNLQPLMPGETFSMDSIKCYPDKETAFSIMPRKGVLSPHTDHEFILSFSPHELRDFHSVLQMVLEEVPEPVSSEAESLGHSSYSVDDVIVLEIEVKGSVEPFQVLLEPYALIIPGENYIGINVKKAFKMWNNSKSPIRYLWGKISDCHIIEVEPGTGVIEPSEVGDFELNFTGGVPGPTSQDLLCEIEDSPSPVVLHIEAVFKGPALIINVSALQFGLLRLGQKATNSIQIRNVSQLPATWRMKESPVSLQERPEDVSPFDIEPSSGQLHSLGECRVDITLEALHCQHLETVLELEVENGAWSYLPVYAEVQKPHVYLQSSQVEVRNLYLGVPTKTTITLINGTLLPTQFHWGKLLGHQAEFCMVTVSPKHGLLGPSEECQLKLELTAHTQEELTHLALPCHVSGMKKPLVLGISGKPQGLQVAITISKESSDCSTEQWPGHPKELRLDFGSAVPLRTRVTRQLILTNRSPIRTRFSLKFEYFGSPQNSLSKKTSLPNMPPALLKTVRMQEHLAKREQLDFMESMLSHGKGAAFFPHFSQGMLGPYQQLCIDITGCANMWGEYWDNLICTVGDLLPEVIPVHMAAVGCPISSLRTTSYTIDQAQKEPAMRFGTQVSGGDTVTRTLRLNNSSPCDIRLDWETYVPEDKEDRLVELLVFYGPPFPLRDQAGNELVCPDTPEGGCLLWSPGPSSSSEFSHETDSSVEGSSSASNRVAQKLISVILQAHEGVPSGHLYCISPKQVVVPAGGSSTIYISFTPMVLSPEILHKVECTGYALGFMSLDSKVEREIPGKRHRLQDFAVGPLKLDLHSYVRPAQLSVELDYGGSMEFQCQASDLIPEQPCSGVLSELVTTHHLKLTNTTEIPHYFRLMVSRPFSVSQDGASQDHRAPGPGQKQECEEETASADKQLVLQAQENMLVNVSFSLSLELLSYQKLPADQTLPGVDIQQSASGEREMVFTQNLLLEYTNQTTQVVPLRAVVAVPELQLSTSWVDFGTCFVSQQRVREVYLMNLSGCRSYWTMLMGVVSCTSPRWWWKVCSVRSPAPCGSGAKAPMMRDTCCLTSPEAPPQPSAPGPSWRKNIAQGLGAALQHKDTDLGTWGPLGSSWNGRTPFHNGLSLGPHDMSSELT

SEQ ID NO: 4904 - protein, 193 aa, Homo sapiens
MEQHFLGCVKRAWDSAEVAPEPQPPPIVSSEDRGPWPLPLYPVLGEYSLDSCDLGLLSSPCWRLPGVYWQNGLSPGVQSTLEPSTAKPTEFSWPGTQKQQEAPVEEVGQAEEPDRLRLQQLPWSSPLHPWDRQQDTEVCDSGCLLERRHPPALQPWRHLPGFSDCLEWILRVGFAAFSVLWACCSRICGAKQP

SEQ ID NO: 4905 - protein, 280 aa, Homo sapiens
MAPRKGSSRVAKTNSLRRRKLASFLKDFDREVEIRIKQIESDRQNLLKEVDNLYNIEILRLPKALREMNWLDYFALGGNKQALEEAATADLDITEINKLTAEAIQTPLKSAKTRKVIQVDEMIVEEEEEEENERKNLQTARVKRCPPSKKRTQSIQGKGKGKRSSRANTVTPAVGRLEVSMVKPTPGLTPRFDSRVFKTPGLRTPAAGERIYNISGNGSPLADSKEIFLTVPVGGGESLRLLASDLQRHSIAQLDPEALGNIKKLSNRLAQICSSIRTHK

SEQ ID NO: 4906 - protein, 1130 aa, Homo sapiens
MRCLAPRPAGSYLSEPQGSSQCATMELGPLEGGYLELLNSDADPLCLYHFYDQMDLAGEEEIELYSEPDTDTINCDQFSRLLCDMEGDEETREAYANIAELDQYVFQDSQLEGLSKDIFKHIGPDEVIGESMEMPAEVGQKSQKRPFPEELPADLKHWKPAEPPTVVTGSLLVGPVSDCSTLPCLPLPALFNQEPASGQMRLEKTDQIPMPFSSSSLSCLNLPEGPIQFVPTISTLPHGLWQISEAGTGVSSIFIYHGEVPQASQVPPPSGFTVHGLPTSPDRPGSTSPFAPSATDLPSMPEPALTSRANMTEHKTSPTQCPAAGEVSNKLPKWPEPVEQFYRSLQDTYGAEPAGPDGILVEVDLVQARLERSSSKSLERELATPDWAERQLAQGGLAEVLLAAKEHRRPRETRVIAVLGKAGQGKSYWAGAVSRAWACGRLPQYDFVFSVPCHCLNRPGDAYGLQDLLFSLGPQPLVAADEVFSHILKRPDRVLLILDGFEELEAQDGFLHSTCGPAPAEPCSLRGLLAGLFQKKLLRGCTLLLTARPRGRLVQSLSKADALFELSGFSMEQAQAYVMRYFESSGMTEHQDRALTLLRDRPLLLSHSHSPTLCRAVCQLSEALLELGEDAKLPSTLTGLYVGLLGRAALDSPPGALAELAKLAWELGRRHQSTLQEDQFPSADVRTWAMAKGLVQHPPRAAESELAFPSFLLQCFLGALWLALSGEIKDKELPQYLALTPRKKRPYDNWLEGVPRFLAGLIFQPPARCLGALLGPSAAASVDRKQKVLARYLKRLQPGTLRARQLLELLHCAHEAEEAGIWQHVVQELPGRLSFLGTRLTPPDAHVLGKALEAAGQDFSLDLRSTGICPSGLGSLVGLSCVTRFRAALSDTVALWESLQQHGETKLLQAAEEKFTIEPFKAKSLKDVEDLGKLVQTQRTRSSSEDTAGELPAVRDLKKLEFALGPVSGPQAFPKLVRILTAFSSLQHLDLDALSENKIGDEGVSQLSATFPQLKSLETLNLSQNNITDLGAYKLAEALPSLAASLLRLSLYNNCICDVGAESLARVLPDMVSLRVMDVQYNKFTAAGAQQLAASLRRCPHVETLAMWTPTIPFSVQEHLQQQDSRISLR

SEQ ID NO: 4907 - protein, 453 aa, Homo sapiens
MKIFKCYFKHTLQQKVFILFLTLWLLSLLKLLNVRRLFPQKDIYLVEYSLSTSPFVRNRYTHVKDEVRYEVNCSGIYEQEPLEIGKSLEIRRRDIIDLEDDDVVAMTSDCDIYQTLRGYAQKLVSKEEKSFPIAYSLVVHKDAIMVERLIHAIYNQHNIYCIHYDRKAPDTFKVAMNNLAKCFSNIFIASKLEAVEYAHISRLQADLNCLSDLLKSSIQWKYVINLCGQDFPLKSNFELVSELKKLNGANMLETVKPPNSKLERFTYHHELRRVPYEYVKLPIRTNISKEAPPHNIQIFVGSAYFVLSQAFVKYIFNNSIVQDFFAWSKDTYSPDEHFWATLIRVPGIPGEISRSAQDVSDLQSKTRLVKWNYYEGFFYPSCTGSHLRSVCIYGAAELRWLIKDGHWFANKFDSKVDPILIKCLAEKLEEQQRDWITLPSEKLFMDRNLTTTS

SEQ ID NO: 4908 - protein, 513 aa, Homo sapiens
MWKASAGHAVSIAQDDAGADDWETDPDFVNDVSEKEQRWGAKTVQGSGHQEHINIHKLRENVFQEHQTLKEKELETGPKASHGYGGKFGVEQDRMDKSAVGHEYQSKLSKHCSQVDSVRGFGGKFGVQMDRVDQSAVGFEYQGKTEKHASQKDYSSGFGGKYGVQADRVDKSAVGFDYQGKTEKHESQRDYSKGFGGKYGIDKDKVDKSAVGFEYQGKTEKHESQKDYVKGFGGKFGVQTDRQDKCALGWDHQEKLQLHESQKDYSKGFGGKYGVQKDRMDKNASTFEDVTQVSSAYQKTVPVEAVTSKTSNIRANFENLAKEKEQEDRRKAEAERAQRMAKERQEQEEARRKLEEQARAKTQTPPVSPAPQPTEERLPSSPVYEDAASFKAELSYRGPVSGTEPEPVYSMEAADYREASSQQGLAYATEAVYESAEAPGHYPAEDSTYDEYENDLGITAVALYDYQAAGDDEISFDPDDIITNIEMIDDGWWRGVCKGRYGLFPANYVELRQ

SEQ ID NO: 4909 - protein, 281 aa, Homo sapiens
MATNFLAHEKIWFDKFKYDDAERRFYEQMNGPVAGASRQENGASVILRDIARARENIQKSLAGSSGPGASSGTSGDHGELVVRIASLEVENQSLRGVVQELQQAISKLEARLNVLEKSSPGHRATAPQTQHVSPMRQVEPPAKKPATPAEDDEDDDIDLFGSDNEEEDKEAAQLREERLRQYAEKKAKKPALVAKSSILLDVKPWDDETDMAQLEACVRSIQLDGLVWGASKLVPVGYGIRKLQIQCVVEDDKVGTDLLEEEITKFEEHVQSVDIAAFNKI

SEQ ID NO: 4910 - protein, 331 aa, Homo sapiens
MGTPQKDVIIKSDAPDTLLLEKHADYIASYGSKKDDYEYCMSEYLRMSGIYWGLTVMDLMGQLHRMNREEILAFIKSCQHECGGISASIGHDPHLLYTLSAVQILTLYDSINVIDVNKVVEYVKGLQKEDGSFAGDIWGEIDTRFSFCAVATLALLGKLDAINVEKAIEFVLSCMNFDGGFGCRPGSESHAGQIYCCTGFLAITSQLHQVNSDLLGWWLCERQLPSGGLNGRPEKLPDVCYSWWVLASLKIIGRLHWIDREKLRNFILACQDEETGGFADRPGDMVDPFHTLFGIAGLSLLGEEQIKPVNPVFCMPEEVLQRVNVQPELVS

SEQ ID NO: 4911 - protein, 688 aa, Homo sapiens
MADLEAVLADVSYLMAMEKSKATPAARASKRIVLPEPSIRSVMQKYLAERNEITFDKIFNQKIGFLLFKDFCLNEINEAVPQVKFYEEIKEYEKLDNEEDRLCRSRQIYDAYIMKELLSCSHPFSKQAVEHVQSHLSKKQVTSTLFQPYIEEICESLRGDIFQKFMESDKFTRFCQWKNVELNIHLTMNEFSVHRIIGRGGFGEVYGCRKADTGKMYAMKCLDKKRIKMKQGETLALNERIMLSLVSTGDCPFIVCMTYAFHTPDKLCFILDLMNGGDLHYHLSQHGVFSEKEMRFYATEIILGLEHMHNRFVVYRDLKPANILLDEHGHARISDLGLACDFSKKKPHASVGTHGYMAPEVLQKGTAYDSSADWFSLGCMLFKLLRGHSPFRQHKTKDKHEIDRMTLTVNVELPDTFSPELKSLLEGLLQRDVSKRLGCHGGGSQEVKEHSFFKGVDWQHVYLQKYPPPLIPPRGEVNAADAFDIGSFDEEDTKGIKLLDCDQELYKNFPLVISERWQQEVTETVYEAVNADTDKIEARKRAKNKQLGHEEDYALGKDCIMHGYMLKLGNPFLTQWQRRYFYLFPNRLEWRGEGESRQNLLTMEQILSVEETQIKDKKCILFRIKGGKQFVLQCESDPEFVQWKKELNETFKEAQRLLRRAPKFLNKPRSGTVELPKPSLCHRNSNGL

SEQ ID NO: 4912 - protein, 324 aa, Homo sapiens
MDAPRQVVNFGPGPAKLPHSVLLEIQKELLDYKGVGISVLEMSHRSSDFAKIINNTENLVRELLAVPDNYKVIFLQGGGCGQFSAVPLNLIGLKAGRCADYVVTGAWSAKAAEEAKKFGTINIVHPKLGSYTKIPDPSTWNLNPDASYVYYCANETVHGVEFDFIPDVKGAVLVCDMSSNFLSKPVDVSKFGVIFAGAQKNVGSAGVTVVIVRDDLLGFALRECPSVLEYKVQAGNSSLYNTPPCFSIYVMGLVLEWIKNNGGAAAMEKLSSIKSQTIYEIIDNSQGFYVSVGGIRASLYNAVTIEDVQKLAAFMKKFLEMHQL

SEQ ID NO: 4913 - protein, 430 aa, Homo sapiens
MAEAVLIDLFGLKLNSQKNCHQTLLKTLNAVQYHHAAKAKFLCIMCCSNISYERDGEQDNCEIETSNGLSALLEEFEIVSCPSMAATLYTIKQKIDEKNLSSIKVIVPRHRKTLMKAFIDQLFTDVYNFEFEDLQVTFRGGLFKQSIEINVITAQELRGIQNEIETFLRSLPALRGKLTIITSSLIPDIFIHGFTTRTGGISYIPTLSSFNLFSSSKRRDPKVVVQENLRRLANAAGFNVEKFYRIKTHHSNDIWIMGRKEPDSYDGITTNQRGVTIAALGADCIPIVFADPVKKACGVAHAGWKGTLLGVAMATVNAMIAEYGCSLEDIVVVLGPSVGPCCFTLPRESAEAFHNLHPACVQLFDSPNPCIDIRKATRILLEQGGILPQNIQDQNQDLNLCTSCHPDKFFSHVRDGLNFGTQIGFISIKE

SEQ ID NO: 4914 - protein, 322 aa, Homo sapiens
GRLGKDLATGVLSQECTKFKVSSCRECIESGPGCTWCQKLNFTGPGDPDSIRCDTRPQLLMRGCAADDIMDPTSLAETQEDHNGGQKQLSPQKVTLYLRPGQAAAFNVTFRRAKGYPIDLYYLMDLSYSMLDDLRNVKKLGGDLLRALNEITESGRIGFGSFVDKTVLPFVNTHPDKLRNPCPNKEKECQPPFAFRHVLKLTNNSNQFQTEVGKQLISGNLDAPEGGLDAMMQVAACPEEIGWRNVTRLLVFATDDGFHFAGDGKLGAILTPNDGRCHLEDNLYKRSNEFDYPSVGQLAHKLAENNIQPIFAVTSRMVKTYE

SEQ ID NO: 4915 - protein, 387 aa, Homo sapiens
MTGKLAEKLPVTMSSLLNQLPDNLYPEEIPSALNLFSGSSDSVVHYNQMATENVMDIGLTNEKPNPELSYSGSFQPAPGNKTVTYLGKFAFDSPSNWCQDNIISLMSAGILGVPPASGALSTQTSTASMVQPPQGDVEAMYPALPPYSNCGDLYSEPVSFHDPQGNPGLAYSPQDYQSAKPALDSNLFPMIPDYNLYHHPNDMGSIPEHKPFQGMDPIRVNPPPITPLETIKAFKDKQIHPGFGSLPQPPLTLKPIRPRKYPNRPSKTPLHERPHACPAEGCDRRFSRSDELTRHLRIHTGHKPFQCRICMRSFSRSDHLTTHIRTHTGEKPFACEFCGRKFARSDERKRHAKIHLKQKEKKAEKGGAPSASSAPPVSLAPVVTTCA

SEQ ID NO: 4916 - protein, 342 aa, Homo sapiens
MNNAGHGPTRRLRGLGVLAGVALLAALWLLWLLGSAPRGTPAPQPTITILVWHWPFTDQPPELPSDTCTRYGIARCHLSANRSLLASADAVVFHHRELQTRRSHLPLAQRPRGQPWVWASMESPSHTHGLSHLRGIFNWVLSYRRDSDIFVPYGRLEPHWGPSPPLPAKSRVAAWVVSNFQERQLRARLYRQLAPHLRVDVFGRANGRPLCASCLVPTVAQYRFYLSFENSQHRDYITEKFWRNALVAGTVPVVLGPPRATYEAFVPADAFVHVDDFGSARELAAFLTGMNESRYQRFFAWRDRLRVRLFTDWRERFCAICDRYPHLPRSQVYEDLEGWFQA

SEQ ID NO: 4917 - protein, 216 aa, Homo sapiens
MSEAYFRVESGALGPEENFLSLDDILMSHEKLPVRTETAMPRLGAFFLERSAGAETDNAVPQGSKLELPLWLAKGLFDNKRRILSVELPKIYQEGWRTVFSADPNVVDLHKMGPHFYGFGSQLLHFDSPENADISQSLLQTFIGRFRRIMDSSQNAYNEDTSALVARLDEMERGLFQTGQKGLNDFQCWEKGQASQITASNLVQNYKKRKFTDMED

SEQ ID NO: 4918 - protein, 246 aa, Homo sapiens
MAFSGSQAPYLSPAVPFSGTIQGGLQDGLQITVNGTVLSSSGTRFAVNFQTGFSGNDIAFHFNPRFEDGGYVVCNTRQNGSWGPEERKTHMPFQKGMPFDLCFLVQSSDFKVMVNGILFVQYFHRVPFHRVDTISVNGSVQLSYISFQPPGVWPANPAPITQTVIHTVQSAPGQMFSTPAIPPMMYPHPAYPMPFITTILGGLYPSKSILLSGTVLPSAQRCGSCVKLTASRWPWMVSTCLNTTIA

SEQ ID NO: 4919 - protein, 442 aa, Homo sapiens
MAEGEGYFAMSEDELACSPYIPLGGDFGGGDFGGGDFGGGDFGGGGSFGGHCLDYCESPTAHCNVLNWEQVQRLDGILSETIPIHGRGNFPTLELQPSLIVKVVRRRLAEKRIGVRDVRLNGSAASHVLHQDSGLGYKDLDLIFCADLRGEGEFQTVKDVVLDCLLDFLPEGVNKEKITPLTLKEAYVQKMVKVCNDSDRWSLISLSNNSGKNVELKFVDSLRRQFEFSVDSFQIKLDSLLLFYECSENPMTETFHPTIIGESVYGDFQEAFDHLCNKIIATRNPEEIRGGGLLKYCNLLVRGFRPASDEIKTLQRYMCSRFFIDFSDIGEQQRKLESYLQNHFVGLEDRKYEYLMTLHGVVNESTVCLMGHERRQTLNLITMLAIRVLADQNVIPNVANVTCYYQPAPYVADANFSNYYIAQVQPVFTCQQQTYSTWLPCN

SEQ ID NO: 4920 - protein, 130 aa, Homo sapiens [sequence omitted]

SEQ ID NO: 4921 - protein, 479 aa, Homo sapiens
MSSPGIDGDPKPPCLPRNGLVKLPGQPNGLGAASITKGTPATKNRPCQPPPPPTLPPPSLAAPLSRAALAGGPCTPAGGPASALAPGHPAERPPLATDEKILNGLFWYFSACEKCVLAQVCKAWRRVLYQPKFWAGLTPVLHAKELYNVLPGGEKEFVNLQGFAARGFEGFCLVGVSDLDICEFIDNYALSKKGVKAMSLKRSTITDAGLEVMLEQMQGVVRLELSGCNDFTEAGLWSSLSARITSLSVSDCINVADDAIAAISQLLPNLAELSLQAYHVTDTALAYFTARQGHSTHTLRLLSCWEITNHGVVNVVHSLPNLTALSLSGCSKVTDDGVELVAENLRKLRSLDLSWCPRITDMALEYVACDLHRLEELVLDRCVRITDTGLSYLSTMSSLRSLYLRWCCQVQDFGLKHLLALGSLRLLSLAGCPLLTTTGLSGLVQLQELEELELTNCPGATPELFKYFSQHLPRCLVIE

SEQ ID NO: 4922 - protein, 858 aa, Homo sapiens
MSVVGLDVGSQSCYIAVARAGGIETIANEFSDRCTPSVISFGSKNRTIGVAAKNQQITHANNTVSNFKRFHGRAFNDPFIQKEKENLSYDLVPLKNGGVGIKVMYMGEEHLFSVEQITAMLLTKLKETAENSLKKPVTDCVISVPSFFTDAERRSVLDAAQIVGLNCLRLMNDMTAVALNYGIYKQDLPSLDEKPRIVVFVDMGHSAFQVSACAFNKGKLKVLGTAFDPFLGGKNFDEKLVEHFCAEFKTKYKLDAKSKIRALLRLYQECEKLKKLMSSNSTDLPLNIECFMNDKDVSGKMNRSQFEELCAELLQKIEVPLYSLLEQTHLKVEDVSAVEIVGGATRIPAVKERIAKFFGKDISTTLNADEAVARGCALQCAILSPAFKVREFSVTDAVPFPISLIWNHDSEDTEGVHEVFSRNHAAPFSKVLTFLRRGPFELEAFYSDPQGVPYPEAKIGRFVVQNVSAQKDGEKSRVKVKVRVNTHGIFTISTASMVEKVPTEENEMSSEADMECLNQRPPENPDTDKNVQQDNSEAGTQPQVQTDAQQTSQSPPSPELTSEENKIPDADKANEKKVDQPPEAKKPKIKVVNVELPIEANLVWQLGKDLLNMYIETEGKMIMQDKLEKERNDAKNAVEEYVYEFRDKLCGPYEKFICEQDHQNFLRLLTETEDWLYEEGEDQAKQAYVDKLEELMKIGTPVKVRFQEAEERPKMFEELGQRLQHYAKIAADFRNKDEKYNHIDESEMKKVEKSVNEVMEWMNNVMNAQAKKSLDQDPVVRAQEIKTKIKELNNTCEPVVTQPKPKIESPKLERTPNGPNIDKKEEDLEDKNNFGAEPPHQNGECYPNEKNSVNMDLD

SEQ ID NO: 4923 - protein, 935 aa, Homo sapiens
MIDLSFLTEEEQEAIMKVLQRDAALKRAEEERVRHLPEKIKDDQQLKNMSGQWFYEAKAKRHRDKIHGADIIRASMRKKRPQIAAEQSKDRENGAKESWVNNVNKDAFLPPELAGVVEEPEEDAAPASPSSSVVNPASSVIDMSQENTRKPNVSPEKQRKNPFNSSKLPEGHSSQQTKNEQSKNGRTGLFQTSKEDELSESKEKSTVADTSIQKLEKSKQTLPGLSNGSQIKAPIPKARKMIYKSTDLNKDDNQSFPRQRTDSLKARGAPRGILKRNSSSSSTDSETLRYNHNFEPKSKIVSPGLTIHERISEKEHSLEDNSSPNSLEPLKHVRFSAVKDELPQSPGLIHGREVGEFSVLESDRLKNGMEDAGDTEEFQSDPKPSQYRKPSLFHQSTSSPYVSKSETHQPMTSGSFPINGLHSHSEVLTARPQSMENSPTINEPKDKSSELTRLESVLPRSPADELSHCVEPEPSQVPGGSSRDRQQGSEEEPSPVLKTLERSAARKMPSKSLEDISSDSSNQAKVDNQPEELVRSAEDVSTVPTQPDNPFSHPDKLKRMSKSVPAFLQDESDDRETDTASESSYQLSRHKKSPSSLTNLSSSSGMTSLSSVSGSVMSVYSGDFGNLEVKGNIQFAIEYVESLKELHVFVAQCKDLAAADVKKQRSDPYVKAYLLPDKGKMGKKKTLVVKKTLNPVYNEILRYKIEKQILKTQKLNLSIWHRDTFKRNSFLGEVELDLETWDWDNKQNKQLRWYPLKRKTAPVALEAENRGEMKLALQYVPEPVPGKKLPTTGEVHIWVKECLDLPLLRGSHLNSFVKCTILPDTSRKSRQKTRAVGKTTNPIFNHTMVYDGFRPEDLMEACVELTVWDHYKLTNQFLGGLRIGFGTGKSYGTEVDWMDSTSEEVALWEKMVNSPNTWIEATLPLRMLLIAKISK

SEQ ID NO: 4924 - protein, 873 aa, Homo sapiens
MAEMEKEGRPPENKRSRKPAHPVKREINEEMKNFAENTMNELLGWYGYDKVELKDGEDIEFRSYPTDGESRQHISVLKENSLPKPKLPEDSVISPYNISTGYSGLATGNGLSDSPAGSKDHGSVPIIVPLIPPPFIKPPAEDDVSNVQIMCAWCQKVGIKRYSLSMGSEVKSFCSEKCFAACRRAYFKRNKARDEDGHAENFPQQHYAKETPRLAFKNNCELLVCDWCKHIRHTKEYLDFGDGERRLQFCSAKCLNQYKMDIFYKETQANLPAGLCSTLHPPMENKAEGTGVQLLTPDSWNIPLTDARRKAPSPVATAGQSQGPGPSASTTVSPSDTANCSVTKIPTPVPKSIPISETPNIPPVSVQPPASIGPPLGVPPRSPPMVMTNRGPVPLPIFMEQQIMQQIRPPFIRGPPHHASNPNSPLSNPMLPGIGPPPGGPRNLGPTSSPMHRPMLSPHIHPPSTPTMPGNPPGLLPPPPPGAPLPSLPFPPVSMMPNGPMPVPQMMNFGLPSLAPLVPPPTLLVPYPVIVPLPVPIPIPIPIPHVSDSKPPNGFSSNGENFIPNAPGDSAAAGGKPSGHSLSPRDSKQGSSKSADSPPGCSGQALSLAPTPAEHGRSEVVDLTRRAGSPPGPPGAGGQLGFPGVLQGPQDGVIDLTVGHRARLHNVIHRALHAHVKAEREPSAAERRTCGGCRDGHCSPPAAGDPGPGAPAGPEAAAACNVIVNGTRGAAAEGAKSAEPPPEQPPPPPPPAPPKKLLSPEEPAVSELESVKENNCASNCHLDGEAAKKLMGEEALAGGDKSDPNLNNPADEDHAYALRMLPKTGCVIQPVPKPAEKAAMAPCIISSPMLSAGPEDLEPPLKRRCLRIRNQNK

SEQ ID NO: 4925 - protein, 637 aa, Homo sapiens
MAAMAVGGAGGSRVSSGRDLNCVPEIADTLGAVAKQGFDFLCMPVFHPRFKREFIQEPAKNRPGPQTRSDLLLSGRDWNTLIVGKLSPWIRPDSKVEKIRRNSEAAMLQELNFGAYLGLPAFLLPLNQEDNTNLARVLTNHIHTGHHSSMFWMRVPLVAPEDLRDDIIENAPTTHTEEYSGEEKTWMWWHNFRTLCDYSKRIAVALEIGADLPSNHVIDRWLGEPIKAAILPTSIFLTNKKGFPVLSKMHQRLIFRLLKLEVQFIITGTNHHSEKEFCSYLQYLEYLSQNRPPPNAYELFAKGYEDYLQSPLQPLMDNLESQTYEVFEKDPIKYSQYQQAIYKCLLDRVPEEEKDTNVQVLMVLGAGRGPLVNASLRAAKQADRRIKLYAVEKNPNAVVTLENWQFEEWGSQVTVVSSDMREWVAPEKADIIVSELLGSFADNELSPECLDGAQHFLKDDGVSIPGEYTSFLAPISSSKLYNEVRACREKDRDPEAQFEMPYVVRLHNFHQLSAPQPCFTFSHPNRDPMIDNNRYCTLEFPVEVNTVLHGFAGYFETVLYQDITLSIRPETHSPGMFSWFPILFPIKQPITVREGQTICVRFWRCSNSKKVWYEWAVTAPVCSAIHNPTGRSYTIGL

SEQ ID NO: 4926 - protein, 414 aa, Homo sapiens
MIPLEKPGSGGSSPGATSGSGRAGRGLSGPCRPPPPPQARGLLTEIRAVVRTEPFQDGYSLCPGRELGRGKFAVVRKCIKKDSGKEFAAKFMRKRRKGQDCRMEIIHEIAVLELAQDNPWVINLHEVYETASEMILVLEYAAGGEIFDQCVADREEAFKEKDVQRLMRQILEGVHFLHTRDVVHLDLKPQNILLTSESPLGDIKIVDFGLSRILKNSEELREIMGTPEYVAPEILSYDPISMATDMWSIGVLTYVMLTGISPFLGNDKQETFLNISQMNLSYSEEEFDVLSESAVDFIRTLLVKKPEDRATAEECLKHPWLTQSSIQEPSFRMEKALEEANALQEGHSVPEINSDTDKSETKESIVTEELIVVTSYTLGQCRQSEKEKMEQKAISKRFKFEEPLLQEIPGEFIY

SEQ ID NO: 4927 - protein, 1015 aa, Homo sapiens
MTVSQKGGPQPTPSPAGPGTQLGPITGEMDEADSAFLKFKQTADDSLSLTSPNTESIFVEDPYTASLRSEIESDGHEFEAESWSLAVDAAYAKKQKREVVKRQDVLYELMQTEVHHVRTLKIMLKVYSRALQEELQFSSKAIGRLFPCADDLLETHSHFLARLKERRQESLEEGSDRNYVIQKIGDLLVQQFSGENGERMKEKYGVFCSGHNEAVSHYKLLLQQNKKFQNLIKKIGNFSIVRRLGVQECILLVTQRITKYPVLVERIIQNTEAGTEDYEDLTQALNLIKDIISQVDAKVSECEKGQRLREIAGKMDLKSSSKLKNGLTFRKEDMLQRQLHLEGMLCWKTTSGRLKDILAILLTDVLLLLQEKDQKYVFASVDSKPPVISLQKLIVREVANEEKAMFLISASLQGPEMYEIYTSSKEDRNAWMAHIQRAVESCPDEEEGPFSLPEEERKVVEARATRLRDFQERLSMKDQLIAQSLLEKQQIYLEMAEMGGLEDLPQPRGLFRGGDPSETLQGELILKSAMSEIEGIQSLICRQLGSANGQAEDGGSSTGPPRRAETFAGYDCTNSPTKNGSFKKKVSSTDPRPRDWRGPPNSPDLKLSDSDIPGSSEESPQVVEAPGTESDPRLPTVLESELVQRIQTLSQLLLNLQAVIAHQDSYVETQRAAIQEREKQFRLQSTRGNLLLEQERQRNFEKQREERAALEKLQSQLRHEQQRWERERQWQHQELERAGARLQEREGEARQLRERLEQERAELERQRQAYQHDLERLREAQRAVERERERLELLRRLKKQNTAPGALPPDTLAEAQPPSHPPSFNGEGLEGPRVSMLPSGVGPEYAERPEVARRDSAPTENRLAKSDVPIQLLSATNQFQRQAAVQQQIPTKLAASTKGGKDKGGKSRGSQRWESSASFDLKQQLLLNKLMGKDESTSRNRRSLSPILPGRHSPAPPPDPGFPAPSPPPADSPSEGFSLKAGGTALLPGPPAPSPLPATPLSAKEDASKEDVIFF

SEQ ID NO: 4928 - protein, 350 aa, Homo sapiens
MEYYLVKWKGWPDSTNTWEPLQNLKCPLLLQQFSNDKHNYLSQVKKGKAITPKDNNKTLKPAIAEYIVKKAKQRIALQRWQDELNRRKNHKGMIFVENTVDLEGPPSDFYYINEYKPAPGISLVNEATFGCSCTDCFFQKCCPAEAGVLLAYNKNQQIKIPPGTPIYECNSRCQCGPDCPNRIVQKGTQYSLCIFRTSNGRGWGVKTLVKIKRMSFVMEYVGEVITSEEAERRGQFYDNKGITYLFDLDYESDEFTVDAARYGNVSHFVNHSCDPNLQVFNVFIDNLDTRLPRIALFSTRTINAGEELTFDYQMKGSGDISSDSIDHSPAKKRVRTVCKCGAVTCRGYLN

SEQ ID NO: 4929 - protein, 529 aa, Homo sapiens
MEQEKKLLVSDSNSFMERESLKSPFTGDTSMNNLETVHHNNSKADKLKEKPSEWSKRHRPQHYKHEDAKEMPLTWVQDEIWCHDSYESDGKSENWGNFIAKEEEKPNHQEWDSGEHTNACVQQNSSFVDRPYKCSECWKSFSNSSHLRTHQRTHSGEKPYKCSECAKCFCNSSHLIQHLRMHTGEKPYQCGECGKSFSNTSHLIIHERTHTGEKPYKCPECGKRFSSSSHLIQHHRSHTGEKPYECSVCGKGFSHSYVLIEHQRTHTGEKPYKCPDCGKSFSQSSSLIRHQRTHTGEKPYKCLECEKSFGCNSTLIKHQRIHTGEKPYQCPECGKNFSRSSNLITHQKMHTGEKSYESSEYEESLGQNCNVIEECRIQLGEKPYRCCECGKSFGLSSHLIRHQRTHTGEKPYRCSECWKTFSQSSTLVIHQRTHTGEKPYKCPDCGESFSQSFNLIRHRRTHIGEKPYKCTSCEKCFSRSAYLSQHRKIHVEKPFESPDVGDFPHEWTWKNCSGEMPFISSFSVSNSSS

SEQ ID NO: 4930 - protein, 412 aa, Homo sapiens
MDPIRSFCGKLRSLASTLDCETARLQRALDGEESDFEDYPMRILYDLHSEVQTLKDDVNILLDKARLENQEGIDFIKATKVLMEKNSMDIMKIREYFQKYGYSPRVKKNSVHEQEAINSDPELSNCENFQKTDVKDDLSDPPVASSCISEKSPRSPQLSDFGLERYIVSQVLPNPPQAVNNYKEEPVIVTPPTKQSLVKVLKTPKCALKMDDFECVTPKLEHFGISEYTMCLNEDYTMGLKNARNNKSEEAIDTESRLNDNVFATPSPIIQQLEKSDAEYTNSPLVPTFCTPGLKIPSTKNSIALVSTNYPLSKTNSSSNDLEVEDRTSLVLNSDTCFENLTDPSSPTISSYENLLRTPTPPEVTKIPEDILQLLSKYNSNLATPIAIKAVPPSKRFLKHGQNIRDVSNKEN

SEQ ID NO: 4931 - protein, 551 aa, Homo sapiens
FQVPLTFSDVAIDFSQEEWEYLNSDQRDLYRDVMLENYTNLVSLDFNFTTESNKLSSEKRNYEVNAYHQETWKRNKTFNLMRFIFRTDPQYTIEFGRQQRPKVGCFSQMIFKKHKSLPLHKRNNTREKSYECKEYKKGFRKYLHLTEHLRDHTGVIPYECNECGKAFVVFQHFIRHRKIHTDLKPYECNGCEKAFRFYSQLIQHQIIHTGMKPYECKQCGKAFRRHSHLTEHQKIHVGLKPFECKECGETFRLYRHMCLHQKIHHGVKPYKCKECGKAFGHRSSLYQHKKIHSGEKPYKCEQCEKAFVRSYLLVEHQRSHTGEKPHECMECGKAFGKGSSLLKHKRIHSSEKLYDCKDCGKAFCRGSQLTQHQRIHTGEKPHECKECGKTFKLHSYLIQHQIIHTDLKPYECKQCGKAFSRVGDLKTHQSIHAGEKPYECKECGKTFRLNSQLIYHQTIHTGLKPYVCKECKKAFRSISGLSQHKRIHTGEKPYECKECDKAFNRSDRLTQHETIHTGVKPQKCKECGKAFSHCYQLSQHQRFHHGERLLM

SEQ ID NO: 4932 - protein, 494 aa, Homo sapiens
MFEIKKICCIGAGYVGGPTCSVIAHMCPEIRVTVVDVNESRINAWNSPTLPIYEPGLKEVVESCRGKNLFFSTNIDDAIKEADLVFISVNTPTKTYGMGKGRAADLKYIEACARRIVQNSNGYKIVTEKSTVPVRAAESIRRIFDANTKPNLNLQVLSNPEFLAEGTAIKDLKNPDRVLIGGDETPEGQRAVQALCAVYEHWVPREKILTTNTWSSELSKLAANAFLAQRISSINSISALCEATGADVEEVATAIGMDQRIGNKFLKASVGFGGSCFQKDVLNLVYLCEALNLPEVARYWQQVIDMNDYQRRRFASRIIDSLFNTVTDKKIAILGFAFKKDTGDTRESSSIYISKYLMDEGAHLHIYDPKVPREQIVVDLSHPGVSEDDQVSRLVTISKDPYEACDGAHAVVICTEWDMFKELDYERIHKKMLKPAFIFDGRRVLDGLHNELQTIGFQIETIGKKVSSKRIPYAPSGEIPKFSLQDPPNKKPKV

SEQ ID NO: 4933 - protein, 274 aa, Homo sapiens
MVGRRALIVLAHSERTSFNYAMKEAAAAALKKKGWEVVESDLYAMNFNPIISRKDITGKLKDPANFQYPAESVLAYKEGHLSPDIVAEQKKLEAADLVIFQFPLQWFGVPAILKGWFERVFIGEFAYTYAAMYDKGPFRSKKAVLSITTGGSGSMYSLQGIHGDMNVILWPIQSGILHFCGFQVLEPQLTYSIGHTPADARIQILEGWKKRLENIWDETPLYFAPSSLFDLNFQAGFLMKKEVQDEEKNKKFGLSVGHHLGKSIPTDNQIKARK

SEQ ID NO: 4934 - protein, 361 aa, Homo sapiens
MSGAGVGGASEESQAMQAHVSIILPVHNAEPWLDECLRSVLQQDFEGTMELSVFNDASKDKSGAIIEKWRVKLEDSGVHVIIGGHDSPSPRGVGYAKNQAVAQSSGSYLCFLDSDDVMMPQRVRLQHEAAVQHPSSIIGCRVRRDPPNSTERYTRWINQLTPEQLLTQVFTSNGPTVIMPTWFCSRAWFSHVGPFNEGGQGVPEDLLFFYEHLRKGGGVIRVDQSLLLYRHHPQAATHCVLETTIWTHRVRFLEEQALPRWAAFTIWNAGKQGRRLYRSLTAGSQRKVVAFCDVDENKIRKGFYCHEDSQERPKPRIPILHFRAARPPFVICVKLDLTGGAFEDNLRSLHLQEGQDFLHFS

SEQ ID NO: 4935 - protein, 601 aa, Homo sapiens
MDWGTELWDQFEVLERHTQWGLDLLDRYVKFVKERTEVEQAYAKQLRSLVKKYLPKRPAKDDPESKFSQQQSFVQILQEVNDFAGQRELVAENLSVRVCLELTKYSQEMKQERKMHFQEGRRAQQQLENGFKQLENSKRKFERDCREAEKAAQTAERLDQDINATKADVEKAKQQAHLRSHMAEESKNEYAAQLQRFNRDQAHFYFSQMPQIFDKLQDMDERRATRLGAGYGLLSEAELEVVPIIAKCLEGMKVAANAVDPKNDSHVLIELHKSGFARPGDVEFEDFSQPMNRAPSDSSLGTPSDGRPELRGPGRSRTKRWPFGKKNKPRPPPLSPLGGPVPSALPNGPPSPRSGRDPLAILSEISKSVKPRLASFRSLRGSRGTVVTEDFSHLPPEQQRKRLQQQLEERSRELQKEVDQREALKKMKDVYEKTPQMGDPASLEPQIAETLSNIERLKLEVQKYEAWLAEAESRVLSNRGDSLSRHARPPDPPASAPPDSSSNSASQDTKESSEEPPSEESQDTPIYTEFDEDFEEEPTSPIGHCVAIYHFEGSSEGTISMAEGEDLSLMEEDKGDGWTRVRRKEGGEGYVPTSYLRVTLN

SEQ ID NO: 4936 - protein, 751 aa, Homo sapiens
MGQTGKKSEKGPVCWRKRVKSEYMRLRQLKRFRRADEVKSMFSSNRQKILERTEILNQEWKQRRIQPVHILTSVSSLRGTRECSVTSDLDFPTQVIPLKTLNAVASVPIMYSWSPLQQNFMVEDETVLHNIPYMGDEVLDQDGTFIEELIKNYDGKVHGDRECGFINDEIFVELVNALGQYNDDDDDDDGDDPEEREEKQKDLEDHRDDKESRPPRKFPSDKIFEAISSMFPDKGTAEELKEKYKELTEQQLPGALPPECTPNIDGPNAKSVQREQSLHSFHTLFCRRCFKYDCFLHRKCNYSFHATPNTYKRKNTETALDNKPCGPQCYQHLEGAKEFAAALTAERIKTPPKRPGGRRRGRLPNNSSRPSTPTINVLESKDTDSDREAGTETGGENNDKEEEEKKDETSSSSEANSRCQTPIKMKPNIEPPENVEWSGAEASMFRVLIGTYYDNFCAIARLIGTKTCRQVYEFRVKESSIIAPAPAEDVDTPPRKKKRKHRLWAAHCRKIQLKKDGSSNHVYNYQPCDHPRQPCDSSCPCVIAQNFCEKFCQCSSECQNRFPGCRCKAQCNTKQCPCYLAVRECDPDLCLTCGAADHWDSKNVSCKNCSIQRGSKKHLLLAPSDVAGWGIFIKDPVQKNEFISEYCGEIISQDEADRRGKVYDKYMCSFLFNLNNDFVVDATRKGNKIRFANHSVNPNCYAKVMMVNGDHRIGIFAKRAIQTGEELFFDYRYSQADALKYVGIEREMEIP

SEQ ID NO: 4937 - protein, 531 aa, Homo sapiens
MSKPHSEAGTAFIQTQQLHAAMADTFLEHMCRLDIDSPPITARNTGIICTIGPASRSVETLKEMIKSGMNVARLNFSHGTHEYHAETIKNVRTATESFASDPILYRPVAVALDTKGPEIRTGLIKGSGTAEVELKKGATLKITLDNAYMEKCDENILWLDYKNICKVVEVGSKIYVDDGLISLQVKQKGADFLVTEVENGGSLGSKKGVNLPGAAVDLPAVSEKDIQDLKFGVEQDVDMVFASFIRKASDVHEVRKVLGEKGKNIKIISKIENHEGVRRFDEILEASDGIMVARGDLGIEIPAEKVFLAQKMMIGRCNRAGKPVICATQMLESMIKKPRPTRAEGSDVANAVLDGADCIMLSGETAKGDYPLEAVRMQHLIAREAEAAMFHRKLFEELVRASSHSTDLMEAMAMGSVEASYKCLAAALIVLTESGRSAHQVARYRPRAPIIAVTRNPQTARQAHLYRGIFPVLCKDPVQEAWAEDVDLRVNFAMNVGKARGFFKKGDVVIVLTGWRPGSGFTNTMRVVPVP

SEQ ID NO: 4938 - protein, 450 aa, Homo sapiens
MREIVHIQAGQCGNQIGAKFWEVISDEHGIDPSGNYVGDSDLQLERISVYYNEASSHKYVPRAILVDLEPGTMDSVRSGAFGHLFRPDNFIFGQSGAGNNWAKGHYTEGAELVDSVLDVVRKECENCDCLQGFQLTHSLGGGTGSGMGTLLISKVREEYPDRIMNTFSVVPSPKVSDTVVEPYNATLSIHQLVENTDETYCIDNEALYDICFRTLKLATPTYGDLNHLVSATMSGVTTSLRFPGQLNADLRKLAVNMVPFPRLHFFMPGFAPLTARGSQQYRALTVPELTQQMFDAKNMMAACDPRHGRYLTVATVFRGRMSMKEVDEQMLAIQSKNSSYFVEWIPNNVKVAVCDIPPRGLKMSSTFIGNSTAIQELFKRISEQFTAMFRRKAFLHWYTGEGMDEMEFTEAESNMNDLVSEYQQYQDATAEEEGEMYEDDEEESEAQGPK

SEQ ID NO: 4939 - protein, 508 aa, Homo sapiens
MADGQVAELLLRRLEASDGGLDSAELAAELGMEHQAVVGAVKSLQALGEVIEAELRSTKHWELTAEGEEIAREGSHEARVFRSIPPEGLAQSELMRLPSGKVGFSKAMSNKWIRVDKSAADGPRVFRVVDSMEDEVQRRLQLVRGGQAEKLGEKERSELRKRKLLAEVTLKTYWVSKGSAFSTSISKQETELSPEMISSGSWRDRPFKPYNFLAHGVLPDSGHLHPLLKVRSQFRQIFLEMGFTEMPTDNFIESSFWNFDALFQPQQHPARDQHDTFFLRDPAEALQLPMDYVQRVKRTHSQGGYGSQGYKYNWKLDEARKNLLRTHTTSASARALYRLAQKKPFTPVKYFSIDRVFRNETLDATHLAEFHQIEGVVADHGLTLGHLMGVLREFFTKLGITQLRFKPAYNPYTEPSMEVFSYHQGLKKWVEVGNSGVFRPEMLLPMGLPENVSVIAWGLSLERPTMIKYGINNIRELVGHKVNLQMVYDSPLCRLDAEPRPPPTQEAA

SEQ ID NO: 4940 - protein, 502 aa, Homo sapiens
MGTENKEVIPKEEISEESEPHGSLLEKFPKVVYQGHEFGAGCEEDMLEGHSRESMEEVIEQMSPQERDFPSGLMIFKKSPSSEKDRENNESERGCSPSPNLVTHQGDTTEGVSAFATSGQNFLEILESNKTQRSSVGEKPHTCKECGKAFNQNSHLIQHMRVHSGEKPFECKECGKTFGTNSSLRRHLRIHAGEKPFACNECGKAFIQSSHLIHHHRIHTGERPYKCEECGKAFSQNSALILHQRIHTGEKPYECNECGKTFRVSSQLIQHQRIHTEERYHECNECGKAFKHSSGLIRHQKIHTGEKPYLCNECGKGFGQSSELIRHQRIHTGDKPYECNECGKTFGQNSEIIRHIRIHTGEKPYVCKECGKAFRGNSELLRHERIHTGEKPYECFECGKAFRRTSHLIVHQRIHTGEKPHQCNECARTFWDNSELLLHQKIHIGEKPYECSECEKTFSQHSQLIIHQRIHTGEKPYECQECQKTFSRSSHLLRHQSVHCME

SEQ ID NO: 4941 - protein, 185 aa, Homo sapiens
MLKAKILFVGPCESGKTVLANFLTESSDITEYSPTQGVRILEFENPHVTSNNKGTGCEFELWDCGGDAKFESCWPALMKDAHGVVIVFNADIPSHRKEMEMWYSCFVQQPSLQDTQCMLIAHHKPGSGDDKGSLSLSPPLNKLKLVHSNLEDDPEEIRMEFIKYLKSIINSMSESRDREEMSIMT

SEQ ID NO: 4942 - protein, 734 aa, Homo sapiens
MAASPGPAGVGGAGAVYGSGSSGFALDSGLEIKTRSVEQTLLPLVSQITTLINHKDNTKKSDKTLQAIQRVGQAVNLAVGRFVKVGEAIANENWDLKEEINIACIEAKQAGETIAALTDITNLNHLESDGQITIFTDKTGVIKAARLLLSSVTKVLLLADRVVIKQIITSRNKVLATMERLEKVNSFQEFVQIFSQFGNEMVEFAHLSGDRQNDLKDEKKKAKMAAARAVLEKCTMMLLTASKTCLRHPNCESAHKNKEGVFDRMKVALDKVIEIVTDCKPNGETDISSISIFTGIKEFKMNIEALRENLYFQSKENLSVTLEVILERMEDFTDSAYTSHEHRERILELSTQARMELQQLISVWIQAQSKKTKSIAEELELSILKISHSLNELKKELHSTATQLAADLLKYHADHVVLKALKLTGVEGNLEALAEYACKLSEQKEQLVETCRLLRHISGTEPLEITCIHAEETFQVTGQQIISAAETLTLHPSSKIAKENLDVFCEAWESQISDMSTLLREINDVFEGRRGEKYGYLSLPKPMKNNANLKSLKPDKPDSEEQAKIAKLGLKLGLLTSDADCEIEKWEDQENEIVQYGRNMSSMAYSLYLFTRGEGPLKTSQDLIHQLEVFAAEGLKLTSSVQAFSKQLKDDDKLMLLLEINKLIPLCHQLQTVTKTSLQNKVFLKVDKCITKTRSMMALLVQLLSLCYKLLKKLQMENNGWVSVTNKDTMDSKT

SEQ ID NO: 4943 - protein, 545 aa, Homo sapiens
MDWGTELWDQFEVLERHTQWGLDLLDRYVKFVKERTEVEQAYAKQLRSLVKKYLPKRPAKDDPESKFSQQQSFVQILQEVNDFAGQRELVAENLSVRVCLELTKYSQEMKQERKMHFQEGRRAQQQLENGFKQLENSKRKFERDCREAEKAAQTAERLDQDINATKADVEKAKQQAHLRSHMAEESKNEYAAQLQRFNRDQAHFYFSQMPQIFDKLQDMDERRATRLGAGYGLLSEAELEVVPIIAKCLEGMKVAANAVDPKNDSHVLIELHKSGFARPGDVEFEDFSQPMNRAPSDSSLGTPSDGRPELRGPGRSRTKRWPFGKKNKTVVTEDFSHLPPEQQRKRLQQQLEERSRELQKEVDQREALKKMKDVYEKTPQMGDPASLEPQIAETLSNIERLKLEVQKYEAWLAEAESRVLSNRGDSLSRHARPPDPPASAPPDSSSNSASQDTKESSEEPPSEESQDTPIYTEFDEDFEEEPTSPIGHCVAIYHFEGSSEGTISMAEGEDLSLMEEDKGDGWTRVRRKEGGEGYVPTSYLRVTLN

SEQ ID NO: 4944 - protein, 3184 aa, Homo sapiens
MEAEDLSKAEDRNEDPGSKNEGQLAAVQPDVPHGGQSSSPTALWDMLERKFLEYQQLTHKSPIERQKSLLSLLPLFLKAWEHSVGIICFPSLQRLAEDVSDQLAQQLQKALVGKPAEQARLAAGQLLWWKGDVDQDGYLLLKSVYVLTGTDSETLGRVAESGLPALLLQCLYLFFVFPLDKDELLESDLQVQKMFVQMLLNICSDSQGLEGLLSGSELQSLLIATTCLREHSCCFWKEPTFCVLRAISKAQNLSIIQYLQATDCVRLSLQNLSRLTDTLPAPEVSEAVSLILGFVKDSYPVSSALFLEFENSEGYPLLLKVLLRYDGLTQSEVDPHLEELLGLVVWLTTCGRSELKVFDSITYPQLEGFKFHHEASGVTVKNLQAFQVLQNVFHKASDSVLCIQVLSVIRTMWAWNARNFFLLEWTLQPISQFVEIMPLKPAPVQEHFFQLLEALVFELHYVPHEILRKVQHLIKESPGPSCTLMALQSILSIAGGDPLFTDIFRDSGLLGLLLAQLRKQAKIMRKSGNKVSTPGVQDPERELTCVMLRIVVTLLKGSVRNAVVLKDHGMVPFIKIFLDDECYREASLSILEQLSAINAEEYMSIIVGALCSSTQGELQLKLDLLKSLLRILVTPKGRAAFRVSSGFNGLLSLLSDLEGSLQEPPLQAWGAVSPRQTLELVLYTLCAVSAALHWDPVNGYFFRRNGLFEKLAEDLCLLGCFGALEEEGNLLRSWVDTKARPFADLLGTAFSSSGSLPPRIQSCLQILGFLDSMASGTLHLRGDLKESLRTKQGPVVDVQKGETGSDPQRNFKQWPDLEERMDEGDAAIMHPGVVCIMVRLLPRLYHEDHPQLSEEIQCSLASHIQSLVKSEKNRQVMCEAGLLGTLMASCHRALVTSGSPLHSRLIRIFEKLASQAIEPDVLRQFLGLGIPSSLSATTKILDSSHTHRGNPGCSGSQTAQGLAEGPWPAAPDAGLHPGVTQAPQPLGESQDSTTALQTALSLISMTSPRNLQPQRAALAPSFVEFDMSVEGYGCLFIPTLSTVMGTSTEYSVSGGIGTGATRPFPPPGGLTFSCWFLISRHGAATEGHPLRFLTLVRHLARTEQPFVCFSVSLCPDDLSLVVSTEEKEFQPLDVMEPEDDSEPSAGCQLQVRCGQLLACGQWHHLAVVVTKEMKRHCTVSTCLDGQVIGSAKMLYIQALPGPFLSMDPSAFVDVYGYIATPRVWKQKSSLIWRLGPTYLFEEAISMETLEVINKLGPRYCGNFQAVHVQGEDLDSEATPFVAEERVSFGLHIASSSITSVADIRNAYNEVDSRLIAKEMNISSRDNAMPVFLLRNCAGHLSGSLRTIGAVAVGQLGVRVFHSSPAASSLDFIGGPAILLGLISLATDDHTMYAAVKVLHSVLTSNAMCDFLMQHICGYQIMAFLLRKKASLLNHRIFQLILSVAGTVELGFRSSAITNTGVFQHILCNFELWMNTADNLELSLFSHLLEILQSPREGPRNAEAAHQAQLIPKLIFLFNEPSLIPSKISTIIGILACQLRGHFSTQDLLRIGLFVVYTLKPSSVNERQICMDGALDPSLPAGSQTSGKTIWLRNQLLEMLLSVISSPQLHLSSESKEEMFLKLGPDWFLLLLQGHLHASTTVLALKLLLYFLASPSLRTRFRDGLCAGSWVERSTEGVDIVMDNLKSQSPLPEQSPCLLPGFRVLNDFLAHHVHIPEVYLIVSTFFLQTPLTELMDGPKDSLDAMLQWLLQRHHQEEVLQAGLCTEGALLLLEMLKATMSQPLAGSEDGAWAQTFPASVLQFLSLVHRTYPQDPAWRAPEFLQTLAIAAFPLGAQKGVGAESTRNTSSPEAAAEGDSTVEGLQAPTKAHPARRKLREFTQLLLRELLLGASSPKQWLPLEVLLEASPDHATSQQKRDFQSEVLLSAMELFHMTSGGDAAMFRDGKEPQPSAEAAAAPSLANISCFTQKLVEKLYSGMFSADPRHILLFILEHIMVVIETASSQRDTVLSTLYSSLNKVILYCLSKPQQSLSECLGLLSILGFLQEHWDVVFATYNSNISFLLCLMHCLLLLNERSYPEGFGLEPKPRMSTYHQVFLSPNEDVKEKREDLPSLSDVQHNIQKTVQTLWQQLVAQRQQTLEDAFKIDLSVKPGEREVKIEEVTPLWEETMLKAWQHYLASEKKSLASRSNVAHHSKVTLWSGSLSSAMKLMPGRQAKDPECKTEDFVSCIENYRRRGQELYASLYKDHVQRRKCGNIKAANAWARIQEQLFGELGLWSQGEETKPCSPWELDWREGPARMRKRIKRLSPLEALSSGRHKESQDKNDHISQTNAENQDELTLREAEGEPDEVGVDCTQLTFFPALHESLHSEDFLELCRERQVILQELLDKEKVTQKFSLVIVQGHLVSEGVLLFGHQHFYICENFTLSPTGDVYCTRHCLSNISDPFIFNLCSKDRSTDHYSCQCHSYADMRELRQARFLLQDIALEIFFHNGYSKFLVFYNNDRSKAFKSFCSFQPSLKGKATSEDTLSLRRYPGSDRIMLQKWQKRDISNFEYLMYLNTAAGRTCNDYMQYPVFPWVLADYTSETLNLANPKIFRDLSKPMGAQTKERKLKFIQRFKEVEKTEGDMTVQCHYYTHYSSAIIVASYLVRMPPFTQAFCALQGGSFDVADRMFHSVKSTWESASRENMSDVRELTPEFFYLPEFLTNCNGVEFGCMQDGTVLGDVQLPPWADGDPRKFISLHRKALESDFVSANLHHWIDLIFGYKQQGPAAVDAVNIFHPYFYGDRMDLSSITDPLIKSTILGFVSNFGQVPKQLFTKPHPARTAAGKPLPGKDVSTPVSLPGHPQPFFYSLQSLRPSQVTVKDMYLFSLGSESPKGAIGHIVSTEKTILAVERNKVLLPPLWNRTFSWGFDDFSCCLGSYGSDKVLMTFENLAAWGRCLCAVCPSPTTIVTSGTSTVVCVWELSMTKGRPRGLRLRQALYGHTQAVTCLAASVTFSLLVSGSQDCTCILWDLDHLTHVTRLPAHREGISAITISDVSGTIVSCAGAHLSLWNVNGQPLASITTAWGPEGAITCCCLMEGPAWDTSQIIITGSQDGMVRVWKTEDVKMSVPGRPAGEEPPAQPPSPRGHKWEKNLALSRELDVSIALTGKPSKTSPAVTALAVSRNHTKLLVGDERGRIFCWSADG

SEQ ID NO: 4945 - protein, 587 aa, Homo sapiens
MTRFSYAEYFSLFHSCSAPSRSTAPPESSPARAPMGLFQGVMQKYSSSLFKTSQLAPADPLIKAIKDGDEEALKTMIKEGKNLAEPNKEGWLPLHEAAYYGQVGCLKVLQRAYPGTIDQRTLQEETAVYLATCRGHLDCLLSLLQAGAEPDISNKSRETPLYKACERKNAEAVKILVQHNADTNHRCNRGWTALHESVSRNDLEVMQILVSGGAKVESKNAYGITPLFVAAQSGQLEALRFLAKYGADINTQASDNASALYEACKNEHEEVVEFLLSQGADANKTNKDGLLPLHIASKKGNYRIVQMLLPVTSRTRIRRSGVSPLHLAAERNHDEVLEALLSARFDVNTPLAPERARLYEDRRSSALYFAVVNNNVYATELLLQHGADPNRDVISPLLVAIRHGCLRTMQLLLDHGANIDAYIATHPTAFPATIMFAMKCLSLLKFLMDLGCDGEPCFSCLYGNGPHPPAPQPSSRFNDAPAADKEPSVVQFCEFVSAPEVSRWAGPIIDVLLDYVGNVQLCSRLKEHIDSFEDWAVIKEKAEPPRPLAHLCRLRVRKAIGKYRIKLLDTLPLPGRLIRYLKYENTQ

SEQ ID NO: 4946 - protein, 369 aa, Homo sapiens
MPGGGPQGAPAAAGGGGVSHRAGSRDCLPPAACFRRRRLARRPGYMRSSTGPGIGFLSPAVGTLFRFPGGVSGEESHHSESRARQCGLDSRGLLVRSPVSKSAAAPTVTSVRGTSAHFGIQLRGGTRLPDRLSWPCGPGSAGWQQEFAAMDSSETLDASWEAACSDGARRVRAAGSLPSAELSSNSCSPGCGPEVPPTPPGSHSAFTSSFSFIRLSLGSAGERGEAEGCPPSREAESHCQSPQEMGAKAASLDGPHEDPRCLSRPFSLLATRVSADLAQAARNSSRPERDMHSLPDMDPGSSSSLDPSLAGCGGDGSSGSGDAHSWDTLLRKWEPVLRDCLLRNRRQMELEPIALDPPWKPRHPEPNSY

SEQ ID NO: 4947 - protein, 1103 aa, Homo sapiens
MAGASVKVAVRVRPFNARETSQDAKCVVSMQGNTTSIINPKQSKDAPKSFTFDYSYWSHTSTEDPQFASQQQVYRDIGEEMLLHAFEGYNVCIFAYGQTGAGKSYTMMGRQEPGQQGIVPQLCEDLFSRVSENQSAQLSYSVEVSYMEIYCERVRDLLNPKSRGSLRVREHPILGPYVQDLSKLAVTSYADIADLMDCGNKARTVAATNMNETSSRSHAVFTIVFTQRCHDQLTGLDSEKVSKISLVDLAGSERADSSGARGMRLKEGANINKSLTTLGKVISALADMQSKKRKSDFIPYRDSVLTWLLKENLGGNSRTAMIAALSPADINYEETLSTLRYADRTKQIRCNAIINEDPNARLIRELQEEVARLRELLMAQGLSASALEGLKTEEGSVRGALPAVSSPPAPVSPSSPTTHNGELEPSFSPNTESQIGPEEAMERLQETEKIIAELNETWEEKLRKTEALRMEREALLAEMGVAVREDGGTVGVFSPKKTPHLVNLNEDPLMSECLLYHIKDGVTRVGQVDMDIKLTGQFIREQHCLFRSIPQPDGEVVVTLEPCEGAETYVNGKLVTEPLVLKSGNRIVMGKNHVFRFNHPEQARLERERGVPPPPGPPSEPVDWNFAQKELLEQQGIDIKLEMEKRLQDLENQYRKEKEEADLLLEQQRLYADSDSGDDSDKRSCEESWRLISSLREQLPPTTVQTIVKRCGLPSSGKRRAPRRVYQIPQRRRLQGKDPRWATMADLKMQAVKEICYEVALADFRHGRAEIEALAALKMRELCRTYGKPDGPGDAWRAVARDVWDTVGEEEGGGAGSGGGSEEGARGAEVEDLRAHIDKLTGILQEVKLQNSSKDRELQALRDRMLRMERVIPLAQDHEDENEEGGEVPWAPPEGSEAAEEAAPSDRMPSARPPSPPLSSWERVSRLMEEDPAFRRGRLRWLKQEQLRLQGLQGSGGRGGGLRRPPARFVPPHDCKLRFPFKSNPQHRESWPGMGSGEAPTPLQPPEEVTPHPATPARRPPSPRRSHHPRRNSLDGGGRSRGAGSAQPEPQHFQPKKHNSYPQPPQPYPAQRPPGPRYPPYTTPPRMRRQRSAPDLKESGAAV

SEQ ID NO: 4948 - protein, 756 aa, Homo sapiens
MNGAPSPEDGASPSSPPLPPPPPPSWREFCESHARAAALDFARRFRLYLASHPQYAGPGAEAAFSRRFAELFLQHFEAEVARASGSLSPPILAPLSPGAEISPHDLSLESCRVGGPLAVLGPSRSSEDLAGPLPSSVSSSSTTSSKPKLKKRFSLRSVGRSVRGSVRGILQWRGTVDPPSSAGPLETSSGPPVLGGNSNSNSSGGAGTVGRGLVSDGTSPGERWTHRFERLRLSRGGGALKDGAGMVQREELLSFMGAEEAAPDPAGVGRGGGVAGPPSGGGGQPQWQKCRLLLRSEGEGGGGSRLEFFVPPKASRPRLSIPCSSITDVRTTTALEMPDRENTFVVKVEGPSEYIMETVDAQHVKAWVSDIQECLSPGPCPATSPRPMTLPLAPGTSFLTRENTDSLELSCLNHSESLPSQDLLLGPSESNDRLSQGAYGGLSDRPSASISPSSASIAASHFDSMELLPPELPPRIPIEEGPPTGTVHPLSAPYPPLDTPETATGSFLFQGEPEGGEGDQPLSGYPWFHGMLSRLKAAQLVLTGGTGSHGVFLVRQSETRRGEYVLTFNFQGKAKHLRLSLNEEGQCRVQHLWFQSIFDMLEHFRVHPIPLESGGSSDVVLVSYVPSSQRQQEPTTSHDPPQPPEPPSWTDPPQPGAEEASRAPEVAAAAAAAAKERQEKEKAGGGGVPEELVPVVELVPVVELEEAIAPGSEAQGAGSGGDAGVPPMVQLQQSPLGGDGEEGGHPRAINNQYSFV

SEQ ID NO: 4949 - protein, 218 aa, Homo sapiens
MMRREDEEEEGTMMKAKGDLEMKEEEEISETGELVGPFVSAMPTPMPHNKGTRFSEAWEYFHLAPARAGHHPNQYATCRLCGRQVSRGPGVNVGTTALWKHLKSMHREELEKSGHGQAGQRQDPRPHGPQLPTGIEGNWGRLLEQVGTMALWASQREKEVLRRERAVEWRERAVEKRERALEEVERAILEMKWKVRAEKEACQREKELPAAVHPFHFV

SEQ ID NO: 4950 - protein, 130 aa, Homo sapiens
MSGRGKQGGKARAKAKSRSSRAGLQFPVGRVHRLLRKGNYAERVGAGAPVYLAAVLEYLTAEILELAGNAARDNKKTRIIPRHLQLAIRNDEELNKLLGRVTIAQGGVLPNIQAVLLPKKTESHHKAKGK

SEQ ID NO: 4951 - protein, 206 aa, Homo sapiens
MSTGSVSDPEEMELRGLQREYPVPASKRPPLRGVERSYASPSDNSSAEEEDPDGEEERCALGTAGSAEGCKRKRPRVAGGGGAGGSAGGGGKKPLPAKGSAAECKQSQRNAANARERARMRVLSKAFSRLKTSLPWVPPDTKLSKLDTLRLASSYIAHLRQLLQEDRYENGYVHPVNLTWPFVVSGRPDSDTKEVSAANRLCGTTA

SEQ ID NO: 4952 - protein, 280 aa, Homo sapiens
MVARRRKCAARDPEDRIPSPLGYAAIPIKFSEKQQASHYLYVRAHGVRQGTKSTWPQKRTLFVLNVPPYCTEESLSRLLSTCGLVQSVELQEKPDLAESPKESRSKFFHPKPVPGFQVAYVVFQKPSGVSAALALKGPLLVSTESHPVKSGIHKWISDYADSVPDPEALRVEVDTFMEAYDQKIAEEEAKAKEEEGVPDEEGWVKVTRRGRRPVLPRTEAASLRVLERERRKRSRKELLNFYAWQHRESKMEHLAQLRKKFEEDKQRIELLRAQRKFRPY

SEQ ID NO: 4953 - protein, 514 aa, Homo sapiens
MADYLISGGTSYVPDDGLTAQQLFNCGDGLTYNDFLILPGYIDFTADQVDLTSALTKKITLKTPLVSSPMDTVTEAGMAIAMALTGGIGFIHHNCTPEFQANEVRKVKKYEQGFITDPVVLSPKDRVRDVFEAKARHGFCGIPITDTGRMGSRLVGIISSRDIDFLKEEEHDCFLEEIMTKREDLVVAPAGITLKEANEILQRSKKGKLPIVNEDDELVAIIARTDLKKNRDYPLASKDAKKQLLCGAAIGTHEDDKYRLDLLAQAGVDVVVLDSSQGNSIFQINMIKYIKDKYPNLQVIGGNVVTAAQAKNLIDAGVDALRVGMGSGSICITQEVLACGRPQATAVYKVSEYARRFGVPVIADGGIQNVGHIAKALALGASTVMMGSLLAATTEAPGEYFFSDGIRLKKYRGMGSLDAMDKHLSSQNRYFSEADKIKVAQGVSGAVQDKGSIHKFVPYLIAGIQHSCQDIGAKSLTQVRAMMYSGELKFEKRTSSAQVEGGVHSLHSYEKRLF

SEQ ID NO: 4954 - protein, 473 aa, Homo sapiens
MSTELFSSTREEGSSGSGPSFRSNQRKMLNLLLERDTSFTVCPDVPRTPVGKFLGDSANLSILSGGTPKRCLDLSNLSSGEITATQLTTSADLDETGHLDSSGLQEVHLAGMNHDQHLMKCSPAQLLCSTPNGLDRGHRKRDAMCSSSANKENDNGNLVDSEMKYLGSPITTVPKLDKNPNLGEDQAEEISDELMEFSLKDQEAKVSRSGLYRSPSMPENLNRPRLKQVEKFKDNTIPDKVKKKYFSGQGKLRKGLCLKKTVSLCDITITQMLEEDSNQGHLIGDFSKVCALPTVSGKHQDLKYVNPETVAALLSGKFQGLIEKFYVIDCRYPYEYLGGHIQGALNLYSQEELFNFFLKKPIVPLDTQKRIIIVFHCEFSSERGPRMCRCLREEDRSLNQYPALYYPELYILKGGYRDFFPEYMELCEPQSYCPMHHQDHKTELLRCRSQSKVQEGERQLREQIALLVKDMSP

SEQ ID NO: 4955 - protein, 254 aa, Homo sapiens
MDPAASSCMRSLQPPAPVWGCLRNPHSEGNGASGLPHYPPTPFSFHQKPDFLATATAAYPDFSASCLAATPHSLPQEEHIFTEQHPAFPQSPNWHFPVSDARRRPNSGPAGGSKEMGTSSLGLVDTTGGPGDDYGVLGSTANETEKKSSRRRKESSDNQENRGKPEGSSKARKERTAFTKEQLRELEAEFAHHNYLTRLRRYEIAVNLDLSERQVKVWFQNRRMKWKRVKGGQPISPNGQDPEDGDSTASPSSE

SEQ ID NO: 4956 - protein, 126 aa, Homo sapiens
MPEPAKSAPAPKKGSKKAVTKAQKKDGKKRKRSRKESYSVYVYKVLKQVHPDTGISSKAMGIMNSFVNDIFERIAGEASRLAHYNKRSTITSREIQTAVRLLLPGELAKHAVSEGTKAVTKYTSSK

SEQ ID NO: 4957 - protein, 393 aa, Homo sapiens
MKRTRDEVDATLQIAKLNAAELLPAVHCLGFGPGASGAAAGDFCLLELEPTLCQQLEDGHSLVIRGDKDEQAVLCSKDKTYDLKIADTSNMLLFIPGCKTPDQLKKEDSHCNIIHTEIFGFSNNYWELRRRRPKLKKLKKLLMENPYEGPDSQKEKDSNSSKYTTEDLLDQIQASEEEIMTQLQVLNACKIGGYWRILEFDYEMKLLNHVTQLVDSESWSFGKVPLNTCLQELGPLEPEEMIEHCLKCYGKKYVDEGEVYFELDADKICRAAARMLLQNAVKFNLAEFQEVWQQSVPEGMVTSLDQLKGLALVDRHSRPEIIFLLKVDDLPEDNQERFNSLFSLREKWTEEDIAPYIQDLCGEKQTIGALLTKYSHSSMQNGVKVYNSRRPIS

SEQ ID NO: 4958 - protein, 365 aa, Homo sapiens
MEGQSVEELLAKAEQDEAEKLQRITVHKELELQFDLGNLLASDRNPPTGLRCAGPTPEAELQALARDNTQLLINQLWQLPTERVEEAIVARLPEPTTRLPREKPLPRPRPLTRWQQFARLKGIRPKKKTNLVWDEVSGQWRRRWGYQRARDDTKEWLIEVPGNADPLEDQFAKRIQAKKERVAKNELNRLRNLARAHKMQLPSAAGLHPTGHQSKEELGRAMQVAKVSTASVGRFQERLPKEKVPRGSGKKRKFQPLFGDFAAEKKNQLELLRVMNSKKPQLDVTRATNKQMREEDQEEAAKRRKMSQKGKRKGGRQGPGGKRKGGPPSQGGKRKGGLGGKMNSGPPGLGGKRKGGQRPGGKRRK

SEQ ID NO: 4959 - protein, 115 aa, Homo sapiens
MRYVASYLLAALGGNSSPSAKDIKKILDSVGIEADDDRLNKVISELNGKNIEDVIAQGIGKLASVPAGGAVAVSAAPGSAAPAAGSAPAAAEEKKDEKKEESEESDDDMGFGLFD

SEQ ID NO: 4960 - protein, 324 aa, Homo sapiens
MSRPSSTGPSANKPCSKQPPPQPQHTPSPAAPPAAATISAAGPGSSAVPAAAAVISGPGGGGGAGPVSPQHHELTSLFECPVCFDYVLPPILQCQAGHLVCNQCRQKLSCCPTCRGALTPSIRNLAMEKVASAVLFPCKYATTGCSLTLHHTEKPEHEDICEYRPYSCPCPGASCKWQGSLEAVMSHLMHAHKSITTLQGEDIVFLATDINLPGAVDWVMMQSCFGHHFMLVLEKQEKYEGHQQFFAIVLLIGTRKQAENFAYRLELNGNRRRLTWEATPRSIHDGVAAAIMNSDCLVFDTAIAHLFADNGNLGINVTISTCCP

SEQ ID NO: 4961 - protein, 170 aa, Homo sapiens
MSVAGGEIRGDTGGEDTAAPGRFSFSPEPTLEDIRRLHAEFAAERDWEQFHQPRNLLLALVGEVGELAELFQWKTDGEPGPQGWSPRERAALQEELSDVLIYLVALAARCRVDLPLAVLSKMDINRRRYPAHLARSSSRKYTELPHGAISEDQAVGPADIPCDSTGQTST

SEQ ID NO: 4962 - protein, 553 aa, Homo sapiens
MGALEMQDEEDRIEALKQVADKLPRPNLLLLKHLVYVLHLISKNSEVNRMDSSNLAICIGPNMLTLENDQSLSFEAQKDLNNKVKTLVEFLIDNCFEIFGENIPVHSSITSDDSLEHTDSSDVSTLQNDSAYDSNDPDVESNSSSGISSPSRQPQVPMATAAGLDSAGPQDAREVSPEPIVSTVARLKSSLAQPDRRYSEPSMPSSQECLESRVTNQTLTKSEGDFPVPRVGSRLESEEAEDPFPEEVFPAVQGKTKRPVDLKIKNLAPGSVLPRALVLKAFSSSSLDASSDSSPVASPSSPKRNFFSRHQSFTTKTEKGKPSREIKKHSMSFTFAPHKKVLTKNLSAGSGKSQDFTRDHVPRGVRKESQLAGRIVQENGCETHNQTARGFCLRPHALSVDDVFQGADWERPGSPPSYEEAMQGPAARLVASESQTVGSMTVGSMRARMLEAHCLLPPLPPAHHVEDSRHRGSKEPLPGHGLSPLPERWKQSRTVHASGDSLGHVSGPGRPELLPLRTVSESVQRNKRDCLVRRCSQPVFEADQFQYAKESYI

SEQ ID NO: 4963 - protein, 520 aa, Homo sapiens
MPGSLPLNAEACWPKDVGIVALEIYFPSQYVDQAELEKYDGVDAGKYTIGLGQAKMGFCTDREDINSLCMTVVQNLMERNNLSYDCIGRLEVGTETIIDKSKSVKTNLMQLFEESGNTDIEGIDTTNACYGGTAAVFNAVNWIESSSWDGRYALVVAGDIAVYATGNARPTGGVGAVALLIGPNAPLIFERGLRGTHMQHAYDFYKPDMLSEYPIVDGKLSIQCYLSALDRCYSVYCKKIHAQWQKEGNDKDFTLNDFGFMIFHSPYCKLVQKSLARMLLNDFLNDQNRDKNSIYSGLEAFGDVKLEDTYFDRDVEKAFMKASSELFSQKTKASLLVSNQNGNMYTSSVYGSLASVLAQYSPQQLAGKRIGVFSYGSGLAATLYSLKVTQDATPGSALDKITASLCDLKSRLDSRTGVAPDVFAENMKLREDTHHLVNYIPQGSIDSLFEGTWYLVRVDEKHRRTYARRPTPNDDTLDEGVGLVHSNIATEHIPSPAKKVPRLPATAAEPEAAVISNGEH

SEQ ID NO: 4964 - protein, 322 aa, Homo sapiens
MAEQDVENDLLDYDEEEEPQAPQESTPAPPKKDIKGSYVSIHSSGFRDFLLKPELLRAIVDCGFEHPSEVQHECIPQAILGMDVLCQAKSGMGKTAVFVLATLQQIEPVNGQVTVLVMCHTRELAFQISKEYERFSKYMPSVKVSVFFGGLSIKKDEEVLKKNCPHVVVGTPGRILALVRNRSFSLKNVKHFVLDECDKMLEQLDMRRDVQEIFRLTPHEKQCMMFSATLSKDIRPVCRKFMQDPMEVFVDDETKLTLHGLQQYYVKLKDSEKNRKLFDLLDVLEFNQPVTLSAVQGFPAADPGGHQSVWPGDGHRASQHRL

SEQ ID NO: 4965 - protein, 759 aa, Homo sapiens
MEAVIEKECSALGGLFQTIISDMKGSYPVWEDFINKAGKLQSQLRTTVVAAAAFLDAFQKVADMATNTRGGTREIGSALTRMCMRHRSIEAKLRQFSSALIDCLINPLQEQMEEWKKVANQLDKDHAKEYKKARQEIKKKSSDTLKLQKKAKKVDTLGRGDIQPQLDSALQDVNDKYLLLEETEKQAVRKALIEERGRFCTFISMLRPVIEEEISMLGEITHLQTISEDLKSLTMDPHKLPSSSEQVILDLKGSDYSWSYQTPPSSPSTTMSRKSSVCSSLNSVNSSDSRSSGSHSHSPSSHYRYRSSNLAQQAPVRLSSVSSHDSGFISQDAFQSKSPSPMPPEAPNQLSNGFSHYSLSSESHVGPTGAGLFPHCLPASRLLPRVTSVHLPDYAHYYTIGPGMFPSSQIPSWKDWAKPGPYDQPLVNTLQRRKEKREPDPNGGGPTTASGPPAAAEEAQRPRSMTVSAATRPGEEMEACEELALALSRGLQLDTQRSSRDSLQCSSGYSTQTTTPCCSEDTIPSQVSDYDYFSVSGDQEADQQEFDKSSTIPRNSDISQSYRRMFQAKRPASTAGLPTTLGPAMVTPGVATIRRTPSTKPSVRRGTIGAGPIPIKTPVIPVKTPTVPDLPGVLPAPPDGPEERGEHSPESPSVGEGPQGVTSMPSSMWSGQASVNPPLPGPKPSIPEEHRQAIPESEAEDQEREPPSATVSPGQIPESDPADLSPRDTPQGEDMLNAIRRGVKLKKTTTNDRSAPRFS

SEQ ID NO: 4966 - protein, 157 aa, Homo sapiens
MEEAQRKRTQLREAFEQLQAKKQMAMEKRRAVQNQWQLQQEKHLQHLAEVSAEVRERKTGTQQELDRVFQKLGNLKQQAEQERDKLQRYQTFLQLLYTLQGKLLFPEAEAEAENLPDDKPQQPTRPQEQSTGDTMGRDPGVSFKAVGLQPAGDVNLP

SEQ ID NO: 4967 - protein, 897 aa, Homo sapiens
MNISGSSCGSPNSADTSSDFKDLWTKLKECHDREVQGLQVKVTKLKQERILDAQRLEEFFTKNQQLREQQKVLHETIKVLEDRLRAGLCDRCAVTEEHMRKKQQEFENIRQQNLKLITELMNERNTLQEENKKLSEQLQQKIENDQQHQAAELECEEDVIPDSPITAFSFSGVNRLRRKENPHVRYIEQTHTKLEHSVCANEMRKVSKSSTHPQHNPNENEILVADTYDQSQSPMAKAHGTSSYTPDKSSFNLATVVAETLGLGVQEESETQGPMSPLGDELYHCLEGNHKKQPFEESTRNTEDSLRFSDSTSKTPPQEELPTRVSSPVFGATSSIKSGLDLNTSLSPSLLQPGKKKHLKTLPFSNTCISRLEKTRSKSEDSALFTHHSLGSEVNKIIIQSSNKQILINKNISESLGEQNRTEYGKDSNTDKHLEPLKSLGGRTSKRKKTEEESEHEVSCPQASFDKENAFPFPMDNQFSMNGDCVMDKPLDLSDRFSAIQRQEKSQGSETSKNKFRQVTLYEALKTIPKGFSSSRKASDGNCTLPKDSPGEPCSQECIILQPLNKCSPDNKPSLQIKEENAVFKIPLRPRESLETENVLDDIKSAGSHEPIKIQTRSDHGGCELASVLQLNPCRTGKIKSLQNNQDVSFENIQWSIDPGADLSQYKMDVTVIDTKDGSQSKLGGETVDMDCTLVSETVLLKMKKQEQKGEKSSNEERKMNDSLEDMFDRTTHEEYESCLADSFSQAADEEEELSTATKKLHTHGDKQDKVKQKAFVEPYFKGDERETSLQNFPHIEVVRKKEERRKLLGHTCKECEIYYADMPAEEREKKLASCSRHRFRYIPPNTPENFWEVGFPSTQTCMERGYIKEDLDPCPRPKRRQPYNAIFSPKGKEQKT

SEQ ID NO: 4968 - protein, 911 aa, Homo sapiens
MEVNCLTLKDLISPRQPRLDFAVEDGENAQKENIFVDRSRMAPKTPIKNEPIDLSKQKKFTPERNPITPVKFVDRQQAEPWTPTANLKMLISAASPDIRDREKKKGLFRPIENKDDAFTDSLQLDVVGDSAVDEFEKQRPSRKQKSLGLLCQKFLARYPSYPLSTEKTTISLDEVAVSLGVERRRIYDIVNVLESLHLVSRVAKNQYGWHGRHSLPKTLRNLQRLGEEQKYEEQMAYLQQKELDLIDYKFGERKKDGDPDSQEQQLLDFSEPDCPSSSANSRKDKSLRIMSQKFVMLFLVSKTKIVTLDVAAKILIEESQDAPDHSKFKTKVRRLYDIANVLTSLALIKKVHVTEERGRKPAFKWIGPVDFSSSDEELVDVSASVLPELKRETYGQIQVCAKQKLARHGSFNTVQASERIQRKVNSEPSSPYREEQGSGGYSLEIGSLAAVYRQKIEDNSQGKAFASKRVVPPSSSLDPVAPFPVLSVDPEYCVNPLAHPVFSVAQTDLQAFSMQNGLNGQVDVSLASAASAVESLKPALLAGQPLVYVPSASLFMLYGSLQEGPASGSGSERDDRSSEAPATVELSSAPSAQKRLCEERKPQEEDEPATKRQSREYEDGPLSLVMPKKPSDSTDLASPKTMGNRASIPLKDIHVNGQLPAAEEISGKATANSLVSSEWGNPSRNTDVEKPSKENESTKEPSLLQYLCVQSPAGLNGFNVLLSGSQTPPTVGPSSGQLPSFSVPCMVLPSPPLGPFPVLYSPAMPGPVSSTLGALPNTGPVNFSLPGLGSIAQLLVGPTAVVNPKSSTLPSADPQLQSQPSLNLSPVMSRSHSVVQQPESPVYVGHPVSVVKLHQSPVPVTPKSIQRTHRETFFKTPGSLGDPVLKRRERNQSRNTSSAQRRLEIPSGGAD

SEQ ID NO: 4969 - protein, 1193 aa, Homo sapiens
MWRVKKLSLSLSPSPQTGKPSMRTPLRELTLQPGALTNSGKRSPACSSLTPSLCKLGLQEGSNNSSPVDFVNNKRTDLSSEHFSHSSKWLETCQHESDEQPLDPIPQISSTPKTSEEAVDPLGNYMVKTIVLVPSPLGQQQDMIFEARLDTMAETNSISLNGPLRTDDLVREEVAPCMGDRFSEVAAVSEKPIFQESPSHLLEESPPNPCSEQLHCSKESLSSRTEAVREDLVPSESNAFLPSSVLWLSPSTALAADFRVNHVDPEEEIVEHGAMEEREMRFPTHPKESETEDQALVSSVEDILSTCLTPNLVEMESQEAPGPAVEDVGRILGSDTESWMSPLAWLEKGVNTSVMLENLRQSLSLPSMLRDAAIGTTPFSTCSVGTWFTPSAPQEKSTNTSQTGLVGTKHSTSETEQLLCGRPPDLTALSRHDLEDNLLSSLVILEVLSRQLRDWKSQLAVPHPETQDSSTQTDTSHSGITNKLQHLKESHEMGQALQQARNVMQSWVLISKELISLLHLSLLHLEEDKTTVSQESRRAETLVCCCFDLLKKLRAKLQSLKAEREEARHREEMALRGKDAAEIVLEAFCAHASQRISQLEQDLASMREFRGLLKDAQTQLVGLHAKQEELVQQTVSLTSTLQQDWRSMQLDYTTWTALLSRSRQLTEKLTVKSQQALQERDVAIEEKQEVSRVLEQVSAQLEECKGQTEQLELENSRLATDLRAQLQILANMDSQLKELQSQHTHCAQDLAMKDELLCQLTQSNEEQAAQWQKEEMALKHMQAELQQQQAVLAKEVRDLKETLEFADQENQVAHLELGQVECQLKTTLEVLRERSLQCENLKDTVENLTAKLASTIADNQEQDLEKTRQYSQKLGLLTEQLQSLTLFLQTKLKEKTEQETLLLSTACPPTQEHPLPNDRTFLGSILTAVADEEPESTPVPLLGSDKSAFTRVASMVSLQPAETPGMEESLAEMSIMTTELQSLCSLLQESKEEAIRTLQRKICELQARLQAQEEQHQEVQKAKEADIEKLNQALCLRYKNEKELQEVIQQQNEKILEQIDKSGELISLREEVTHLTRSLRRAETETKVLQEALAGQLDSNCQPMATNWIQEKVWLSQEVDKLRVMFLEMKNEKEKLMIKFQSHRNILEENLRRSDKELEKLDDIVQHIYKTLLSIPEVVRGCKELQGLLEFLS

SEQ ID NO: 4970 - protein, 424 aa, Homo sapiens
MHNLQTLPPKPPKPTTVANNGMNNNMSLQDAEWYWGDISREEVNEKLRDTADGTFLVRDASTKMHGDYTLTLRKGGNNKLIKIFHRDGKYGFSDPLTFSSVVELINHYRNESLAQYNPKLDVKLLYPVSKYQQDQVVKEDNIEAVGKKLHEYNTQFQEKSREYDRLYEEYTRTSQEIQMKRTAIEAFNETIKIFEEQCQTQERYSKEYIEKFKREGNEKEIQRIMHNYDKLKSRISEIIDSRRRLEEDLKKQAAEYREIDKRMNSIKPDLIQLRKTRDQYLMWLTQKGVRQKKLNEWLGNENTEDQYSLVEDDEDLPHHDEKTWNVGSSNRNKAENLLRGKRDGTFLVRESSKQGCYACSVVVDGEVKHCVINKTATGYGFAEPYNLYSSLKELVLHYQHTSLVQHNDSLNVTLAYPVYAQQRR

SEQ ID NO: 4971 - protein, 377 aa, Homo sapiens
MLRLVPTGARAIVDMSYARHFLDFQGSAIPQAMQKLVVTRLSPNFREAVTLSRDCPVPLPGDGDLLVRNRFVGVNASDINYSAGRYDPSVKPPFDIGFEGIGEVVALGLSASARYTVGQAVAYMAPGSFAEYTVVPASIATPVPSVKPEYLTLLVSGTTAYISLKELGGLSEGKKVLVTAAAGGTGQFAMQLSKKAKCHVIGTCSSDEKSAFLKSLGCDRPINYKTEPVGTVLKQEYPEGVDVVYESVGGAMFDLAVDALATKGRLIVIGFISGYQTPTGLSPVKAGTLPAKLLKKSASVQGFFLNHYLSKYQAAMSHLLEMCVSGDLVCEVDLGDLSPEGRFTGLESIFRAVNYMYMGKNTGKIVVELPHSVNSKL

SEQ ID NO: 4972 - protein, 719 aa, Homo sapiens
MPRTMIPPGECTYAGRKRRRPLQKQRPAVGAEKSNPSKRHRDRLNAELDHLASLLPFPPDIISKLDKLSVLRLSVSYLRVKSFFQVVQEQSSRQPAAGAPSPGDSCPLAGSAVLEGRLLLESLNGFALVVSAEGTIFYASATIVDYLGFHQTDVMHQNIYDYIHVDDRQDFCRQLHWAMDPPQVVFGQPPPLETGDDAILGRLLRAQEWGTGTPTEYSAFLTRCFICRVRCLLDSTSGFLARGSQAWQLRLCCPEPLMTMQFQGKLKFLFGQKKKAPSGAMLPPRLSLFCIAAPVLLPSAAEMKMRSALLRAKPRADTAATADAKVKATTSLCESELHGKPNYSAGRSSRESGVLVLREQTDAGRWAQVPARAPCLCLRGGPDLVLDPKGGSGDREEEQHRMLSRASGVTGRRETPGPTKPLPWTAGKHSEDGARPRLQPSKNDPPSLRPMPRGSCLPCPCVQGTFRNSPISHPPSPSPSAYSSRTSRPMRDVGEDQVHPPLCHFPQRSLQHQLPQPGAQRFATRGYPMEDMKLQGVPMPPGDLCGPTLLLDVSIKMEKDSGCEGAADGCVPSQVWLGASDRSHPATFPTRMHLKTEPDSRQQVYISHLGHGVRGAQPHGRATAGRSRELTPFHPAHCACLEPTDGLPQSEPPHQLCARGRGEQSCTCRAAEAAPVVKREPLDSPQWATHSQGMVPGMLPKSALATLVPPQASGCTFLP

SEQ ID NO: 4973 - protein, 1112 aa, Homo sapiens
MEMDAPRPPSLAVPGAASRPGRLLDGGHGRQQVQALSSQLLEVIPDSMRKQEVRTGREAGQGHGTGSPAEQVKALMDLLAGKGSQGSQAPQALDRTPDAPLGPCSNDSRIQRHRKALLSKVGGGPELGGPWHRLASLLLVEGLTDLQLREHDFTQVEATRGGGHPARTVALDRLFLPLSRVSVPPRVSITIGVAGMGKTTLVRHFVRLWAHGQVGKDFSLVLPLTFRDLNTHEKLCADRLICSVFPHVGEPSLAVAVPARALLILDGLDECRTPLDFSNTVACTDPKKEIPVDHLITNIIRGNLFPEVSIWITSRPSASGQIPGGLVDRMTEIRGFNEEEIKVCLEQMFPEDQALLGWMLSQVQADRALYLMCTVPAFCRLTGMALGHLWRSRTGPQDAELWPPRTLCELYSWYFRMALSGEGQEKGKASPRIEQVAHGGRKMVGTLGRLAFHGLLKKKYVFYEQDMKAFGVDLALLQGAPCSCFLQREETLASSVAYCFTHLSLQEFVAAAYYYGASRRAIFDLFTESGVSWPRLGFLTHFRSAAQRAMQAEDGRLDVFLRFLSGLLSPRVNALLAGSLLAQGEHQAYRTQVAELLQGCLRPDAAVCARAINVLHCLHELQHTELARSVEEAMESGALARLTGPAHRAALAYLLQVSDACAQEANLSLSLSQGVLQSLLPQLLYCRKLRLDTNQFQDPVMELLGSVLSGKDCRIQKISLAENQISNKGAKALARSLLVNRSLTSLDLRGNSIGPQGAKALADALKINRTLTSLSLQGNTVRDDGARSMAEALASNRTLSMLHLQKNSIGPMGAQRMADALKQNRSLKELMFSSNSIGDGGAKALAEALKVNQGLESLDLQSNSISDAGVAALMGALCTNQTLLSLSLRENSISPEGAQAIAHALCANSTLKNLDLTANLLHDQGARAIAVAVRENRTLTSLHLQWNFIQAGAAQALGQALQLNRSLTSLDLQENAIGDDGACAVARALKVNTALTALYLQVASIGASGAQVLGEALAVNRTLEILDLRGNAIGVAGAKALANALKVNSSLRRLNLQENSLGMDGAICIATALSGNHRLQHINLQGNHIGDSGARMISEAIKTNAPTCTVEM

SEQ ID NO: 4974 - protein, 1388 aa, Homo sapiens
MAPGCKTELRSVTNGQSNQPSNEGDAIKVFVRIRPPAERSGSADGEQNLCLSVLSSTSLRLHSNPEPKTFTFDHVADVDTTQESVFATVAKSIVESCMSGYNGTIFAYGQTGSGKTFTMMGPSESDNFSHNLRGVIPRSFEYLFSLIDREKEKAGAGKSFLCKCSFIEIYNEQIYDLLDSASAGLYLREHIKKGVFVVGAVEQVVTSAAEAYQVLSGGWRNRRVASTSMNRESSRSHAVFTITIESMEKSNEIVNIRTSLLNLVDLAGSERQKDTHAEGMRLKEAGNINRSLSCLGQVITALVDVGNGKQRHVCYRDSKLTFLLRDSLGGNAKTAIIANVHPGSRCFGETLSTLNFAQRAKLIKNKAVVNEDTQGNVSQLQAEVKRLKEQLAELASGQTPPESFLTRDKKKTNYMEYFQEAMLFFKKSEQEKKSLIEKVTQLEDLTLKKEKFIQSNKMIVKFREDQIIRLEKLHKESRGGFLPEEQDRLLSELRNEIQTLREQIEHHPRVAKYAMENHSLREENRRLRLLEPVKRAQEMDAQTIAKLEKAFSEISGMEKSDKNQQGFSPKAQKEPCLFANTEKLKAQLLQIQTELNNSKQEYEEFKELTRKRQLELESELQSLQKANLNLENLLEATKACKRQEVSQLNKIHAETLKIITTPTKAYQLHSRPVPKLSPEMGSFGSLYTQNSSILDNDILNEPVPPEMNEQAFEAISEELRTVQEQMSALQAKLDEEEHKNLKLQQHVDKLEHHSTQMQELFSSERIDWTKQQEELLSQLNVLEKQLQETQTKNDFLKSEVHDLRVVLHSADKELSSVKLEYSSFKTNQEKEFNKLSERHMHVQLQLDNLRLENEKLLESKACLQDSYDNLQEIMKFEIDQLSRNLQNFKKENETLKSDLNNLMELLEAEKERNNKLSLQFEEDKENSSKEILKVLEAVRQEKQKETAKCEQQMAKVQKLEESLLATEKVISSLEKSRDSDKKVVADLMNQIQELRTSVCEKTETIDTLKQELKDINCKYNSALVDREESRVLIKKQEVDILDLKETLRLRILSEDIERDMLCEDLAHATEQLNMLTEASKKHSGLLQSAQEELTKKEALIQELQHKLNQKKEEVEQKKNEYNFKMRQLEHVMDSAAEDPQSPKTPPHFQTHLAKLLETQEQEIEDGRASKTSLEHLVTKLNEDREVKNAEILRMKEQLREMENLRLESQQLIEKNWLLQGQLDDIKRQKENSDQNHPDNQQLKNEQEESIKERLAKSKIVEEMLKMKADLEEVQSALYNKEMECLRMTDEVERTQTLESKAFQEKEQLRSKLEEMYEERERTSQEMEMLRKQVECLAEENGKLVGHQNLHQKIQYVVRLKKENVRLAEETEKLRAENVFLKEKKRSES

SEQ ID NO: 4975 - protein, 142 aa, Homo sapiens
MGAPTLPPAWQPFLKDHRISTFKNWPFLEGCACTPERMAEAGFIHCPTENEPDLAQCFFCFKELEGWEPDDDPIEEHKKHSSGCAFLSVKKQFEELTLGEFLKLDRERAKNKIAKETNNKKKEFEETAEKVRRAIEQLAAMD

SEQ ID NO: 4976 - protein, 1197 aa, Homo sapiens
MGRSGKLPSGVSAKLKRWKKGHSSDSNPAICRHRQAARSRFFSRPSGRSDLTVDAVKLHNELQSGSLRLGKSEAPETPMEEEAELVLTEKSSGTFLSGLSDCTNVTFSKVQRFWESNSAAHKEICAVLAAVTEVIRSQGGKETETEYFAALIRKAAQHGVCSVLKGSEFMFEKAPAHHPAAISTAKFCIQEIEKSGGSKEATTTLHMLTLLKDLLPCFPEGLVKSCSETLLRVMTLSHVLVTACAMQAFHSLFHARPGLSTLSAELNAQIITALYDYVPSENDLQPLLAWLKVMEKAHINLVRLQWDLGLGHLPRFFGTAVTCLLSPHSQVLTAATQSLKEILKECVAPHMADIGSVTSSASGPAQSVAKMFRAVEEGLTYKFHAAWSSVLQLLCVFFEACGRQAHPVMRKCLQSLCDLRLSPHFPHTAALDQAVGAAVTSMGPEVVLQAVPLEIDGSEETLDFPRSWLLPVIRDHVQETRLGFFTTYFLPLANTLKSKAMDLAQAGSTVESKIYDTLQWQMWTLLPGFCTRPTDVAISFKGLARTLGMAISERPDLRVTVCQALRTLITKGCQAEADRAEVSRFAKNFLPILFNLYGQPVAAGDTPAPRRAVLETIRTYLTITDTQLVNSLLEKASEKVLDPASSDFTRLSVLDLVVALAPCADEAAISKLYSTIRPYLESKAHGVQKKAYRVLEEVCASPQGPGALFVQSHLEDLKKTLLDSLRSTSSPAKRPRLKCLLHIVRKLSAEHKEFITALIPEVILCTKEVSVGARKNAFALLVEMGHAFLRFGSNQEEALQCYLVLIYPGLVGAVTMVSCSILALTHLLFEFKGLMGTSTVEQLLENVCLLLASRTRDVVKSALGFIKVAVTVMDVAHLAKHVQLVMEAIGKLSDDMRRHFRMKLRNLFTKFIRKFGFELVKRLLPEEYHRVLVNIRKAEARAKRHRALSQAAVEEEEEEEEEEEPAQGKGDSIEEILADSEDEEDNEEEERSRGKEQRKLARQRSRAWLKEGGGDEPLNFLDPKVAQRVLATQPGPGRGRKKDHGFKVSADGRLIIREEADGNKMEEEEGAKGEDEEMADPMEDVIIRNKKHQKLKHQKEAEEEELEIPPQYQAGGSGIHRPVAKKAMPGAEYKAKKAKGDVKKKGRPDPYAYIPLNRSKLNRRKKMKLQGQFKGLVKAARRGSQVGHKNRRKDRRP

SEQ ID NO: 4977 - protein, 142 aa, Homo sapiens
MATSIGVSFSVGDGVPEAEKNAGEPENTYILRPVFQQRFRPSVVKDCIHAVLKEELANAEYSPEEMPQLTKHLSENIKDKLKEMGFDRYKMVVQVVIGEQRGEGVFMASRCFWDADTDNYTHDVFMNDSLFCVVAAFGCFYY

SEQ ID NO: 4978 - protein, 1187 aa, Homo sapiens
MRPRGAAFAAGPPGDLHLGTAIGFAGAIWRSRSPAMSTLLDIKSSVLRQVQVCPSFRRRTEQDPGSASADPQEPATGAWKPGDGVEFFAHMRLMLKKGEGRQGLPCLEVPLRSGSPAPPEPVDPSLGLRALAPEEVEMLYEEALYTVLYRAGTMGPDQVDDEEALLSYLQQVFGTSLEEHTEAIERVRKAKAPTYALKVSVMRAKNLLAKDPNGFSDPYCMLGILPASDATREPRAQKEQRFGFRKGSKRGGPLPAKCIQVTEVKSSTLNPVWKEHFLFEIEDVSTDQLHLDIWDHDDDVSLVEACRKLNEVIGLKGMGRYFKQIVKSARANGTAGPTEDHTDDFLGCLNIPVREVPVAGVDRWFKLEPRSSASRVQGHCHLVLKLITTQRDTAMSQRGRSGFLSHLLLLSHLLRLEHSAEEPNSSSWRGELSTPAATILCLHGAQSNLSPLQLAVLHWQVSSRHHQTCTLDYSYLLGLLEDMQAHWEEAPSLPQEQEESLADSLSAFSEFGLQLLRQLRDYFPATNSTAVHRLELLLKCLGKLQLFQPSFEICPFESELNMDIAAALKRGNREWYDRILNDKSPREQPGPQRLPGLVVLADAVYDDLQFCYSVYASLFHSILNVDVFTLTFRQLERLVAEEAWVLTEELSPKMTLEVASGLFELYLTLADLQRFWDSIPGRDSRSLALAGIHAPFLPAVKLWFQVLRDQAKWRLQGAVDMDTLEPVDASSRHSSSAATAGLCLSHIQELWVRLAWPDPAQAQGLGTQLGQDVCEATLFYTELLRKKVDTQPGAAGEAVSEALCVVLNNVELVRKAAGQALKGLAWPEGATGPEGVLPRPLLSCTQALDDDLQREAHTVTAHLTSKMVGDIRKYVQHISLSPDSIQNDEAVAPLMKYLDEKLALLNASLVKGNLSRVLEALWELLLQAILQALGANRDVSADFYSRFHFTLEALVSFFHAEGQGLPLESLRDGSYKRLKEELRLHKCSTRECIEQFYLDKLKQRTLEQNRFGRLSVRCHYEAAEQRLAVEVLHAADLLPLDANGLSDPFVIVELGPPHLFPLVRSQRTQVKTRTLHPVYDELFYFSVPAEACRRRAACVLFTVMDHDWLSTNDFAGEAALGLGGVTGVARPQVGGGARAGQPVTLHLCRPRAQVRSALRRLEGRTSKEAQEFVKKLKELEKCMEADP

SEQ ID NO: 4979 - protein, 221 aa, Homo sapiens
METWSVEQVCSWLVEKNLGELVHRFQEEEVSGAALLALNDRMVQQLVKKIGHQAVLMDLIKKYKQNTQGLKSPENPKKAALVMQTEAARDYRDEESSSPARHGEQMPSFYPAENLDNGLIDQRVLKQRRNVKQILARSKALQWTKSYVLPEFPYDVKCMLAEQKCPDHSMRIRIIEFLQADMTKYLEGSLYPSTQQYNDVVNALLQAHPFLDEDGCGFAGV

SEQ ID NO: 4980 - protein, 1401 aa, Homo sapiens
MAPQMYEFHLPLSPEELLKSGGVNQYVVQEVLSIKHLPPQLRAFQAAFRAQGPLAMLQHFDTIYSILHHFRSIDPGLKEDTLQFLIKVVSRHSQELPAILDDTTLSGSDRNAHLNALKMNCYALIRLLESFETMASQTNLVDLDLGGKGKKARTKAAHGFDWEEERQPILQLLTQLLQLDIRHLWNHSIIEEEFVSLVTGCCYRLLENPTINHQKNRPTREAITHLLGVALTRYNHMLSATVKIIQMLQHFEHLAPVLVAAVSLWATDYGMKSIVGEIVREIGQKCPQELSRDPSGTKGFAAFLTELAERVPAILMSSMCILLDHLDGENYMMRNAVLAAMAEMVLQVLSGDQLEAAARDTRDQFLDTLQAHGHDVNSFVRSRVLQLFTRIVQQKALPLTRFQAVVALAVGRLADKSVLVCKNAIQLLASFLANNPFSCKLSDADLAGPLQKETQKLQEMRAQRRTAAASAVLDPEEEWEAMLPELKSTLQQLLQLPQGEEEIPEQIANTETTEDVKGRIYQLLAKASYKKAIILTREATGHFQESEPFSHIDPEESEETRLLNILGLIFKGPAASTQEKNPRESTGNMVTGQTVCKNKPNMSDPEESRGNDELVKQEMLVQYLQDAYSFSRKITEAIGIISKMMYENTTTVVQEVIEFFVMVFQFGVPQALFGVRRMLPLIWSKEPGVREAVLNAYRQLYLNPKGDSARAKAQALIQNLSLLLVDASVGTIQCLEEILCEFVQKDELKPAVTQLLWERATEKVACCPLERCSSVMLLGMMARGKPEIVGSNLDTLVSIGLDEKFPQDYRLAQQVCHAIANISDRRKPSLGKRHPPFRLPQEHRLFERLRETVTKGFVHPDPLWIPFKEVAVTLIYQLAEGPEVICAQILQGCAKQALEKLEEKRTSQEDPKESPAMLPTFLLMNLLSLAGDVALQQLVHLEQAVSGELCRRRVLREEQEHKTKDPKEKNTSSETTMEEELGLVGATADDTEAELIRGICEMELLDGKQTLAAFVPLLLKVCNNPGLYSNPDLSAAASLALGKFCMISATFCDSQLRLLFTMLEKSPLPIVRSNLMVATGDLAIRFPNLVDPWTPHLYARLRDPAQQVRKTAGLVMTHLILKDMVKVKGQVSEMAVLLIDPEPQIAALAKNFFNELSHKGNAIYNLLPDIISRLSDPELGVEEEPFHTIMKQLLSYITKDKQTESLVEKLCQRFRTSRTERQQRDLAYCVSQLPLTERGLRKMLDNFDCFGDKLSDESIFSAFLSVVGKLRRGAKPEGKAIIDEFEQKLRACHTRGLDGIKELEIGQAGSQRAPSAKKPSTGSRYQPLASTASDNDFVTPEPRRTTRRHPNTQQRASKKKPKVVFSSDESSEEDLSAEMTEDETPKKTTPILRASARRHRS

SEQ ID NO: 4981 - protein, 798 aa, Homo sapiens
MAASLPGPGSRLFRTYGAADGRRQRRPGREAAQWFPPQDRRRFFNSSGSSDASIGDPSQSDDPDDPDDPDFPGSPVRRRRRRPGGRVPKDRPSLTVTPKRWKLRARPSLTVTPRRLGLRARPPQKCSTPCGPLRLPPFPSRDSGRLSPDLSVCGQPRDGDELGISASLFSSLASPCPGSPTPRDSVISIGTSACLVAASAVPSGLHLPEVSLDRASLPCSQEEATGGAKDTRMVHQTRASLRSVLFGLMNSGTPEDSEFRADGKNMRESCCKRKLVVGNGPEGPGLSSTGKRRATGQDSCQERGLQEAVRREHQEASVPKGRIVPRGIDRLERTRSSRKSKHQEATETSLLHSHRFKKGQKLGKDSFPTQDLTPLQNVCFWTKTRASFSFHKKKIVTDVSEVCSIYTTATSLSGSLLSECSNRPVMNRTSGAPSSWHSSSMYLLSPLNTLSISNKKASDAEKVYGECSQKGPVPFSHCLPTEKLQRCEKIGEGVFGEVFQTIADHTPVAIKIIAIEGPDLVNGSHQKTFEEILPEIIISKELSLLSGEVCNRTEGFIGLNSVHCVQGSYPPLLLKAWDHYNSTKGSANDRPDFFKDDQLFIVLEFEFGGIDLEQMRTKLSSLATAKSILHQLTASLAVAEASLRFEHRDLHWGNVLLKKTSLKKLHYTLNGKSSTIPSCGLQVSIIDYTLSRLERDGIVVFCDVSMDEDLFTGDGDYQFDIYRLMKKENNNRWGEYHPYSNVLWLHYLTDKMLKQMTFKTKCNTPAMKQIKRKIQEFHRTMLNFSSATDLLCQHSLFK

SEQ ID NO: 4982 - protein, 596 aa, Homo sapiens
MIVDKLLDDSRGGEGLRDAAGGCGLMTSPLNLSYFYGASPPAAAPGACDASCSVLGPSAPGSPGSDSSDFSSASSVSSCGAVESRSRGGARAERQPVEPHMGVGRQQRGPFQGVRVKNSVKELLLHIRSHKQKASGQAVDDFKTQGVNIEQFRELKNTVSYSGKRKGPDSLSDGPACKRPALLHSQFLTPPQTPTPGESMEDVHLNEPKQESSADLLQNIINIKNECSPVSLNTVQTSSSVQQQNDAHLHSFSMMPSSACEAMVGHEMASDSSNTSLPFSNMGNPMNTTQLGKSLFQWQVEQEESKLANISQDQFLSKDADGDTFLHIAVAQGRRALSYVLARKMNALHMLDIKEHNGQSAFQVAVAANQHLIVQDLVNIGAQVNTTDCWGRTPLHVCAEKGHSQVLQAIQKGAVGSNQFVDLEATNYDGLTPLHCAVIAHNAVVHELQRNQQPHSPEVQELLLKNKSLVDTIKCLIQMGAAVEAKDRKSGRTALHLAAEEANLELIRLFLELPSCLSFVNAKAYNGNTALHVAASLQYRLTQLDAVRLLMRKGADPSTRNLENEQPVHLVPDGPVGEQIRRILKGKSIQQRAPPY

SEQ ID NO: 4983 - protein, 110 aa, Homo sapiens
MQAALEVTARYCGRELEQYGQCVAAKPESWQRDCHYLKMSIAQCTSSHPIIRQIRQACAQPFEAFEECLRQNEAAVGNCAEHMRRFLQCAEQVQPPRSPATVEAQPLPAS

SEQ ID NO: 4984 - protein, 718 aa, Homo sapiens
MIVDKLLDDSRGGEGLRDAAGGCGLMTSPLNLSYFYGASPPAAAPGACDASCSVLGPSAPGSPGSDSSDFSSASSVSSCGAVESRSRGGARAERQPVEPHMGVGRQQRGPFQGVRVKNSVKELLLHIRSHKQKASGQAVDDFKTQGVNIEQFRELKNTVSYSGKRKGPDSLSDGPACKRPALLHSQFLTPPQTPTPGESMEDVHLNEPKQESSADLLQNIINIKNECSPVSLNTVQVSWLNPVVVPQSSPAEQCQDFHGGQVFSPPQKCQPFQVRGSQQMIDQASLYQYSPQNQHVEQQPHYTHKPTLEYSPFPIPPQSPAYEPNLFDGPESQFCPNQSLVSLLGDQRESENIANPMQTSSSVQQQNDAHLHSFSMMPSSACEAMVGHEMASDSSNTSLPFSNMGNPMNTTQLGKSLFQWQVEQEESKLANISQDQFLSKDADGDTFLHIAVAQGRRALSYVLARKMNALHMLDIKEHNGQSAFQVAVAANQHLIVQDLVNIGAQVNTTDCWGRTPLHVCAEKGHSQVLQAIQKGAVGSNQFVDLEATNYDGLTPLHCAVIAHNAVVHELQRNQQPHSPEVQELLLKNKSLVDTIKCLIQMGAAVEAKDRKSGRTALHLAAEEANLELIRLFLELPSCLSFVNAKAYNGNTALHVAASLQYRLTQLDAVRLLMRKGADPSTRNLENEQPVHLVPDGPVGEQIRRILKGKSIQQRAPPY

SEQ ID NO: 4985 - protein, 724 aa, Homo sapiens
MPEEVHHGEEEVETFAFQAEIAQLMSLIINTFYSNKEIFLRELISNASDALDKIRYESLTDPSKLDSGKELKIDIIPNPQERTLTLVDTGIGMTKADLINNLGTIAKSGTKAFMEALQAGADISMIGQFGVGFYSAYLVAEKVVVITKHNDDEQYAWESSAGGSFTVRADHGEPIGRGTKVILHLKEDQTEYLEERRVKEVVKKHSQFIGYPITLYLEKEREKEISDDEAEEEKGEKEEEDKDDEEKPKIEDVGSDEEDDSGKDKKKKTKKIKEKYIDQEELNKTKPIWTRNPDDITQEEYGEFYKSLTNDWEDHLAVKHFSVEGQLEFRALLFIPRRAPFDLFENKKKKNNIKLYVRRVFIMDSCDELIPEYLNFIRGVVDSEDLPLNISREMLQQSKILKVIRKNIVKKCLELFSELAEDKENYKKFYEAFSKNLKLGIHEDSTNRRRLSELLRYHTSQSGDEMTSLSEYVSRMKETQKSIYYITGESKEQVANSAFVERVRKRGFEVVYMTEPIDEYCVQQLKEFDGKSLVSVTKEGLELPEDEEEKKKMEESKAKFENLCKLMKEILDKKVEKVTISNRLVSSPCCIVTSTYGWTANMERIMKAQALRDNSTMGYMMAKKHLEINPDHPIVETLRQKAEADKNDKAVKDLVVLLFETALLSSGFSLEDPQTHSNRIYRMIKLGLGIDEDEVAAEEPNAAVPDEIPPLEGDEDASRMEEVD

SEQ ID NO: 4986 - protein, 240 aa, Homo sapiens
MEDYTKIEKIGEGTYGVVYKGRHKTTGQVVAMKKIRLESEEEGVPSTAIREISLLKELRHPNIVSLQDVLMQDSRLYLIFEFLSMDLKKYLDSIPPGQYMDSSLVKVVTLWYRSPEVLLGSARYSTPVDIWSIGTIFAELATKKPLFHGDSEIDQLFRIFRALGTPNNEVWPEVESLQDYKNTFPKWKPGSLASHVKNLDENGLDLLSKMLIYDPAKRISGKMALNHPYFNDLDNQIKKM

SEQ ID NO: 4987 - protein, 1399 aa, Homo sapiens
MDLSALRVEEVQNVINAMQKILECPICLELIKEPVSTKCDHIFCKFCMLKLLNQKKGPSQCPLCKNDITKRSLQESTRFSQLVEELLKIICAFQLDTGLEYANSYNFAKKENNSPEHLKDEVSIIQSMGYRNRAKRLLQSEPENPSLQETSLSVQLSNLGTVRTLRTKQRIQPQKTSVYIELGSDSSEDTVNKATYCSVGDQELLQITPQGTRDEISLDSAKKAACEFSETDVTNTEHHQPSNNDLNTTEKRAAERHPEKYQGSSVSNLHVEPCGTNTHASSLQHENSSLLLTKDRMNVEKAEFCNKSKQPGLARSQHNRWAGSKETCNDRRTPSTEKKVDLNADPLCERKEWNKQKLPCSENPRDTEDVPWITLNSSIQKVNEWFSRSDELLGSDDSHDGESESNAKVADVLDVLNEVDEYSGSSEKIDLLASDPHEALICKSERVHSKSVESNIEDKIFGKTYRKKASLPNLSHVTENLIIGAFVTEPQIIQERPLTNKLKRKRRPTSGLHPEDFIKKADLAVQKTPEMINQGTNQTEQNGQVMNITNSGHENKTKGDSIQNEKNPNPIESLEKESAFKTKAEPISSSISNMELELNIHNSKAPKKNRLRRKSSTRHIHALELVVSRNLSPPNCTELQIDSCSSSEEIKKKKYNQMPVRHSRNLQLMEGKEPATGAKKSNKPNEQTSKRHDSDTFPELKLTNAPGSFTKCSNTSELKEFVNPSLPREEKEEKLETVKVSNNAEDPKDLMLSGERVLQTERSVESSSISLVPGTDYGTQESISLLEVSTLGKAKTEPNKCVSQCAAFENPKGLIHGCSKDNRNDTEGFKYPLGHEVNHSRETSIEMEESELDAQYLQNTFKVSKRQSFAPFSNPGNAEEECATFSAHSGSLKKQSPKVTFECEQKEENQGKNESNIKPVQTVNITAGFPVVGQKDKPVDNAKCSIKGGSRFCLSSQFRGNETGLITPNKHGLLQNPYRIPPLFPIKSFVKTKCKKNLLEENFEEHSMSPEREMGNENIPSTVSTISRNNIRENVFKEASSSNINEVGSSTNEVGSSINEIGSSDENIQAELGRNRGPKLNAMLRLGVLQPEVYKQSLPGSNCKHPEIKKQEYEEVVQTVNTDFSPYLISDNLEQPMGSSHASQVCSETPDDLLDDGEIKEDTSFAENDIKESSAVFSKSVQKGELSRSPSPFTHTHLAQGYRRGAKKLESSEENLSSEDEELPCFQHLLFGKVNNIPSQSTRHSTVATECLSKNTEENLLSLKNSLNDCSNQVILAKASQEHHLSEETKCSASLFSSQCSELEDLTANTNTQDPFLIGSSKQMRHQSESQGVGLSDKELVSDDEERGTGLEENNQEEQSMDSNLGIGTRFLCLPQSIYRSELNVYAFGEHILQISKYS

SEQ ID NO: 4988 - protein, 237 aa, Homo sapiens
MAMFRSLVASAQQRQPPAGPAGGDSGLEAQYTCPICLEVYHRPVAIGSCGHTFCGECLQPCLQVPSPLCPLCRLPFDPKKVDKATHVEKQLSSYKAPCRGCNKKVTLAKMRVHISSCLKVQEQMANCPKFVPVVPTSQPIPSNIPNRSTFACPYCGARNLDQQELVKHCVESHRSDPNRVVCPICSAMPWGDPSYKSANFLQHLLHRHKFSYDTFVDYSIDEEAAFQAALALSLSEN

SEQ ID NO: 4989 - protein, 206 aa, Homo sapiens
MEVDINGESRSTLTTLPFPGAEANSPGKAEAEKPRCSSTPCSPMRRTVSGYQILHMDSNYLVGFTTGEELLKLAQKCTGGEESKAEAMPSLRSKQLDAGLARSSRLYKTRSRYYQPYEIPAVNGRRRRRMPSSGDKCTKSLPYEPYKALHGPLPLCLLKGKRAHSKSLDYLNLDKMIKEPADTEVLQYQLQHLTLRGDRVFARNNT

SEQ ID NO: 4990 - protein, 54 aa, Homo sapiens
MPGKKARKNAQPSPARAPAELEVECATQLRRFGDKLNFRQKLLNLISKLFCSGT

SEQ ID NO: 4991 - protein, 422 aa, Homo sapiens
MESSPESLQPLEHGVAAGPASGTGSSQEGLQETRLAAGDGPGVWAAETSGGNGLGAAAARRSLPDSASPAGSPEVPGPCSSSAGLDLKDSGLESPAAAEAPLRGQYKVTASPETAVAGVGHELGTAGDAGARPDLAGTCQAELTAAGSEEPSSAGGLSSSCSDPSPPGESPSLDSLESFSNLHSFPSSCEFNSEEGAENRVPEEEEGAAVLPGAVPLCKEEEGEETAQVLAASKERFPGQSVYHIKWIQWKEENTPIITQNENGPCPLLAILNVLLLAWKVKLPPMMEIITAEQLMEYLGDYMLDAKPKEISEIQRLNYEQNMSDAMAILHKLQTGLDVNVRFTGVRVFEYTPECIVFDLLDIPLYHGWLVDPQIDDIVKAVGNCSYNQLVEKIISCKQSDNSELVSEGSTVFVGNGPGVSY

SEQ ID NO: 4992 - protein, 1181 aa, Homo sapiens
MPENPATDKLQVLQVLDRLKMKLQEKGDTSQNEKLSMFYETLKSPLFNQILTLQQSIKQLKGQLNHIPSDCSANFDFSRKGLLVFTDGSITNGNVHRPSNNSTVSGLFPWTPKLGNEDFNSVIQQMAQGRQIEYIDIERPSTGGLGFSVVALRSQNLGKVDIFVKDVQPGSVADRDQRLKENDQILAINHTPLDQNISHQQAIALLQQTTGSLRLIVAREPVHTKSSTSSSLNDTTLPETVCWGHVEEVELINDGSGLGFGIVGGKTSGVVVRTIVPGGLADRDGRLQTGDHILKIGGTNVQGMTSEQVAQVLRNCGNSVRMLVARDPAGDISVTPPAPAALPVALPTVASKGPGSDSSLFETYNVELVRKDGQSLGIRIVGYVGTSHTGEASGIYVKSIIPGSAAYHNGHIQVNDKIVAVDGVNIQGFANHDVVEVLRNAGQVVHLTLVRRKTSSSTSPLEPPSDRGTVVEPLKPPALFLTGAVETETNVDGEDEEIKERIDTLKNDNIQALEKLEKVPDSPENELKSRWENLLGPDYEVMVATLDTQIADDAELQKYSKLLPIHTLRLGVEVDSFDGHHYISSIVSGGPVDTLGLLQPEDELLEVNGMQLYGKSRREAVSFLKEVPPPFTLVCCRRLFDDEASVDEPRRTETSLPETEVDHNMDVNTEEDDDGELALWSPEVKIVELVKDCKGLGFSILDYQDPLDPTRSVIVIRSLVADGVAERSGGLLPGDRLVSVNEYCLDNTSLAEAVEILKAVPPGLVHLGICKPLVEDNEEESCYILHSSSNEDKTEFSGTIHDINSSLILEAPKGFRDEPYFKEELVDEPFLDLGKSFHSQQKEIEQSKEAWEMHEFLTPRLQEMDEEREILVDEEYELYQDPSPSMELYPLSHIQEATPVPSVNELHFGTQWLHDNEPSESQEARTGRTVYSQEAQPYGYCPENVMKENFVMESLPSVPSTEGNSQQGRFDDLENLNSLAKTSLDLGMIPNDVQGPSLLIDLPVVAQRREQEDLPLYQHQATRVISKASAYTGMLSSRYATDTCELPEREEGEGEETPNFSHWGPPRIVEIFREPNVSLGISIVGGQTVIKRLKNGEELKGIFIKQVLEDSPAGKTNALKTGDKILEVSGVDLQNASHSEAVEAIKNAGNPVVFIVQSLSSTPPWTTERDSVSKKKKRKER

SEQ ID NO: 4993 - protein, 726 aa, Homo sapiens [sequence omitted]

SEQ ID NO: 4994 - protein, 838 aa, Homo sapiens
MSLQVLNDKNVSNEKNTENCDFLFSPPEVTGRSSVLRVSQKENVPPKNLAKAMKVTFQTPLRDPQTHRILSPSMASKLEAPFTQDDTLGLENSHPVWTQKENQQLIKEVDAKTTHGILQKPVEADTDLLGDASPAFGSGSSSESGPGALADLDCSSSSQSPGSSENQMVSPGKVSGSPEQAVEENLSSYSLDRRVTPASETLEDPCRTESQHKAETPHGAEEECKAETPHGAEEECRHGGVCAPAAVATSPPGAIPKEACGGAPLQGLPGEALGCPAGVGTPVPADGTQTLTCAHTSAPESTAPTNHLVAGRAMTLSPQEEVAAGQMASSSRSGPVKLEFDVSDGATSKRAPPPRRLGERSGLKPPLRKAAVRQQKAPQEVEEDDGRSGAGEDPPMPASRGSYHLDWDKMDDPNFIPFGGDTKSGCSEAQPPESPETRLGQPAAEQLHAGPATEEPGPCLSQQLHSASAEDTPVVQLAAETPTAESKERALNSASTSLPTSCPGSEPVPTHQQGQPALELKEESFRDPAEVLGTGAEVDYLEQFGTSSFKESALRKQSLYLKFDPLLRDSPGRPVPVATETSSMHGANETPSGRPREAKLVEFDFLGALDIPVPGPPPGVPAPGGPPLSTGPIVDLLQYSQKDLDAVVKATQEENRELRSRCEELHGKNLELGKIMDRFEEVVYQAMEEVQKQKELSKAEIQKVLKEKDQLTTDLNSMEKSFSDLFKRFEKQKEVIEGYRKNEESLKKCVEDYLARITQEGQRYQALKAHAEEKLQLANEEIAQVRSKAQAEALALQASLRKEQMRIQSLEKTVEQKTKENEELTRICDDLISKMEKI

SEQ ID NO: 4995 - protein, 1256 aa, Homo sapiens
MPGPRGAAGGLAPEMRGAGAAGLLALLLLLLLLLLGLGGRVEGGPAGERGAGGGGALARERFKVVFAPVICKRTCLKGQCRDSCQQGSNMTLIGENGHSTDTLTGSGFRVVVCPLPCMNGGQCSSRNQCLCPPDFTGRFCQVPAGGAGGGTGGSGPGLSRTGALSTGALPPLAPEGDSVASKHAIYAVQVIADPPGPGEGPPAQHAAFLVPLGPGQISAEVQAPPPVVNVRVHHPPEASVQVHRIESSNAESAAPSQHLLPHPKPSHPRPPTQKPLGRCFQDTLPKQPCGSNPLPGLTKQEDCCGSIGTAWGQSKCHKCPQLQYTGVQKPGPVRGEVGADCPQGYKRLNSTHCQDINECAMPGVCRHGDCLNNPGSYRCVCPPGHSLGPSRTQCIADKPEEKSLCFRLVSPEHQCQHPLTTRLTRQLCCCSVGKAWGARCQRCPTDGTAAFKEICPAGKGYHILTSHQTLTIQGESDFSLFLHPDGPPKPQQLPESPSQAPPPEDTEEERGVTTDSPVSEERSVQQSHPTATTTPARPYPELISRPSPPTMRWFLPDLPPSRSAVEIAPTQVTETDECRLNQNICGHGECVPGPPDYSCHCNPGYRSHPQHRYCVDVNECEAEPCGPGRGICMNTGGSYNCHCNRGYRLHVGAGGRSCVDLNECAKPHLCGDGGFCINFPGHYKCNCYPGYRLKASRPPVCEDIDECRDPSSCPDGKCENKPGSFKCIACQPGYRSQGGGACRDVNECAEGSPCSPGWCENLPGSFRCTCAQGYAPAPDGRSCLDVDECEAGDVCDNGICSNTPGSFQCQCLSGYHLSRDRSHCEDIDECDFPAACIGGDCINTNGSYRCLCPQGHRLVGGRKCQDIDECSQDPSLCLPHGACKNLQGSYVCVCDEGFTPTQDQHGCEEVEQPHHKKECYLNFDDTVFCDSVLATNVTQQECCCSLGAGWGDHCEIYPCPVYSSAEFHSLCPDGKGYTQDNNIVNYGIPAHRDIDECMLFGSEICKEGKCVNTQPGYECYCKQGFYYDGNLLECVDVDECLDESNCRNGVCENTRGGYRCACTPPAEYSPAQRQCLSPEEMERAPERRDVCWSQRGEDGMCAGPLAGPALTFDDCCCRQGRGWGAQCRPCPPRGAGSHCPTSQSESNSFWDTSPLLLGKPPRDEDSSEEDSDECRCVSGRCVPRPGGAVCECPGGFQLDASRARCVDIDECRELNQRGLLCKSERCVNTSGSFRCVCKAGFARSRPHGACVPQRRR

SEQ ID NO: 4996 - protein, 518 aa, Homo sapiens
MDRAPQRQHRASRELLAAKKTHTSQIEVIPCKICGDKSSGIHYGVITCEGCKGFFRRSQRCNAAYSCTRQQNCPIDRTSRNRCQHCRLQKCLALGMSRDAVKFGRMSKKQRDSLHAEVQKQLQQRQQQQQEPVVKTPPAGAQGADTLTYTLGLPDGQLPLGSSPDLPEASACPPGLLKASGSGPSYSNNLAKAGLNGASCHLEYSPERGKAEGRESFYSTGSQLTPDRCGLRFEEHRHPGLGELGQGPDSYGSPSFRSTPEAPYASLTEIEHLVQSVCKSYRETCQLRLEDLLRQRSNIFSREEVTGYQRKSMWEMWERCAHHLTEAIQYVVEFAKRLSGFMELCQNDQIVLLKAGAMEVVLVRMCRAYNADNRTVFFEGKYGGMELFRALGCSELISSIFDFSHSLSALHFSEDEIALYTALVLINAHRPGLQEKRKVEQLQYNLELAFHHHLCKTHRQSILAKLPPKGKLRSLCSQHVERLQIFQHLHPIVVQAAFPPLYKELFSTETESPVGLSK

SEQ ID NO: 4997 - protein, 403 aa, Homo sapiens
MASELAMSNSDLPTSPLAMEYVNDFDLMKFEVKKEPVETDRIISQCGRLIAGGSLSSTPMSTPCSSVPPSPSFSAPSPGSGSEQKAHLEDYYWMTGYPQQLNPEALGFSPEDAVEALISNSHQLQGGFDGYARGAQQLAAAAGAGAGASLGGSGEEMGPAAAVVSAVIAAAAAQSGAGPHYHHHHHHAAGHHHHPTAGAPGAAGSAAASAGGAGGAGGGGPASAGGGGGGGGGGGGGGAAGAGGALHPHHAAGGLHFDDRFSDEQLVTMSVRELNRQLRGVSKEEVIRLKQKRRTLKNRGYAQSCRFKRVQQRHVLESEKNQLLQQVDHLKQEISRLVRERDAYKEKYEKLVSSGFRENGSSSDNPSSPEFFITEPTRKLEPSVGYATFWKPQHRVLTSVFTK

SEQ ID NO: 4998 - protein, 620 aa, Homo sapiens
MSPPSPGRRREQRRPRAAATMATPLPGRAGGPATPLSPTRLSRLQEKEELRELNDRLAHYIDRVRALELENDRLLLKISEKEEVTTREVSGIKALYESELADARRVLDETARERARLQIEIGKLRAELDEVNKSAKKREGELTVAQGRVKDLESLFHRSEVELAAALSDKRGLESDVAELRAQLAKAEDGHAVAKKQLEKETLMRVDLENRCQSLQEELDFRKSVFEEEVRETRRRHERRLVEVDSSRQQEYDFKMAQALEELRSQHDEQVRLYKLELEQTYQAKLDSAKLSSDQNDKAASAAREELKEARMRLESLSYQLSGLQKQASAAEDRIRELEEAMAGERDKFRKMLDAKEQEMTEMRDVMQQQLAEYQELLDVKLALDMEINAYRKLLEGEEERLKLSPSPSSRVTVSRATSSSSGSLSATGRLGRSKRKRLEVEEPLGSGPSVLGTGTGGSGGFHLAQQASASGSVSIEEIDLEGKFVQLKNNSDKDQSLGNWRIKRQVLEGEEIAYKFTPKYILRAGQMVTVWAAGAGVAHSPPSTLVWKGQSSWGTGESFRTVLVNADGEEVAMRTVKKSSVMRENENGEEEEEEAEFGEEDLFHQQGDPRTTSRGCYVM

SEQ ID NO: 4999 - protein, 275 aa, Homo sapiens
MASFPPRVNEKEIGKLLLNLVDHTEVVRDLTFAPDGSLILVSASRDKTLRVWDLKDDGNMMKVLRGHQNWVYSCAFSPDSSMLCSVGASKAVFLWNMDKYTMIRKLEGHHHDVVACDFSPDGALLATASYDTRVYIWDPHNGDILMEFGHLFPPPTPIFAGGANDRWVRSVSFSHDGLHVASLADDKMVRFWRIDEDYPVQVAPLSNGLCCAFSTDGSVLAAGTHDGSVYFWATPRQVPSLQHLCRMSIRRVMPTQEVQELPIPSKLLEFLSYRI

SEQ ID NO: 5000 - protein, 686 aa, Homo sapiens
MGEFKVHRVRFFNYVPSGIRCVAYNNQSNRLAVSRTDGTVEIYNLSANYFQEKFFPGHESRATEALCWAEGQRLFSAGLNGEIMEYDLQALNIKYAMDAFGGPIWSMAASPSGSQLLVGCEDGSVKLFQITPDKIQFERNFDRQKSRILSLSWHPSGTHIAAGSIDYISVFDVKSGSAVHKMIVDRQYMGVSKRKCIVWGVAFLSDGTIISVDSAGKVQFWDSATGTLVKSHLIANADVQSIAVADQEDSFVVGTAEGTVFHFQLVPVTSNSSEKQWVRTKPFQHHTHDVRTVAHSPTALISGGTDTHLVFRPLMEKVEVKNYDAALRKITFPHRCLISCSKKRQLLLFQFAHHLELWRLGSTVATGKNGDTLPLSKNADHLLHLKTKGPENIICSCISPCGSWIAYSTVSRFFLYRLNYEHDNISLKRVSKMPAFLRSALQILFSEDSTKLFVASNQGALHIVQLSGGSFKHLHAFQPQSGTVEAMCLLAVSPDGNWLAASGTSAGVHVYNVKQLKLHCTVPAYNFPVTAMAIAPNTNNLVIAHSDQQVFEYSIPDKQYTDWSRTVQKQGFHHLWLQRDTPITHISFHPKRPMHILLHDAYMFCIIDKSLPLPNDKTLLYNPFPPTNESDVIRRRTAHAFKISKIYKPLLFMDLLDERTLVAVERPLDDIIAQLPPPIKKKKFGT

SEQ ID NO: 5001 - protein, 679 aa, Homo sapiens
MESRSVAQAGVQWCDLGSLQAPPPGFTLFSCLSLLSSWDYSSGFSGFCASPIEESHGALISSCNSRTMTDGLVTFRDVAIDFSQEEWECLDPAQRDLYVDVMLENYSNLVSLDLESKTYETKKIFSENDIFEINFSQWEMKDKSKTLGLEASIFRNNWKCKSIFEGLKGHQEGYFSQMIISYEKIPSYRKSKSLTPHQRIHNTEKSYVCKECGKACSHGSKLVQHERTHTAEKHFECKECGKNYLSAYQLNVHQRFHTGEKPYECKECGKTFSWGSSLVKHERIHTGEKPYECKECGKAFSRGYHLTQHQKIHTGVKSYKCKECGKAFFWGSSLAKHEIIHTGEKPYKCKECGKAFSRGYQLTQHQKIHTGKKPYECKICGKAFCWGYQLTRHQIFHTGEKPYECKECGKAFNCGSSLIQHERIHTGEKPYECKECGKAFSRGYHLSQHQKIHTGEKPFECKECGKAFSWGSSLVKHERVHTGEKSHECKECGKTFCSGYQLTRHQVFHTGEKPYECKECGKAFNCGSSLVQHERIHTGEKPYECKECGKAFSRGYHLTQHQKIHTGEKPFKCKECGKAFSWGSSLVKHERVHTNEKSYECKDCGKAFGSGYQLSVHQRFHTGEKLYQRKEFGKTFTCGSKLVHERTHSNDKPYKYNECGEAFLWTTYSNEKIDTDETL

SEQ ID NO: 5002 - protein, 138 aa, Homo sapiens
MSEAYFRVESGALGPEENFLSLDDILMSHEKLPVRTETAMPRLGAFFLERSAGAETDNAVPQTFIGRFRRIMDSSQNAYNEDTSALVARLDEMERGLFQTGQKGLNDFQCWEKGQASQITASNLVQNYKKRKFTDMED

SEQ ID NO: 5003 - protein, 382 aa, Homo sapiens
MNPQIRNPMERMYRDTFYDNFENEPILYGRSYTWLCYEVKIKRGRSNLLWDTGVFRGQVYFKPQYHAEMCFLSWFCGNQLPAYKCFQITWFVSWTPCPDCVAKLAEFLSEHPNVTLTISAARLYYYWERDYRRALCRLSQAGARVTIMDYEEFAYCWENFVYNEGQQFMPWYKFDENYAFLHRTLKEILRYLMDPDTFTFNFNNDPLVLRRRQTYLCYEVERLDNGTWVLMDQHMGFLCNEAKNLLCGFYGRHAELRFLDLVPSLQLDPAQIYRVTWFISWSPCFSWGCAGEVRAFLQENTHVRLRIFAARIYDYDPLYKEALQMLRDAGAQVSIMTYDEFEYCWDTFVYRQGCPFQPWDGLEEHSQALSGRLRAILQNQGN

SEQ ID NO: 5004 - protein, 201 aa, Homo sapiens
MAAAKDTHEDHDTSTENTDESNHDPQFEPIVSLPEQEIKTLEEDEEELFKMRAKLFRFASENDLPEWKERGTGDVKLLKHKEKGAIRLLMRRDKTLKICANHYITPMMELKPNAGSDRAWVWNTHADFADECPKPELLAIRFLNAENAQKFKTKFEECRKEIEEREKKAGSGKNDHAEKVAEKLEALSVKEETKEDAEEKQ

SEQ ID NO: 5005 - protein, 292 aa, Homo sapiens
MPRSFLVKTHSSHRVPNYRRLETQREINGACSACGGLVVPLLPRDKEAPSVPGDLPQPWDRSSAVACISLPLLPRIEEALGASGLDALEVSEVDPRASRAAIVPLKDSLNHLNLPPLLVLPTRWSPTLGPDRHGAPEKLLGAERMPRAPGGFECFHCHKPYHTLAGLARHRQLHCHLQVGRVFTCKYCDKEYTSLGALKMHIRTHTLPCTCKICGKAFSRPWLLQGHVRTHTGEKPYACSHCSRAFADRSNLRAHLQTHSDAKKYRCRRCTKTFSRMSLLARHEESGCCPGP

SEQ ID NO: 5006 - protein, 543 aa, Homo sapiens
MESSKKMDSPGALQTNPPLKLHTDRSAGTPVFVPEQGGYKEKFVKTVEDKYKCEKCHLVLCSPKQTECGHRFCESCMAALLSSSSPKCTACQESIVKDKVFKDNCCKREILALQIYCRNESRGCAEQLMLGHLLVHLKNDCHFEELPCVRPDCKEKVLRKDLRDHVEKACKYREATCSHCKSQVPMIALQKHEDTDCPCVVVSCPHKCSVQTLLRSEGTNQQIKAHEASSAVQHVNLLKEWSNSLEKKVSLLQNESVEKNKSIQSLHNQICSFEIEIERQKEMLRNNESKILHLQRVIDSQAEKLKELDKEIRPFRQNWEEADSMKSSVESLQNRVTELESVDKSAGQVARNTGLLESQLSRHDQMLSVHDIRLADMDLRFQVLETASYNGVLIWKIRDYKRRKQEAVMGKTLSLYSQPFYTGYFGYKMCARVYLNGDGMGKGTHLSLFFVIMRGEYDALLPWPFKQKVTLMLMDQGSSRRHLGDAFKPDPNSSSFKKPTGEMNIASGCPVFVAQTVLENGTYIKDDTIFIKVIVDTSDLPDP

SEQ ID NO: 5007 - protein, 707 aa, Homo sapiens
MLSGIEAAAGEYEDSELRCRVAVEELSPGGQPRRRQALRTAELSLGRNERRELMLRLQAPGPAGRPRCFPLRAARLFTRFAEAGRSTLRLPAHDTPGAGAVQLLLSDCPPDRLRRFLRTLRLKLAAAPGPGPASARAQLLGPRPRDFVTISPVQPEERRLRAATRVPDTTLVKRPVEPQAGAEPSTEAPRWPLPVKRLSLPSTKPQLSEEQAAVLRAVLKGQSIFFTGSAGTGKSYLLKRILGSLPPTGTVATASTGVAACHIGGTTLHAFAGIGSGQAPLAQCVALAQRPGVRQGWLNCQRLVIDEISMVEADLFDKLEAVARAVRQQNKPFGGIQLIICGDFLQLPPVTKGSQPPRFCFQSKSWKRCVPVTLELTKVWRQADQTFISLLQAVRLGRCSDEVTRQLQATASHKVGRDGIVATRLCTHQDDVALTNERRLQELPGKVHRFEAMDSNPELASTLDAQCPVSQLLQLKLGAQVMLVKNLSVSRGLVNGARGVVVGFEAEGRGLPQVRFLCGVTEVIHADRWTVQATGGQLLSRQQLPLQLAWAMSIHKSQGMTLDCVEISLGRVFASGQAYVALSRARSLQGLRVLDFDPMAVRCDPRVLHFYATLRRGRSLSLAAEGRGNEDRCSGSSIRALGGDWWGLRLGAASKQRTELRCVSTARPSLAQPRTNTLQSLTKEHKLQNVHPYFKLLFQGINSVWGH

SEQ ID NO: 5008 - protein, 469 aa, Homo sapiens
MPIRALCTICSDFFDHSRDVAAIHCGHTFHLQCLIQWFETAPSRTCPQCRIQVGKRTIINKLFFDLAQEEENVLDAEFLKNELDNVRAQLSQKDKEKRDSQVIIDTLRDTLEERNATVVSLQQALGKAEMLCSTLKKQMKYLEQQQDETKQAQEEARRLRSKMKTMEQIELLLQSQRPEVEEMIRDMGVGQSAVEQLAVYCVSLKKEYENLKEARKASGEVADKLRKDLFSSRSKLQTVYSELDQAKLELKSAQKDLQSADKEIMSLKKKLTMLQETLNLPPVASETVDRLVLESPAPVEVNLKLRRPSFRDDIDLNATFDVDTPPARPSSSQHGYYEKLCLEKSHSPIQDVPKKICKGPRKESQLSLGGQSCAGEPDEELVGAFPIFVRNAILGQKQPKRPRSESSCSKDVVRTGFDGLGGRTKFIQPTDTVMIRPLPVKPKTKVKQRVRVKTVPSLFQAKLDTFLWS

SEQ ID NO: 5009 - protein, 1023 aa, Homo sapiens
MDANSKDKPPETKESAMNNAGNASFILGTGKIVTPQKHAELPPNPCTPDTFKSPLNFSTVTVEQLGITPESFVRNSAGKSSSYLKKCRRRSAVGARGSPETNHLIRFIARQQNIKNARKSPLAQDSPSQGSPALYRNVNTLRERISAFQSAFHSIKENEKMTGCLEFSEAGKESEMTDLTRKEGLSACQQSGFPAVLSSKRRRISYQRDSDENLTDAEGKVIGLQIFNIDTDRACAVETSVDLSEISSKLGSTQSGFLVEESLPLSELTETSNALKVADCVVGKGSSDAVSPDTFTAEVSSDAVPDVRSPATPACRRDLPTPKTFVLRSVLKKPSVKMCLESLQEHCNNLYDDDGTHPSLISNLPNCCKEKEAEDEENFEAPAFLNMRKRKRVTFGEDLSPEVFDESLPANTPLRKGGTPVCKKDFSGLSSLLLEQSPVPEPLPQPDFDDKGENLENIEPLQVSFAVLSSPNKSSISETLSGTDTFSSSNNHEKISSPKVGRITRTSNRRNQLVSVVEESVCNLLNTEVQPCKEKKINRRKSQETKCTKRALPKKSQVLKSCRKKKGKGKKSVQKSLYGERDIASKKPLLSPIPELPEVPEMTPSIPSIRRLGSGYFSSNGKLEEVKTPKNPVKRKDLLRHDPDLHMHQGYDKYDVSEFCSYIKSSSSLGNATSDEDPNTNIMNINENKNIPKAKNKSESENEPKAGTDSPVSCASVTEERVASDSPKPALTLQQGQEFSAGGQNAENLCQFFKISPDLNIKCERKDDFLGAAEGKLQCNRLMPNSQKDCHCLGDVLIENTKESKSQSEDLGRKPMESSSVVSCRDRKDRRRSMCYSDGRSLHLEKNGNHTPSSSVGSSVEISLENSELFKDLSDAIEQTFQRRNSETKVRRSTRLQKDLENEGLVWISLPLPSTSQKAKRRTICTFDSSGFESMSPIKETVSSRQKPQMAPPVSDPENSQGPAAGSSDEPGKRRKSFCISTLANTKATSQFKGYRRRSSLNGKGESSLTALERIEHNGERKQ

SEQ ID NO: 5010 - protein, 296 aa, Homo sapiens
MAAEARVSRWYFGGLASCGAACCTHPLDLLKVHLQTQQEVKLRMTGMALRVVRTDGILALYSGLSASLCRQMTYSLTRFAIYETVRDRVAKGSQGPLPFHEKVLLGSVSGLAGGFVGTPADLVNVRMQNDVKLPQGQRRNYAHALDGLYRVAREEGLRRLFSGATMASSRGALVTVGQLSCYDQAKQLVLSTGYLSDNIFTHFVASFIAAAGDEPPPQGGCATFLCQPLDVLKTRLMNSKGEYQGVFHCAVETAKLGPLAFYKGLVPAGIRLIPHTVLTFVFLEQLRKNFGIKVPS

SEQ ID NO: 5011 - protein, 87 aa, Homo sapiens
MNLEPPKAEFRSATRVAGGPVTPRKGPPKFKQRQTRQFKSKPPKKGVQGFGDDIPGMEGLGTDITVICPWEAFNHLELHELAQYGII

SEQ ID NO: 5012 - protein, 128 aa, Homo sapiens
MSGRGKQGGKARAKAKTRSSRAGLQFPVGRVHRLLRKGNYAERVGAGAPVYLAAVLEYLTAEILELAGNAARDNKKTRIIPRHLQLAIRNDEELNKLLGKVTIAQGGVLPNIQAVLLPKKTESHHKTK

SEQ ID NO: 5013 - protein, 917 aa, Homo sapiens
MADEALAGLDEGALRKLLEVTADLAERRRIRSAIRELQRQELEREEEALASKRFRAERQDNKENWLHSQQREAEQRAALARLAGQLESMNDVEELTALLRSAGEYEERKLIRAAIRRVRAQEIEAATLAGRLYSGRPNSGSREDSKGLAAHRLEQCEVPEREEQEQQAEVSKPTPTPEGTSQDVTTVTLLLRAPPGSTSSSPASPSSSPTPASPEPPLEPAEAQCLTAEVPGSPEPPPSPPKTTSPEPQESPTLPSTEGQVVNKLLSGPKETPAAQSPTRGPSDTKRADVAGPRPCQRSLSVLSPRQPAQNRESTPLASGPSSFQRAGSVRDRVHKFTSDSPMAARLQDGTPQAALSPLTPARLLGPSLTSTTPASSSSGSSSRGPSDTSSRFSKEQRGVAQPLAQLRSCPQEEGPRGRGLAARPLENRAGGPVARSEEPGAPLPVAVGTAEPGGSMKTTFTIEIKDGRGQASTGRVLLPTGNQRAELTLGLRAPPTLLSTSSGGKSTITRVNSPGTLARLGSVTHVTSFSHAPPSSRGGCSIKMEAEPAEPLAAAVEAANGAEQTRVNKAPEGRSPLSAEELMTIEDEGVLDKMLDQSTDFEERKLIRAALRELRQRKRDQRDKERERRLQEARGRPGEGRGNTATETTTRHSQRAADGSAVSTVTKTERLVHSNDGTRTARTTTVESSFVRRSENGSGSTMMQTKTFSSSSSSKKMGSIFDREDQASPRAGSLAALEKRQAEKKKELMKAQSLPKTSASQARKAMIEKLEKEGAAGSPGGPRAAVQRSTSFGVPNANSIKQMLLDWCRAKTRGYEHVDIQNFSSSWSDGMAFCALVHNFFPEAFDYGQLSPQNRRQNFEVAFSSAEMLVDCVPLVEVDDMMIMGKKPDPKCVFTYVQSLYNHLRRHELRLRGKNV

SEQ ID NO: 5014 - protein, 516 aa, Homo sapiens
MEREPGAAGVRRALGRRLEAVLASRSEANAVFDILAVLQSEDQEEIQEAVRTCSRLFGALLERGELFVGQLPSEEMVMTGSQGATRKYKVWMRHRYHSCCNRLGELLGHPSFQVKELALSALLKFVQLEGAHPLEKSKWEGNYLFPRELFKLVVGGLLSPEEDQSLLLSQFREYLDYDDTRYHTMQAAVDAVARVTGQHPEVPPAFWNNAFTLLSAVSLPRREPTVSSFYVKRAELWDTWKVAHLKEHRRVFQAMWLSFLKHKLPLSLYKKVLLIVHDAILPQLAQPTLMIDFLTRACDLGGALSLLALNGLFILIHKHNLEYPDFYRKLYGLLDPSVFHVKYRARFFHLADLFLSSSHLPAYLVAAFAKRLARLALTAPPEALLMVLPFICNLLRRHPACRVLVHRPHGPELDADPYDPGEEDPAQSRALESSLWELQALQRHYHPEVSKAASVINQALSMPEVSIAPLLELTAYEIFERDLKKKGPEPVPLEFIPAQGLLGRPGELCAQHFTLS

SEQ ID NO: 5015 - protein, 319 aa, Homo sapiens
MSVGFIGAGQLAFALAKGFTAAGVLAAHKIMASSPDMDLATVSALRKMGVKLTPHNKETVQHSDVLFLAVKPHIIPFILDEIGADIEDRHIVVSCAAGVTISSIEKKLSAFRPAPRVIRCMTNTPVVVREGATVYATGTHAQVEDGRLMEQLLSSVGFCTEVEEDLIDAVTGLSGSGPAYAFTALDALADGGVKMGLPRRLAVRLGAQALLGAAKMLLHSEQHPGQLKDNVSSPGGATIHALHVLESGGFRSLLINAVEASCIRTRELQSMADQEQVSPAAIKKTILDKVKLDSPAGTALSPSGHTKLLPRSLAPAGKD

SEQ ID NO: 5016 - protein, 514 aa, Homo sapiens
MSRESDVEAQQSHGSSACSQPHGSVTQSQGSSSQSQGISSSSTSTMPNSSQSSHSSSGTLSSLETVSTQELYSIPEDQEPEDQEPEEPTPAPWARLWALQDGFANLECVNDNYWFGRDKSCEYCFDEPLLKRTDKYRTYSKKHFRIFREVGPKNSYIAYIEDHSGNGTFVNTELVGKGKRRPLNNNSEIALSLSRNKVFVFFDLTVDDQSVYPKALRDEYIMSKTLGSGACGEVKLAFERKTCKKVAIKIISKRKFAIGSAREADPALNVETEIEILKKLNHPCIIKIKNFFDAEDYYIVLELMEGGELFDKVVGNKRLKEATCKLYFYQMLLAVQITDFGHSKILGETSLMRTLCGTPTYLAPEVLVSVGTAGYNRAVDCWSLGVILFICLSGYPPFSEHRTQVSLKDQITSGKYNFIPEVWAEVSEKALDLVKKLLVVDPKARFTTEEALRHPWLQDEDMKRKFQDLLSEENESTALPQVLAQPSTSRKRPREGEAEGAETTKRPAVCAAVL

SEQ ID NO: 5017 - protein, 469 aa, Homo sapiens
MSIHFSSPVFTSRSAAFSGRGAQVRLSSARPGGLGSSSLYGLGASRPRVAVRSAYGGPVGAGIREVTINQSLLAPLRLDADPSLQRVRQEESEQIKTLNNKFASFIDKVRFLEQQNKLLETKWTLLQEQKSAKSSRLPDIFEAQIAGLRGQLEALQVDGGRLEAELRSMQDVVEDFKNKYEDEINHRTAAENEFVVLKKDVDAAYMSKVELEAKVDALNDEINFLRTLNETELTELQSQISDTSVVLSMDNSRSLDLDGIIAEVKAQYEEMAKCSRAEAEAWYQTKFETLQAQAGKHGDDLRNTRNEISEMNRAIQRLQAEIDNIKNQRAKLEAAIAEAEERGELALKDARAKQEELEAALQRGKQDMARQLREYQELMSVKLALDIEIATYRKLLEGEESRLAGDGVGAVNISVMNSTGGSSSGGGIGLTLGGTMGSNALSFSSSAGPGLLKAYSIRTASASRRSARD

SEQ ID NO: 5018 - protein, 211 aa, Homo sapiens
MVAHNQVAADNAVSTAAEPRRRPEPSSSSSSSPAAPARPRPCPAVPAPAPGDTHFRTFRSHADYRRITRASALLDACGFYWGPLSVHGAHERLRAEPVGTFLVRDSRQRNCFFALSVKMASGPTSIRVHFQAGRFHLDGSRESFDCLFELLEHYVAAPRRMLGAPLRQRRVRPLQELCRQRIVATVGRENLARIPLNPVLRDYLSSFPFQI

SEQ ID NO: 5019 - protein, 915 aa, Homo sapiens
MADEALAGLDEGALRKLLEVTADLAERRRIRSAIRELQRQELEREEEALASKRFRAERQDNKENWLHSQQREAEQRAALARLAGQLESMNDVEELTALLRSAGEYEERKLIRAAIRRVRAQEIEAATLAGRLYSGRPNSGSREDSKGLAAHRLEQCEVPEREEQEQQAEVSKPTPTPEGTSQDVTTVTLLLRAPPGSTSSSPASPSSSPTPASPEPPLEPAEAQCLTAEVPGSPEPPPSPPKTTSPEPQESPTLPSTEGQVVNKLLSGPKETPAAQSPTRGPSDTKRADVAGPRPCQRSLSVLSPRQPAQNRESTPLASGPSSFQRAGSVRDRVHKFTSDSPMAARLQDGTPQAALSPLTPARLLGPSLTSTTPASSSSGSSSRGPSDTSSRFSKEQRGVAQPLAQLRSCPQEEGPRGRGLAARPLENRAGGPVARSEEPGAPLPVAVGTAEPGGSMKTTFTIEIKDGRGQASTGRVLLPTGNQRAELTLGLRAPPTLLSTSSGGKSTITRVNSPGTLARLGSVTHVTSFSHAPPSSRGGCSIKMEAEPAEPLAAAVEAANGAEQTRVNKAPEGRSPLSAEELMTIEDEGVLDKMLDQSTDFEERKLIRAALRELRQRKRDQRDKERERRLQEARGRPGEGRGNTATETTTRHSQRAADGSAVSTVTKTERLVHSNDGTRTARTTTVESSFVRRSENGSGSTMMQTKTFSSSSSSKKMGSIFDREDQASPRAGSLAALEKRQAEKKKELMKAQSLPKTSASQARKAMIEKLEKEGAAGSPGGPRAAVQRSTSFGVPNANSIKQMLLDWCRAKTRGYEHVDIQNFSSSWSDGMAFCALVHNFFPEAFDYGQLSPQNRRQNFEVAFSSAETHADCPQLLDTEDMVRLREPDWKCVYTYIQEFYRCLVQKGLVKTKKS

SEQ ID NO: 5020 - protein, 213 aa, Homo sapiens
MSVELEEALPVTTAEGMAKKVTKAGGSAALSPSKKRKNSKKKNQPGKYSQLVVETIRRLGERNGSSLAKIYTEAKKVPWFDQQNGRTYLKYSIKALVQNDTLLQVKGTGANGSFKLNRKKLEGGGERRGAPAAATAPAPTAHKAKKAAPGAAGSRRADKKPARGQKPEQRSHKKGAGAKKDKGGKAKKTAAAGGKKVKKAAKPSVPKVPKGRK

SEQ ID NO: 5021 - protein, 514 aa, Homo sapiens
MEPVPLQDFVRALDPASLPRVLRVCSGVYFEGSIYEISGNECCLSTGDLIKVTQVRLQKVVCENPKTSQTMELAPNFQGYFTPLNTPQSYETLEELVSATTQSSKQLPTCFMSTHRIVTEGRVVTEDQLLMLEAVVMHLGIRSARCVLGMEGQQVILHLPLSQKGPFWTWEPSAPRTLLQVLQDPALKDLVLTCPTLPWHSLILRPQYEIQAIMHMRRTIVKIPSTLEVDVEDVTASSRHVHFIKPLLLSEVLAWEGPFPLSMEILERLSDQAGEDEEEECKEEAESPERVLLPFHFPGSFVEEMSDSRRYSLADLTAQFSLPCEVKVVAKDTSHPTDPLTSFLGLRLEEKITEPFLVVSLDSEPGMCFEIPPRWLDLTVVKAKGQPDLPEGSLPIATVEELTDTFYYRLRKLPACEIQAPPPRPPKNQGLSKQRRHSSEGGVKSSQVLGLQQHARLPKPKAKTLPEFIKDGSSTYSKIPAHRKGHRPAKPQRQDLDDDEHDYEEILEQFQKTI

SEQ ID NO: 5022 - protein, 998 aa, Homo sapiens
MNRRRKFLLASVLALQNSSFIYPSCQKCFSRIILVSKRSNCPKCGSTGESGNANYRYKLSLKVAESNKLFVITVFGSCLDTFFGLTATGLHRYIQDPNKIPETLDNDTTQNLLTKAVETCFVGQSFIFGVTNFENQPGQGSDASNFLQQCSDHKRKAKALVACQIVLPDPGIAGFTVIDYFHQLLQTFNFRKLQCDSQAPNNHLLALDHSNSDLSSIYTSDSTSDFFKSCSKDTFSKFWQPSLEFTCIVSQLTDNDDFSASEQSKAFGTLQQNRKSISIAEATGSSSCHDPIQDSWSLVSYMDKKSTAEKLGKELGLQAKELSAVHSSHHEIGVNDSNLFSLEMREPLESSNTKSFHSAVEIKNRSQHELPCFQHHGIDTPTSLQKRSACCPPSLLRLEETASSSQDGDPQIWDDLPFSESLNKFLAVLESEIAVTQADVSSRKHHVDNDIDKFHADHSRLSVTPQRTTGALHTPPIALRSSQVIVKANCSKDDFLFNCKGNLSPSVEKESQPDNKVEAVSVNHNGRDMSEYFLPNPYLSALSSSSKDLETIVTLKKTIRISPHRESDHSSLNNKYLNGCGEISVSEMNEKLTTLCYRKYNDVSDLCKLENKQYCRWSKNQDDSFTICRKLTYPLETLCNSPNRSTNTLKEMPWGHINNNVTQSYSIGYEGSYDASADLFDDIAKEMDIATEITKKSQDILLKWGTSLAESHPSESDFSLRSLSEDFIQPSQKLSLQSLSDSRHSRTCSPTPHFQSDSEYNFENSQDFVPCSQSTPISGFHQTRIHGINRAFKKPVFYSDLDGNYEKIRIFPENDKQQASPSCPKNIKTPSQKIRSPIVSGVSQPDVFNHYPFAECHETDSDEWVPPTTQKIFPSDMLGFQGIGLGKCLAAYHFPDQQELPRKKLKHIRQGTNKGLIKKKLKNMLAAVVTKKKTHKYNCKSSGWISKCPDIQVLAAPQLHPILGPDSCSEVKCCLPFSEKGPPSVCETRSAWSPELFS

SEQ ID NO: 5023 - protein, 462 aa, Homo sapiens
MGKEKTHINIVVIGHVDSGKSTTTGHLIYKCGGIDKRTIEKFEKEAAEMGKGSFKYAWVLDKLKAERERGITIDISLWKFETSKYYVTIIDAPGHRDFIKNMITGTSQADCAVLIVAAGVGEFEAGISKNGQTREHALLAYTLGVKQLIVGVNKMDSTEPPYSQKRYEEIVKEVSTYIKKIGYNPDTVAFVPISGWNGDNMLEPSANMPWFKGWKVTRKDGNASGTTLLEALDCILPPTRPTDKPLRLPLQDVYKIGGIGTVPVGRVETGVLKPGMVVTFAPVNVTTEVKSVEMHHEALSEALPGDNVGFNVKNVSVKDVRRGNVAGDSKNDPPMEAAGFTAQVIILNHPGQISAGYAPVLDCHTAHIACKFAELKEKIDRRSGKKLEDGPKFLKSGDAAIVDMVPGKPMCVESFSDYPPLGRFAVRDMRQTVAVGVIKAVDKKAAGAGKVTKSAQKAQKAK

SEQ ID NO: 5024 - protein, 226 aa, Homo sapiens
MSETAPAETATPAPVEKSPAKKKATKKAAGAGAAKRKATGPPVSELITKAVAASKERNGLSLAALKKALAAGGYDVEKNNSRIKLGLKSLVSKGTLVQTKGTGASGSFKLNKKAASGEAKPKAKKAGAAKAKKPAGATPKKAKKAAGAKKAVKKTPKKAKKPAAAGVKKVAKSPKKAKAAAKPKKATKSPAKPKAVKPKAAKPKAAKPKAAKPKAAKAKKAAAKKK

SEQ ID NO: 5025 - protein, 539 aa, Homo sapiens
MAAPASRQVRRRARAAPRPRSAEDWWWDRLAPRGSGYHLLQSDSMLLVLSEPGPARPRAQRRASRRTPRQPPRGPSAAAKPKAGLRSEAAAAPAPAPAPTPTPEEGPDAGWGDRIPLEILVQIFGLLVAADGPMPFLGRAARVCRRWQEAASQPALWHTVTLSSPLVGRPAKGGVKAEKKLLASLEWLMPNRFSQLQRLTLIHWKSQVHPVLKLVGECCPRLTFLKLSGCHGVTADALVMLAKACCQLHSLDLQHSMVESTAVVSFLEEAGSRMRKLWLTYSSQTTAILGALLGSCCPQLQVLEVSTGINRNSIPLQLPVEALQKGCPQLQVLRLLNLMWLPKPPGRGVAPGPGFPSLEELCLASSTCNFVSNEVLGRLLHGSPNLRLLDLRGCARITPAGLQDLPCRELEQLHLGLYGTSDRLTLAKEGSPFLTQKWCHTLRELDLSGQGFSEKDLEQALAAFLSTPGGSHPALCSLNLRGTRVTPSTVSSVISGCPGLLYLNLESCRCLPRGLKRAYRGLEEVQWCLEQLLTSPSPS

SEQ ID NO: 5026 - protein, 225 aa, Homo sapiens
MVTHSKFPAAGMSRPLDTSLRLKTFSSKSEYQLVVNAVRKLQESGFYWSAVTGGEANLLLSAEPAGTFLIRDSSDQRHFFTLSVKTQSGTKNLRIQCEGGSFSLQSDPRSTQPVPRFDCVLKLVHHYMPPPGAPSFPSPPTEPSSEVPEQPSAQPLPGSPPRRAYYIYSGGEKIPLVLSRPLSSNVATLQHLCRKTVNGHLDSYEKVTQLPGPIREFLDQYDAPL

SEQ ID NO: 5027 - protein, 330 aa, Homo sapiens
MATKESRDAKAQLALSSSANQSKEVPENPNYALKCTLVGHTEAVSSVKFSPNGEWLASSSADRLIIIWGAYDGKYEKTLYGHNLEISDVAWSSDSSRLVSASDDKTLKLWDVRSGKCLKTLKGHSNYVFCCNFNPPSNLIISGSFDETVKIWEVKTGKCLKTLSAHSDPVSAVHFNCSGSLIVSGSYDGLCRIWDAASGQCLKTLVDDDNPPVSFVKFSPNGKYILTATLDNTLKLWDYSRGRCLKTYTGHKNEKYCIFANFSVTGGKWIVSGSEDNLVYIWNLQTKEIVQKLQGHTDVVISAACHPTENLIASAALENDKTIKLWMSNH

SEQ ID NO: 5028 - protein, 532 aa, Homo sapiens
MMMVRRGLLAWISRVVVLLVLLCCAISVLYMLACTPKGDEEQLALPRANSPTGKEGYQAVLQEWEEQHRNYVSSLKRQIAQLKEELQERSEQLRNGQYQASDAAGLGLDRSPPEKTQADLLAFLHSQVDKAEVNAGVKLATEYAAVPFDSFTLQKVYQLETGLTRHPEEKPVRKDKRDELVEAIESALETLNSPAENSPNHRPYTASDFIEGIYRTERDKGTLYELTFKGDHKHEFKRLILFRPFGPIMKVKNEKLNMANTLINVIVPLAKRVDKFRQFMQNFREMCIEQDGRVHLTVVYFGKEEINEVKGILENTSKAANFRNFTFIQLNGEFSRGKGLDVGARFWKGSNVLLFFCDVDIYFTSEFLNTCRLNTQPGKKVFYPVLFSQYNPGIIYGHHDAVPPLEQQLVIKKETGFWRDFGFGMTCQYRSDFINIGGFDLDIKGWGGEDVHLYRKYLHSNLIVVRTPVRGLFHLWHEKRCMDELTPEQYKMCMQSKAMNEASHGQLGMLVFRHEIEAHLRKQKQKTSSKKT

SEQ ID NO: 5029 - protein, 327 aa, Homo sapiens
MTAPCPPPPPDPQFVLRGTQSPVHALHFCEGAQAQGRPLLFSGSQSGLVHIWSLQTRRAVTTLDGHGGQCVTWLQTLPQGRQLLSQGRDLKLCLWDLAEGRSAVVDSVCLESVGFCRSSILAGGQPRWTLAVPGRGSDEVQILEMPSKTSVCALKPKADAKLGMPMCLRLWQADCSSRPLLLAGYEDGSVVLWDVSEQKVCSRIACHEEPVMDLDFDSQKARGISGSAGKALAVWSLDWQQALQVRGTHELTNPGIAEVTIRPDRKILATAGWDHRIRVFHWRTMQPLAVLAFHSAAVQCVAFTADGLLAAGSKDQRISLWSLYPRA

SEQ ID NO: 5030 - protein, 1283 aa, Homo sapiens [sequence omitted]

SEQ ID NO: 5031 - protein, 107 aa, Homo sapiens
MAAWSPAAAAPLLRGIRGLPLHHRMFATQTEGELRVTQILKEKFPRATAIKVTDISGGCGAMYEIKIESEEFKEKRTVQQHQMVNQALKEEIKEMHGLRIFTSVPKR

SEQ ID NO: 5032 - protein, 311 aa, Homo sapiens
MVQAIKWVDEVVPAAPYVTTLETLDKYNCDFCVHGNDITLTVDGRDTYEEVKQAGRYRECKRTQGVSTTDLVGRMLLVTKAHHSSQEMSSEYREYADSFGKCPGGRNPWTGVSQFLQTSQKIIQFASGKEPQPGETVIYVAGAFDLFHIGHVDFLEKVHRLAERPYIIAGLHFDQEVNHYKGKNYPIMNLHERTLSVLACRYVSEVVIGAPYAVTAELLSHFKVDLVCHGKTEIIPDRDGSDPYQEPKRRGIFRQIDSGSNLTTDLIVQRIITNRLEYEARNQKKEAKELAFLEAARQQAAQPLGERDGDF

SEQ ID NO: 5033 - protein, 167 aa, Homo sapiens
MVSNFFHVIQVFEKSATLISKTEHIGFVIYSWRKSTTHLGSRRKFAISIYLSEVSLQKYDCPFSGTSFVVFSLFLICAMAGDVVYADIKTVRTSPLELAFPLQRSVSFNFSTVHKSCPAKDWKVHKGKCYWIAETKKSWNKSQNDCAINNSYLMVIQDITAMVRFNI

SEQ ID NO: 5034 - protein, 696 aa, Homo sapiens
AWQEGSVTRLWKAIHTAPVATMAFDPTSTLLATGGCDGAVRVWDIVRHYGTHHFRGSPGVVHLVAFHPDPTRLLLFSSATDAAIRVWSLQDRSCLAVLTAHYSAVTSLAFSADGHTMLSSGRDKICIIWDLQSCQATRTVPVFESVEAAVLLPEEPVSQLGVKSPGLYFLTAGDQGTLRVWEAASGQCVYTQAQPPGPGQELTHCTLAHTAGVVLTATADHNLLLYEARSLRLQKQFAGYSEEVLDVRFLGPEDSHVVVASNSPCLKVFELQTSACQILHGHTDIVLALDVFRKGWLFASCAKDQSVRIWRMNKAGQVMLKESFLVTGSQDCTVKLWPLPKALLSKNTAPDNGPILLQAQTTQRCHDKDINSVAIAPNDKLLATGSQDRTAKLWALPQCQLLGVFSGHRRGLWCVQFSPMDQVLATASADGTIKLWALQDFSCLKTFEGHDASVLKVAFVSRGTQLLSSGSDGLVKLWTIKNNECVRTLDAHEDKVWGLHCSRLDDHALTGASDSRVILWKDVTEAEQAEEQARQEEQVVRQQELDNLLHEKRYLRALGLAISLDRPHTVLTVIQAIRRDPEACEKLEATMLRLRRDQKEALLRFCVTWNTNSRHCHEAQAVLGVLLRREAPEELLAYEGVRAALEALLPYTERHFQRLSRTLQAAAFLDFLWHNMKLPVPAAAPTPWETHKGALP

SEQ ID NO: 5035 - protein, 452 aa, Homo sapiens
MAGYLRVVRSLCRASGSRPAWAPAALTAPTSQEQPRRHYADKRIKVAKPVVEMDGDEMTRIIWQFIKEKLILPHVDIQLKYFDLGLPNRDQTDDQVTIDSALATQKYSVAVKCATITPDEARVEEFKLKKMWKSPNGTIRNILGGTVFREPIICKNIPRLVPGWTKPITIGRHAHGDQYKATDFVADRAGTFKMVFTPKDGSGVKEWEVYNFPAGGVGMGMYNTDESISGFAHSCFQYAIQKKWPLYMSTKNTILKAYDGRFKDIFQEIFDKHYKTDFDKNKIWYEHRLIDDMVAQVLKSSGGFVWACKNYDGDVQSDILAQGFGSLGLMTSVLVCPDGKTIEAEAAHGTVTRHYREHQKGRPTSTNPIASIFAWTRGLEHRGKLDGNQDLIRFAQMLEKVCVETVESGAMTKDLAGCIHGLSNVKLNEHFLNTTDFLDTIKSNLDRALGRQ

SEQ ID NO: 5036 - protein, 437 aa, Homo sapiens
MAAGTLYTYPENWRAFKALIAAQYSGAQVRVLSAPPHFHFGQTNRTPEFLRKFPAGKVPAFEGDDGFCVFESNAIAYYVSNEELRGSTPEAAAQVVQWVSFADSDIVPPASTWVFPTLGIMHHNKQATENAKEEVRRILGLLDAYLKTRTFLVGERVTLADITVVCTLLWLYKQVLEPSFRQAFPNTNRWFLTCINQPQFRAVLGEVKLCEKMAQFDAKKFAETQPKKDTPRKEKGSREEKQKPQAERKEEKKAAAPAPEEEMDECEQALAAEPKAKDPFAHLPKSTFVLDEFKRKYSNEDTLSVALPYFWEHFDKDGWSLWYSEYRFPEELTQTFMSCNLITGMFQRLDKLRKNAFASVILFGTNNSSSISGVWVFRGQELAFPLSPDWQVDYESYTWRKLDPGSEETQTLVREYFSWEGAFQHVGKAFNQGKIFK

SEQ ID NO: 5037 - protein, 325 aa, Homo sapiens
MVPREAPESAQCLCPSLTIPNAKDVLRKRHKRRSRQHQRFMARKALLQEQGLLSMPPEPGSSPLPTPFGAATATEAASSGKQCLRAGSGSAPCSRRPAPGKASGPLPSKCVAIDCEMVGTGPRGRVSELARCSIVSYHGNVLYDKYIRPEMPIADYRTRWSGITRQHMRKAVPFQVAQKEILKLLKGKVVVGHALHNDFQALKYVHPRSQTRDTTYVPNFLSEPGLHTRARVSLKDLALQLLHKKIQVGQHGHSSVEDATTAMELYRLVEVQWEQQEARSLWTCPEDREPDSSTDMEQYMEDQYWPDDLAHGSRGGAREAQDRRN

SEQ ID NO: 5038 - protein, 736 aa, Homo sapiens
MKKSRSVMTVMADDNVKDYFECSLSKSYSSSSNTLGIDLWRGRRCCSGNLQLPPLSQRQSERARTPEGDGISRPTTLPLTTLPSIAITTVSQECFDVENGPSPGRSPLDPQASSSAGLVLHATFPGHSQRRESFLYRSDSDYDLSPKAMSRNSSLPSEQHGDDLIVTPFAQVLASLRSVRNNFTILTNLHGTSNKRSPAASQPPVSRVNPQEESYQKLAMETLEELDWCLDQLETIQTYRSVSEMASNKFKRMLNRELTHLSEMSRSGNQVSEYISNTFLDKQNDVEIPSPTQKDREKKKKQQLMTQISGVKKLMHSSSLNNTSISRFGVNTENEDHLAKELEDLNKWGLNIFNVAGYSHNRPLTCIMYAIFQERDLLKTFRISSDTFITYMMTLEDHYHSDVAYHNSLHAADVAQSTHVLLSTPALDAVFTDLEILAAIFAAAIHDVDHPGVSNQFLINTNSELALMYNDESVLENHHLAVGFKLLQEEHCDIFMNLTKKQRQTLRKMVIDMVLATDMSKHMSLLADLKTMVETKKVTSSGVLLLDNYTDRIQVLRNMVHCADLSNPTKSLELYRQWTDRIMEEFFQQGDKERERGMEISPMCDKHTASVEKSQVGFIDYIVHPLWETWADLVQPDAQDILDTLEDNRNWYQSMIPQSPSPPLDEQNRDCQGLMEKFQFELTLDEEDSEGPEKEGEGHSYFSSTKTLCVIDPENRDSLGETDIDIATEDKSPVDT

SEQ ID NO: 5039 - protein, 129 aa, Homo sapiens
MSGRGKQGGKARAKAKSRSSRAGLQFPVGRVHRLLRKGNYAERVGAGAPVYMAAVLEYLTAEILELAGNAARDNKKTRIIPRHLQLAIRNDEELNKLLGKVTIAQGGVLPNIQAVLLPKKTESHKAKSK

SEQ ID NO: 5040 - protein, 654 aa, Homo sapiens
MSEASSEDLVPPLEAGAAPYREEEEAAKKKKEKKKKSKGLANVFCVFTKGKKKKGQPSSAEPEDAAGSRQGLDGPPPTVEELKAALERGQLEAARPLLALERELAAAAAAGGVSEEELVRRQSKVEALYELLRDQVLGVLRRPLEAPPERLRQALAVVAEQEREDRQAAAAGPGTSGLAATRPRRWLQLWRRGVAEAAEERMGQRPAAGAEVPESVFLHLGRTMKEDLEAVVERLKPLFPAEFGVVAAYAESYHQHFAAHLAAVAQFELCERDTYMLLLWVQNLYPNDIINSPKLVGELQGMGLGSLLPPRQIRLLEATFLSSEAANVRELMDRALELEARRWAEDVPPQRLDGHCHSELAIDIIQITSQAQAKAESITLDLGSQIKRVLLVELPAFLRSYQRAFNEFLERGKQLTNYRANVIANINNCLSFRMSMEQNWQVPQDTLSLLLGPLGELKSHGFDTLLQNLHEDLKPLFKRFTHTRWAAPVETLENIIATVDTRLPEFSELQGCFREELMEALHLHLVKEYIIQLSKGRLVLKTAEQQQQLAGYILANADTIQHFCTQHGSPATWLQPALPTLAEIIRLQDPSAIKIEVATYATCYPDFSKGHLSAILAIKGNLSNSEVKRIRSILDVSMGAQEPSRPLFSLIKVG

SEQ ID NO: 5041 - protein, 77 aa, Homo sapiens
MPKCPKCNKEVYFAERVTSLGKDWHRPCLKCEKCGKTLTSGGHAEHEGKPYCNHPCYAAMFGPKGFGRGGAESHTFK

SEQ ID NO: 5042 - protein, 529 aa, Homo sapiens [sequence omitted]

SEQ ID NO: 5043 - protein, 130 aa, Homo sapiens
MSGRGKQGGKARAKAKSRSSRAGLQFPVGRVHRLLRKGNYAERVGAGAPVYLAAVLEYLTAEILELAGNAARDNKKTRIIPRHLQLAVRNDEELNKLLGGVTIAQGGVLPNIQAVLLPKKTESHKPGKNK

SEQ ID NO: 5044 - protein, 604 aa, Homo sapiens
MAGDVEGFCSSIHDTSVSAGFRALYEEGLLLDVTLVIEDHQFQAHKALLATQSDYFRIMFTADMRERDQDKIHLKGLTATGFSHVLQFMYYGTIELSMNTVHEILQAAMYVQLIEVVKFCCSFLLAKICLENCAEIMRLLDDFGVNIEGVREKLDTFLLDNFVPLMSRPDFLSYLSFEKLMSYLDNDHLSRFPEIELYEAVQSWLRHDRRRWRHTDTIIQNIRFCLMTPTSVFEKVKTSEFYRYSRQLRYEVDQALNYFQNVHQQPLLDMKSSRIRSAKPQTTVFRGMIGHSMVNSKILLLKKPRVWWELEGPQVPLRPDCLAIVNNFVFLLGGEELGPDGEFHASSKVFRYDPRQNSWLQMADMSVPRSEFAVGVIGKFIYAVAGRTRDETFYSTERYDITNDKWEFVDPYPVNKYGHEGTVLNNKLFITGGITSSSTSKQVCVFDPSKEGTIEQRTRRTQVVTNCWENKSKMNYARCFHKMISYNGKLYVFGGVCVILRASFESQGCPSTEVYNPETDQWTILASMPIGRSGHGVTVLDKQIMVLGGLCYNGHYSDSILTFDPDENKWKEDEYPRMPCKLDGLQVCNLHFPDYVLDEVRRCN

SEQ ID NO: 5045 - protein, 270 aa, Homo sapiens
MDSLEWNWALVYELSGEHHDEEWSVKTYQEVAQKFVETHPEFIGIKIIYSDHRSKDVAVIAESIRMAMGLRIKFPTVVAGFDLVGHEDTGHSLHDYKEALMIPAKDGVKLPYFFHAGETDWQGTSIDRNILDALMLNTTRIGHGFALSKHPAVRTYSWKKDIPIEVCPISNQVLKLVSDLRNHPVATLMATGHPMVISSDDPAMFGAKGLSYDFYEVFMGIGGMKADLRTLKQLAMNSIKYSTLLESEKNTFMEIWKKRWDKFIADVATK

SEQ ID NO: 5046 - protein, 579 aa, Homo sapiens
MAVFNQKSVSDMIKEFRKNWRALCNSERTTLCGADSMLLALQLSMAENNKQHSGEFTVSLSDVLLTWKYLLHEKLNLPVENMDVTDHYEDVRKIYDDFLKNSNMLDLIDVYQKCRALTSNCENYNTVSPSQLLDFLSGKQYAVGDETDLSIPTSPTSKYNRDNEKVQLLARKIIFSYLNLLVNSKNDLAVAYILNIPDRGLGREAFTDLKHAAREKQMSIFLVATSFIRTIELGGKGYAPPPSDPLRTHVKGLSNFINFIDKLDEILGEIPNPSIAGGQILSVIKMQLIKGQNSRDPFCKAIEEVAQDLDLRIKNIINSQEGVVALSTTDISPARPKSHAINHGTAYCGRDTVKALLVLLDEEAANAPTKNKAELLYDEENTIHHHGTSILTLFRSPTQVNNSIKPLRERICVSMQEKKIKMKQTLIRSQFACTYKDDYMISKDNWNNVNLASKPLCVLYMENDLSEGVNPSVGRSTIGTSFGNVHLDRSKNEKVSRKSTSQTGNKSSKRKQVDLDGENILCDNRNEPPQHKNAKIPKKSNDSQNRLYGKLAKVAKSNKCTAKDKLISGQAKLTQFFRL

SEQ ID NO: 5047 - protein, 322 aa, Homo sapiens
MVERRGPGRPRTDGENVFTGQSKIYSYMSPNKCSGMRFPLQEENSVTHHEVKCQGKPLAGIYRKREEKRNAGNAVRSAMKSEEQKIKDARKGPLVPFPNQKSEAAEPPKTPPSSCDSTNAAIAKQALKKPIKGKQAPRKKAQGKTQQNRKLTDFYPVRRSSRKSKAELQSEERKRIDELIESGKEEGMKIDLIDGKGRGVIATKQFSRGDFVVEYHGDLIEITDAKKREALYAQDPSTGCYMYYFQYLSKTYCVDATRETNRLGRLINHSKCGNCQTKLHDIDGVPHLILIASRDIAAGEELLYDYGDRSKASIEAHPWLKH

SEQ ID NO: 5048 - protein, 637 aa, Homo sapiens
MHDSIRFGNVDMPCVQAQYSPSPPGSSYAAQTYSSEYTTEIMNPDYTKLTMDLGSTEITATATTSLPSISTFVEGYSSNYELKPSCVYQMQRPLIKVEEGRAPSYHHHHHHHHHHHHHHQQQHQQPSIPPASSPEDEVLPSTSMYFKQSPPSTPTTPAFPPQAGALWDEALPSAPGCIAPGPLLDPPMKAVPTVAGARFPLFHFKPSPPHPPAPSPAGGHHLGYDPTAAAALSLPLGAAAAAGSQAAALESHPYGLPLAKRAAPLAFPPLGLTPSPTASSLLGESPSLPSPPSRSSSSGEGTCAVCGDNAACQHYGVRTCEGCKGFFKRTVQKNAKYVCLANKNCPVDKRRRNRCQYCRFQKCLSVGMVKEVVRTDSLKGRRGRLPSKPKSPLQQEPSQPSPPSPPICMMNALVRALTDSTPRDLDYSRYCPTDQAAAGTDAEHVQQFYNLLTASIDVSRSWAEKIPGFTDLPKEDQTLLIESAFLELFVLRLSIRSNTAEDKFVFCNGLVLHRLQCLRGFGEWLDSIKDFSLNLQSLNLDIQALACLSALSMITERHGLKEPKRVEELCNKITSSLKDHQSKGQALEPTESKVLGALVELRKICTLGLQRIFYLKLEDLVSPPSIIDKLFLDTLPF

SEQ ID NO: 5049 - protein, 136 aa, Homo sapiens [sequence omitted]

SEQ ID NO: 5050 - protein, 307 aa, Homo sapiens
MSKSESPKEPEQLRKLFIGGLSFETTDESLRSHFEQWGTLTDCVVMRDPNTKRSRGFGFVTYATVEEVDAAMNARPHKVDGRVVEPKRAVSREDSQRPGAHLTVKKIFVGGIKEDTEEHHLRDYFEQYGKIEVIEIMTDRGSGKKRGFAFVTFDDHDSVDKIVIQKYHTVNGHNCEVRKALSKQEMASASSSQRGRSGSGNFGGGRGGGFGGNDNFGRGGNFSGRGIGDGYNGFGNDGSNFGGGGSYNDFGNYNNQSSNFGPMKGGNFGGRSSGPYGGGGQYFAKPRNQGGYGGSSSSSSYGSGRRF

SEQ ID NO: 5051 - protein, 148 aa, Homo sapiens
MGRLWKRPDQLAMLMNKLILMGCVKRRCQPRGSACSCSHLKAENSDFILGYVCQPQRINYLHTQKQWSRIFWQDFQDLCHRCLISVSSQSVLGFEIDAVNSVQFSNHTETRSVSVAQAGVKWRNQLTAALTSWAEAIFLPPPPEWLGL

SEQ ID NO: 5052 - protein, 715 aa, Homo sapiens
MSKAHKPWPYRRRSQFSSRKYLKKEMNSFQQQPPPFGTVPPQMMFPPNWQGAEKDAAFLAKDFNFLTLNNQPPPGNRSQPRAMGPENNLYSQYEQKVRPCIDLIDSLRALGVEQDLALPAIAVIGDQSSGKSSVLEALSGVALPRGSGIVTRCPLVLKLKKQPCEAWAGRISYRNTELELQDPGQVEKEIHKAQNVMAGNGRGISHELISLEITSPEVPDLTIIDLPGITRVAVDNQPRDIGLQIKALIKKYIQRQQTINLVVVPCNVDIATTEALSMAHEVDPEGDRTIGILTKPDLMDRGTEKSVMNVVRNLTYPLKKGYMIVKCRGQQEITNRLSLAEATKKEITFFQTHPYFRVLLEEGSATVPRLAERLTTELIMHIQKSLPLLEGQIRESHQKATEELRRCGADIPSQEADKMFFLIEKIKMFNQDIEKLVEGEEVVRENETRLYNKIREDFKNWVGILATNTQKVKNIIHEEVEKYEKQYRGKELLGFVNYKTFEIIVHQYIQQLVEPALSMLQKAMEIIQQAFINVAKKHFGEFFNLNQTVQSTIEDIKVKHTAKAENMIQLQFRMEQMVFCQDQIYSVVLKKVREEIFNPLGTPSQNMKLNSHFPSNESSVSSFTEIGIHLNAYFLETSKRLANQIPFIIQYFMLRENGDSLQKAMMQILQEKNRYSWLLQEQSETATKRRILKERIYRLTQARHALCQFSSKEIH

SEQ ID NO: 5053 - protein, 609 aa, Homo sapiens
MPHLLVTFRDVAIDFSQEEWECLDPAQRDLYRDVMLENYSNLISLDLESSCVTKKLSPEKEIYEMESLQWENMGKRINHHLQYNGLGDNMECKGNLEGQEASQEGLYMCVKITCEEKATESHSTSSTFHRIIPTKEKLYKCKECRQGFSYLSCLIQHEENHNIEKCSEVKKHRNTFSKKPSYIQHQRIQTGEKPYECMECGKAFGRTSDLIQHQKIHTNEKPYQCNACGKAFIRGSQLTEHQRVHTGEKPYECKKCGKAFSYCSQYTLHQRIHSGEKPYECKDCGKAFILGSQLTYHQRIHSGEKPYECKECGKAFILGSHLTYHQRVHTGEKPYICKECGKAFLCASQLNEHQRIHTGEKPYECKECGKTFFRGSQLTYHLRVHSGERPYKCKECGKAFISNSNLIQHQRIHTGEKPYKCKECGKAFICGKQLSEHQRIHTGEKPFECKECGKAFIRVAYLTQHEKIHGEKHYECKECGKTFVRATQLTYHQRIHTGEKPYKCKECDKAFIYGSQLSEHQRIHRGEKPYECKQCGKAFIRGSHLTEHLRTHTGEKPYECKECGRAFSRGSELTLHQRIHTGEKPYTCVQCGKDFRCPSQLTQHTRLHN

SEQ ID NO: 5054 - protein, 504 aa, Homo sapiens
MLYFSLFWAARPLQRCGQLVRMAIRAQHSNAAQTQTGEANRGWTGQESLSDSDPEMWELLQREKDRQCRGLELIASENFCSRAALEALGSCLNNKYSEGYPGKRYYGGAEVVDEIELLCQRRALEAFDLDPAQWGVNVQPYSGSPANLAVYTALLQPHDRIMGLDLPDGGHLTHGYMSDVKRISATSIFFESMPYKLNPKTGLIDYNQLALTARLFRPRLIIAGTSAYARLIDYARMREVCDEVKAHLLADMAHISGLVAAKVIPSPFKHADIVTTTTHKTLRGARSGLIFYRKGVKAVDPKTGREIPYTFEDRINFAVFPSLQGGPHNHAIAAVAVALKQACTPMFREYSLQVLKNARAMADALLERGYSLVSGGTDNHLVLVDLRPKGLDGARAERVLELVSITANKNTCPGDRSAITPGGLRLGAPALTSRQFREDDFRRVVDFIDEGVNIGLEVKSKTAKLQDFKSFLLKDSETSQRLANLRQRVEQFARAFPMPGFDEH

SEQ ID NO: 5055 - protein, 394 aa, Homo sapiens
MAGKVKWVTDIEKSVLINNFEKRGWVQVTENEDWNFYWMSVQTIRNVFSVEAGYRLSDDQIVNHFPNHYELTRKDLMVKNIKRYRKELEKEGSPLAEKDENGKYLYLDFVPVTYMLPADYNLFVEEFRKSPSSTWIMKPCGKAQGKGIFLINKLSQIKKWSRDSKTSSFVSQSNKEAYVISLYINNPLLIGGRKFDLRLYVLVSTYRPLRCYMYKLGFCRFCTVKYTPSTSELDNMFVHLTNVAIQKHGEDYNHIHGGKWTVSNLRLYLESTRGKEVTSKLFDEIHWIIVQSLKAVAVNASPSLTSSTANDRILKYNLINDTLNIAVPNGEIPDCKWNKSPPKEVLGNYEILYDEELAQGDGADRELRSRQGQSLGPRAGRSRDSGRAVLTTWK

SEQ ID NO: 5056 - protein, 198 aa, Homo sapiens [sequence omitted]

SEQ ID NO: 5057 - protein, 81 aa, Homo sapiens
MIHFILLFSRQGKLRLQKWYITLPDKERKKITREIVQIILSRGHRTSSFVDWKELKLVYKRSVSWILSLILKRLISSWTSL

SEQ ID NO: 5058 - protein, 1196 aa, Homo sapiens
MENVDNSLDGSDVSEPAKPEAGLEVAQSILSKFSMKSLFGFTSKLESVNPEEEDAVLKAFHSLDVNPTSQQDDSSNGLDPQEAGSRVSPDLGNDEKIASVETESEGSQRKEAGTSLLAQELLPLSTLKGTKDDVICVRGTLVHTTSDSDSDDGGQEPEEGSSTNGPKSPSGVLSEPSQESKENPGGFRENTVTGEMNGAELCAEDPQRIPPEMSSKLEAGNGGLQTERRPSQDQVGEEGSQDLPAVTNQNSSVGITESASSKKEVSGEKSFQLPAFFSGLRVLKKGATAEGGETITEIKPKDGDLALLKLTQPVQKSLVQAGLQTVKSEKKATDPKATPTLLEQLSLLLNIDMPKTEPKGADPESPRREEMGCNADQESQSGPGVPQTQGGEVKPKSPETALEAFKALFIRPPRKGTTADTSELEALKRKMRHEKESLRAVFERSNSKPADGPSDSKSPDHSLTEQDDRTPGRLQAVWPPPKTKDTEEKVGLKYTEAEYQAAILHLKREHKEEIENLQAQFELRAFHIRGEHAMITARLEETIENLKHELEHRWRGGCEERKDVCISTDDDCPPKTFRNVCVQTDRETFLKPCESESKTTRSNQLVPKKLNISSLSQLSPPNDHKDIHAALQPMEGMASNQQKALPPPPASIPPPPPLPSGLGSLSPAPPMPPVSAGPPLPPPPPPPPPLPPPSSAGPPPPPPPPPLPNSPAPPNPGGPPPAPPPPGLAPPPPPGLFFGLGSSSSQCPRKPAIEPSCPMKPLYWTRIQISDRSQNATPTLWDSLEEPDIRDPSEFEYLFSKDTTQQKKKPLSETYEKKNKVKKIIKLLDGKRSQTVGILISSLHLEMKDIQQAIFNVDDSVVDLETLAALYENRAQEDELVKIRKYYETSKEEELKLLDKPEQFLHELAQIPNFAERAQCIIFRSVFSEGITSLHRKVEIITRASKDLLHVKSVKDILALILAFGNYMNGGNRTRGQADGYSLEILPKLKDVKSRDNGINLVDYVVKYYLRYYDQEAGTEKSVFPLPEPQDFFLASQVKFEDLIKDLRKLKRQLEASEKQMVVVCKESPKEYLQPFKDKLEEFFQKAKKEHKMEESHLENAQKSFETTVRYFGMKPKSGEKEITPSYVFMVWYEFCSDFKTIWKRESKNISKERLKMAQESVSKLTSEKKVETKKINPTASLKERLRQKEASVTTN

SEQ ID NO: 5059 - protein, 150 aa, Homo sapiens
MASQNRDPAATSVAAARKGAEPSGGAARGPVGKRLQQELMTLMVYEDLRYKLSLEFPSGYPYNAPTVKFLTPCYHPNVDTQGNICLDILKEKWSALYDVRTILLSIQSLLGEPNIDSPLNTHAAELWKNPTAFKKYLQETYSKQVTSQEP

SEQ ID NO: 5060 - protein, 996 aa, Homo sapiens
MRDFGFGVLQTAPLRSSSPGPLFCGEAYGPYAVGSVNPLPSATPFGPLSPPPLPVTGFLEAASPFSVPLGGGAGSPAAAASSSSPFLAHQQTMQDELLLGLTQQPARPLSGAAATEKLPDHHPGGGTIAGVTHLLPSQDFKPSLHHPSSSSASSCCCCRTSSPQDFSKRQQQQLSSQKRKEFSPPHLPHPPDSKPPPPPPPLHCPGRFSPPPPPAGPLLQPAQLAQRQQQQPPQQFSLLHQQHLSPQDFAPRQRPADLPPLPQLPPSPPAAPRRRHGGAGSPRKTPAAGEGSAAESPNAGLASSTPVNPAPGSMESPNHPLLNSPSNLLPGGALGAGAFSSLQSPDLPHPGGGGGGGGGGPPGGGGGGGSASPPPLPGFGTPWSVQTASPPPQPQQPPPTQPQQQPPPPQQPPQPQPQPPGSSATTPGGGSGGSLSAMPPPSPDSENGFYPGLPSSMNPAFFPSFSPVSPHGCTGLSVPTSGGGGGGFGGPFSATAVPPPPPPAMNIPQQQPPPPAAPQQPQSRRSPVSPQLQQQHQAAAAAFLQQRNSYNHHQPLLKQSPWSNHQSSGWGTGSMSWGAMHGRDHRRTGNMGIPGTMNQISPLKKPFSGNVIAPPKFTRSTPSLTPKSWIEDNVFRTDNNSNTLLPLQDRSRMYDSLNMHSLENSLIDIMRAEHDPLKGRLSYPHPGTDNLLMLNGRSSLFPIDDGLLDDGHSDQVGVLNSPTCYSAHQNGERIERFSRKVFVGGLPPDIDEDEITASFRRFGPLVVDWPHKAESKSYFPPKGYAFLLFQEESSVQALIDACIEEDGKLYLCVSSPTIKDKPVQIRPWNLSDSDFVMDGSQPLDPRKTIFVGGVPRPLRAVELAMIMDRLYGGVCYAGIDTDPELKYPKGAGRVAFSNQQSYIAAISARFVQLQHGDIDKRVEVKPYVLDDQMCDECQGARCGGKFAPFFCANVTCLQYYCEFCWANIHSRAGREFHKPLVKEGADRPRQIHFRWN

SEQ ID NO: 5061 - protein, 2155 aa, Homo sapiens
MELQRTSSISGPLSPAYTGQVPYNYNQLEGRFKQLQDEREAVQKKTFTKWVNSHLARVSCRITDLYTDLRDGRMLIKLLEVLSGERLPKPTKGRMRIHCLENVDKALQFLKEQRVHLENMGSHDIVDGNHRLTLGLIWTIILRFQIQDISVETEDNKEKKSAKDALLLWCQMKTAGYPNVNIHNFTTSWRDGMAFNALIHKHRPDLIDFDKLKKSNAHYNLQNAFNLAEQHLGLTKLLDPEDISVDHPDEKSIITYVVTYYHYFSKMKALAVEGKRIGKVLDNAIETEKMIEKYESLASDLLEWIEQTIIILNNRKFANSLVGVQQQLQAFNTYRTVEKPPKFTEKGNLEVLLFTIQSKMRANNQKVYMPREGKLISDINKAWERLEKAEHERELALRNELIRQEKLEQLARRFDRKAAMRETWLSENQRLVSQDNFGFDLPAVEAATKKHEAIETDIAAYEERVQAVVAVARELEAENYHDIKRITARKDNVIRLWEYLLELLRARRQRLEMNLGLQKIFQEMLYIMDWMDEMKVLVLSQDYGKHLLGVEDLLQKHTLVEADIGIQAERVRGVNASAQKFATDGEGYKPCDPQVIRDRVAHMEFCYQELCQLAAERRARLEESRRLWKFFWEMAEEEGWIREKEKILSSDDYGKDLTSVMRLLSKHRAFEDEMSGRSGHFEQAIKEGEDMIAEEHFGSEKIRERIIYIREQWANLEQLSAIRKKRLEEASLLHQFQADADDIDAWMLDILKIVSSSDVGHDEYSTQSLVKKHKDVAEEIANYRPTLDTLHEQASALPQEHAESPDVRGRLSGIEERYKEVAELTRLRKQALQDTLALYKMFSEADACELWIDEKEQWLNNMQIPEKLEDLEVIQHRFESLEPEMNNQASRVAVVNQIARQLMHSGHPSEKEIKAQQDKLNTRWSQFRELVDRKKDALLSALSIQNYHLECNETKSWIREKTKVIESTQDLGNDLAGVMALQRKLTGMERDLVAIEAKLSDLQKEAEKLESEHPDQAQAILSRLAEISDVWEEMKTTLKNREASLGEASKLQQFLRDLDDFQSWLSRTQTAIASEDMPNTLTEAEKLLTQHENIKNEIDNYEEDYQKMRDMGEMVTQGQTDAQYMFLRQRLQALDTGWNELHKMWENRQNLLSQSHAYQQFLRDTKQAEAFLNNQEYVLAHTEMPTTLEGAEAAIKKQEDFMTTMDANEEKINAVVETGRRLVSDGNINSDRIQEKVDSIDDRHRKNRETASELLMRLKDNRDLQKFLQDCQELSLWINEKMLTAQDMSYDEARNLHSKWLKHQAFMAELASNKEWLDKIEKEGMQLISEKPETEAVVKEKLTGLHKMWEVLESTTQTKAQRLFDANKAELFTQSCADLDKWLHGLESQIQSDDYGKDLTSVNILLKKQQMLENQMEVRKKEIEELQSQAQALSQEGKSTDEVDSKRLTVQTKFMELLEPLNERKHNLLASKEIHQFNRDVEDEILWVGERMPLATSTDHGHNLQTVQLLIKKNQTLQKEIQGHQPRIDDIFERSQNIVTDSSSLSAEAIRQRLADLKQLWGLLIEETEKRHRRLEEAHRAQQYYFDAAEAEAWMSEQELYMMSEEKAKDEQSAVSMLKKHQILEQAVEDYAETVHQLSKTSRALVADSHPESERISMRQSKVDKLYAGLKDLAEERRGKLDERHRLFQLNREVDDLEQWIAEREVVAGSHELGQDYEHVTMLQERFREFARDTGNIGQERVDTVNHLADELINSGHSDAATIAEWKDGLNEAWADLLELIDTRTQILAASYELHKFYHDAKEIFGRIQDKHKKLPEELGRDQNTVETLQRMHTTFEHDIQALGTQVRQLQEDAARLQAAYAGDKADDIQKRENEVLEAWKSLLDACESRRVRLVDTGDKFRFFSMVRDLMLWMEDVIRQIEAQEKPRDVSSVELLMNNHQGIKAEIDARNDSFTTCIELGKSLLARKHYASEEIKEKLLQLTEKRKEMIDKWEDRWEWLRLILEVHQFSRDASVAEAWLLGQEPYLSSREIGQSVDEVEKLIKRHEAFEKSAATWDERFSALERLTTLELLEVRRQQEEEERKRRPPSPEPSTKVSEEAESQQQWDTSKGEQVSQNGLPAEQGSPRVSYRSQTYQNYKNFNSRRTASDQPWSGL

SEQ ID NO: 5062 - protein, 438 aa, Homo sapiens
MRGSPGDAERRQRWGRLFEELDSNKDGRVDVHELRQGLARLGGGNPDPGAQQGISSEGDADPDGGLDLEEFSRYLQEREQRLLLMFHSLDRNQDGHIDVSEIQQSFRALGISISLEQAEKILHSMDRDGTMTIDWQEWRDHFLLHSLENVEDVLYFWKHSTVLDIGECLTVPDEFSKQEKLTGMWWKQLVAGAVAGAVSRTGTAPLDRLKVFMQVHASKTNRLNILGGLRSMVLEGGIRSLWRGNGINVLKIAPESAIKFMAYEQIKRAILGQQETLHVQERFVAGSLAGATAQTIIYPMEVLKTRLTLRRTGQYKGLLDCARRILEREGPRAFYRGYLPNVLGIIPYAGIDLAVYETLKNWWLQQYSHDSADPGILVLLACGTISSTCGQIASYPLALVRTRMQAQDVSVYKTDTVPTLIELTGRRGRKMLNKSFWN

SEQ ID NO: 5063 - protein, 2567 aa, Homo sapiens
MAISSRLALWEQKIREEDKSPPPSSPPPLFSVIPGGFIKQLVRGTEKEAKEARQRKQLAVASPEREIPEISISQPNSKSSSGTRSGSQQISQDDQSSSPGSSDILGKESEGSRSPDPEQMTSINGEKAQELGSSATPTKKTVPFKRGVRRGDVLLMVAKLDPDSAKPEKTHPHDAPPCKTSPPATDTGKEKKGETSRTPCGSQASTEILAPKAEKTRTGGLGDPGQGTVALKKGEEGQSIVGKGLGTPKTTELKEAEPQGKDRQGTRPQAQGPGEGVRPGKAEKEGAEPTNTVEKGNVSKDVGSEGKHVRPQIPGRKWGGFLGRRSKWDGPQNKKDKEGVLLSKAEKTGEPQTQMEKTSQVQGELGDDLRMGEKAGELRSTTGKAGESWDKKEKMGQPQGKSGNAGEARSQTEKGCEAPKEVSTMVESPAAPGKGGWPGSRGQEAEEPCSRAGDGAGALETELEGPSQPALEKDAERPRIRKENQDGPAPQEEGKGGQSRDSDQAPEDRWYEAEKVWLAQKDGFTLATVLKPDEGTADLPAGRVRLWIDADKTITEVDEEHVHRANPPELDQVEDLASLISVNESSVLNTLLQRYKAQLLHTCTGPDLIVLQPRGPSVPSAGKVPKGRRDGLPAHIGSMAQRAYWALLNQRRDQSIVALGWSGAGKTTCCEQVLEHLVGMAGSVDGRVSVEKIRATFTVLRAFGSVSMAHSRSATRFSMVMSLDFNATGRITAAQLQTMLLEKSRVARQPEGESNFLVFSQMLAGLDLDLRTELNLHQMADSSSFGMGVWSKPEDKQKAAAAFAQLQGAMEMLGISESEQRAVWRVLAAIYHLGAAGACKVGRKQFMRFEWANYAAEALGCEYEELNTATFKHHLRQIIQQMTFGPSRWGLEDEETSSGLKMTGVDCVEGMASGLYQELFAAVVSLINRSFSSHHLSMASIMVVDSPGFQNPRHQGKDRAATFEELCHNYAHERLQLLFYQRTFVSTLQRYQEEGVPVQFDLPDPSPGTTVAVVDQNPSQVRLPAGGGAQDARGLFWVLDEEVHVEGSSDSVVLERLCAAFEKKGAGTEGSSALRTCEQPLQCEIFHQLGWDPVRYDLTGWLHRAKPNLSALDAPQVLHQSKREELRSLFQARAKLPPVCRAVAGLEGTSQQALQRSRMVRRTFASSLAAVRRKAPCSQIKLQMDALTSMIKRSRLHFIHCLVPNPVVESRSGQESPPPPQPGRDKPGAGGPLALDIPALRVQLAGFHILEALRLHRTGYADHMGLTRFRRQFQVLDAPLLKKLMSTSEGIDERKAVEELLETLDLEKKAVAVGHSQVFLKAGVISRLEKQREKLVSQSIVLFQAACKGFLSRQEFKKLKIRRLAAQCIQKNVAVFLAVKDWPWWQLLGSLQPLLSATIGTEQLRAKEEELTTLRRKLEKSEKLRNELRQNTDLLESKIADLTSDLADERFKGDVACQVLESERAERLQAFREVQELKSKHEQVQKKLGDVNKQLEEAQQKIQLNDLERNPTGGADEWQMRFDCAQMENEFLRKRLQQCEERLDSELTARKELEQKLGELQSAYDGAKKMAHQLKRKCHHLTCDLEDTCVLLENQQSRNHELEKKQKKFDLQLAQALGESVFEKGLREKVTQENTSVRWELGQLQQQLKQKEQEASQLKQQVEMLQDHKRELLGSPSLGENCVAGLKERLWKLESSALEQQKIQSQQENTIKQLEQLRQRFELEIERMKQMHQKDREDQEEELEDVRQSCQKRLHQLEMQLEQEYEEKQMVLHEKQDLEGLIGTLCDQIGHRDFDVEKRLRRDLRRTHALLSDVQLLLGTMEDGKTSVSKEELEKVHSQLEQSEAKCEEALKTQKVLTADLESMHSELENMTRNKSLVDEQLYRLQFEKADLLKRIDEDQDDLNELMQKHKDLIAQSAADIGQIQELQLQLEEAKKEKHKLQEQLQVAQMRIEYLEQSTVDRAIVSRQEAVICDLENKTEFQKVQIKRFEVLVIRLRDSLIKMGEELSQAATSESQQRESSQYYQRRLEELKADMEELVQREAEASRRCMELEKYVEELAAVRQTLQTDLETSIRRIADLQAALEEVASSDSDTESVQTAVDCGSSGRKEMDNVSILSSQPEGSLQSWLSCTLSLATDTMRTPSRQSATSSRILSPRINEEAGDTERTQSALALSRARSTNVHSKTSGDKPVSPHFVRRQKYCHFGDGEVLAVQRKSTERLEPASSPLASRSTNTSPLSREKLPSPSAALSEFVEGLRRKRAQRGQGSTLGLEDWPTLPIYQTTGASTLRRGRAGSDEGNLSLRVGAKSPLEIEGAAGGLLRSTSLKCISSDGVGGTTLLPEKSKTQFSSCESLLESRPSMGRKLSSPTTPRDMLLSPTLRPRRRCLESSVDDAGCPDLGKEPLVFQNRQFAHLMEEPLGSDPFSWKLPSLDYERKTKVDFDDFLPAIRKPQTPTSLAGSAKGGQDGSQRSSIHFETEEANRSFLSGIKTILKKSPEPKEDPAHLSDSSSSSGSIVSFKSADSIKSRPGIPRLAGDGGERTSPERREPGTGRKDDDVASIMKKYLQK

SEQ ID NO: 5064 - protein, 73 aa, Homo sapiens
MDPGSRWRNLPSGPSLKHLTDPSYGIPREQQKAALQELTRAHVESFNYAVHEGLGLAVQRRGLPMWPSLVSNS

SEQ ID NO: 5065 - protein, 583 aa, Homo sapiens
MGGLEKKKYERGSATNYITRNKARKKLQLSLADFRRLCILKGIYPHEPKHKKKVNKGSTAARTFYLIKDIRFLLHEPIVNKFREYKVFVRKLRKAYGKSEWNTVERLKDNKPNYKLDHIIKERYPTFIDALRDLDDALSMCFLFSTFPRTGKCHVQTIQLCRRLTVEFMHYIIAARALRKVFLSIKGIYYQAEVLGQPIVWITPYAFSHDHPTDVDYRVMATFTEFYTTLLGFVNFRLYQLLNLHYPPKLEGQAQAEAKAGEGTYALDSESCMEKLAALSASLARVVVPATEEEAEVDEFPTDGEEDRRKELEAQEKHKKLFEGLKFFLNREVPREALAFIIRSFGGEVSWDKSLCIGATYDVTDSRITHQIVDRPGQQTSVIGRCYVQPQWVFDSVNARLLLPVAEYFSGVQLPPHLSPFVTEKEGDYVPPEKLKLLALQRGEDPGNLNESEEEEEEDDNNEGDGDEEGENEEEEEDAEAGSEKEEEARLAALEEQRMEGKKPRVMAGTLKLEDKQRLAQEEESEAKRLAIMMMKKREKYLYQKIMFGKRRKIREANKLAEKRKAHDEAVRSEKKAKKARPE

SEQ ID NO: 5066 - protein, 1250 aa, Homo sapiens
MEASRRFPEAEALSPEQAAHYLRYVKEAKEATKNGDLEEAFKLFNLAKDIFPNEKVLSRIQKIQEALEELAEQGDDEFTDVCNSGLLLYRELHNQLFEHQKEGIAFLYSLYRDGRKGGILADDMGLGKTVQIIAFLSGMFDASLVNHVLLIMPTNLINTWVKEFIKWTPGMRVKTFHGPSKDERTRNLNRIQQRNGVIITTYQMLINNWQQLSSFRGQEFVWDYVILDEAHKIKTSSTKSAICARAIPASNRLLLTGTPIQNNLQELWSLFDFACQGSLLGTLKTFKMEYENPITRAREKDATPGEKALGFKISENLMAIIKPYFLRRTKEDVQKKKSSNPEARLNEKNPDVDAICEMPSLSRKNDLIIWIRLVPLQEEIYRKFVSLDHIKELLMETRSPLAELGVLKKLCDHPRLLSARACCLLNLGTFSAQDGNEGEDSPDVDHIDQVTDDTLMEESGKMIFLMDLLKRLRDEGHQTLVFSQSRQILNIIERLLKNRHFKTLRIDGTVTHLLEREKRINLFQQNKDYSVFLLTTQVGGVGLTLTAATRVVIFDPSWNPATDAQAVDRVYRIGQKENVVVYRLITCGTVEEKIYRRQVFKDSLIRQTTGEKKNPFRYFSKQELRELFTIEDLQNSVTQLQLQSLHAAQRKSDIKLDEHIAYLQSLGIAGISDHDLMYTCDLSVKEELDVVEESHYIQQRVQKAQFLVEFESQNKEFLMEQQRTRNEGAWLREPVFPSSTKKKCPKLNKPQPQPSPLLSTHHTQEEDISSKMASVVIDDLPKEGEKQDLSSIKVNVTTLQDGKGTGSADSIATLPKGFGSVEELCTNSSLGMEKSFATKNEAVQKETLQEGPKQEALQEDPLESFNYVLSKSTKADIGPNLDQLKDDEILRHCNPWPIISITNESQNAESNVSIIEIADDLSASHSALQDAQASEAKLEEEPSASSPQYACDFNLFLEDSADNRQNFSSQSLEHVEKENSLCGSAPNSRAGFVHSKTCLSWEFSEKDDEPEEVVVKAKIRSKARRIVSDGEDEDDSFKDTSSINPFNTSLFQFSSVKQFDASTPKNDISPPGRFFSSQIPSSVNKSMNSRRSLASRRSLINMVLDHVEDMEERLDDSSEAKGPEDYPEEGVEESSGEASKYTEEDPSGETLSSENKSSWLMTSKPSALAQETSLGAPEPLSGEQLVGSPQDKAAEATNDYETLVKRGKELKECGKIQEALNCLVKALDIKSADPEVMLLTLSLYKQLNNN

SEQ ID NO: 5067 - protein, 214 aa, Homo sapiens
MGAAHSASEEVRELEGKTGFSSDQIEQLHRRFKQLSGDQPTIRKENFNNVPDLELNPIRSKIVRAFFDNRNLRKGPSGLADEINFEDFLTIMSYFRPIDTTMDEEQVELSRKEKLRFLFHMYDSDSDGRITLEEYRNVVEELLSGNPHIEKESARSIADGAMMEAASVCMGQMEPDQVYEGITFEDFLKIWQGIDIETKMHVRFLNMETMALCH

SEQ ID NO: 5068 - protein, 1161 aa, Homo sapiens
MKKFSRMPKSEGGSGGGAAGGGAGGAGAGAGCGSGGSSVGVRVFAVGRHQVTLEESLAEGGFSTVFLVRTHGGIRCALKRMYVNNMPDLNVCKREITIMKELSGHKNIVGYLDCAVNSISDNVWEVLILMEYCRAGQVVNQMNKKLQTGFTEPEVLQIFCDTCEAVARLHQCKTPIIHRDLKVENILLNDGGNYVLCDFGSATNKFLNPQKDGVNVVEEEIKKYTTLSYRAPEMINLYGGKPITTKADIWALGCLLYKLCFFTLPFGESQVAICDGNFTIPDNSRYSRNIHCLIRFMLEPDPEHRPDIFQVSYFAFKFAKKDCPVSNINNSSIPSALPEPMTASEAAARKSQIKARITDTIGPTETSIAPRQRPKANSATTATPSVLTIQSSATPVKVLAPGEFGNHRPKGALRPGNGPEILLGQGPPQQPPQQHRVLQQLQQGDWRLQQLHLQHRHPHQQQQQQQQQQQQQQQQQQQQQQQQQQQHHHHHHHHLLQDAYMQQYQHATQQQQMLQQQFLMHSVYQPQPSASQYPTMMPQYQQAFFQQQMLAQHQPSQQQASPEYLTSPQEFSPALVSYTSSLPAQVGTIMDSSYSANRSVADKEAIANFTNQKNISNPPDMSGWNPFGEDNFSKLTEEELLDREFDLLRSNRLEERASSDKNVDSLSAPHNHPPEDPFGSVPFISHSGSPEKKAEHSSINQENGTANPIKNGKTSPASKDQRTGKKTSVQGQVQKGNDESESDFESDPPSPKSSEEEEQDDEEVLQGEQGDFNDDDTEPENLGHRPLLMDSEDEEEEEKHSSDSDYEQAKAKYSDMSSVYRDRSGSGPTQDLNTILLTSAQLSSDVAVETPKQEFDVFGAVPFFAVRAQQPQQEKNEKNLPQHRFPAAGLEQEEFDVFTKAPFSKKVNVQECHAVGPEAHTIPGYPKSVDVFGSTPFQPFLTSTSKSESNEDLFGLVPFDEITGSQQQKVKQRSLQKLSSRQRRTKQDMSKSNGKRHHGTPTSTKKTLKPTYRTPERARRHKKVGRRDSQSSNEFLTISDSKENISVALTDGKDRGNVLQPEESLLDPFGAKPFHSPDLSWHPPHQGLSDIRADHNTVLPGRPRQNSLHGSFHSADVLKMDDFGAVPFTELVVQSITPHQSQQSQPVELDPFGAAPFPSKQ

SEQ ID NO: 5069 - protein, 628 aa, Homo sapiens
MDSVVFEDVAVDFTLEEWALLDSAQRDLYRDVMLETFQNLASVDDETQFKASGSVSQQDIYGEKIPKESKIATFTRNVSWASVLGKIWDSLSIEDQTTNQGRNLSRNHGLERLCESNDQCGEALSQIPHLNLYKKIPPGVKQYEYNTYGKVFMHRRTSLKSPITVHTGHKPYQCQECGQAYSCRSHLRMHVRTHNGERPYVCKLCGKTFPRTSSLNRHVRIHTAEKTYECKQCGKAFIDFSSLTSHLRSHTGEKPYKCKECGKAFSYSSTFRRHTITHTGEKPYKCKECAEAFSYSSTFRRHMISHTGEKPHKCKECGEAFSYSSAFRRHMITHTGEKPYECKQCGKTFIYLQSFRRHERIHTGEKPYECKQCGKTFIYPQSFRRHERTHGGEKPYECNQCGKAFSHPSSFRGHMRVHTGEKPYECKQCGKTFNWPISLRKHMRTHTREKPYECKQCGKAFSLSACFREHVRMHPEDKSYECKLCGKAFYCHISLQKHMRRHTAEKLYKCKQCGKAFSWPELLQQHVRTHTVEKPYECKECGKVFKWPSSLPIHMRLHTGEKPYQCKHCGKAFNCSSSLRRHVRIHTTEKQYKCNVGHPPANEFMCSASEKSHQERDLIKVVNMVLPL

SEQ ID NO: 5070 - protein, 77 aa, Homo sapiens
MALASVLERPLPVNQRGFFGLGGRADLLDLGPGSLSDGLSLAAPGWGVPEEPGIEMLHGTTTLAFKVWSQPPCQAEY

SEQ ID NO: 5071 - protein, 531 aa, Homo sapiens
MSKPHSEAGTAFIQTQQLHAAMADTFLEHMCRLDIDSPPITARNTGIICTIGPASRSVETLKEMIKSGMNVARLNFSHGTHEYHAETIKNVRTATESFASDPILYRPVAVALDTKGPEIRTGLIKGSGTAEVELKKGATLKITLDNAYMEKCDENILWLDYKNICKVVEVGSKIYVDDGLISLQVKQKGADFLVTEVENGGSLGSKKGVNLPGAAVDLPAVSEKDIQDLKFGVEQDVDMVFASFIRKASDVHEVRKVLGEKGKNIKIISKIENHEGVRRFDEILEASDGIMVARGDLGIEIPAEKVFLAQKMMIGRCNRAGKPVICATQMLESMIKKPRPTRAEGSDVANAVLDGADCIMLSGETAKGDYPLEAVRMQHLIAREAEAAIYHLQLFEELRRLAPITSDPTEATAVGAVEASFKCCSGAIIVLTKSGRSAHQVARYRPRAPIIAVTRNPQTARQAHLYRGIFPVLCKDPVQEAWAEDVDLRVNFAMNVGKARGFFKKGDVVIVLTGWRPGSGFTNTMRVVPVP

SEQ ID NO: 5072 - protein, 371 aa, Homo sapiens
MAAPALRLCHIAFHVPAGQPLARNLQRLFGFQPLASREVDGWRQLALRSGDAVFLVNEGAGSGEPLYGLDPRHAVPSATNLCFDVADAGAATRELAALGCSVPVPPVRVRDAQGAATYAVVSSPAGILSLTLLERAGYRGPFLPGFRPVSSAPGPGWVSRVDHLTLACTPGSSPTLLRWFHDCLGFCHLPLSPGEDPELGLEMTAGFGLGGLRLTALQAQPGSIVPTLVLAESLPGATTRQDQVEQFLARHKGPGLQHVGLYTPNIVEATEGVATAGGQFLAPPGAYYQQPGKERQIRAAGHEPHLLARQGILLDGDKGKFLLQVFTKSLFTEDTFFLELIQRQGATGFGQGNIRALWQSVQEQSARSQEA

SEQ ID NO: 5073 - protein, 220 aa, Homo sapiens
MVKISFQPAVAGIKGDKADKASASAPAPASATEILLTPARLARDNFFRCGVLYEDSLSSQVRTQMELEEDVKIYLDENYERINVPVPQFGGGDPADIIHDFQRGLTAYHDISLDKCYVIELNTTIVLPPRNFWELLMNVKRGTYLPQTYIIQEEMVVTEHVSDKEALGSFIYHLCNGKDTYRLRRRATRRRINKRGAKNCNAIRHFENTFVVETLICGVV

SEQ ID NO: 5074 - protein, 163 aa, Homo sapiens
MTDCEFGYIYRLAQDYLQCVLQIPQPGSGPSKTSRVLQNVAFSVQKEVEKNLKSCLDNVNVVSVDTARTLFNQVMEKEFEDGIINWGRIVTIFAFEGILIKKLLRQQIAPDVDTYKEISYFVAEFIMNNTGEWIRQNGGWGKWHNHTPMLVESVAHKKRKMAL

SEQ ID NO: 5075 - protein, 304 aa, Homo sapiens
MLRGSASSTSMEKAKGKEWTSTEKSREEDQQASNQPNSIALPGTSAKRTKEKMSIKGSKVLCPKKKAEHTDNPRPQKKIPIPPLPSKLPPVNLIHRDILRAWCQQLKLSSKGQKLDAYKRLCAFAYPNQKDFPSTAKEAKIRKSLQKKLKVEKGETSLQSSETHPPEVALPPVGEPPALENSTALLEGVNTVVVTTSAPEALLASWARISARARTPEAVESPQEASGVRWCVVHGKSLPADTDGWVHLQFHAGQAWVPEKQEGRVSALFLLPASNFPPPHLEDNMLCPKCVHRNKVLIKSLQWE

SEQ ID NO: 5076 - protein, 1499 aa, Homo sapiens
MRILANKTRLPHPRRREAPGSPPLSPRGHCPPAPAKPMHPENKLTNHGKTGNGGAQSQHQNVNQGPTCNVGSKGVGAGNHGAKANQISPSNSSLKNPQAGVPPFSSLKGKVKRDRSVSVDSGEQREAGTPSLDSEAKEVAPRSKRRCVLERKQPYSGDEWCSGPDSEEDDKPIGATHNCNVADPAMAAPQLGPGQTTQLPLSESSVPGAPHGPPPGLRPDAPGGGGGGGGVPGKPPSQFVYVFTTHLANTAAEAVLQGRADSILAYHQQNVPRAKLDQAPKVPPTPEPLPLSTPSAGTPQSQPPPLPPPPPPAPGSAPPALPPEGPPEDSSQDLAPNSVGAASTGGGTGGTHPNTPTATTANNPLPPGGDPSSAPGPALLGEAAAPGNGQRSLVGSEGLSKEQLEHRERSLQTLRDIERLLLRSGETEPFLKGPPGGAGEGGPPAQAPPPPQQPPTAPPSGLKKYEEPLQSMISQTQSLGGPPLEHEVPGHPPGGDMGQQMNMMIQRLGQDSLTPEQVAWRKLQEEYYEEKRRKEEQIGLHGSRPLQDMMGMGGMMVRGPPPPYHSKPGDQWPPGMGAQLRGPMDVQDPMQLRGGPPFPGPRFPGNQIQRVPGFGGMQSMPMEVPMNAMQRPVRPGMGWTEDLPPMGGPSNFAQNTMPYPGGQGEAERFMTPRVREELLRHQLLEKRSMGMQRPLGMAGSGMGQSMEMERMMQAHRQMDPAMFPGQMAGGEGLAGTPMGMEFGGGRGLLSPPMGQSGLREVDPPMGPGNLNMNMNVNMNMNMNLNVQMTPQQQMLMSQKMRGPGDLMGPQGLSPEEMARVRAQNSSGVMGGPQKMLMPSQFPNQGQQGFSGGQGPYQAMSQDMGNTQDMFSPDQSSMPMSNVGTTRLSHMPLPPASNPPGTVHSAPNRGLGRRPSDLTISINQMGSPGMGHLKSPTLSQVHSPLVTSPSANLKSPQTPSQMVPLPSANPPGPLKSPQVLGSSLSVRSPTGSPSRLKSPSMAVPSPGWVASPKTAMPSPGVSQNKQPPLNMNSSTTLSNMEQGTLPPSGPRSSSSAPPANPPSGLMNPSLPFTSSPDPTPSQNPLSLMMTQMSKYAMPSSTPLYHNAIKTIATSDDELLPDRPLLPPPPPPQGSGPGISNSQPSQMHLNSAAAQSPMGMNLPGQQPLSHEPPPAMLPSPTPLGSNIPLHPNAQGTGGPPQNSMMMAPGGPDSLNAPCGPVPSSSQMMPFPPRLQQPHGAMAPTGGGGGGPGLQQHYPSGMALPPEDLPNQPPGPMPPQQHLMGKAMAGRMGDAYPPGVLPGVASVLNDPELSEVIRPTPTGIPEFDLSRIIPSEKPSSTLQYFPKSENQPPKAQPPNLHLMNLQNMMAEQTPSRPPNLPGQQGVQRGLNMSMCHPGQMSLLGRTGVPPQQGMVPHGLHQGVMSPPQGLMTQQNFMLMKQRGVGGEVYSQPPHMLSPQGSLMGPPPQQNLMVSHPLRQRSVSLDSQMGYLPAPGGMANLPF

SEQ ID NO: 5077 - protein, 1732 aa, Homo sapiens
MSGEVRLRQLEQFILDGPAQTNGQCFSVETLLDILICLYDECNNSPLRREKNILEYLEWAKPFTSKVKQMRLHREDFEILKVIGRGAFGEVAVVKLKNADKVFAMKILNKWEMLKRAETACFREERDVLVNGDNKWITTLHYAFQDDNNLYLVMDYYVGGDLLTLLSKFEDRLPEDMARFYLAEMVIAIDSVHQLHYVHRDIKPDNILMDMNGHIRLADFGSCLKLMEDGTVQSSVAVGTPDYISPEILQAMEDGKGRYGPECDWWSLGVCMYEMLYGETPFYAESLVETYGKIMNHKERFQFPAQVTDVSENAKDLIRRLICSREHRLGQNGIEDFKKHPFFSGIDWDNIRNCEAPYIPEVSSPTDTSNFDVDDDCLKNSETMPPPTHTAFSGHHLPFVGFTYTSSCVLSDRSCLRVTAGPTSLDLDVNVQRTLDNNLATEAYERRIKRLEQEKLELSRKLQESTQTVQALQYSTVDGPLTASKDLEIKNLKEEIEKLRKQVTESSHLEQQLEEANAVRQELDDAFRQIKAYEKQIKTLQQEREDLNKELVQASERLKNQSKELKDAHCQRKLAMQEFMEINERLTELHTQKQKLARHVRDKEEEVDLVMQKVESLRQELRRTERAKKELEVHTEALAAEASKDRKLREQSEHYSKQLENELEGLKQKQISYSPGVCSIEHQQEITKLKTDLEKKSIFYEEELSKREGIHANEIKNLKKELHDSEGQQLALNKEIMILKDKLEKTRRESQSEREEFESEFKQQYEREKVLLTEENKKLTSELDKLTTLYENLSIHNQQLEEEVKDLADKKESVAHWEAQITEIIQWVSDEKDARGYLQALASKMTEELEALRNSSLGTRATDMPWKMRRFAKLDMSARLELQSALDAEIRAKQAIQEELNKVKASNIITECKLKDSEKKNLELLSEIEQLIKDTEELRSEKGIEHQDSQHSFLAFLNTPTDALDQFERSPSCTPASKGRRTVDSTPLSVHTPTLRKKGCPGSTGFPPKRKTHQFFVKSFTTPTKCHQCTSLMVGLIRQGCSCEVCGFSCHITCVNKAPTTCPVPPEQTKGPLGIDPQKGIGTAYEGHVRIPKPAGVKKGWQRALAIVCDFKLFLYDIAEGKASQPSVVISQVIDMRDEEFSVSSVLASDVIHASRKDIPCIFRVTASQLSASNNKCSILMLADTENEKNKWVGVLSELHKILKKNKFRDRSVYVPKEAYDSTLPLIKTTQAAAIIDHERIALGNEEGLFVVHVTKDEIIRVGDNKKIHQIELIPNDQLVAVISGRNRHVRLFPMSALDGRETDFYKLSETKGCQTVTSGKVRHGALTCLCVAMKRQVLCYELFQSKTRHRKFKEIQVPYNVQWMAIFSEQLCVGFQSGFLRYPLNGEGNPYSMLHSNDHTLSFIAHQPMDAICAVEISSKEYLLCFNSIGIYTDCQGRRSRQQELMWPANPSSCCYNAPYLSVYSENAVDIFDVNSMEWIQTLPLKKVRPLNNEGSLNLLGLETIRLIYFKNKMAEGDELVVPETSDNSRKQMVRNINNKRRYSFRVPEEERMQQRREMLRDPEMRNKLISNPTNFNHIAHMGPGDGIQILKDLPMNPRPQESRTVFSGSVSIPSITKSRPEPGRSMSASSGLSARSSAQNGSALKREFSGGSYSAKRQPMPSPSEGSLSSGGMDQGSDAPARDFDGEDSDSPRHSTASNSSNLSSPPSPASPRKTKSLSLESTDRGSWDP

SEQ ID NO: 5078 - protein, 212 aa, Homo sapiens
MKPPSSIQTSEFDSSDEEPIEDEQTPIHISWLSLSRVNCSQFLGLCALPGCKFKDVRRNVQKDTEELKSCGIQDIFVFCTRGELSKYRVPNLLDLYQQCGIITHHHPIADGGTPDIASCCEIMEELTTCLKNYRKTLIHCYGGLGRSCLVAACLLLYLSDTISPEQAIDSLRDLRGSGAIQTIKQYNYLHEFRDKLAAHLSSRDSQSRSVSR

SEQ ID NO: 5079 - protein, 532 aa, Homo sapiens
MMFQDSVAFEDVAVSFTQEEWALLDPSQKNLYRDVMQETFKNLTSVGKTWKVQNIEDEYKNPRRNLSLMREKLCESKESHHCGESFNQIADDMLNRKTLPGITPCESSVCGEVGTGHSSLNTHIRADTGHKSSEYQEYGENPYRNKECKKAFSYLDSFQSHDKACTKEKPYDGKECTETFISHSCIQRHRVMHSGDGPYKCKFCGKAFYFLNLCLIHERIHTGVKPYKCKQCGKAFTRSTTLPVHERTHTGVNADECKECGNAFSFPSEIRRHKRSHTGEKPYECKQCGKVFISFSSIQYHKMTHTGEKPYECKQCGKAFRCGSHLQKHGRTHTGEKPYECRQCGKAFRCTSDLQRHEKTHTEDKPYGCKQCGKGFRCASQLQIHERTHSGEKPHECKECGKVFKYFSSLRIHERTHTGEKPHECKQCGKAFRYFSSLHIHERTHTGDKPYECKVCGKAFTCSSSIRYHERTHTGEKPYECKHCGKAFISNYIRYHERTHTGEKPYQCKQCGKAFIRASSCREHERTHTINR

SEQ ID NO: 5080 - protein, 2342 aa, Homo sapiens
MDGVSSEANEENDNIERPVRRRHSSILKPPRSPLQDLRGGNERVQESNALRNKKNSRRVSFADTIKVFQTESHMKIVRKSEMEGCSAMVPSQLQLLPPGFKRFSCLSLPETETGENLLLIQNKKLEDNYCEITGMNTLLSAPIHTQMQQKEFSIIEHTRERKHANDQTVIFSDENQMDLTSSHTVMITKGLLDNPISEKSTKIDTTSFLANLKLHTEDSRMKKEVNFSVDQNTSSENKIDFNDFIKRLKTGKCSAFPDVPDKENFEIPIYSKEPNSASSTHQMHVSLKEDENNSNITRLFREKDDGMNFTQCHTANIQTLIPTSSETNSRESKGNDITIYGNDFMDLTFNHTLQILPATGNFSEIENQTQNAMDVTTGYGTKASGNKTVFKSKQNTAFQDLSINSADKIHITRSHIMGAETHIVSQTCNQDARILAMTPESIYSNPSIQGCKTVFYSSCNDAMEMTKCLSNMREEKNLLKHDSNYAKMYCNPDAMSSLTEKTIYSGEENMDITKSHTVAIDNQIFKQDQSNVQIAAAPTPEKEMMLQNLMTTSEDGKMNVNCNSVPHVSKERIQQSLSNPLSISLTDRKTELLSGENMDLTESHTSNLGSQVPLAAYNLAPESTSESHSQSKSSSDECEEITKSRNEPFQRSDIIAKNSLTDTWNKDKDWVLKILPYLDKDSPQSADCNQEIATSHNIVYCGGVLDKQITNRNTVSWEQSLFSTTKPLFSSGQFSMKNHDTAISSHTVKSVLGQNSKLAEPLRKSLSNPTPDYCHDKMIICSEEEQNMDLTKSHTVVIGFGPSELQELGKTNLEHTTGQLTTMNRQIAVKVEKCGKSPIEKSGVLKSNCIMDVLEDESVQKPKFPKEKQNVKIWGRKSVGGPKIDKTIVFSEDDKNDMDITKSYTIEINHRPLLEKRDCHLVPLAGTSETILYTCRQDDMEITRSHTTALECKTVSPDEITTRPMDKTVVFVDNHVELEMTESHTVFIDYQEKERTDRPNFELSQRKSLGTPTVICTPTEESVFFPGNGESDRLVANDSQLTPLEEWSNNRGPVEVADNMELSKSATCKNIKDVQSPGFLNEPLSSKSQRRKSLKLKNDKTIVFSENHKNDMDITQSCMVEIDNESALEDKEDFHLAGASKTILYSCGQDDMEITRSHTTALECKTLLPNEIAIRPMDKTVLFTDNYSDLEVTDSHTVFIDCQATEKILEENPKFGIGKGKNLGVSFPKDNSCVQEIAEKQALAVGNKIVLHTEQKQQLFAATNRTTNEIIKFHSAAMDEKVIGKVVDQACTLEKAQVESCQLNNRDRRNVDFTSSHATAVCGSSDNYSCLPNVISCTDNLEGSAMLLCDKDEEKANYCPVQNDLAYANDFASEYYLESEGQPLSAPCPLLEKEEVIQTSTKGQLDCVITLHKDQDLIKDPRNLLANQTLVYSQDLGEMTKLNSKRVSFKLPKDQMKVYVDDIYVIPQPHFSTDQPPLPKKGQSSINKEEVILSKAGNKSLNIIENSSAPICENKPKILNSEEWFAAACKKELKENIQTTNYNTALDFHSNSDVTKQVIQTHVNAGEAPDPVITSNVPCFHSIKPNLNNLNGKTGEFLAFQTVHLPPLPEQLLELGNKAHNDMHIVQATEIHNINIISSNAKDSRDEENKKSHNGAETTSLPPKTVFKDKVRRCSLGIFLPRLPNKRNCSVTGIDDLEQIPADTTDINHLETQPVSSKDSGIGSVAGKLNLSPSQYINEENLPVYPDEINSSDSINIETEEKALIETYQKEISPYENKMGKTCNSQKRTWVQEEEDIHKEKKIRKNEIKFSDTTQDREIFDHHTEEDIDKSANSVLIKNLSRTPSSCSSSLDSIKADGTSLDFSTYRSSQMESQFLRDTICEESLREKLQDGRITIREFFILLQVHILIQKPRQSNLPGNFTVNTPPTPEDLMLSQYVYRPKIQIYREDCEARRQKIEELKLSASNQDKLLVDINKNLWEKMRHCSDKELKAFGIYLNKIKSCFTKMTKVFTHQGKVALYGKLVQSAQNEREKLQIKIDEMDKILKKIDNCLTEMETETKNLEDEEKNNPVEEWDSEMRAAEKELEQLKTEEEELQRNLLELEVQKEQTLAQIDFMQKQRNRTEELLDQLSLSEWDVVEWSDDQAVFTFVYDTIQLTITFEESVVGFPFLDKRYRKIVDVNFQSLLDEDQAPPSSLLVHKLIFQYVEEKESWKKTCTTQHQLPKMLEEFSLVVHHCRLLGEEIEYLKRWGPNYNLMNIDINNNELRLLFSSSAAFAKFEITLFLSAYYPSVPLPSTIQNHVGNTSQDDIATILSKVPLENNYLKNVVKQIYQDLFQDCHFYH

SEQ ID NO: 5081 - protein, 756 aa, Homo sapiens
MDSGRDFLTLHGLQDDEDLQALLKGSQLLKVKSSSWRRERFYKLQEDCKTIWQESRKVMRTPESQLFSIEDIQEVRMGHRTEGLEKFARDVPEDRCFSIVFKDQRNTLDLIAPSPADAQHWVLGLHKIIHHSGSMDQRQKLQHWIHSCLRKADKNKDNKMSFKELQNFLKELNIQVDDSYARKIFRECDHSQTDSLEDEEIEAFYKMLTQRVEIDRTFAEAAGSGETLSVDQLVTFLQHQQREEAAGPALALSLIERYEPSETAKAQRQMTKDGFLMYLLSADGSAFSLAHRRVYQDMGQPLSHYLVSSSHNTYLLEDQLAGPSSTEAYIRALCKGCRCLELDCWDGPNQEPIIYHGYTFTSKILFCDVLRAIRDYAFKASPYPVILSLENHCTLEQQRVMARHLHAILGPMLLNRPLDGVTNSLPSPEQLKGKILLKGKKLGGLLPPGGEGGPEATVVSDEDEAAEMEDEAVRSRVQHKPKEDKLRLAQELSDMVIYCKSVHFGGFSSPGTPGQAFYEMASFSENRALRLLQESGNGFVRHNVGHLSRIYPAGWRTDSSNYSPVEMWNGGCQIVALNFQTPGPEMDVYQGRFQDNGACGYVLKPAFLRDPNGTFNPRALAQGPWWARKRLNIRVISGQQLPKVNKNKNSIVDPKVTVEIHGVSRDVASRQTAVITNNGFNPWWDTEFAFEVVVPDLALIRFLVEDYDASSKNDFIGQSTIPLNSLKQGYRHVHLMSKNGDQHPSATLFVKISLQD

SEQ ID NO: 5082 - protein, 161 aa, Homo sapiens
MASQNRDPAATSVAAARKGAEPSGGAARGPVGKRLQQELMTLMMSGDKGISAFPESDNLFKWVGTIHGAAGTAVGSIRTSSTVCLLSGPRETQDSSKPLVWGLGWDMRLLLELTLQLFLQMPEPNIDSPLNTHAAELWKNPTAFKKYLQETYSKQVTSQEP

SEQ ID NO: 5083 - protein, 316 aa, Homo sapiens
MSVGFIGAGQLAFALAKGFTAAGVLAAHKIMASSPDMDLATVSALRKMGVKLTPHNKETVQHSDVLFLAVKPHIIPFILDEIGADIEDRHIVVSCAAGVTISSIEKKLSAFRPAPRVIRCMTNTPVVVREGATVYATGTHAQVEDGRLMEQLLSSVGFCTEVEEDLIDAVTGLSGSGPAYAFTALDALADGGVKMGLPRRLAVRLGAQALLGAAKMLLHSEQHPGQLKDNVSSPGGATIHALHVLESGGFRSLLINAVEASCIRTRELQSMADQEQVSPAAIKKTILDKDHLPLELGSPEGLHPLLLQYQLARAPS

SEQ ID NO: 5084 - protein, 238 aa, Homo sapiens
MSSGYSSLEEDAEDFFFTARTSFFRRAPQGKPRSGQQDVEKEKETHSYLSKEEIKEKVHKYNLAVTDKLKMTLNSNGIYTGFIKVQMELCKPPQTSPNSGKLSPSSNGCMNTLHISSTNTVGEVIEALLKKFLVTESPAKFALYKRCHREDQVYACKLSDREHPLYLRLVAGPRTDTLSFVLREHEIGEWEAFSLPELQNFLRILDKEEDEQLQNLKRRYTAYRQKLEEALREVWKPD

SEQ ID NO: 5085 - protein, 184 aa, Homo sapiens
MCGTGGTDSKTRRPPHRASFLKRLESKPLKMADDLDFETGDAGASATFPMQCSALRKNGFVVLKGRPCKIVEMSTSKTGKHGHAKVHLVGIDIFTGKKYEDICPSTHNMDVPNIKRNDFQLIGIQDGYLSLLQDSGEVREDLRLPEGDLGKEIEQKYDCGEEILITVLSAMTEEAAVAIKAMAK

SEQ ID NO: 5086 - protein, 1037 aa, Homo sapiens
MDRMASSMKQVPNPLPKVLSRRGVGAGLEAAERESFERTQTVSINKAINTQEVAVKEKHARTCILGTHHEKGAQTFWSVVNRLPLSSNAVLCWKFCHVFHKLLRDGHPNVLKDSLRYRNELSDMSRMWGHLSEGYGQLCSIYLKLLRTKMEYHTKNPRFPGNLQMSDRQLDEAGESDVNNFFQLTVEMFDYLECELNLFQTVFNSLDMSRSVSVTAAGQCRLAPLIQVILDCSHLYDYTVKLLFKLHSCLPADTLQGHRDRFMEQFTKLKDLFYRSSNLQYFKRLIQIPQLPENPPNFLRASALSEHISPVVVIPAEASSPDSEPVLEKDDLMDMDASQQNLFDNKFDDIFGSSFSSDPFNFNSQNGVNKDEKDHLIERLYREISGLKAQLENMKTESQRVVLQLKGHVSELEADLAEQQHLRQQAADDCEFLRAELDELRRQREDTEKAQRSLSEIERKAQANEQRYSKLKEKYSELVQNHADLLRKNAEVTKQVSMARQAQVDLEREKKELEDSLERISDQGQRKTQEQLEVLESLKQELATSQRELQVLQGSLETSAQSEANWAAEFAELEKERDSLVSGAAHREEELSALRKELQDTQLKLASTEESMCQLAKDQRKMLLVGSRKAAEQVIQDALNQLEEPPLISCAGSADHLLSTVTSISSCIEQLEKSWSQYLACPEDISGLLHSITLLAHLTSDAIAHGATTCLRAPPEPADSLTEACKQYGRETLAYLASLEEEGSLENADSTAMRNCLSKIKAIGEELLPRGLDIKQEELGDLVDKEMAATSAAIETATARIEEMLSKSRAGDTGVKLEVNERILGCCTSLMQAIQVLIVASKDLQREIVESGRGTASPKEFYAKNSRWTEGLISASKAVGWGATVMVDAADLVVQGRGKFEELMVCSHEIAASTAQLVAASKVKADKDSPNLAQLQQASRGVNQATAGVVASTISGKSQIEETDNMDFSSMTLTQIKRQEMDSQVRVLELENELQKERQKLGELRKKHYELAGVAEGWEEGTEASPPTLQEVVTEKE

SEQ ID NO: 5087 - protein, 1565 aa, Homo sapiens
MLSWRLQTGPEKAELQELNARLYDYVCRVRELERENLLLEEELRGRRGREGLWAEGQARCAEEARSLRQQLDELSWATALAEGERDALRRELRELQRLDAEERAARGRLDAELGAQQRELQEALGARAALEALLGRLQAERRGLDAAHERDVRELRARAASLTMHFRARATGPAAPPPRLREVHDSYALLVAESWRETVQLYEDEVRELEEALRRGQESRLQAEEETRLCAQEAEALRREALGLEQLRARLEDALLRMREEYGIQAEERQRVIDCLEDEKATLTLAMADWLRDYQDLLQVKTGLSLEVATYRALLEGESNPEIVIWAEHVENMPSEFRNKSYHYTDSLLQRENERNLFSRQKAPLASFNHSSALYSNLSGHRGSQTGTSIGGDARRGFLGSGYSSSATTQQENSYGKAVSSQTNVRTFSPTYGLLRNTEAQVKTFPDRPKAGDTREVPVYIGEDSTIARESYRDRRDKVAAGASESTRSNERTVILGKKTEVKATREQERNRPETIRTKPEEKMFDSKEKASEERNLRWEELTKLDKEARQRESQQMKEKAKEKDSPKEKSVREREVPISLEVSQDRRAEVSPKGLQTPVKDAGGGTGREAEARELRFRLGTSDATGSLQGDSMTETVAENIVTSILKQFTQSPETEASADSFPDTKVTYVDRKELPGERKTKTEIVVESKLTEDVDVSDEAGLDYLLSKDIKEVGLKGKSAEQMIGDIINLGLKGREGRAKVVNVEIVEEPVSYVSGEKPEEFSVPFKVEEVEDVSPGPWGLVKEEEGYGESDVTFSVNQHRRTKQPQENTTHVEEVTEAGDSEGEQSYFVSTPDEHPGGHDRDDGSVYGQIHIEEESTIRYSWQDEIVQGTRRRTQKDGAVGEKVVKPLDVPAPSLEGDLGSTHWKEQARSGEFHAEPTVIEKEIKIPHEFHTSMKGISSKEPRQQLVEVIGQLEETLPERMREELSALTREGQGGPGSVSVDVKKVQGAGGSSVTLVAEVNVSQTVDADRLDLEELSKDEASEMEKAVESVVRESLSRQRSPAPGSPDEEGGAEAPAAGIRFRRWATRELYIPSGESEVAGGASHSSGQRTPQGPVSATVEVSSPTGFAQSQVLEDVSQAARHIKLGPSEVWRTERMSYEGPTAEVVEVSAGGDLSQAASPTGASRSVRHVTLGPGQSPLSREVIFLGPAPACPEAWGSPEPGPAESSADMDGSGRHSTFGCRQFHAEKEIIFQGPISAAGKVGDYFATEESVGTQTSVRQLQLGPKEGFSGQIQFTAPLSDKVELGVIGDSVHMEGLPGSSTSIRHISIGPQRHQTTQQIVYHGLVPQLGESGDSESTVHGEGSADVHQATHSHTSGRQTVMTEKSTFQSVVSESPQEDSAEDTSGAEMTSGVSRSFRHIRLGPTETETSEHIAIRGPVSRTFVLAGSADSPELGKLADSSRTLRHIAPGPKETSFTFQMDVSNVEAIRSRTQEAGALGVSDRGSWRDADSRNDQAVGVSFKASAGEGDQAHREQGKEQAMFDKKVQLQRMVDQRSVISDEKKVALLYLDNEEEENDGHWF

SEQ ID NO: 5088 - protein, 154 aa, Homo sapiens
MADDLDFETGDAGASATFPMQCSALRKNGFVVLKGRPCKIVEMSTSKTGKHGHAKVHLVGIDIFTGKKYEDICPSTHNMDVPNIKRNDFQLIGIQDGYLSLLQDSGEVREDLRLPEGDLGKEIEQKYDCGEEILITVLSAMTEEAAVAIKAMAK

SEQ ID NO: 5089 - protein, 451 aa, Homo sapiens [sequence omitted]

SEQ ID NO: 5090 - protein, 140 aa, Homo sapiens
MGPRRRSRKPEAPRRRSPSPTPTPGPSRRGPSLGASSHQHSRRRQGWLKEIRKLQKSTHLLIRKLPFSRLAREICVKFTRGVDFNWQAQALLALQEAAEAFLVHLFEDAYLLTLHAGRVTLFPKDVQLARRIRGLEEGLG

SEQ ID NO: 5091 - protein, 327 aa, Homo sapiens
MTVVSVPQREPLVLGGRLAPLGFSSRGYFGALPMVTTAPPPLPRIPDPRALPPTLFLPHFLGGDGPCLTPQPRAPAALPNRSLAVAGGTPRAAPKKRRKKKVRASPAGQLPSRFHQYQQHRPSLEGGRSPATGPSGAQEVPGPAAALAPSPAAAAGTEGASPDLAPLRPAAPGQTPLRKEVLKSKMGKSEKIALPHGQLVHGIHLYEQPKINRQKSKYNLPLTKITSAKRNENNFWQDSVSSDRIQKQEKKPFKNTENIKNSHLKKSAFLTEVSQKENYAGAKFSDPPSPSVLPKPPSHWMGSTVENSNQNRELMAVHLKTLLKVQT

SEQ ID NO: 5092 - protein, 590 aa, Homo sapiens
MPRRSRRGIWRIPVDEIDRPGSFAWHMNRSIVLLLKVLAQLRDHSTLLKVSSMLQRTPDQGKKYLRDADRQVLAQRAFILTVKVLEDTLSELAEGSERPGPKVCGLPGARMTTDVSHKASPEDGQEGLPQPKKPPLADGSGPGPEPGGKVGLLNHRPVAMDAGDSADQSGERKDKESPRAGPTEPMDTSEATVCHSDLERTPPLLPGRPARDRGPESRPTELSLEELSISARQQPTPLTPAQPAPAPAPATTTGTRAGGHPEEPLSRLSRKRKLLEDTESGKTLLLDAYRVWQQGQKGVAYDLGRVERIMSETYMLIKQVDEEAALEQAVKFCQVHLGAAAQRQASGDTPTTPKHPKDSRENFFPVTVVPTAPDPVPADSVQRPSDAHTKPRPALAAATTIITCPPSASASTLDQSKDPGPPRPHRPEATPSMASLGPEGKLRPEPRRDGEAQEAASETQPLSSPPTAASSKAPSSGSAQPPEGHPGKPEPSRAKSRPLPNMPKLVIPSAATKFPPEITVTPPTPTLLSPKGSISEETKQKLKSAILSAQSAANVRKESLCQPALEVLETSSQESSLESETDEDDDYMDI

SEQ ID NO: 5093 - protein, 166 aa, Homo sapiens
MLLEEVRAGDRLSGAAARGDVQEVRRLLHRELVHPDALNRFGKTALQVMMFGSTAIALELLKQGASPNVQDTSGTSPVHDAARTGFLDTLKVLVEHGADVNVPDGTGALPIHLAVQEGHTAVVSFLAAESDLHRRDARGLTPLELALQRGAQDLVDILQGHMVAPL

SEQ ID NO: 5094 - protein, 1241 aa, Homo sapiens
MEPIYPFARPQMNTRFPSSRMVPFHFPPSKCALWNPTPTGDFIYLHLSYYRNPKLVVTEKTIRLAYRHAKQNKKNSSCFLLGSLTADEDEEGVTLTVDRFDPGREVPECLEITPTASLPGDFLIPCKVHTQELCSREMIVHSVDDFSSALKALQCHICSKDSLDCALARNLSSNLNISQVQGTYKYGYLTMDETRKLLLLLESDPKVYSLPLVGIWLSGITHIYSPQVWACCLRYIFNSSVQERVFSESGNFIIVLYSMTHKEPEFYECFPCDGKIPDFRFQLLTSKETLHLFKNVEPPDKNPIRCELSAESQNAETEFFSKASKNFSIKRSSQKLSSGKMPIHDHDSGVEDEDFSPRPIPSPHPVSQKISKIQPSVPELSLVLDGNFIESNPLPTPLEMVNNENPPLINHLEHLKPLQPQLYDEKHSPEVEAGEPSLRGIPNQLNQDKPALLRHCKVRQPPAYKKGNPHTRNSIKPSSHNGPSHDIFEKLQTVSAGNVQNEEYPIRPSTLNSRQSSLAPQSQPHDFVFSPHNSGRPMELQIPTPPLPSYCSTNVCRCCQHHSHIQYSPLNSWQGANTVGSIQDVQSEALQKHSLFHPSGCPALYCNAFCSSSSPIALRPQGDMGSCSPHSNIEPSPVARPPSHMDLCNPQPCTVCMHTPKTESDNGMMGLSPDAYRFLTEQDRQLRLLQAQIQRLLEAQSLMPCSPKTTAVEDTVQAGRQMELVSVEAQSSPGLHMRKGVSIAVSTGASLFWNAAGEDQEPDSQMKQDDTKISSEDMNFSVDINNEVTSLPGSASSLKAVDIPSFEESNIAVEEEFNQPLSVSNSSSLVVRKEPDVPVFFPSGQLAESVSMCLQTGPTGGASNNSETSEEPKIEHVMQPLLHQPSDNQKIYQDLLGQVNHLLNSSSKETEQPSTKAVIISHECTRTQNVYHTKKKTHHSRLVDKDCVLNATLKQLRSLGVKIDSPTKVKKNAHNVDHASVLACISPEAVISGLNCMSFANVGMSGLSPNGVDLSMEANAIALKYLNENQLSQLSVTRSNQNNCDPFSLLHINTDRSTVGLSLISPNNMSFATKKYMKRYGLLQSSDNSEDEEEPPDNADSKSEYLLNQNLRSIPEQLGGQKEPSKNDHEIINCSNCESVGTNADTPVLRNITNEVLQTKAKQQLTEKPAFLVKNLKPSPAVNLRTGKAEFTQHPEKENEGDITIFPESLQPSETLKQMNSMNSVGTFLDVKRLRQLPKLF

SEQ ID NO: 5095 - protein, 338 aa, Homo sapiens
MTTTLVSATIFDLSEVLCKGNKMLNYSAPSAGGCLLDRKAVGTPAGGGFPRRHSVTLPSSKFHQNQLLSSLKGEPAPALSSRDSRFRDRSFSEGGERLLPTQKQPGGGQVNSSRYKTELCRPFEENGACKYGDKCQFAHGIHELRSLTRHPKYKTELCRTFHTIGFCPYGPRCHFIHNAEERRALAGARDLSADRPRLQHSFSFAGFPSAAATAAATGLLDSPTSITPPPILSADDLLGSPTLPDGTNNPFAFSSQELASLFAPSMGLPGGGSPTTFLFRPMSESPHMFDSPPSPQDSLSDQEGYLSSSSSSHSGSDSPTLDNSRRLPIFSRLSISDD

SEQ ID NO: 5096 - protein, 836 aa, Homo sapiens
MKPSPAGTAKELEPPAPARGEQRTAEPEGRWREKGEADTERQRTRERQEATLAGLAELEYLRQRQELLVRGALRGAGGAGAAAPRAGELLGEAAQRSRLEEKFLEENILLLRKQLNCLRRRDAGLLNQLQELDKQISDLRLDVEKTSEEHLETDSRPSSGFYELSDGASGSLSNSSNSVFSECLSSCHSSTCFCSPLEATLSLSDGCPKSADLIGLLEYKEGHCEDQASGAVCRSLSTPQFNSLDVIADVNPKYQCDLVSKNGNDVYRYPSPLHAVAVQSPMFLLCLTGNPLREEDRLGNHASDICGGSELDAVKTDSSLPSPSSLWSASHPSSSKKMDGYILSLVQKKTHPVRTNKPRTSVNADPTKGLLRNGSVCVRAPGGVSQGNSVNLKNSKQACLPSGGIPSLNNGTFSPPKQWSKESKAEQAESKRVPLPEGCPSGAASDLQSKHLPKTAKPASQEHARCSAIGTGESPKESAQLSGASPKESPSRGPAPPQENKVVQPLKKMSQKNSLQGVPPATPPLLSTAFPVEERPALDFKSEGSSQSLEEAHLVKAQFIPGQQPSVRLHRGHRNMGVVKNSSLKHRGPALQGLENGLPTVREKTRAGSKKCRFPDDLDTNKKLKKASSKGRKSGGGPEAGVPGRPAGGGHRAGSRAHGHGREAVVAKPKHKRTDYRRWKSSAEISYEEALRRARRGRRENVGLYPAPVPLPYASPYAYVASDSEYSAECESLFHSTVVDTSEDEQSNYTTNCFGDSESSVSEGEFVGESTTTSDSEESGGLIWSQFVQTLPIQTVTAPDLHNHPAKTFVKIKASHNLKKKILRFRSGSLKLMTTV

SEQ ID NO: 5097 - protein, 562 aa, Homo sapiens
MNPLFGPNLFLLQQEQQGLAGPLGDSLGGDHFAGGGDLPPAPLSPAGPAAYSPPGPGPAPPAAMALRNDLGSNINVLKTLNLRFRCFLAKVHELERRNRLLEKQLQQALEEGKQGRRGLGRRDQAVQTGFVSPIRPLGLQLGARPAAVCSPSARVLGSPARSPAGPLAPSAASLSSSSTSTSTTYSSSARFMPGTIWSFSHARRLGPGLEPTLVQGPGLSWVHPDGVGVQIDTITPEIRALYNVLAKVKRERDEYKRRWEEEYTVRIQLQDRVNELQEEAQEADACQEELALKVEQLKAELVVFKGLMSNNLSELDTKIQEKAMKVDMDICRRIDITAKLCDVAQQRNCEDMIQMFQKKLVPSMGGRKRERKAAVEEDTSLSESEGPRQPDGDEEESTALSINEEMQRMLNQLREYDFEDDCDSLTWEETEETLLLWEDFSGYAMAAAEAQGEQEDSLEKVIKDTESLFKTREKEYQETIDQIELELATAKNDMNRHLHEYMEMCSMKRGLDVQMETCRRLITQSGDRKSPAFTAVPLSDPPPPPSEAEDSDRDVSSDSSMR

SEQ ID NO: 5098 - protein, 231 aa, Homo sapiens
MAGKKVLIVYAHQEPKSFNGSLKNVAVDELSRQGCTVTVSDLYAMNLEPRATDKDITGTLSNPEVFNYGVETHEAYKQRSLASDITDEQKKVREADLVIFQFPLYWFSVPAILKGWMDRVLCQGFAFDIPGFYDSGLLQGKLALLSVTTGGTAEMYTKTGVNGDSRYFLWPLQHGTLHFCGFKVLAPQISFAPEIASEEERKGMVAAWSQRLQTIWKEEPIPCTAHWHFGQ

SEQ ID NO: 5099 - protein, 466 aa, Homo sapiens
MSEREVSTAPAGTDMPAAKKQKLSSDENSNPDLSGDENDDAVSIESGTNTERPDTPTNTPNAPGRKSWGKGKWKSKKCKYSFKCVNSLKEDHNQPLFGVQFNWHSKEGDPLVFATVGSNRVTLYECHSQGEIRLLQSYVDADADENFYTCAWTYDSNTSHPLLAVAGSRGIIRIINPITMQCIKHYVGHGNAINELKFHPRDPNLLLSVSKDHALRLWNIQTDTLVAIFGGVEGHRDEVLSADYDLLGEKIMSCGMDHSLKLWRINSKRMMNAIKESYDYNPNKTNRPFISQKIHFPDFSTRDIHRNYVDCVRWLGDLILSKSGRAILHSHQQCMRDPVSPNLRQHLSCENAIVCWKPGKMEDDIDKIKPSESNVTILGRFDYSQCDIWYMRFSMDFWQKMLALGNQVGKLYVWDLEVEDPHKAKCTTLTHHKCGAAIRQTSFSRDSSILIAVCDDASIWRWDRLR

SEQ ID NO: 5100 - protein, 1723 aa, Homo sapiens
MREKEQEREEQLMEDKKRKKEDKKKKEATQKVTEQKTKVPEVTKPSLSQPTAASPIGSSPSPPVNGGNNAKRVAVPNGQPPSAARYMPREVPPRFRCQQDHKVLLKRGQPPPPSCMLLGGGAGPPPCTAPGANPNNAQVTGALLQSESGTAPDSTLGGAAASNYANSTWGSGASSNNGTSPNPIHIWDKVIVDGSDMEEWPCIASKDTESSSENTTDNNSASNPGSEKSTLPGSTTSNKGKGSQCQSASSGNECNLGVWKSDPKAKSVQSSNSTTENNNGLGNWRNVSGQDRIGPGSGFSNFNPNSNPSAWPALVQEGTSRKGALETDNSNSSAQVSTVGQTSREQQSKMENAGVNFVVSGREQAQIHNTDGPKNGNTNSLNLSSPNPMENKGMPFGMGLGNTSRSTDAPSQSTGDRKTGSVGSWGAARGPSGTDTVSGQSNSGNNGNNGKEREDSWKGASVQKSTGSKNDSWDNNNRSTGGSWNFGPQDSNDNKWGEGNKMTSGVSQGEWKQPTGSDELKIGEWSGPNQPNSSTGAWDNQKGHPLPENQGNAQAPCWGRSSSSTGSEVGGQSTGSNHKAGSSDSHNSGRRSYRPTHPDCQAVLQTLLSRTDLDPRVLSNTGWGQTQIKQDTVWDIEEVPRPEGKSDKGTEGWESAATQTKNSGGWGDAPSQSNQMKSGWGELSASTEWKDPKNTGGWNDYKNNNSSNWGGGRPDEKTPSSWNENPSKDQGWGGGRQPNQGWSSGKNGWGEEVDQTKNSNWESSASKPVSGWGEGGQNEIGTWGNGGNASLASKGGWEDCKRSPAWNETGRQPNSWNKQHQQQQPPQQPPPPQPEASGSWGGPPPPPPGNVRPSNSSWSSGPQPATPKDEEPSGWEEPSPQSISRKMDIDDGTSAWGDPNSYNYKNVNLWDKNSQGGPAPREPNLPTPMTSKSASDSKSMQDGWGESDGPVTGARHPSWEEEEDGGVWNTTGSQGSASSHNSASWGQGGKKQMKCSLKGGNNDSWMNPLAKQFSNMGLLSQTEDNPSSKMDLSVGSLSDKKFDVDKRAMNLGDFNDIMRKDRSGFRPPNSKDMGTTDSGPYFEKGGSHGLFGNSTAQSRGLHTPVQPLNSSPSLRAQVPPQFISPQVSASMLKQFPNSGLSPGLFNVGPQLSPQQIAMLSQLPQIPQFQLACQLLLQQQQQQQLLQNQRKISQAVRQQQEQQLARMVSALQQQQQQQQRQPGMKHSPSHPVGPKPHLDNMVPNALNVGLPDLQTKGPIPGYGSGFSSGGMDYGMVGGKEAGTESRFKQWTSMMEGLPSVATQEANMHKNGAIVAPGKTRGGSPYNQFDIIPGDTLGGHTGPAGDSWLPAKSPPTNKIGSKSSNASWPPEFQPGVPWKGIQNIDPESDPYVTPGSVLGGTATSPIVDTDHQLLRDNTTGSNSSLNTSLPSPGAWPYSASDNSFTNVHSTSAKFPDYKSTWSPDPIGHNPTHLSNKMWKNHISSRNTTPLPRPPPGLTNPKPSSPWSSTAPRSVRGWGTQDSRLASASTWSDGGSVRPSYWLVLHNLTPQIDGSTLRTICMQHGPLLTFHLNLTQGTALIRYSTKQEAAKAQTALHMCVLGNTTILAEFATDDEVSRFLAQAQPPTPAATPSAPAAGWQSLETGQNQSDPVGPALNLFGGSTGLGQWSSSAGGSSGADLAGASLWGPPNYSSSLWGVPTVEDPHRMGSPAPLLPGDLLGGGSDSI

SEQ ID NO: 5101 - protein, 112 aa, Homo sapiens
MAKQPSDVSSECDREGRQLQPAERPPQLRPGAPTSLQTEPQDRSPAPMSCDKSTQTPSPPCQAFNHYLSAMVVILEDIGDLSLCFGFIFTGLDLYGHHHSQDTEQLNHKDFS

SEQ ID NO: 5102 - protein, 216 aa, Homo sapiens
MGVLRVGLCPGLTEEMIQLLRSHRIKTVVDLVSADLEEVAQKCGLSYKAEALRRIQVVHAFDIFQMLDVLQELRGTVAQQVTGSSGTVKVVVVDSVTAVVSPLLGGQQREGLALMMQLARELKTLARDLGMAVVVTNHITRDRDSGRLKPALGRSWSFVPSTRILLDTIEGAGASGGRRMACLAKSSRQPTGFQEMVDIGTWGTSEQSATLQGDQT

SEQ ID NO: 5103 - protein, 431 aa, Homo sapiens
MPQTPPFSAMFDSSGYNRNLYQSAEDSCGGLYYHDNNLLSGSLEALIQHLVPNVDYYPDNQMRKIAPKILQLLTEWTETFPYDFRDERMMRNLKDLAHRIASGEETYRKNVQQMMQCLIRKLAALSQYEEVLAKISSTSTDRLTVLKTKPQSIQRDIITVCNDPYTLAQQLTHIELERLNYIGPEEFVQAFVQKDPLDNDKSCYSERKKTRNLEAYVEWFNRLSYLVATEICMPVKKKHRARMIEYFIDVARECFNIGNFNSLMAIISGMNMSPVSRLKKTWAKVKTAKFDILEHQMDPSSNFYNYRTALRGAAQRSLTAHSSREKIVIPFFSLLIKDIYFLNEGCANRLPNGHVNFEKFWELAKQVSEFMTWKQVECPFERDRKILQYLLTVPVFSEDALYLASYESEGPENHIEKDRWKSLRSSLLGRV

SEQ ID NO: 5104 - protein, 1447 aa, Homo sapiens
MFRAGEASKRPLPGPSPPRVRSVEVARGRAGYGFTLSGQAPCVLSCVMRGSPADFVGLRAGDQILAVNEINVKKASHEDVVKLIGKCSGVLHMVIAEGVGRFESCSSDEEGGLYEGKGWLKPKLDSKALGINRAERVVEEMQSGGIFNMIFENPSLCASNSEPLKLKQRSLSESAATRFDVGHESINNPNPNMLSKEEISKVIHDDSVFSIGLESHDDFALDASILNVAMIVGYLGSIELPSTSSNLESDSLQAIRGCMRRLRAEQKIHSLVTMKIMHDCVQLSTDKAGVVAEYPAEKLAFSAVCPDDRRFFGLVTMQTNDDGSLAQEEEGALRTSCHVFMVDPDLFNHKIHQGIARRFGFECTADPDTNGCLEFPASSLPVLQFISVLYRDMGELIEGMRARAFLDGDADAHQNNSTSSNSDSGIGNFHQEEKSNRVLVVDLGGSSSRHGPGGSAWDGVGGRGAQPWGAPWTGPFCPDPEGSPPFEAAHQTDRFWDLNKHLGPASPVEVPPASLRSSVPPSKRGTVGAGCGFNQRWLPVHVLREWQCGHTSDQDSYTDSTDGWSSINCGTLPPPMSKIPADRYRVEGSFAQPPLNAPKREWSRKAFGMQSIFGPHRNVRKTKEDKKGSKFGRGTGLTQPSQRTSARRSFGRSKRFSITRSLDDLESATVSDGELTGADLKDCVSNNSLSSNASLPSVQSCRRLRERRVASWAVSFERLLQDPVGVRYFSDFLRKEFSEENILFWQACEYFNHVPAHDKKELSYRAREIFSKFLCSKATTPVNIDSQAQLADDVLRAPHPDMFKEQQLQIFNLMKFDSYTRFLKSPLYQECILAEVEGRALPDSQQVPSSPASKHSLGSDHSSVSTPKKLSGKSKSGRSLNEELGDEDSEKKRKGAFFSWSRTRSTGRSQKKREHGDHADDALHANGGLCRRESQGSVSSAGSLDLSEACRTLAPEKDKATKHCCIHLPDGTSCVVAVKAGFSIKDILSGLCERHGINGAAADLFLVGGDKPLVLHQDSSILESRDLRLEKRTLFRLDLVPINRSVGLKAKPTKPVTEVLRPVVARYGLDLSGLLVRLSGEKEPLDLGAPISSLDGQRVVLEEKDPSRGKASADKQKGVPVKQNTAVNSSSRNHSATGEERTLGKSNSIKIKGENGKNARDPRLSKREESIAKIGKKKYQKINLDEAEEFFELISKAQSNRADDQRGLLRKEDLVLPEFLRLPPGSTELTLPTPAAVAKGFSKRSATGNGRESASQPGEQWEPVQESSDSPSTSPGSASSPPGPPGTTPPGQKSPSGPFCTPQSPVSLAQEGTAQIWKRQSQEVEAGGIQTVEDEHVAELTLMGEGDISSPNSTLLPPPSTPQEVPGPSRPGSGTHGSRDLPVNRIIDVDLVTGSAPGRDGGIAGAQAGPGRSQASGGPPTSDLPGLGPVPGEPAKPKTSAHHATFV

SEQ ID NO: 5105 - protein, 536 aa, Homo sapiens
MNASLESLYSACSMQSDTVPLLQNGQHARSQPRASGPPRSIQPQVSPRQRVQRSQPVHILAVRRLQEEDQQFRTSSLPAIPNPFPELCGPGSPPVLTPGSLPPSQAAAKQDVKVFSEDGTSKVVEILADMTARDLCQLLVYKSHCVDDNSWTLVEHHPHLGLERCLEDHELVVQVESTMASESKFLFRKNYAKYEFFKNPMNFFPEQMVTWCQQSNGSQTQLLQNFLNSSSCPEIQGFLHVKELGKKSWKKLYVCLRRSGLYCSTKGTSKEPRHLQLLADLEDSNIFSLIAGRKQYNAPTDHGLCIKPNKVRNETKELRLLCAEDEQTRTCWMTAFRLLKYGMLLYQNYRIPQQRKALLSPFSTPVRSVSENSLVAMDFSGQTGRVIENPAEAQSAALEEGHAWRKRSTRMNILGSQSPLHPSTLSTVIHRTQHWFHGRISREESHRIIKQQGLVDGLFLLRDSQSNPKAFVLTLCHHQKIKNFQILPCEDDGQTFFSLDDGNTKFSDLIQLVDFYQLNKGVLPCKLKHHCIRVAL

SEQ ID NO: 5106 - protein, 454 aa, Homo sapiens
MYNTVWNMEDLDLEYAKTDINCGTDLMFYIEMDPPALPPKPPKPTTVANNGMNNNMSLQDAEWYWGDISREEVNEKLRDTADGTFLVRDASTKMHGDYTLTLRKGGNNKLIKIFHRDGKYGFSDPLTFSSVVELINHYRNESLAQYNPKLDVKLLYPVSKYQQDQVVKEDNIEAVGKKLHEYNTQFQEKSREYDRLYEEYTRTSQEIQMKRTAIEAFNETIKIFEEQCQTQERYSKEYIEKFKREGNEKEIQRIMHNYDKLKSRISEIIDSRRRLEEDLKKQAAEYREIDKRMNSIKPDLIQLRKTRDQYLMWLTQKGVRQKKLNEWLGNENTEDQYSLVEDDEDLPHHDEKTWNVGSSNRNKAENLLRGKRDGTFLVRESSKQGCYACSVVVDGEVKHCVINKTATGYGFAEPYNLYSSLKELVLHYQHTSLVQHNDSLNVTLAYPVYAQQRR

SEQ ID NO: 5107 - protein, 609 aa, Homo sapiens
MAGTLDLDKGCTVEELLRGCIEAFDDSGKVRDPQLVRMFLMMHPWYIPSSQLAAKLLHIYQQSRKDNSNSLQVKTCHLVRYWISAFPAEFDLNPELAEQIKELKALLDQEGNRRHSSLIDIDSVPTYKWKRQVTQRNPVGQKKRKMSLLFDHLEPMELAEHLTYLEYRSFCKILFQDYHSFVTHGCTVDNPVLERFISLFNSVSQWVQLMILSKPTAPQRALVITHFVHVAEKLLQLQNFNTLMAVVGGLSHSSISRLKETHSHVSPETIKLWEGLTELVTATGNYGNYRRRLAACVGFRFPILGVHLKDLVALQLALPDWLDPARTRLNGAKMKQLFSILEELAMVTSLRPPVQANPDLLSLLTVSLDQYQTEDELYQLSLQREPRSKSSPTSPTSCTPPPRPPVLEEWTSAAKPKLDQALVVEHIEKMVESVFRNFDVDGDGHISQEEFQIIRGNFPYLSAFGDLDQNQDGCISREEMVSYFLRSSSVLGGRMGFVHNFQESNSLRPVACRHCKALILGIYKQGLKCRACGVNCHKQCKDRLSVECRRRAQSVSLEGSAPSPSPMHSHHHRAFSFSLPRPGRRGSRPPEIREEEVQTVEDGVFDIHL

SEQ ID NO: 5108 - protein, 251 aa, Homo sapiens
MNPQIRNPMERMYRDTFYDNFENEPILYGRSYTWLCYEVKIKRGRSNLLWDTGVFRGQVYFKPQYHAEMCFLSWFCGNQLPAYKCFQITWFVSWTPCPDCVAKLAEFLSEHPNVTLTISAARLYYYWERDYRRALCRLSQAGARVTIMDYEEFAYCWENFVYNEGQQFMPWYKFDENYAFLHRTLKEILRLRIFSVAFTAAMRSCASWTWFLLCSWTRPRSTGSLGSSPGAPASPGAVPGKCVRSFRRTHT

SEQ ID NO: 5109 - protein, 564 aa, Homo sapiens
MAELDLMAPGPLPRATAQPPAPLSPDSGSPSPDSGSASPVEEEDVGSSEKLGRETEEQDSDSAEQGDPAGEGKEVLCDFCLDDTRRVKAVKSCLTCMVNYCEEHLQPHQVNIKLQSHLLTEPVKDHNWRYCPAHHSPLSAFCCPDQQCICQDCCQEHSGHTIVSLDAARRDKEAELQCTQLDLERKLKLNENAISRLQANQKSVLVSVSEVKAVAEMQFGELLAAVRKAQANVMLFLEEKEQAALSQANGIKAHLEYRSAEMEKSKQELERMAAISNTVQFLEEYCKFKNTEDITFPSVYVGLKDKLSGIRKVITESTVHLIQLLENYKKKLQEFSKEEEYDIRTQVSAVVQRKYWTSKPEPSTREQFLQYAYDITFDPDTAHKYLRLQEENRKVTNTTPWEHPYPDLPSRFLHWRQVLSQQSLYLHRYYFEVEIFGAGTYVGLTCKGIDRKGEERNSCISGNNFSWSLQWNGKEFTAWYSDMETPLKAGPFRRLGVYIDFPGGILSFYGVEYDTMTLVHKFACKFSEPVYAAFWLSKKENAIRIVDLGEEPEKPAPSLVGTAP

SEQ ID NO: 5110 - protein, 218 aa, Homo sapiens
MNCRSEVLEVSVEGRQVEEAMLAVLHTVLLHRSTGKFHYKKEGTYSIGTVGTQDVDCDFIDFTYVRVSSEELDRALRKVVGEFKDALRNSGGDGLGQMSLEFYQKKKSRWPFSDECIPWEVWTVKVHVVALATEQERQICREKVGEKLCEKIINIVEVMNRHEYLPKMPTQSEVDNVFDTGLRDVQPYLYKISFQITDALGTSVTTTMRRLIKDTLAL

SEQ ID NO: 5111 - protein, 444 aa, Homo sapiens
MREIVHIQAGQCGNQIGAKFWEVISDEHGIDPTGTYHGDSDLQLDRISVYYNEATGGKYVPRAILVDLEPGTMDSVRSGPFGQIFRPDNFVFGQSGAGNNWAKGHYTEGAELVDSVLDVVRKEAESCDCLQGFQLTHSLGGGTGSGMGTLLISKIREEYPDRIMNTFSVVPSPKVSDTVVEPYNATLSVHQLVENTDETYCIDNEALYDICFRTLKLTTPTYGDLNHLVSATMSGVTTCLRFPGQLNADLRKLAVNMVPFPRLHFFMPGFAPLTSRGSQQYRALTVPELTQQVFDAKNMMAACDPRHGRYLTVAAVFRGRMSMKEVDEQMLNVQNKNSSYFVEWIPNNVKTAVCDIPPRGLKMAVTFIGNSTAIQELFKRISEQFTAMFRRKAFLHWYTGEGMDEMEFTEAESNMNDLVSEYQQYQDATAEEEEDFGEEAEEEA

SEQ ID NO: 5112 - protein, 317 aa, Homo sapiens
MPREDRATWKSNYFLKIIQLLDDYPKCFIVGADNVGSKQMQQIRMSLRGKAVVLMGKNTMMRKAIRGHLENNPALEKLLPHIRGNVGFVFTKEDLTEIRDMLLANKVPAAARAGAIAPCEVTVPAQNTGLGPEKTSFFQALGITTKISRGTIEILSDVQLIKTGDKVGASEATLLNMLNISPFSFGLVIQQVFDNGSIYNPEVLDITEETLHSRFLEGVRNVASVCLQIGYPTVASVPHSIINGYKRVLALSVETDYTFPLAEKVKAFLADPSAFVAAAPVAAATTAAPAAAAAPAKVEAKEESEESDEDMGFGLFD

SEQ ID NO: 5113 - protein, 188 aa, Homo sapiens
MIIYRDLISHDEMFSDIYKIREIADGLCLEVEGKMVSRTEGNIDDSLIGGNASAEGPEGEGTESTVITGVDIVMNHHLQETSFTKEAYKKYIKDYMKSIKGKLEEQRPERVKPFMTGAAEQIKHILANFKNYQFFIGENMNPDGMVALLDYREDGVTPYMIFFKDGLEMEKCVSTRKWVKINNVKKTF

SEQ ID NO: 5114 - protein, 153 aa, Homo sapiens
MAALRPLVKPKIVKKRTKKFIRHQSDRYVKIKEEFALCTDANPPVYYFLQRNWRKPRGIDNRVRRRFKGQILMPNIGYGSNKKTKHMLPSGFRKFLVHNVKELEVLLMCNKSYCAEIAHNVSSKNRKAIVERAAQLAIRVTNPNARLRSEENE

SEQ ID NO: 5115 - protein, 687 aa, Homo sapiens
GEVGADGVPGFPGLPGREGIAGPQGPKGDRGSRGEKGDPGKDGVGQPGLPGPPGPPGPVVYVSEQDGSVLSVPGPEGRPGFAGFPGPAGPKGNLGSKGERGSPGPKGEKGEPGSIFSPDGGALGPAQKGAKGEPGFRGPPGPYGRPGYKGEIGFPGRPGRPGMNGLKGEKGEPGDASLGFGMRGMPGPPGPPGPPGPPGTPVYDSNVFAESSRPGPPGLPGNQGPPGPKGAKGEVGPPGPPGQFPFDFLQLEAEMKGEKGDRGDAGQKGERGEPGGGGFFGSSLPGPPGPPGPPGPRGYPGIPGPKGESIRGQPGPPGPQGPPGIGYEGRQGPPGPPGPPGPPSFPGPHRQTISVPGPPGPPGPPGPPGTMGASSGQVRLWATRQAMLGQVHEVPEGWLIFVAEQEELYVRVQNGFRKVQLEARTPLPRGTDNEVAALQPPVVQLHDSNPYPRREHPHPTARPWRADDILASPPRLPEPQPYPGAPHHSSYVHLRPARPTSPPAHSHRDFQPVLHLVALNSPLSGGMRGIRGADFQCFQQARAVGLAGTFRAFLSSRLQDLYSIVRRADRAAVPIVNLKDELLFPSWEALFSGSEGPLKPGARIFSFDGKDVLRHPTWPQKSVWHGSDPNGRRLTESYCETWRTEAPSATGQASSLLGGRLLGQSAASCHHAYIVLCIENSFMTASK

SEQ ID NO: 5116 - protein, 516 aa, Homo sapiens
MHSETPKSQVGTLLFRSRSRLTHLSLSRRASESSLSSESSESSDAGLCMDSPSPMDPHMAEQTFEQAIQAASRIIRNEQFAIRRFQSMPVRLLGHSPVLRNITNSQAPDGRRKSEAGSGAASSSGEDKENDGFVFKMPWKPTHPSSTHALAEWASRREAFAQRPSSAPDLMCLSPDRKMEVEELSPLALGRFSLTPAEGDTEEDDGFVDILESDLKDDDAVPPGMESLISAPLVKTLEKEEEKDLVMYSKCQRLFRSPSMPCSVIRPILKRLERPQDRDTPVQNKRRRSVTPPEEQQEAEEPKARVLRSKSLCHDEIENLLDSDHRELIGDYSKAFLLQTVDGKHQDLKYISPETMVALLTGKFSNIVDKFVIVDCRYPYEYEGGHIKTAVNLPLERDAESFLLKSPIAPCSLDKRVILIFHCEFSSERGPRMCRFIRERDRAVNDYPSLYYPEMYILKGGYKEFFPQHPNFCEPQDYRPMNHEAFKDELKTFRLKTRSWAGERSRRELCSRLQDQ

SEQ ID NO: 5117 - protein, 571 aa, Homo sapiens
MGEFKVHRVRFFNYVPSGIRCVAYNNQSNRLAVSRTDGTVEIYNLSANYFQEKFFPGHESRATEALCWAEGQRLFSAGLNGEIMEYDLQALNIKYAMDAFGGPIWSMAASPSGSQLLVGCEDGSVKLFQITPDKIQFERNFDRQKSRILSLSWHPSGTHIAAGSIDYISVFDVKSGSAVHKMIVDRQYMGVSKRKCIVWGVAFLSDGTIISVDSAGKVQFWDSATGTLVKSHLIANADVQSIAVADQEDSFVVGTAEGTVFHFQLVPVTSNSSEKQWVRTKPFQHHTHDVRTVAHSPTALISGGTDTHLVFRPLMEKVEVKNYDAALRKITFPHRCLISCSKKRQLLLFQFAHHLELWRLGSTVATGTVEAMCLLAVSPDGNWLAASGTSAGVHVYNVKQLKLHCTVPAYNFPVTAMAIAPNTNNLVIAHSDQQVFEYSIPDKQYTDWSRTVQKQGFHHLWLQRDTPITHISFHPKRPMHILLHDAYMFCIIDKSLPLPNDKTLLYNPFPPTNESDVIRRRTAHAFKISKIYKPLLFMDLLDERTLVAVERPLDDIIAQLPPPIKKKKFGT

SEQ ID NO: 5118 - protein, 539 aa, Homo sapiens
MEVPQPEPAPGSALSPAGVCGGAQRPGHLPGLLLGSHGLLGSPVRAAASSPVTTLTQTMHDLAGLGSETPKSQVGTLLFRSRSRLTHLSLSRRASESSLSSESSESSDAGLCMDSPSPMDPHMAEQTFEQAIQAASRIIRNEQFAIRRFQSMPDGFVFKMPWKPTHPSSTHALAEWASRREAFAQRPSSAPDLMCLSPDRKMEVEELSPLALGRFSLTPAEGDTEEDDGFVDILESDLKDDDAVPPGMESLISAPLVKTLEKEEEKDLVMYSKCQRLFRSPSMPCSVIRPILKRLERPQDRDTPVQNKRRRSVTPPEEQQEAEEPKARVLRSKSLCHDEIENLLDSDHRELIGDYSKAFLLQTVDGKHQDLKYISPETMVALLTGKFSNIVDKFVIVDCRYPYEYEGGHIKTAVNLPLERDAESFLLKSPIAPCSLDKRVILIFHCEFSSERGPRMCRFIRERDRAVNDYPSLYYPEMYILKGGYKEFFPQHPNFCEPQDYRPMNHEAFKDELKTFRLKTRSWAGERSRRELCSRLQDQ

SEQ ID NO: 5119 - protein, 321 aa, Homo sapiens
MAEIGEDLDKSDVSSLIFLMKDYMGRGKISKEKSFLDLVVELEKLNLVAPDQLDLLEKCLKNIHRIDLKTKIQKYKQSVQGAGTSYRNVLQAAIQKSLKDPSNNFREEPVKKSIQESEAFLPQSIPEERYKMKSKPLGICLIIDCIGNETELLRDTFTSLGYEVQKFLHLSMHGISQILGQFACMPEHRDYDSFVCVLVSRGGSQSVYGVDQTHSGLPLHHIRRMFMGDSCPYLAGKPKMFFIQNYVVSEGQLEDSSLLEVDGPAMKNVEFKAQKRGLCTVHREADFFWSLCTADMSLLEQSHSSPSLYLQCLSQKLRQER

SEQ ID NO: 5120 - protein, 221 aa, Homo sapiens
MSAEVIHQVEEALDTDEKEMLLFLCRDVAIDVVPPNVRDLLDILRERGKLSVGDLAELLYRVRRFDLLKRILKMDRKAVETHLLRNPHLVSDYRVLMAEIGEDLDKSDVSSLIFLMKDYMGRGKISKEKSFLDLVVELEKLNLVAPDQLDLLEKCLKNIHRIDLKTKIQKYKQSVQGAGTSYRNVLQAAIQKSLKDPSNNFRMITPYAHCPDLKILGNCSM

SEQ ID NO: 5121 - protein, 340 aa, Homo sapiens
MCAQYCISFADVEKAHINIRDSIHLTPVLTSSILNQLTGRNLFFKCELFQKTGSFKIRGALNAVRSLVPDALERKPKAVVTHSSGNHGQALTYAAKLEGIPAYIVVPQTAPDCKKLAIQAYGASIVYCEPSDESRENVAKRVTEETEGIMVHPNQEPAVIAGQGTIALEVLNQVPLVDALVVPVGGGGMLAGIAITVKALKPSVKVYAAEPSNADDCYQSKLKGKLMPNLYPPETIADGVKSSIGLNTWPIIRDLVDDIFTVTEDEIKCATQLVWERMKLLIEPTAGVGVAAVLSQHFQTVSPEVKNICIVLSGGNVDLTSSITWVKQAERPASYQSVSV

SEQ ID NO: 5122 - protein, 430 aa, Homo sapiens
MLVSLKMSYKAAAGEDYKADCPPGNPAPTSNHGPDATEAEEDFVDPWTVQTSSAKGIDYDKLIVRFGSSKIDKELINRIERATGQRPHHFLRRGIFFSHRDMNQVLDAYENKKPFYLYTGRGPSSEAMHVGHLIPFIFTKWLQDVFNVPLVIQMTDDEKYLWKDLTLDQAYSYAVENAKDIIACGFDINKTFIFSDLDYMGMSSGFYKNVVKIQKHVTFNQVKGIFGFTDSDCIGKISFPAIQAAPSFSNSFPQIFRDRTDIQCLIPCAIDQDPYFRMTRDVAPRIGYPKPALLHSTFFPALQGAQTKMSASDPNSSIFLTDTAKQIKTKVNKHAFSGGRDTIEEHRQFGGNCDVDVSFMYLTFFLEDDDKLEQIRKDYTSGAMLTGELKKALIEVLQPLIAEHQARRKEVTDEIVKEFMTPRKLSFDFQ

SEQ ID NO: 5123 - protein, 179 aa, Homo sapiens
MSGISPQQMGEPEGSWSGKNPGTMGASRLYTLVLVLQPQRVLLGMKKRGFGAGRWNGFGGKVQEGETIEDGARRELQEESGLTVDALHKVGQIVFEFVGEPELMDVHVFCTDSIQGTPVESDEMRPCWFQLDQIPFKDMWPDDSYWFPLLLQKKKFHGYFKFQGQDTILDYTLREVDTV

SEQ ID NO: 5124 - protein, 1024 aa, Homo sapiens
MSNAKERKHAKKMRNQPTNVTLSSGFVADRGVKHHSGGEKPFQAQKQEPHPGTSRQRQTRVNPHSLPDPEVNEQSSSKGMFRKKGGWKAGPEGTSQEIPKYITASTFAQARAAEISAMLKAVTQKSSNSLVFQTLPRHMRRRAMSHNVKRLPRRLQEIAQKEAEKAVHQKKEHSKNKCHKARRCHMNRTLEFNRRQKKNIWLETHIWHAKRFHMVKKWGYCLGERPTVKSHRACYRAMTNRCLLQDLSYYCCLELKGKEEEILKALSGMCNIDTGLTFAAVHCLSGKRQGSLVLYRVNKYPREMLGPVTFIWKSQRTPGDPSESRQLWIWLHPTLKQDILEEIKAACQCVEPIKSAVCIADPLPTPSQEKSQTELPDEKIGKKRKRKDDGENAKPIKKIIGDGTRDPCLPYSWISPTTGIIISDLTMEMNRFRLIGPLSHSILTEAIKAASVHTVGEDTEETPHRWWIETCKKPDSVSLHCRQEAIFELLGGITSPAEIPAGTILGLTVGDPRINLPQKKSKALPNPEKCQDNEKVRQLLLEGVPVECTHSFIWNQDICKSVTENKISDQDLNRMRSELLVPGSQLILGPHESKIPILLIQQPGKVTGEDRLGWGSGWDVLLPKGWGMAFWIPFIYRGVRVGGLKESAVHSQYKRSPNVPGDFPDCPAGMLFAEEQAKNLLEKYKRRPPAKRPNYVKLGTLAPFCCPWEQLTQDWESRVQAYEEPSVASSPNGKESDLRRSEVPCAPMPKKTHQPSDEVGTSIEHPREAEEVMDAGCQESAGPERITDQEASENHVAATGSHLCVLRSRKLLKQLSAWCGPSSEDSRGGRRAPGRGQQGLTREACLSILGHFPRALVWVSLSLLSKGSPEPHTMICVPAKEDFLQLHEDWHYCGPQESKHSDPFRSKILKQKEKKKREKRQKPGRASSDGPAGEEPVAGQEALTLGLWSGPLPRVTLHCSRTLLGFVTQGDFSMAVGCGEALGFVSLTGLLDMLSSQPAAQRGLVLLRPPASLQYRFARIAIEV

SEQ ID NO: 5125 - protein, 213 aa, Homo sapiens [sequence omitted]

SEQ ID NO: 5126 - protein, 496 aa, Homo sapiens
MFAKATRNFLREVDADGDLIAVSNLNDSDKLQLLSLVTKKKRFWCWQRPKYQFLSLTLGDVLIEDQFPSPVVVESDFVKYEGKFANHVSGTLETALGKVKLNLGGSSRVESQSSFGTLRKQEVDLQQLIRDSAERTINLRNPVLQQVLEGRNEVLCVLTQKITTMQKCVISEHMQVEEKCGGIVGIQTKTVQVSATEDGNVTKDSNVVLEIPAATTIAYGVIELYVKLDGQFEFCLLRGKQGGFENKKRIDSVYLDPLVFREFAFIDMPDAAHGISSQDGPLSVLKQATLLLERNFHPFAELPEPQQTALSDIFQAVLFDDELLMVLEPVCDDLVSGLSPTVAVLGELKPRQQQDLVAFLQLVGCSLQGGCPGPEDAGSKQLFMTAYFLVSALAEMPDSAAALLGTCCKLQIIPTLCHLLRALSDDGVSDLEDPTLTPLKDTERFGIVQRLFASADISLERLKSSVKAVILKDSKVFPLLLCITLNGLCALGREHS

SEQ ID NO: 5127 - protein, 455 aa, Homo sapiens
MARKALKLASWTSMALAASGIYFYSNKYLDPNDFGAVRVGRAVATTAVISYDYLTSLKSVPYGSEEYLQLRSKIHDLFQSFDDTPLGTASLAQVHKAVLHDGRTVAVKVQHPKVRAQSSKDILLMEVLVLAVKQLFPEFEFMWLVDEAKKNLPLELDFLNEGRNAEKVSQMLRHFDFLKVPRIHWDLSTERVLLMEFVDGGQVNDRDYMERNKIDVNEISRHLGKMYSEMIFVNGFVHCDPHPGNVLVRKHPGTGKAEIVLLDHGLYQMLTEEFRLNYCHLWQSLIWTDMKRVKEYSQRLGAGDLYPLFACMLTARSWDSVNRGISQAPVTATEDLEIRNNAANYLPQISHLLNHVPRQMLLILKTNDLLRGIEAALGTRASASSFLNMSRCCIRALAEHKKKNTCSFFRRTQISFSEAFNLWQINLHELILRVKGLKLADRVLALICWLFPAPL

SEQ ID NO: 5128 - protein, 643 aa, Homo sapiens
MGQTKSTSSGGGNRKCNQEQSKNQPLDARVDKIKDKKPRKKAMESSSNSDSDSGTSSDTSSEGISSSDSDDLEEDEEEEDQSIEESEDDDSDSESEAQHKSNNQVLLHGISDPKADGQKATEKAQEKRIHQPLPLASESQTHSFQSQQKQPQVLSQQLPFIFQSSQAKEESVNKHTSVIQSTGLVSNVKPLSLVNQAKKETYMKLIVPSPDVLKAGNKNTSEESSLLTSELRSKREQYKQAFPSQLKKQESSKSLKKVIAALSNPKATSSSPAHPKQTLENNHPNPFLTNALLGNHQPNGVIQSVIQEAPLALTTKTKMQSKINENIAAASSTPFSSPVNLSTSGRRTPGNQTPVMPSASPILHSQGKEKAVSNNVNPVKTQHHSHPAKSLVEQFRGTDSDIPSSKDSEDSNEDEEEDDEEEDEEDDEDDESDDSQSGTSKRRRVTDERELRIPLEYGWQRETRIRNFGGRLQGEVAYYAPCGKKLRQYPEVIKYLSRNGIMDISRDNFSFSAKIRVGDFYEARDGPQGMQWCLLKEEDVIPRIRAMEGRRGRPPNPDRQRAREESRMRRRKGRPPNVGNAEFLDNADAKLLRKLQAQEIARQAAQIKLLRKLQKQEQARVAKEAKKQQAIMLLRRSGSKKNR

SEQ ID NO: 5129 - protein, 689 aa, Homo sapiens
MEDTGIQRGIWDGDAKAVQQCLTDIFTSVYTTCDIPENAIFGPCVLSHTSLYDSIAFIALKSTDKRTVPYIFRVDTSAANGSSEGLMWLRLVQSARDKEEQNLEAYIKNGQLFYRSLRRIAKDEELLVWYGKELTELLLLCPSRSHNKMNGSSPYTCLECSQRFQFEFPYVAHLRFRCPKRLHSADISPQDEQGGGVGTKDHGGGGGGGKDQQQQQQEAPLGPGPKFCKAGPLHHYPSPSPESSNPSAAAGGSSAKPSTDFHNLARELENSRGGSSCSPAQSLSSGSGSGGGGGHQEAELSPDGIATGGGKGKRKFPEEAAEGGGGAGLVGGRGRFVERPLPASKEDLVCTPQQYRASGSYFGLEENGRLFAPPSPETGEAKRSAFVEVKKAARAASLQEEGTADGAGVASEDQDAGGGGGSSTPAAASPVGAEKLLAPRPGGPLPSRLEGGSPARGSAFTSVPQLGSAGSTSGGGGTGAGAAGGAGGGQGAASDERKSAFSQPARSFSQLSPLVLGQKLGALEPCHPADGVGPTRLYPAAADPLAVKLQGAADLNGGCGSLPSGGGGLPKQSPFLYATAFWPKSSAAAAAAAAAAAAGPLQLQLPSALTLLPPSFTSLCLPAQNWCAKCNASFRMTSDLVYHMRSHHKKEYAMEPLVKRRREEKLKCPICNESFRERHHLSRHMTSHN

SEQ ID NO: 5130 - protein, 325 aa, Homo sapiens
MKAKDLIVTPATILKEKPDPNNLVFGTVFTDHMLTVEWSSEFGWEKPHIKPLQNLSLHPGSSALHYAVEVFDKEELLECIQQLVKLDQEWVPYSTSASLYIRPTFIGTEPSLGVKKPTKALLFVLLSPVGPYFSSGTFNPVSLWANPKYVRAWKGGTGDCKMGGNYGSSLFAQCEAVDNGCQQVLWLYGEDHQITEVGTMNLFLYWINEDGEEELATPPLDGIILPGVTRRCILDLAHQWGEFKVSERYLTMDDLTTALEGNRVREMFGSGTACVVCPVSDILYKGETIHIPTMENGPKLASRILSKLTDIQYGREESDWTIVLS

SEQ ID NO: 5131 - protein, 570 aa, Homo sapiens
MALKKSSPSLDSGDSDSEELPTFAFLKKEPSSTKRRQPEREEKIVVVDISDCEASCPPAPELFSPPVPEIAETVTQTQPVRLLSSESEDEEEFIPLAQRLTCKFLTHKQLSPEDSSSPVKSVLDHQNNEGASCDWKKPFPKIPEVPLHDTPERSAADNKDLILDPCCQLPAYLSTCPGQSSSLAVTKTNSDILPPQKKTKPSQKVQGRGSHGCRQQRQARQKESTLRRQERKNAALVTRMKAQRPEECLKHIIVVLDPVLLQMEGGGQLLGALQTMECRCVIEAQAVPCSVTWRRRAGPSEDREDWVEEPTVLVLLRAEAFVSMIDNGKQGSLDSTMKGKETLQGFVTDITAKTAGKALSLVIVDQEKCFSAQNPPRRGKQGANKQTKKQQQRQPEASIGSMVSRVDAEEALVDLQLHTEAQAQIVQSWKELADFTCAFTKAVAEAPFKKLRDETTFSFCLESDWAGGVKVDLAGRGLALVWRRQIQQLNRVSLEMASAVVNAYPSPQLLVQAYQQCFSDKERQNLLADIQVRRGEGVTSTSRRIGPELSRRIYLQMTTLQPHLSLDSAD

SEQ ID NO: 5132 - protein, 761 aa, Homo sapiens
MARRPRHSIYSSDEDDEDFEMCDHDYDGLLPKSGKRHLGKTRWTREEDEKLKKLVEQNGTDDWKVIANYLPNRTDVQCQHRWQKVLNPELIKGPWTKEEDQRVIELVQKYGPKRWSVIAKHLKGRIGKQCRERWHNHLNPEVKKTSWTEEEDRIIYQAHKRLGNRWAEIAKLLPGRTDNAIKNHWNSTMRRKVEQEGYLQESSKASQPAVATSFQKNSHLMGFAQAPPTAQLPATGQPTVNNDYSYYHISEAQNVSSHVPYPVALHVNIVNVPQPAAAAIQRHYNDEDPEKEKRIKELELLLMSTENELKGQQVLPTQNHTCSYPGWHSTTIADHTRPHGDSAPVSCLGEHHSTPSLPADPGSLPEESASPARCMIVHQGTILDNVKNLLEFAETLQFIDSDSSSWCDLSSFEFFEEADFSPSQHHTGKALQLQQREGNGTKPAGEPSPRVNKRMLSESSLDPPKVLPPARHSTIPLVILRKKRGQASPLATGDCSSFIFADVSSSTPKRSPVKSLPFSPSQFLNTSSNHENSDLEMPSLTSTPLIGHKLTVTTPFHRDQTVKTQKENTVFRTPAIKRSILESSPRTPTPFKHALAAQEIKYGPLKMLPQTPSHLVEDLQDVIKQESDESGIVAEFQENGPPLLKKIKQEVESPTDKSGNFFCSHHWEGDSLNTQLFTQTSPVADAPNILTSSVLMAPASEDEDNVLKAFTVPKNRSLASPLQPCSSTWEPASCGKMEEQMTSSSQARKYVNAFSARTLVM

SEQ ID NO: 5133 - protein, 573 aa, Homo sapiens
MLRLPTVFRQMRPVSRVLAPHLTRAYAKDVKFGADARALMLQGVDLLADAVAVTMGPKGRTVIIEQSWGSPKVTKDGVTVAKSIDLKDKYKNIGAKLVQDVANNTNEEAGDGTTTATVLARSIAKEGFEKISKGANPVEIRRGVMLAVDAVIAELKKQSKPVTTPEEIAQVATISANGDKEIGNIISDAMKKVGRKGVITVKDGKTLNDELEIIEGMKFDRGYISPYFINTSKGQKCEFQDAYVLLSEKKISSIQSIVPALEIANAHRKPLVIIAEDVDGEALSTLVLNRLKVGLQVVAVKAPGFGDNRKNQLKDMAIATGGAVFGEEGLTLNLEDVQPHDLGKVGEVIVTKDDAMLLKGKGDKAQIEKRIQEIIEQLDVTTSEYEKEKLNERLAKLSDGVAVLKVGGTSDVEVNEKKDRVTDALNATRAAVEEGIVLGGGCALLRCIPALDSLTPANEDQKIGIEIIKRTLKIPAMTIAKNAGVEGSLIVEKIMQSSSEVGYDAMAGDFVNMVEKGIIDPTKVVRTALLDAAGVASLLTTAEVVVTEIPKEEKDPGMGAMGGMGGGMGGGMF

SEQ ID NO: 5134 - protein, 270 aa, Homo sapiens
MSSTQFNKGPSYGLSAEVKNRLLSKYDPQKEAELRTWIEGLTGLSIGPDFQKGLKDGTILCTLMNKLQPGSVPKINRSMQNWHQLENLSNFIKAMVSYGMNPVDLFEANDLFESGNMTQVQVSLLALAGKMGTNKCASQSGMTAYGTRRHLYDPKNHILPPMDHSTISLQMGTNKCASQVGMTAPGTRRHIYDTKLGTDKCDNSSMSLQMGYTQGANQSGQVFGLGRQIYDPKYCPQGTVADGAPSGTGDCPDPGEVPEYPPYYQEEAGY

SEQ ID NO: 5135 - protein, 266 aa, Homo sapiens
MKLRSSHNASKTLNANNMETLIECQSEGDIKEHPLLASCESEDSICQLIEVKKRKKVLSWPFLMRRLSPASDFSGALETDLKASLFDQPLSIICGDSDTLPRPIQDILTILCLKGPSTEGIFRRAANEKARKELKEELNSGDAVDLERLPVHLLAVVFKDFLRSIPRKLLSSDLFEEWMGALEMQDEEDRIEALKQVADKLPRPNLLLLKHLVYVLHLISKNSEVNRMDSSNLAICIGPNMLTLENDQSLSFEAQKDLNNKVCSAY

SEQ ID NO: 5136 - protein, 443 aa, Homo sapiens
MPCVQAQYSPSPPGSSYAAQTYSSEYTTEIMNPDYTKLTMDLGSTEITATATTSLPSISTFVEGYSSNYELKPSCVYQMQRPLIKVEEGRAPSYHHHHHHHHHHHHHHQQQHQQPSIPPASSPEDEVLPSTSMYFKQSPPSTPTTPAFPPQAGALWDEALPSAPGCIAPGPLLDPPMKAVPTVAGARFPLFHFKPSPPHPPAPSPAGGHHLGYDPTAAAALSLPLGAAAAAGSQAAALESHPYGLPLAKRAAPLAFPPLGLTPSPTASSLLGESPSLPSPPSRSSSSGEGTCAVCGDNAACQHYGVRTCEGCKGFFKRTVQKNAKYVCLANKNCPVDKRRRNRCQYCRFQKCLSVGMVKEVVRTDSLKGRRGRLPSKPKSPLQQEPSQPSPPSPPICMMNALVRALTDSTPRDLDYSRVSFMISCFQMNDQGLYLWLLVIRVD

SEQ ID NO: 5137 - protein, 176 aa, Homo sapiens
MGRARDAILDALENLTAEELKKFKLKLLSVPLREGYGRIPRGALLSMDALDLTDKLVSFYLETYGAELTANVLRDMGLQEMAGQLQAATHQGLHFIDQHRAALIARVTNVEWLLDALYGKVLTDEQYQAVRAEPTNPSKMRKLFSFTPAWNWTCKDLLLQALRESQSYLVEDLERS

SEQ ID NO: 5138 - protein, 911 aa, Homo sapiens
MCSHFTQDFLPVQGIEDSFHKLILRRYEKCGHDNLQLRKGCKSMNVCKVQKGVYNGINKCLSNTQSKIFQCNARVKVFSKFANSNKDKTRHTGEKHFKCNECGKSFQKFSDLTQHKGIHAGEKPYTCEERGKDFGWYTDLNQHKKIHTGEKPYKCEECGKAFNRSTNLTAHKRIHNREKAYTGEDRDRAFGWSTNLNEYKKIHTGDKPYKCKECGKAFMHSSHLNKHEKIHTGEKPYKCKECGKVISSSSSFAKHKRIHTGEKPFKCLECGKAFNISTTLTKHRRIHTGEKPYTCEVCGKAFRQSANLYVHRRIHTGEKPYTCGECGKTFRQSANLYVHRRIHTGEKPYKCEDCGKAFGRYTALNQHKKIHTGEKPYKCEECGKAFNSSTNLTAHKRIHTREKPYTCEDRGRAFGLSTNLNEYKKIHTGDKPYKCKECGKAFIHSLHLNKHEKIHTGKKPYKCKQCGKVITSSSSFAKHKRIHTGEKPFECLECGKAFTSSTTLTKHRRIHTGEKPYTCEVCGKAFRQSAILYVHRRIHTGEKPYTCEECGKTFRQSANLYVHRRIHTGEKPYKCEECGKAFGRYTDLNQHKKIHTGEKLYKCEECGKDFVWYTDLNQQKKIYTGEKPYKCEECGKAFAPSTDLNQHTKILTGEQSYKCEECGKAFGWSIALNQHKKIHTGEKPYKCEECGKAFSRSRNLTTHRRVHTREKPYKCEDRGRSFGWSTNLNEYKKIHTGDKLYKCKECGKVFKQSSHLNRHEKIHTGKKPYKCKECGKVITSSSSFAKHKRIHTGEKPFKCLECGKAFTSSTTLTKHRRIHTGEKPYTCEECGKAFRQSAILYVHRRIHTGEKPYTCGECGKTFRQSANLYAHKKIHTGEKPYTCGDCGKTFRQSANLYAHKKIHTGDKTIQV

SEQ ID NO: 5139 - protein, 102 aa, Homo sapiens
MFPVGRIHRHLKTRTTSHGRVGATAAVYSAAILEYLTAEVLELAGNASKDLKVKRITPRHLQLAIRGDEELDSLIKATIAGGGVIPHIHKSLIGKKGQQKTA

SEQ ID NO: 5140 - protein, 121 aa, Homo sapiens
NTSESFVLNWYRMSPSNQTDKLAAFPEDRSQPGQDCRFRVTQLPNGRDFHMSVVRARRNDSGTYLCGAISLAPKAQIKESLRAELRVTGTIGARRTGQPLKEDPSAVPVFSVDYGELDFQW

SEQ ID NO: 5141 - protein, 483 aa, Homo sapiens
MGRKKIQITRIMDERNRQVTFTKRKFGLMKKAYELSVLCDCEIALIIFNSTNKLFQYASTDMDKVLLKYTEYNEPHESRTNSDIVETLRKKGLNGCDSPDPDADDSALNKKENKGCESPDPDSSYALTPRTEEKYKKINEEFDNMIKSHKIPAVPPPNFEMPVSIPVSSHNSLVYSNPVSSLGNPNLLPLAHPSLQRNSMSPGVTHRPPSAGNTGGLMGGDLTSGAGTSAGNGYGNPRNSPGLLVSPGNLNKNMQAKSPPPMNLGMNNRKPDLRVLIPPGSKNTMPSVNQRINNSQSAQSLATPVVSVATPTLPGQGMGGYPSAISTTYGTEYSLSSADLSSLSGFNTASALHLGSVTGWQQQHLHNMPPSALSQLGACTSTHLSQSSNLSLPSTQSLNIKSEPVSPPRDRTTTPSRYPQHTRHEAGRSPVDSLSSCSSSYDGSDREDHRNEFHSPIGLTRPSPDERESPSVKRMRLSEGWAT

SEQ ID NO: 5142 - protein, 248 aa, Homo sapiens [sequence omitted]

SEQ ID NO: 5143 - protein, 282 aa, Homo sapiens
MEGDFSVCRNCKRHVVSANFTLHEAYCLRFLVLCPECEEPVPKETMEEHCKLEHQQANECQERPVECKFCKLDMQLSKLELHESYCGSRTELCQGCGQFIMHRMLAQHRDVCRSEQAQLGKGERISAPEREIYCHYCNQMIPENKYFHHMGKCCPDSEFKKHFPVGNPEILPSSLPSQAAENQTSTMEKDVRPKTRSINRFPLHSESSSKKAPRSKNKTLDPLLMSEPKPRTSSPRGDKAAYDILRRCSQCGILLPLPILNQHQEKCRWLASSKGKQVRNFS

SEQ ID NO: 5144 - protein, 275 aa, Homo sapiens
MSTIGSFEGFQAVSLKQEGDDQPSETDHLSMEEEDPMPRQISRQSSVTESTLYPNPYHQPYISRKYFATRPGAIETAMEDLKGHVAETSGETIQGFWLLTKIDHWNNEKERILLVTDKTLLICKYDFIMLSCVQLQRIPLSAVYRICLGKFTFPGMSLDKRQGEGLRIYWGSPEEQSLLSRWNPWSTEVPYATFTEHPMKYTSEKFLEICKLSGFMSKLVPAIQNAHKNSTGSGRGKKLMVLTEPILIETYTGLMSFIGNRNKLGYSLARGSIGF

SEQ ID NO: 5145 - protein, 449 aa, Homo sapiens
MARRPRHSIYSSDEDDEDFEMCDHDYDGLLPKSGKRHLGKTRWTREEDEKLKKLVEQNGTDDWKVIANYLPNRTDVQCQHRWQKVLNPELIKGPWTKEEDQRVIELVQKYGPKRWSVIAKHLKGRIGKQCRERWHNHLNPEVKKTSWTEEEDRIIYQAHKRLGNRWAEIAKLLPGRTDNAIKNHWNSTMRRKVEQEGYLQESSKASQPAVATSFQKNSHLMGFAQAPPTAQLPATGQPTVNNDYSYYHISEAQNVSSHVPYPVALHVNIVNVPQPAAAAIQRHYNDEDPEKEKRIKELELLLMSTENELKGQQVLPTQNHTCSYPGWHSTTIADHTRPHGDSAPVSCLGEHHSTPSLPADPGSLPEESASPARCMIVHQGTILDNVKNLLEFAETLQFIDSFLNTSSNHENSDLEMPSLTSTPLIGHKLTVTTPFHRDQTVKTQKENTV

SEQ ID NO: 5146 - protein, 130 aa, Homo sapiens
MSGRGKQGGKARAKAKTRSSRAGLQFPVGRVHRLLRKGNYSERVGAGAPVYLAAVLEYLTAEILELAGNAARDNKKTRIIPRHLQLAIRNDEELNKLLGKVTIAQGGVLPNIQAVLLPKKTESHHKAKGK

SEQ ID NO: 5147 - protein, 255 aa, Homo sapiens
MALMQELYSTPASRLDSFVAQWLQPHREWKEEVLDAVRTVEEFLRQEHFQGKRGLDQDVRVLKVVKVGSFGNGTVLRSTREVELVAFLSCFHSFQEAAKHHKDVLRLIWKTMWQSQDLLDLGLEDLRMEQRVPDALVFTIQTRGTAEPITVTIVPAYRALGPSLPNSQPPPEVYVSLIKACGGPGNFCPSFSELQRNFVKHRPTKLKSLLRLVKHWYQQAHHPGSGRPHPQRGRRVQMGHRCSEGLPVPETGLLL

SEQ ID NO: 5148 - protein, 783 aa, Homo sapiens
MSQVKSSYSYDAPSDFINFSSLDDEGDTQNIDSWFEEKANLENKLLGKNGTGGLFQGKTPLRKANLQQAIVTPLKPVDNTYYKEAEKENLVEQSIPSNACSSLEVEAAISRKTPAQPQRRSLRLSAQKDLEQKEKHHVKMKAKRCATPVIIDEILPSKKMKVSNNKKKPEEEGSAHQDTAEKNASSPEKAKGRHTVPCMPPAKQKFLKSTEEQELEKSMKMQQEVVEMRKKNEEFKKLALAGIGQPVKKSVSQVTKSVDFHFRTDERIKQHPKNQEEYKEVNFTSELRKHPSSPARVTKGCTIVKPFNLSQGKKRTFDETVSTYVPLAQQVEDFHKRTPNRYHLRSKKDDIKTGSCSVTQAGVQWRDHGSLQCPTPGLKQSSCLSLPNLLPSKSSVTKICRDPQTPVLQTKHRARAVTCKSTAELEAEELEKLQQYKFKARELDPRILEGGPILPKKPPVKPPTEPIGFDLEIEKRIQERESKKKTEDEHFEFHSRPCPTKILEDVVGVPEKKVLPITVPKSPAFALKNRIRMPTKEDEEEDEPVVIKAQPVPHYGVPFKPQIPEARTVEICPFSFDSRDKERQLQKEKKIKELQKGEVPKFKALPLPHFDTINLPEKKVKNVTQIEPFCLETDRRGALKAQTWKHQLEEELRQQKEAACFKARPNTVISQEPFVPKKEKKSVAEGLSGSLVQEPFQLATEKRAKERQELEKRMAEVEAQKAQQLEEARLQEEEQKKEELARLRRELVHKANPIRKYQGLEIKSSDQPLTVPVSPKFSTRFHC

SEQ ID NO: 5149 - protein, 224 aa, Homo sapiens
MASSTPSSSATSSNAGADPNTTNLRPTTYDTWCGVAHGCTRKLGLKICGFLQRTNSLEEKSRLVSAFKERQSSKNLLSCENSDRDARFRRTETDFSNLFARDLLPAKNGEEQTVQFLLEVVDILLNYVRKTFDRSTKVLDFHHPHQLLEGMEGFNLELSDHPESLEQILVDCRDTLKYGVRTGHPRFFNQLSTGLDIIGLAGEWLTSTANTNMPSDMRECWLLR

SEQ ID NO: 5150 - protein, 265 aa, Homo sapiens
MEDSMDMDMSPLRPQNYLFGCELKADKDYHFKVDNDENEHQLSLRTVSLGAGAKDELHIVEAEAMNYEGSPIKVTLATLKMSVQPTVSLGGFEITPPVVLRLKCGSGPVHISGQHLVAVEEDAESEDEEEEDVKLLSISGKRSAPGGGSKVPQKKVKLAADEDDDDDDEEDDDEDDDDDDFDDEEAEEKAPVKKGQESFKKQEKTPKTPKGPSSVEDIKAKMQASIEKGGSLPKVEAKFINYVKNCFRMTDQEAIQDLWQWRKSL

SEQ ID NO: 5151 - protein, 445 aa, Homo sapiens
MREIVHLQAGQCGNQIGAKFWEVISDEHGIDPTGTYHGDSDLQLERINVYYNEATGGKYVPRAVLVDLEPGTMDSVRSGPFGQIFRPDNFVFGQSGAGNNWAKGHYTEGAELVDSVLDVVRKEAESCDCLQGFQLTHSLGGGTGSGMGTLLISKIREEYPDRIMNTFSVVPSPKVSDTVVEPYNATLSVHQLVENTDETYCIDNEALYDICFRTLKLTTPTYGDLNHLVSATMSGVTTCLRFPGQLNADLRKLAVNMVPFPRLHFFMPGFAPLTSRGSQQYRALTVPELTQQMFDAKNMMAACDPRHGRYLTVAAVFRGRMSMKEVDEQMLNVQNKNSSYFVEWIPNNVKTAVCDIPPRGLKMSATFIGNSTAIQELFKRISEQFTAMFRRKAFLHWYTGEGMDEMEFTEAESNMNDLVSEYQQYQDATAEEEGEFEEEAEEEVA

SEQ ID NO: 5152 - protein, 182 aa, Homo sapiens
MDLQRPDSYQGGAGPDFNDHVLHKTILVGDSGVGKTSLLVQFDQGKFIPGSFSATVGIGFTNKVVTVDGVRVKLQIWDTAGQERFRSVTHAYYRDAQALLLLYDITNKSSFDNIRAWLTEIHEYAQRDVVIMLLGNKADMSSERVIRSEDGETLAREYGVPFLETSAKTGMNVELAFLAIAK

SEQ ID NO: 5153 - protein, 984 aa, Homo sapiens
METKGYHSLPEGLDMERRWGQVSQAVERSSLGPTERTDENNYMEIVNVSCVSGAIPNNSTQGSSKEKQELLPCLQQDNNRPGILTSDIKTELESKELSATVAESMGLYMDSVRDADYSYEQQNQQGSMSPAKIYQNVEQLVKFYKGNGHRPSTLSCVNTPLRSFMSDSGSSVNGGVMRAVVKSPIMCHEKSPSVCSPLNMTSSVCSPAGINSVSSTTASFGSFPVHSPITQGTPLTCSPNVENRGSRSHSPAHASNVGSPLSSPLSSMKSSISSPPSHCSVKSPVSSPNNVTLRSSVSSPANINNSRCSVSSPSNTNNRSTLSSPAASTVGSICSPVNNAFSYTASGTSAGSSTLRDVVPSPDTQEKGAQEVPFPKTEEVESAISNGVTGQLNIVQYIKPEPDGAFSSSCLGGNSKINSDSSFSVPIKQESTKHSCSGTSFKGNPTVNPFPFMDGSYFSFMDDKDYYSLSGILGPPVPGFDGNCEGSGFPVGIKQEPDDGSYYPEASIPSSAIVGVNSGGQSFHYRIGAQGTISLSRSARDQSFQHLSSFPPVNTLVESWKSHGDLSSRRSDGYPVLEYIPENVSSSTLRSVSTGSSRPSKICLVCGDEASGCHYGVVTCGSCKVFFKRAVEGQHNYLCAGRNDCIIDKIRRKNCPACRLQKCLQAGMNLGARKSKKLGKLKGIHEEQPQQQQPPPPPPPPQSPEEGTTYIAPAKEPSVNTALVPQLSTISRALTPSPVMVLENIEPEIVYAGYDSSKPDTAENLLSTLNRLAGKQMIQVVKWAKVLPGFKNLPLEDQITLIQYSWMCLSSFALSWRSYKHTNSQFLYFAPDLVFNEEKMHQSAMYELCQGMHQISLQFVRLQLTFEEYTIMKVLLLLSTIPKDGLKSQAAFEEMRTNYIKELRKMVTKCPNNSGQSWQRFYQLTKLLDSMHDLVSDLLEFCFYTFRESHALKVEFPAMLVEIISDQLPKVESGNAKPLYFHRK

SEQ ID NO: 5154 - protein, 536 aa, Homo sapiens
MCSKPEDPVEYLESCLQKVKELGGCDKVKWDTFVSQEKKTLPPLNGGQSRRSFLRNVMPENSNFPYRRYDRLPPIHQFSIESDTDLSETAELIEEYEVFDPTRPRPKIILVIGGPGSGKGTQSLKIAERYGFQYISVGELLRKKIHSTSSNRKWSLIAKIITTGELAPQETTITEIKQKLMQIPDEEGIVIDGFPRDVAQALSFEDQICTPDLVVFLACANQRLKERLLKRAEQQGRPDDNVKATQRRLMNFKQNAAPLVKYFQEKGLIMTFDADRDEDEVFYDISMAVDNKLFPNKEAAAGSSDLDPSMILDTGEIIDTGSDYEDQGDDQLNVFGEDTMGGFMEDLRKCKIIFIIGGPGSGKGTQCEKLVEKYGFTHLSTGELLREELASESERSKLIRDIMERGDLVPSGIVLELLKEAMVASLGDTRGFLIDGYPREVKQGEEFGRRIGDPQLVICMDCSADTMTNRLLQRSRSSLPVDDTTKTIAKRLEAYYRASIPVIAYYETKTQLHKINAEGTPEDVFLQLCTAIDSIF

SEQ ID NO: 5155 - protein, 734 aa, Homo sapiens
MNSMKTEENKSFSAMEDDQRTRPEVSKDTVMKQTHADTPVDHCLSGIRKCSSTFKLKSEVNKHETALEMQNPNLNNKECCFTFTLNGNSRKLDRSVFTAYGKPSESIYSALSANDYFSERIKNQFNKNIIVYEEKTIDGHINLGMPLKCLPSDSHFKITFGQRKSSKEDGHILRQCENPNMECILFHVVAIGRTRKKIVKINELHEKGSKLCIYALKGETIEGALCKDGRFRSDIGEFEWKLKEGHKKIYGKQSMVDEVSGKVLEMDISKKKALQQKDIHKKIKQNESATDEINHQSLIQSKKKVHKPKKDGETKDVEHSREQILPPQDLSHYIKDKTRQTIPRIRNYYFCSLPRKYRQINSQVRRRPHLGRRYAINLDVQKEAINLLKNYQTLNEAIMHQYPNFKEEAQWVRKYFREEQKRMNLSPAKQFNIYKKDFGKMTANSVSVATCEQLTYYSKSVGFMQWDNNGNTGNATCFVFNGGYIFTCRHVVHLMVGKNTHPSLWPDIISKCAKVTFTYTEFCPTPDNWFSIEPWLKVSNENLDYAILKLKENGNAFPPGLWRQISPQPSTGLIYLIGHPEGQIKKIDGCTVIPLNERLKKYPNDCQDGLVDLYDTTSNVYCMFTQRSFLSEVWNTHTLSYDTCFSDGSSGSPVFNASGKLVALHTFGLFYQRGFNVHALIEFGYSMDSILCDIKKTNESLYKSLNDEKLETYDEEKGKQESSLQDHQIEPMEC

SEQ ID NO: 5156 - protein, 951 aa, Homo sapiens
MLGSMARKKPRNTSRLPLALNPLKSKDVLAVLAERNEAIVPVGAWVEPASPGSSEIPAYTSAYLIEEELKEQLRKKQEALKHFQKQVKYRVNQQIRLRKKQQLQKSYERAQKEGSIAMQSSATHLTSKRTSVFPNNLNVAIGSSRLPPSLMPGDGIEDEENQNELFQQQAQALSETMKQARHRLASFKTVIKKKGSVFPDDGRKSFLTREEVLSRKPASTGINTGIRGELPIKVHQGLLAAVPYQNYMENQELDYEEPDYEESSSLVTDEKGKEDLFGRGQQDQQAIHSEDKNKPFSRVQKVKFKNPLFVLMEEEEQKQLHFEGLQDILPEAQDYFLEAQGDLLETQGDLTGIQSVKPDTQAVEMKVQVTEPEGQAIEPEGQPIKTETQGIMLKAQSIELEEGSIVLKTQDFLPTNQALLTKNQDVLLKDHCVLPKDQSILLKYQDQDFLPRDQHVLHKDQDILPKYQDQNFLPKDQNFLSRDQHVLPKDQDILPKYQDQNFLPKDQNFLSRDQHVLPKDQNILPKYQGQDFLPKDQDFLSRDQHVLPKDWNILPKCQDQDFLPRDQGVLPKDQNILPICQDQDFLPRDQGYLPKDQNILPICQDRDFLPRDLHVLSNDQNILPKCQDQDFLPKYQKVHFKEPYSDMTDEKGREDFSLADYQCLPPKSQDQDDIKNQQPASFMREERVREELPLDYHQYVVPKIQDQDSPREQNKHIKLPSSFEKWEIARGNTPGVPLAYDRYQSGLSTEFQAPLAFQSDVDKEEDKKERQKQYLRHRRLFMDIEREQVKEQQRQKEQKKKIEKIKKKREQECYAAEQRILRMNFHEDPYSGEKLSEILAQLQLQEIKGTREKQQREKEYLRYVEALRAQIQEKMQLYNITLPPLCCCGPDFWDAHPDTCANNCIFYKNHRAYTRALHSFINSCDVPGGNSTLRVAIHNFASAHRRTLKNL

SEQ ID NO: 5157 - protein, 214 aa, Homo sapiens
MGRRPARCYRYCKNKPYPKSRFCRGVPDAKIRIFDLGRKKAKVDEFPLCGHMVSDEYEQLSSEALEAARICANKYMVKSCGKDGFHIRVRLHPFHVIRINKMLSCAGADRLQTGMRGAFGKPQGTVARVHIGQVIMSIRTKLQNKEHVIEALRRAKFKFPGRQKIHISKKWGFTKFNADEFEDMVAEKRLIPDGCGVKYIPSRGPLDKWRALHS

SEQ ID NO: 5158 - protein, 372 aa, Homo sapiens
MSKSESPKEPEQLRKLFIGGLSFETTDESLRSHFEQWGTLTDCVVMRDPNTKRSRGFGFVTYATVEEVDAAMNARPHKVDGRVVEPKRAVSREDSQRPGAHLTVKKIFVGGIKEDTEEHHLRDYFEQYGKIEVIEIMTDRGSGKKRGFAFVTFDDHDSVDKIVIQKYHTVNGHNCEVRKALSKQEMASASSSQRGRSGSGNFGGGRGGGFGGNDNFGRGGNFSGRGGFGGSRGGGGYGGSGDGYNGFGNDGGYGGGGPGYSGGSRGYGSGGQGYGNQGSGYGGSGSYDSYNNGGGGGFGGGSGSNFGGGGSYNDFGNYNNQSSNFGPMKGGNFGGRSSGPYGGGGQYFAKPRNQGGYGGSSSSSSYGSGRRF

SEQ ID NO: 5159 - protein, 341 aa, Homo sapiens
MQEGELAISPISPVAAMPPLGTHVQARCEAQINLLGEGGICKLPGRLRIQPALWSREDVLHWLRWAEQEYSLPCTAEHGFEMNGRALCILTKDDFRHRAPSSGDVLYELLQYIKTQRRALVCGPFFGGIFRLKTPTQHSPVPPEEVTGPSQMDTRRGHLLQPPDPGLTSNFGHLDDPGLARWTPGKEESLNLCHCAELGCRTQGVCSFPAMPQAPIDGRIADCRLLWDYVYQLLLDTRYEPYIKWEDKDAKIFRVVDPNGLARLWGNHKNRVNMTYEKMSRALRHYYKLNIIKKEPGQKLLFRFLKTPGKMVQDKHSHLEPLESQEQDRIEFKDKRPEISP

SEQ ID NO: 5160 - protein, 245 aa, Homo sapiens
MVAAIAETDESAESEGVIDSHKRREILSRRPSYRKILNELSSDVPGVPKIEEERSEEEGTPPSIATMAVPTSIYQTSTGQYIAIAQGGTIQISNPGSDGVQGLQALTMTNSGAPPPGATIVQYAAQSADGTQQFFVPGSQVVVQAATGDMPTYQIRAPTAALPQGVVMAASPGSLHSPQQLAEEATRKRELRLMKNREAAKECRRRKKEYVKCLESRVAVLEVQNKKLIEELETLKDICSPKTDY

SEQ ID NO: 5161 - protein, 293 aa, Homo sapiens [sequence omitted]

SEQ ID NO: 5162 - protein, 1078 aa, Homo sapiens
MAKMEVKTSLLDNMIGVGDMVLLEPLNEETFINNLKKRFDHSEIYTYIGSVVISVNPYRSLPIYSPEKVEEYRNRNFYELSPHIFALSDEAYRSLRDQDKDQCILITGESGAGKTEASKLVMSYVAAVCGKGAEVNQVKEQLLQSNPVLEAFGNAKTVRNDNSSRFGKYMDIEFDFKGDPLGGVISNYLLEKSRVVKQPRGERNFHVFYQLLSGASEELLNKLKLERDFSRYNYLSLDSAKVNGVDDAANFRTVRNAMQIVGFMDHEAESVLAVVAAVLKLGNIEFKPESRVNGLDESKIKDKNELKEICELTGIDQSVLERAFSFRTVEAKQEKVSTTLNVAQAYYARDALAKNLYSRLFSWLVNRINESIKAQTKVRKKVMGVLDIYGFEIFEDNSFEQFIINYCNEKLQQIFIELTLKEEQEEYIREDIEWTHIDYFNNAIICDLIENNTNGILAMLDEECLRPGTVTDETFLEKLNQVCATHQHFESRMSKCSRFLNDTSLPHSCFRIQHYAGKVLYQVEGFVDKNNDLLYRDLSQAMWKASHALIKSLFPEGNPAKINLKRPPTAGSQFKASVATLMKNLQTKNPNYIRCIKPNDKKAAHIFNEALVCHQIRYLGLLENVRVRRAGYAFRQAYEPCLERYKMLCKQTWPHWKGPARSGVEVLFNELEIPVEEYSFGRSKIFIRNPRTLFKLEDLRKQRLEDLATLIQKIYRGWKCRTHFLLMKKSQIVIAAWYRRYAQQKRYQQTKSSALVIQSYIRGWKARKILRELKHQKRCKEAVTTIAAYWHGTQVRREYRKFFRANAGKKIYEFTLQRIVQKYFLEMKNKMPSLSPIDKNWPSRPYLFLDSTHKELKRIFHLWRCKKYRDQFTDQQKLIYEEKLEASELFKDKKALYPSSVGQPFQGAYLEINKNPKYKKLKDAIEEKIIIAEVVNKINRANGKSTSRIFLLTNNNLLLADQKSGQIKSEVPLVDVTKVSMSSQNDGFFAVHLKEGSEAASKGDFLFSSDHLIEMATKLYRTTLSQTKQKLNIEISDEFLVQFRQDKVCVKFIQGNQKNGSVPTCKRKNNRLLEVAVP

SEQ ID NO: 5163 - protein, 617 aa, Homo sapiens
MSSLPTSDGFNHPARSSGQSPDVGNPMSLARSVSASVCPIKPSDSDRIEPKAVKALKASAEFQLNSEKKEHLSLQDLSDHASSADHAPTDQSPAMPMQNSSEEITVAGNLEKSAERSTQGLKFHLHTRQEASLSVTSTRMHEPQMFLGEKDWHPENQNLSQVSDPQQHEEPGNEQYEVAQQKASHDQEYLCNIGDLELPEERQQNQHKIVDLEATMKGNGLPQNVDPPSAKKSIPSSECSGCSNSETFMEIDTAQQSLVTLLNSTGRQNANVKNIGALDLTLDNPLMEVETSKCNPSSEILNDSISTQDLQPPETNVEIPGTNKEYGHYSSPSLCGSCQPSVESAEESCPSITAALKELHELLVVSSKPASENTSEEVICQSETIAEGQTSIKDLSERWTQNEHLTQNEQCPQVSFHQAISVSVETEKLTGTSSDTGREAVENVNFRSLGDGLSTDKEGVPKSRESINKNRSVTVTSAKTSNQLHCTLGVEISPKLLAGEEDALNQTSEQTKSLSSNFILVKDLGQGIQNSVTDRPETRENVCPDASRPLLEYEPPTSHPSSSPAILPPLIFPATDIDRILRAGFTLQEALGALHRVGGNADLALLVLLAKNIVVPT

SEQ ID NO: 5164 - protein, 431 aa, Homo sapiens
MEDIQTNAELKSTQEQSVPAESAAVLNDYSLTKSHEMENVDSGEGPANEDEDIGDDSMKVKDEYSERDENVLKSEPMGNAEEPEIPYSYSREYNEYENIKLERHVVSFDSSRPTSGKMNCDVCGLSCISFNVLMVHKRSHTGERPFQCNQCGASFTQKGNLLRHIKLHTGEKPFKCHLCNYACQRRDALTGHLRTHSGEKRHCFDVNYNSSYMYEKESELIQTRMMDQAINNAISYLGAEALRPLVQTPPAPTSEMVPVISSMYPIALTRAEMSNGAPQELEKKSIHLPEKSVPSERGLSPNNSGHDSTDTDSNHEERQNHIYQQNHMVLSRARNGMPLLKEVPRSYELLKPPPICPRDSVKVINKEGEVMDVYRCDHCRVLFLDYVMFTIHMGCHGFRDPFECNMCGYRSHDRYEFSSHIARGEHRALLK

SEQ ID NO: 5165 - protein, 317 aa, Homo sapiens
MQEGELAISPISPVAAMPPLGTHVQARCEAQINLLGEGGICKLPGRLRIQPALWSREDVLHWLRWAEQEYSLPCTAEHGFEMNGRALCILTKDDFRHRAPSSGDVLYELLQYIKTQRRALVCGPFFGGIFRLKTPTQHSPVPPEEVTGPSQMDTRRGHLLQPPDPGLTSNFGHLDDPGLARWTPGKEESLNLCHCAELGCRTQGVCSFPAMPQAPIDGRIADCRLLWDYVYQLLLDTRYEPYIKWEDKDAKIFRVVDPNGLARLWGNHKNRVNMTYEKMSRALRHYYKLNIIKKEPGQKLLFRNGLQLIFIFIWSFQ

SEQ ID NO: 5166 - protein, 801 aa, Homo sapiens
MKTSPRRPLILKRRRLPLPVQNAPSETSEEEPKRSPAQQESNQAEASKEVAESNSCKFPAGIKIINHPTMPNTQVVAIPNNANIHSIITALTAKGKESGSSGPNKFILISCGGAPTQPPGLRPQTQTSYDAKRTEVTLETLGPKPAARDVNLPRPPGALCEQKRETCADGEAAGCTINNSLSNIQWLRKMSSDGLGSRSIKQEMEEKENCHLEQRQVKVEEPSRPSASWQNSVSERPPYSYMAMIQFAINSTERKRMTLKDIYTWIEDHFPYFKHIAKPGWKNSIRHNLSLHDMFVRETSANGKVSFWTIHPSANRYLTLDQVFKPLDPGSPQLPEHLESQQKRPNPELRRNMTIKTELPLGARRKMKPLLPRVSSYLVPIQFPVNQSLVLQPSVKVPLPLAASLMSSELARHSKRVRIAPKVFGEQVVFGYMSKFFSGDLRDFGTPITSLFNFIFLCLSVLLAEEGIAPLSSAGPGKEEKLLFGEGFSPLLPVQTIKEEEIQPGEEMPHLARPIKVESPPLEEWPSPAPSFKEESSHSWEDSSQSPTPRPKKSYSGLRSPTRCVSEMLVIQHRERRERSRSRRKQHLLPPCVDEPELLFSEGPSTSRWAAELPFPADSSDPASQLSYSQEVGGPFKTPIKETLPISSTPSKSVLPRTPESWRLTPPAKVGGLDFSPVQTSQGASDPLPDPLGLMDLSTTPLQSAPPLESPQRLLSSEPLDLISVPFGNSSPSDIDVPKPGSPEPQVSGLAANRSLTEGLVLDTMNDSLSKILLDISFPGLDEDPLGPDNINWSQFIPELQ

SEQ ID NO: 5167 - protein, 297 aa, Homo sapiens
MASPQLCRALVSAQWVAEALRAPRAGQPLQLLDASWYLPKLGRDARREFEERHIPGAAFFDIDQCSDRTSPYDHMLPGAEHFAEYAGRLGVGAATHVVIYDASDQGLYSAPRVWWMFRAFGHHAVSLLDGGLRHWLRQNLPLSSGKSQPAPAEFRAQLDPAFIKTYEDIKENLESRRFQVVDSRATGRFRGTEPEPRDGIEPGHIPGTVNIPFTDFLSQEGLEKSPEEIRHLFQEKKVDLSKPLVATCGSGVTACHVALGAYLCGKPDVPIYDGSWVEWYMRARPEDVISEGRGKTH

SEQ ID NO: 5168 - protein, 1210 aa, Homo sapiens
MRSRSNSGVRLDGYARLVQQTILCHQNPVTGLLPASYDQKDAWVRDNVYSILAVWGLGLAYRKNADRDEDKAKAYELEQSVVKLMRGLLHCMIRQVDKVESFKYSQSTKDSLHAKYNTKTCATVVGDDQWGHLQLDATSVYLLFLAQMTASGLHIIHSLDEVNFIQNLVFYIEAAYKTADFGIWERGDKTNQGISELNASSVGMAKAALEALDELDLFGVKGGPQSVIHVLADEVQHCQSILNSLLPRASTSKEVDASLLSVVSFPAFAVEDSQLVELTKQEIITKLQGRYGCCRFLRDGYKTPKEDPNRLYYEPAELKLFENIECEWPLFWTYFILDGVFSGNAEQVQEYKEALEAVLIKGKNGVPLLPELYSVPPDRVDEEYQNPHTVDRVPMGKLPHMWGQSLYILGSLMAEGFLAPGEIDPLNRRFSTVPKPDVVVQVSILAETEEIKTILKDKGIYVETIAEVYPIRVQPARILSHIYSSLGCNNRMKLSGRPYRHMGVLGTSKLYDIRKTIFTFTPQFIDQQQFYLALDNKMIVEMLRTDLSYLCSRWRMTGQPTITFPISHSMLDEDGTSLNSSILAALRKMQDGYFGGARVQTGKLSEFLTTSCCTHLSFMDPGPEGKLYSEDYDDNYDYLESGNWMNDYDSTSHARCGDEVARYLDHLLAHTAPHPKLAPTSQKGGLDRFQAAVQTTCDLMSLVTKAKELHVQNVHMYLPTKLFQASRPSFNLLDSPHPRQENQVPSVRVEIHLPRDQSGEVDFKALVLQLKETSSLQEQADILYMLYTMKGPDWNTELYNERSATVRELLTELYGKVGEIRHWGLIRYISGILRKKVEALDEACTDLLSHQKHLTVGLPPEPREKTISAPLPYEALTQLIDEASEGDMSISILTQEIMVYLAMYMRTQPGLFAEMFRLRIGLIIQVMATELAHSLRCSAEEATEGLMNLSPSAMKNLLHHILSGKEFGVERSVRPTDSNVSPAISIHEIGAVGATKTERTGIMQLKSEIKQSPGTSMTPSSGSFPSAYDQQSSKDSRQGQWQRRRRLDGALNRVPVGFYQKVWKVLQKCHGLSVEGFVLPSSTTREMTPGEIKFSVHVESVLNRVPQPEYRQLLVEAILVLTMLADIEIHSIGSIIAVEKIVHIANDLFLQEQKTLGADDTMLAKDPASGICTLLYDSAPSGRFGTMTYLSKAAATYVQEFLPHSICAMQ

SEQ ID NO: 5169 - protein, 90 aa, Homo sapiens
MAGGKAGKDSGKAKAKAVSRSQRAGLQVLELAGNASKDLKVKRITPRHLQLAIRGDEELDSLIKATIAGGGVIPHIHKSLIGKKGQQKTA

SEQ ID NO: 5170 - protein, 137 aa, Homo sapiens [sequence omitted]

SEQ ID NO: 5171 - protein, 292 aa, Homo sapiens
MSAEVIHQVEEALDTDEKEMLLFLCRDVAIDVVPPNVRDLLDILRERGKLSVGDLAELLYRVRRFDLLKRILKMDRKAVETHLLRNPHLVSDYRVLMAEIGEDLDKSDVSSLIFLMKDYMGRGKISKEKSFLDLVVELEKLNLVAPDQLDLLEKCLKNIHRIDLKTKIQKYKQSVQGAGTSYRNVLQAAIQKSLKDPSNNFRLHNGRSKEQRLKEQLGAQQEPVKKSIQESEAFLPQSIPEERYKMKSKPLGICLIIDCIGNETGWSAMAQSQLTAISTSQVQAILLPQPPE

SEQ ID NO: 5172 - protein, 126 aa, Homo sapiens [sequence omitted]

SEQ ID NO: 5173 - protein, 215 aa, Homo sapiens
MGKGDPKKPRGKMSSYAFFVQTCREEHKKKHPDASVNFSEFSKKCSERWKTMSAKEKGKFEDMAKADKARYEREMKTYIPPKGETKKKFKDPNAPKRPPSAFFLFCSEYRPKIKGEHPGLSIGDVAKKLGEMWNNTAADDKQPYEKKAAKLKEKYEKDIAAYRAKGKPDAAKKGVVKAEKSKKKKEEEEDEEDEEDEEEEEDEEDEDEEEDDDDE

SEQ ID NO: 5174 - protein, 71 aa, Homo sapiens
MAAPPQLRALLVVVNALLRKRRYHAALAVLKGFRNGAVYGAKIRAPHALVMTFLFRNGRSTCTCCHASCLP

SEQ ID NO: 5175 - protein, 1843 aa, Homo sapiens
MADTQTQVAPTPTMRMATAEDLPLPPPPALEDLPLPPPKESFSKFHQQRQASELRRLYRHIHPELRKNLAEAVAEDLAEVLGSEEPTEGDVQCMRWIFENWRLDAIGEHERPAAKEPVLCGDVQATSRKFEEGSFANSTDQEPTRPQPGGGDVRAARWLFETKPLDELTGQAKELEATVREPAASGDVQGTRMLFETRPLDRLGSRPSLQEQSPLELRSEIQELKGDVKKTVKLFQTEPLCAIQDAEGAIHEVKAACREEIQSNAVRSARWLFETRPLDAINQDPSQVRVIRGISLEEGARPDVSATRWIFETQPLDAIREILVDEKDFQPSPDLIPPGPDVQQQQHLFETRALDTLKGDEEAGAEAPPKEEVVPGDVRSTLWLFETKPLDAFRDKVQVGHLQRVDPQDGEGHLSSDSSSALPFSQSAPQRDELKGDVKTFKNLFETLPLDSIGQGEVLAHGSPSREEGTDSAGQAQGIGSPVYAMQDSKGRLHALTSVSREQIVGGDVQGYRWMFETQPLDQLGRSPSTIDVVRGITRQEVVAGDVGTARWLFETQPLEMIHQREQQERQKEEGKSQGDPQPEAPPKGDVQTIRWLFETCPMSELAEKQGSEVTDPTAKAEAQSCTWMFKPQPVDRPVGSREQHLQVSQVPAGERQTDRHVFETEPLQASGRPCGRRPVRYCSRVEIPSGQVSRQKEVFQALEAGKKEEQEPRVIAGSIPAGSVHKFTWLFENCPMGSLAAESIQGGNLLEEQPMSPSGNRMQESQETAAEGTLRTLHATPGILHHGGILMEARGPGELCLAKYVLSGTGQGHPYIRKEELVSGELPRIICQVLRRPDVDQQGLLVQEDPTGQLQLKPLRLPTPGSSGNIEDMDPELQQLLACGLGTSVARTGLVMQETEQGLVALTAYSLQPRLTSKASERSSVQLLASCIDKGDLSGLHSLRWEPPADPSPVPASEGAQSLHPTESIIHVPPLDPSMGMGHLRASGATPCPPQAIGKAVPLAGEAAAPAQLQNTEKQEDSHSGQKGMAVLGKSEGATTTPPGPGAPDLLAAMQSLRMATAEAQSLHQQVLNKHKQGPTPTATSNPIQDGLRKAGATQSNIRPGGGSDPRIPAAPRKVSREEQALPRGLPGGWVTIQDGIYTAHPVRTFDPPGGVQLSQREPQSRHRETALSVQAPRPLQGGPGQSTGPGREEPGGCTQMAWGPPGKAMAEVCPGGLQAAETTLKTAPLGRHILASGPQAAGASPHPHNAFVPPPPTLPAAVTGPDFPAGAHRAEDSIQQASEPLKDPLLHSHSSPAGQRTPGGSQTKTPKLDPTMPPKKKPQLPPKPAHLTQSHPPQRLPKPLPLSPSFSSEVGQREHQRGERDTAIPQPAKVPTTVDQGHIPLARCPSGHSQPSLQHGLSTTAPRPTKNQATGSNAQSSEPPKLNALNHDPTSPQWGPGPSGEQPMEGSHQGAPESPDSLQRNQKELQGLLNQVQALEKEAASSVDVQALRRLFEAVPQLGGAAPQAPAAHQKPEASVEQAFGELTRVSTEVAQLKEQTLARLLDIEEAVHKALSSMSSLQPEASARGHFQGPPKDHSAHKISVTVSSSARPSGSGQEVGGQTAVKNQAKVECHTEAQSQVKIRNHTEARGHTASTAPSTRRQETSREYLCPPRVLPSSRDSPSSPTFISIQSATRKPLETPSFKGNPDVSVKSTQLAQDIGQALLHQKGVQDKTGKKDITQCSVQPEPAPPSASPLPRGWQKSVLELQTGPGSSQHYGAMRTVTEQYEEVDQFGNTVLMSSTTVTEQAEPPRNPGSHLGLHASPLLRQFLHSPAGFSSDLTEAETVQVSCSYSQPAAQ

SEQ ID NO: 5176 - protein, 484 aa, Homo sapiens
MELGPEPPHRRRLLFACSPPPASQPVVKALFGASAAGGLSPVTNLTVTMDQLQGLGSDYEQPLEVKNNSNLQRMGSSESTDSGFCLDSPGPLDSKENLENPMRRIHSLPQKLLGCSPALKRSHSDSLDHDIFQLIDPDENKENLSSNERDSSEPGNFIPLFTPQSPVTATLSDEDDGFVDLLDGENLKNEEETPSCMASLWTAPLVMRTTNLDNRCKLFDSPSLCSSSTRSVLKRPERSQEESPPGSTKRRKSMSGASPKESTNPEKAHETLHQSLSLASSPKGTIENILDNDPRDLIGDFSKGYLFHTVAGKHQDLKYISPEIMASVLNGKFANLIKEFVIIDCRYPYEYEGGHIKGAVNLHMEEEVEDFLLKKPIVPTDGKRVIVVFHCEFSSERGPRMCRYVRERDRLGNEYPKLHYPELYVLKGGYKEFFMKCQSYCEPPSYRPMHHEDFKEDLKKFRTKSRTWAGEKSKREMYSRLKKL

SEQ ID NO: 5177 - protein, 424 aa, Homo sapiens
MSVGCPEPEPPRSLTCCGPGTAPGPGAGVPLLTEDMQALTLRTLAASDVTKHYELVRELGKGTYGKVDLVVYKGTGTKMALKFVNKSKTKLKNFLREVSITNSLSSSPFIIKVFDVVFETEDCYVFAQEYAPAGDLFDIIPPQVGLPEDTVKRCVQQLGLALDFMHGRQLVHRDIKPENVLLFDRECRRVKLADFGMTRRVGCRVKRVSGTIPYTAPEVCQAGRADGLAVDTGVDVWAFGVLIFCVLTGNFPWEAASGADAFFEEFVRWQRGRLPGLPSQWRRFTEPALRMFQRLLALEPERRGPAKEVFRFLKHELTSELRRRPSHRARKPPGDRPPAAGPLRLEAPGPLKRTVLTESGSGSRPAPPAVGSVPLPVPVPVPVPVPVPVPEPGLAPQGPPGRTDGRADKSKGQVVLATAIEICV

SEQ ID NO: 5178 - protein, 156 aa, Homo sapiens
MGASRLYTLVLVLQPQRVLLGMKKRGFGAGRWNGFGGKVQEGETIEDGARRELQEESGLTVDALHKVGQIVFEFVGEPELMDVHVFCTDSIQGTPVESDEMRPCWFQLDQIPFKDMWPDDSYWFPLLLQKKKFHGYFKFQGQDTILDYTLREVDTV

SEQ ID NO: 5179 - protein, 840 aa, Homo sapiens
MDPTAGSKKEPGGGAATEEGVNRIAVPKPPSIEEFSIVKPISRGAFGKVYLGQKGGKLYAVKVVKKADMINKNMTHQVQAERDALALSKSPFIVHLYYSLQSANNVYLVMEYLIGGDVKSLLHIYGYFDEEMAVKYISEVALALDYLHRHGIIHRDLKPDNMLISNEGHIKLTDFGLSKVTLNRDINMMDILTTPSMAKPRQDYSRTPGQVLSLISSLGFNTPIAEKNQDPANILSACLSETSQLSQGLVCPMSVDQKDTTPYSSKLLKSCLETVASNPGMPVKCLTSNLLQSRKRLATSSASSQSHTFISSVESECHSSPKWEKDCQESDEALGPTMMSWNAVEKLCAKSANAIETKGFNKKDLELALSPIHNSSALPTTGRSCVNLAKKCFSGEVSWEAVELDVNNINMDTDTSQLGFHQSNQWAVDSGGISEEHLGKRSLKRNFELVDSSPCKKIIQNKKTCVEYKHNEMTNCYTNQNTGLTVEVQDLKLSVHKSQQNDCANKENIVNSFTDKQQTPEKLPIPMIAKNLMCELDEDCEKNSKRDYLSSSFLCSDDDRASKNISMNSDSSFPGISIMESPLESQPLDSDRSIKESSFEESNIEDPLIVTPDCQEKTSPKGVENPAVQESNQKMLGPPLEVLKTLASKRNAVAFRSFNSHINASNNSEPSRMNMTSLDAMDISCAYSGSYPMAITPTQKRRSCMPHQTPNQIKSGTPYRTPKSVRRGVAPVDDGRILGTPDYLAPELLLGRAHDIPWPEGEEKLSDNAQSAVEILLTIDDTKRAGMKELKRHPLFSDVDWENLQHQTMPFIPQPDDETDTSYFEARNTAQHLTVSGFSL

SEQ ID NO: 5180 - protein, 107 aa, Homo sapiens
MDAILNYRSEDTEDYYTLLGCDELSSVEQILAEFKVRALECHPDKHPENPKAVETFQKLQKAKEILTNEESRARYDHWRRSQMSMPFQQWEALNDSVKTVGFSLGAT

SEQ ID NO: 5181 - protein, 792 aa, Homo sapiens
MAAINPWASWGALTDQSWGMTAVDPWASWALCPQYPAWHVEGSLEEGRRATGLPAAQVQEPVTFKDVAVDFTQEEWGQLDLVQRTLYRDVMLETYGHLLSVGNQIAKPEVISLLEQGEEPWSVEQACPQRTCPEWVRNLESKALIPAQSIFEEEQSHGMKLERYIWDDPWFSRLEVLGCKDQLEMYHMNQSTAMRQMVFMQKQVLSQRSSEFCGLGAEFSQNLNFVPSQRVSQIEHFYKPDTHAQSWRCDSAIMYADKVTCENNDYDKTVYQSIQPIYPARIQTGDNLFKCTDAVKSFNHIIHFGDHKGIHTGEKLYEYKECHQIFNQSPSFNEHPRLHVGENQYNYKEYENIFYFSSFMEHQKIGTVEKAYKYNEWEKVFGYDSFLTQHTSTYTAEKPYDYNECGTSFIWSSYLIQHKKTHTGEKPYECDKCGKVFRNRSALTKHERTHTGIKPYECNKCGKAFSWNSHLIVHKRIHTGEKPYVCNECGKSFNWNSHLIGHQRTHTGEKPFECTECGKSFSWSSHLIAHMRMHTGEKPFKCDECEKAFRDYSALSKHERTHSGAKPYKCTECGKSFSWSSHLIAHQRTHTGEKPYNCQECGKAFRERSALTKHEIIHSGIKPYECNKCGKSCSQMAHLVRHQRTHTGEKPYECNKCGKSFSQSCHLVAHRRIHTGEKPYKCNQCERSFNCSSHLIAHRRTHTGEKPYRCNECGKAFNESSSLIVHLRNHTGEKPYKCNHCEKAFCKNSSLIIHQRMHSGEKRFICSECGKAFSGHSALLQHQRNHSEEKLN

SEQ ID NO: 5182 - protein, 443 aa, Homo sapiens
MYDCMETFAPGPRRLYGAAGPGAGLLRRATGGSCFAGLESFAWPQPASLQSVETQSTSSEEMVPSSPSPPPPPRVYKPCFVCNDKSSGYHYGVSSCEGCKGFFRRSIQKNMVYTCHRDKNCIINKVTRNRCQYCRLQKCFEVGMSKEAVRNDRNKKKKEVKEEGSPDSYELSPQLEELITKVSKAHQETFPSLCQLGKYTTNSSADHRVQLDLGLWDKFSELATKCIIKIVEFAKRLPGFTGLSIADQITLLKAACLDILMLRICTRYTPEQDTMTFSDGLTLNRTQMHNAGFGPLTDLVFAFAGQLLPLEMDDTETGLLSAICLICGDRMDLEEPEKVDKLQEPLLEALRLYARRRRPSQPYMFPRMLMKITDLRGISTKGAERAITLKMEIPGPMPPLIREMLENPEMFEDDSSQPGPHPNASSEDEVPGGQGKGGLKSPA

SEQ ID NO: 5183 - protein, 706 aa, Homo sapiens
METKGYHSLPEGLDMERRWGQVSQAVERSSLGPTERTDENNYMEIVNVSCVSGAIPNNSTQGSSKEKQELLPCLQQDNNRPGILTSDIKTELESKELSATVAESMGLYMDSVRDADYSYEQQNQQGSMSPAKIYQNVEQLVKFYKGNGHRPSTLSCVNTPLRSFMSDSGSSVNGGVMRAVVKSPIMCHEKSPSVCSPLNMTSSVCSPAGINSVSSTTASFGSFPVHSPITQGTPLTCSPNVENRGSRSHSPAHASNVGSPLSSPLSSMKSSISSPPSHCSVKSPVSSPNNVTLRSSVSSPANINNSRCSVSSPSNTNNRSTLSSPAASTVGSICSPVNNAFSYTASGTSAGSSTLRDVVPSPDTQEKGAQEVPFPKTEEVESAISNGVTGQLNIVQYIKPEPDGAFSSSCLGGNSKINSDSSFSVPIKQESTKHSCSGTSFKGNPTVNPFPFMDGSYFSFMDDKDYYSLSGILGPPVPGFDGNCEGSGFPVGIKQEPDDGSYYPEASIPSSAIVGVNSGGQSFHYRIGAQGTISLSRSARDQSFQHLSSFPPVNTLVESWKSHGDLSSRRSDGYPVLEYIPENVSSSTLRSVSTGSSRPSKICLVCGDEASGCHYGVVTCGSCKVFFKRAVEGQHNYLCAGRNDCIIDKIRRKNCPACRLQKCLQAGMNLGERRCISLPCMNYARGCTKSAFSSFDCSSPLKNTPS

SEQ ID NO: 5184 - protein, 389 aa, Homo sapiens
MALKDYALEKEKVKKFLQEFYQDDELGKKQFKYGNQLVRLAHREQVALYVDLDDVAEDDPELVDSICENARRYAKLFADAVQELLPQYKEREVVNKDVLDVYIEHRLMMEQRSRDPGMVRSPQNQYPAELMRRFELYFQGPSSNKPRVIREVRADSVGKLVTVRGIVTRVSEVKPKMVVATYTCDQCGAETYQPIQSPTFMPLIMCPSQECQTNRSGGRLYLQTRGSRFIKFQEMKMQEHSDQVPVGNIPRSITVLVEGENTRIAQPGDHVSVTGIFLPILRTGFRQVVQGLLSETYLEAHRIVKMNKSEDDESGAGELTREELRQIADVIFATVRELVSGGRSVRFSEAEQRCVSRGFTPAQFQAALDEYEELNVWQVNASRTRITFV

SEQ ID NO: 5185 - protein, 504 aa, Homo sapiens
MKEESAAQLGCCHRPMALGGTGGSLSPSLDFQLFRGDQVFSACRPLPDMVDAHGPSCASWLCPLPLAPGRSALLACLQDLDLNLCTPQPAPLGTDLQGLQEDALSMKHEPPGLQASSTDDKKFTVKYPQNKDKLGKQPERAGEGAPCPAFSSHNSSSPPPLQNRKSPSPLAFCPCPPVNSISKELPFLLHAFYPGYPLLLPPPHLFTYGALPSDQCPHLLMLPQDPSYPTMAMPSLLMMVNELGHPSARWETLLPYPGAFQASGQALPSQARNPGAGAAPTDSPGLERGGMASPAKRVPLSSQTGTAALPYPLKKKNGKILYECNICGKSFGQLSNLKVHLRVHSGERPFQCALCQKSFTQLAHLQKHHLVHTGERPHKCSVCHKRFSSSSNLKTHLRLHSGARPFQCSVCRSRFTQHIHLKLHHRLHAPQPCGLVHTQLPLASLACLAQWHQGALDLMAVASEKHMGYDIDEVKVSSTSQGKARAVSLSSAGTPLVMGQDQNN

SEQ ID NO: 5186 - protein, 240 aa, Homo sapiens
MFQRLNKMFVGEVSSSSNQEPEFNEKEDDEWILVDFIDTCTGFSAEEEEEEEDISEESPTEHPSVFSCLPASLECLADTSDSCFLQFESCPMEESWFITPPPCFTAGGLTTIKVETSPMENLLIEHPSMSVYAVHNSCPGLSEATRGTDELHSPSSPRVEAQNEMGQHIHCYVAALAAHTTFLEQPKSFRPSQWIKEHSERQPLNRNSLRRQNLTRDCHPRQVKHNGWVVHQPCPRQYNY

SEQ ID NO: 5187 - protein, 470 aa, Homo sapiens
MEDIQTNAELKSTQEQSVPAESAAVLNDYSLTKSHEMENVDSGEGPANEDEDIGDDSMKVKDEYSERDENVLKSEPMGNAEEPEIPYSYSREYNEYENIKLERHVVSFDSSRPTSGKMNCDVCGLSCISFNVLMVHKRSHTGERPFQCNQCGASFTQKGNLLRHIKLHTGEKPFKCHLCNYACQRRDALTGHLRTHSVEKPYKCEFCGRSYKQRSSLEEHKERCRTFLQSTDPGDTGEKRHCFDVNYNSSYMYEKESELIQTRMMDQAINNAISYLGAEALRPLVQTPPAPTSEMVPVISSMYPIALTRAEMSNGAPQELEKKSIHLPEKSVPSERGLSPNNSGHDSTDTDSNHEERQNHIYQQNHMVLSRARNGMPLLKEVPRSYELLKPPPICPRDSVKVINKEGEVMDVYRCDHCRVLFLDYVMFTIHMGCHGFRDPFECNMCGYRSHDRYEFSSHIARGEHRALLK

SEQ ID NO: 5188 - protein, 598 aa, Homo sapiens
MPCVQAQYGSSPQGASPASQSYSYHSSGEYSSDFLTPEFVKFSMDLTNTEITATTSLPSFSTFMDNYSTGYDVKPPCLYQMPLSGQQSSIKVEDIQMHNYQQHSHLPPQSEEMMPHSGSVYYKPSSPPTPTTPGFQVQHSPMWDDPGSLHNFHQNYVATTHMIEQRKTPVSRLSLFSFKQSPPGTPVSSCQMRFDGPLHVPMNPEPAGSHHVVDGQTFAVPNPIRKPASMGFPGLQIGHASQLLDTQVPSPPSRGSPSNEGLCAVCGDNAACQHYGVRTCEGCKGFFKRTVQKNAKYVCLANKNCPVDKRRRNRCQYCRFQKCLAVGMVKEVVRTDSLKGRRGRLPSKPKSPQEPSPPSPPVSLISALVRAHVDSNPAMTSLDYSRFQANPDYQMSGDDTQHIQQFYDLLTGSMEIIRGWAEKIPGFADLPKADQDLLFESAFLELFVLRLAYRSNPVEGKLIFCNGVVLHRLQCVRGFGEWIDSIVEFSSNLQNMNIDISAFSCIAALAMVTERHGLKEPKRVEELQNKIVNCLKDHVTFNNGGLNRPNYLSKLLGKLPELRTLCTQGLQRIFYLKLEDLVPPPAIIDKLFLDTLPF

SEQ ID NO: 5189 - protein, 509 aa, Homo sapiens
MEDIQTNAELKSTQEQSVPAESAAVLNDYSLTKSHEMENVDSGEGPANEDEDIGDDSMKVKDEYSERDENVLKSEPMGNAEEPEIPYSYSREYNEYENIKLERHVVSFDSSRPTSGKMNCDVCGLSCISFNVLMVHKRSHTGERPFQCNQCGASFTQKGNLLRHIKLHTGEKPFKCHLCNYACQRRDALTGHLRTHSVEKPYKCEFCGRSYKQRSSLEEHKERCRTFLQSTDPGDTASAEARHIKAEMGSERALVLDRLASNVAKRKSSMPQKFIGEKRHCFDVNYNSSYMYEKESELIQTRMMDQAINNAISYLGAEALRPLVQTPPAPTSEMVPVISSMYPIALTRAEMSNGAPQELEKKSIHLPEKSVPSERGLSPNNSGHDSTDTDSNHEERQNHIYQQNHMVLSRARNGMPLLKEVPRSYELLKPPPICPRDSVKVINKEGEVMDVYRCDHCRVLFLDYVMFTIHMGCHGFRDPFECNMCGYRSHDRYEFSSHIARGEHRALLK

SEQ ID NO: 5190 - protein, 296 aa, Homo sapiens
MKNEIAAVVFFFTRLVRKHDKLKKEAVERFAEKLTLILQEKYKNHWYPEKPSKGQAYRCIRVNKFQRVDPDVLKACENSCILYSDLGLPKELTLWVDPCEVCCRRDGVSPCWPDCSQTPDLVIRPPWPPKALDYRREPLRPASSFLIMYGEKNNAFIVASFENKDENKDEISRKVTRALDKVTSDYHSGSSSSDEETSKEMEVKPSSVTAAASPVYQISELIFPPLPMWHPLPRKKPGMYRGNGHQNHYPPPVPFGYPNQGRKNKPYRPIPVTWVPPPGMHCDRNHWINPHMLAPH

SEQ ID NO: 5191 - protein, 894 aa, Homo sapiens
RSQVLQTYVAFLKSSEEVEMQFQSLKEFYETEIPQKEQDDAKAKHCSDSAEKQWQLFLKKSFITQDLGLEFLNLINMAKENEILDVKNEVYLMKNTMENQKAEREELSLLRLAWQLKATESKPGKQQWAAFKEQLKKTSHNLKLLQEALMPVSALDLGGSLQFILDLRQKWNDMKPQFQQLNDEVQYIMKESEELTGRGAPVKEKSQQLKDLIHFHQKQKERIQDYEDILYKVVQFHQVKEELGRLIKSRELEFVEQPKELGDAHDVQIHLRCSQEKQARVDHLHRLALSLGVDIISSVQRPHCSNVSAKNLQQQLELLEEDSMKWRAKAEEYGRTLSRSVEYCAMRDEINELKDSFKDIKKKFNNLKFNYTKKNEKSRNLKALKYQIQQVDMYAEKMQALKRKMEKVSNKTSDSFLNYPSDKVNVLLEVMKDLQKHVDDFDKVVTDYKKNLDLTEHFQEVIEECHFWYEDASATVVRVGKYSTECKTKEAVKILHQQFNKFIAPSVPQQEERIQEATDLAQHLYGLEEGQKYIEKIVTKHKEVLESVTELCESLTELEEKLKQGDVLKMNPNLEDFHYDYIDLLKEPAKNKQTIFNEERNKGQVQVADLLGINGTGEERLPQDLKVSTDKEGGVQDLLLPEDMLSGEEYECVSPDDISLPPLPGSPESPLAPSDMEVEEPVSSSLSLHISSYGVQAGTSSPGDAQESVLPPPVAFADACNDKRETFSSHFERPYLQFKAEPPLTSRGFVEKSTALHRISAEHPESMMSEVHERALQQHPQAQGGLLETREKMHADNNFTKTQDRLHASSDAFSGLRFQSGTSRGYQRQMVPREEIKSTSAKSSVVSLADQAPNFSRLLSNVTVMEGSPVTLEVEVTGFPEPTLTWWVAYNDKP

SEQ ID NO: 5192 - protein, 636 aa, Homo sapiens
MTTWSLRRRPARTLGLLLLVVLGFLVLRRLDWSTLVPLRLRHRQLGLQAKGWNFMLEDSTFWIFGGSIHYFRVPREYWRDRLLKMKACGLNTLTTYVPWNLHEPERGKFDFSGNLDLEAFVLMAAEIGLWVILRPGPYICSEMDLGGLPSWLLQDPGMRLRTTYKGFTEAVDLYFDHLMSRVVPLQYKRGGPIIAVQVENEYGSYNKDPAYMPYVKKALEDRGIVELLLTSDNKDGLSKGIVQGVLATINLQSTHELQLLTTFLFNVQGTQPKMVMEYWTGWFDSWGGPHNILDSSEVLKTVSAIVDAGSSINLYMFHGGTNFGFMNGAMHFHDYKSDVTSYDYDAVLTEAGDYTAKYMKLRDFFGSISGIPLPPPPDLLPKMPYEPLTPVLYLSLWDALKYLGEPIKSEKPINMENLPVNGGNGQSFGYILYETSITSSGILSGHVHDRGQVFVNTVSIGFLDYKTTKIAVPLIQGYTVLRILVENRGRVNYGENIDDQRKGLIGNLYLNDSPLKNFRIYSLDMKKSFFQRFGLDKWSSLPETPTLPAFFLGSLSISSTPCDTFLKLEGWEKGVVFINGQNLGRYWNIGPQKTLYLPGPWLSSGINQVIVFEETMAGPALQFTETPHLGRNQYIK

SEQ ID NO: 5193 - protein, 506 aa, Homo sapiens
MDVRLYPSAPAVGARPGAEPAGLAHLDYYHGGKFDGDSAYVGMSDGNPELLSTSQTYNGQSENNEDYEIPPITPPNLPEPSLLHLGDHEASYHSLCHGLTPNGLLPAYSYQAMDLPAIMVSNMLAQDSHLLSGQLPTIQEMVHSEVAAYDSGRPGPLLGRPAMLASHMSALSQSQLISQMGIRSSIAHSSPSPPGSKSATPSPSSSTQEEESEVHFKISGEKRPSADPGKKAKNPKKKKKKDPNEPQKPVSAYALFFRDTQAAIKGQNPSATFGDVSKIVASMWDSLGEEQKQAYKRKTEAAKKEYLKALAAYRASLVSKSSPDQGETKSTQANPPAKMLPPKQPMYAMPGLASFLTPSDLQAFRSGASPASLARTLGSKSLLPGLSASPPPPPSFPLSPTLHQQLSLPPHAQGALLSPPVSMSPAPQPPVLPTPMALQVQLAMSPSPPGPQDFPHISEFPSSSGSCSPGPSNPTSSGDWDSSYPSGECGISTCSLLPRDKSLYLT

SEQ ID NO: 5194 - protein, 459 aa, Homo sapiens
MPQLNGGGGDDLGANDELISFKDEGEQEEKSSENSSAERDLADVKSSLVNESETNQNSSSDSEAERRPPPRSESFRDKSRESLEEAAKRQDGGLFKGPPYPGYPFIMIPDLTSPYLPNGSLSPTARTYLQMKWPLLDVQAGSLQSRQALKDARSPSPAHIVSNKVPVVQHPHHVHPLTPLITYSNEHFTPGNPPPHLPADVDPKTGIPRPPHPPDISPYYPLSPGTVGQIPHPLGWLVPQQGQPVYPITTGGFRHPYPTALTVNASMSRFPPHMVPPHHTLHTTGIPHPAIVTPTVKQESSQSDVGSLHSSKHQDSKKEEEKKKPHIKKPLNAFMLYMKEMRAKVVAECTLKESAAINQILGRRWHALSREEQAKYYELARKERQLHMQLYPGWSARDNYGKKKKRKRDKQPGETNEHSECFLNPCLSLPPITDLSAPKKCRARFGLDQQNNWCGPCSL

SEQ ID NO: 5195 - protein, 156 aa, Homo sapiens
MTTNPKPNKALKVKKEAGENAPVLSDDELVSMSVRELNQHLRGLTKEEVTRLKQRRRTLKNRGYAASCRIKRVTQKEELERQRVELQQEVEKLARENSSMRLELDALRSKYEALQTFARTVARGPVAPSKVATTSVITIVKSTELSSTSVPFSAAS

SEQ ID NO: 5196 - protein, 202 aa, Homo sapiens
MATLIYVDKENGEPGTRVVAKDGLKLGSGPSIKALDGRSQVSTPRFGKTFDAPPALPKATRKALGTVNRATEKSVKTKGPLKQKQPSFSAKKMTEKTVKAKSSVPASDDAYPEIEKFFPFNPLDFESFDLPEEHQIAHLPLSGVPLMILDEERELEKLFQLGPPSPVKMPSPPWESNLLQSPSSILSTLDVELPPVCCDIDI

SEQ ID NO: 5197 - protein, 400 aa, Homo sapiens
MSTELFSSTREEGSSGSGPSFRSNQRKMLNLLLERDTSFTVCPDVPRTPVGKFLGDSANLSILSGSPGFFRTSGSAFSWDDNGNLVDSEMKYLGSPITTVPKLDKNPNLGEDQAEEISDELMEFSLKDQEAKVSRSGLYRSPSMPENLNRPRLKQVEKFKDNTIPDKVKKKYFSGQGKLRKGLCLKKTVSLCDITITQMLEEDSNQGHLIGDFSKVCALPTVSGKHQDLKYVNPETVAALLSGKFQGLIEKFYVIDCRYPYEYLGGHIQGALNLYSQEELFNFFLKKPIVPLDTQKRIIIVFHCEFSSERGPRMCRCLREEDRSLNQYPALYYPELYILKGGYRDFFPEYMELCEPQSYCPMHHQDHKTELLRCRSQSKVQEGERQLREQIALLVKDMSP

SEQ ID NO: 5198 - protein, 158 aa, Homo sapiens
MKVIENRAMKDEEKMEIQEMQLKEAKHIAEEADRKYEEVARKLVILEGELERAEERAEVSELKCGDLEEELKNVTNNLKSLEAASEKYSEKEDKYEEEIKLLSDKLKEAETRAEFAERTVAKLEKTIDDLEEKLAQAKEENVGLHQTLDQTLNELNCI

SEQ ID NO: 5199 - protein, 533 aa, Homo sapiens
MKMRRYKLFLMFCMAGLCLISFLHFFKTLSYVTFPRELASLSPNLVSSFFWNNAPVTPQASPEPGGPDLLRTPLYSHSPLLQPLPPSKAAEELHRVDLVLPEDTTEYFVRTKAGGVCFKPGTKMLERPPPGRPEEKPEGANGSSARRPPRYLLSARERTGGRGARRKWVECVCLPGWHGPSCGVPTVVQYSNLPTKERLVPREVPRRVINAINVNHEFDLLDVRFHELGDVVDAFVVCESNFTAYGEPRPLKFREMLTNGTFEYIRHKVLYVFLDHFPPGGRQDGWIADDYLRTFLTQDGVSRLRNLRPDDVFIIDDADEIPARDGVLFLKLYDGWTEPFAFHMRKSLYGFFWKQPGTLEVVSGCTVDMLQAVYGLDGIRLRRRQYYTMPNFRQYENRTGHILVQWSLGSPLHFAGWHCSWCFTPEGIYFKLVSAQNGDFPRWGDYEDKRDLNYIRGLIRTGGWFDGTQQEYPPADPSEHMYAPKYLLKNYDRFHYLLDNPYQEPRSTAAGGWRHRGPEGRPPARGKLDEAEV

SEQ ID NO: 5200 - protein, 164 aa, Homo sapiens
MSVDPLSSKALKIKRELSENTPHLSDEALMGLSVRELNRHLRGLSAEEVTRLKQRRRTLKNRGYAASCRVKRVCQKEELQKQKSELEREVDKLARENAAMRLELDALRGKCEALQGFARSVAAARGPATLVAPASVITIVKSTPGSGSGPAHGPDPAHGPASCS

SEQ ID NO: 5201 - protein, 232 aa, Homo sapiens
MSEEVTYADLQFQNSSEMEKIPEIGKFGEKVHVTLKIEMKKMNKLQNISEELQRNISLQLMSNMNISNKIRNLSTTLQTIATKLCRELYSKEQEHKCKPCPRRWIWHKDSCYFLSDDVQTWQESKMACAAQNASLLKINNKNALEFIKSQSRSYDYWLGLSPEEDSTRGMRVDNIINSSAWVIRNAPDLNNMYCGYINRLYVQYYHCTYKKRMICEKMANPVQLGSTYFREA

SEQ ID NO: 5202 - protein, 575 aa, Homo sapiens
MNGPALQPSSPSSAPSASPAAAPRGWSEFCELHAVAAARELARQYWLFAREHPQHAPLRAELVSLQFTDLFQRYFCREVRDGRAPGRDYRDTGRGPPAKAEASPEPGPGPAAPGLPKARSSEELAPPRPPGPCSFQHFRRSLRHIFRRRSAGELPAAHTAAAPGTPGEAAETPARPGLAKKFLPWSLAREPPPEALKEAVLRYSLADEASMDSGARWQRGRLALRRAPGPDGPDRVLELFDPPKSSRPKLQAACSSIQEVRWCTRLEMPDNLYTFVLKVKDRTDIIFEVGDEQQLNSWMAELSECTGRGLESTEAEMHIPSALEPSTSSSPRGSTDSLNQGASPGGLLDPACQKTDHFLSCYPWFHGPISRVKAAQLVQLQGPDAHGVFLVRQSETRRGEYVLTFNFQGIAKHLRLSLTERGQCRVQHLHFPSVVDMLHHFQRSPIPLECGAACDVRLSSYVVVVSQPPGSCNTVLFPFSLPHWDSESLPHWGSELGLPHLSSSGCPRGLSPEGLPGRSSPPEQIFHLVPSPEELANSLQHLEHEPVNRARDSDYEMDSSSRSHLRAIDNQYTPL

SEQ ID NO: 5203 - protein, 437 aa, Homo sapiens
MALAGAPAGGPCAPALEALLGAGALRLLDSSQIVIISAAQDASAPPAPTGPAAPAAGPCDPDLLLFATPQAPRPTPSAPRPALGRPPVKRRLDLETDHQYLAESSGPARGRGRHPGKGVKSPGEKSRYETSLNLTTKRFLELLSHSADGVVDLNWAAEVLKVQKRRIYDITNVLEGIQLIAKKSKNHIQWLGSHTTVGVGGRLEGLTQDLRQLQESEQQLDHLMNICTTQLRLLSEDTDSQRLAYVTCQDLRSIADPAEQMVMVIKAPPETQLQAVDSSENFQISLKSKQGPIDVFLCPEETVGGISPGKTPSQEVTSEEENRATDSATIVSPPPSSPPSSLTTDPSQSLLSLEQEPLLSRMGSLRAPVDEDRLSPLVAADSLLEHVREDFSGLLPEEFISLSPPHEALDYHFGLEEGEGIRDLFDCDFGDLTPLDF

SEQ ID NO: 5204 - protein, 287 aa, Homo sapiens
MAAEARVSRWYFGGLASCGAACCTHPLDLLKVHLQTQQEVKLRMTGMALRVVRTDGILALYSGLSASLCRQMTYSLTRFAIYETVRDRVAKGSQGPLPFHEKVLLGSVSGLAGGFVGTPADLVNVRMQNDVKLPQGQRRNYAHALDGLYRVAREEGLRRLFSGATMASSRGALVTVGQLSCYDQAKQLVLSTGYLSDNIFTHFVASFIAGGCATFLCQPLDVLKTRLMNSKGEYQGVFHCAVETAKLGPLAFYKGLVPAGIRLIPHTVLTFVFLEQLRKNFGIKVPS

SEQ ID NO: 5205 - protein, 470 aa, Homo sapiens
MEDIQTNAELKSTQEQSVPAESAAVLNDYSLTKSHEMENVDSGEGPANEDEDIGDDSMKVKDEYSERDENVLKSEPMGNAEEPEIPYSYSREYNEYENIKLERHVVSFDSSRPTSGKMNCDVCGLSCISFNVLMVHKRSHTGERPFQCNQCGASFTQKGNLLRHIKLHTGEKPFKCHLCNYACQRRDALTGHLRTHSASAEARHIKAEMGSERALVLDRLASNVAKRKSSMPQKFIGEKRHCFDVNYNSSYMYEKESELIQTRMMDQAINNAISYLGAEALRPLVQTPPAPTSEMVPVISSMYPIALTRAEMSNGAPQELEKKSIHLPEKSVPSERGLSPNNSGHDSTDTDSNHEERQNHIYQQNHMVLSRARNGMPLLKEVPRSYELLKPPPICPRDSVKVINKEGEVMDVYRCDHCRVLFLDYVMFTIHMGCHGFRDPFECNMCGYRSHDRYEFSSHIARGEHRALLK

SEQ ID NO: 5206 - protein, 480 aa, Homo sapiens
MEVAPEQPRWMAHPAVLNAQHPDSHHPGLAHNYMEPAQLLPPDEVDVFFNHLDSQGNPYYANPAHARARVSYSPAHARLTGGQMCRPHLLHSPGLPWLDGGKAALSAAAAHHHNPWTVSPFSKTPLHPSAAGGPGGPLSVYPGAGGGSGGGSGSSVASLTPTAAHSGSHLFGFPPTPPKEVSPDPSTTGAASPASSSAGGSAARGEDKDGVKYQVSLTESMKMESGSPLRPGLATMGTQPATHHPIPTYPSYVPAAAHDYSSGLFHPGGFLGGPASSFTPKQRSKARSCSEGRECVNCGATATPLWRRDGTGHYLCNACGLYHKMNGQNRPLIKPKRRLSAARRAGTCCANCQTTTTTLWRRNANGDPVCNACGLYYKLHNVNRPLTMKKEGIQTRNRKMSNKSKKSKKGAECFEELSKCMQEKSSPFSAAALAGHMAPVGHLPPFSHSGHILPTPTPIHPSSSLSFGHPHPSSMVTAMG

SEQ ID NO: 5207 - protein, 171 aa, Homo sapiens
MAMSQESLTFKDVFVDFTLEEWQQLDSAQKNLYRDVMLENYSHLVSVGYLVAKPDVIFRLGPGEESWMADGGTPVRTCAGEDRPEVWQVDEQIDHYKESQDKLPWQAAFIGKETLKDESGQESRTCRKSIYLSTEFDSVRQRLPKYYSWEKAFKTSFKLSWSKWKLCKKER

SEQ ID NO: 5208 - protein, 445 aa, Homo sapiens
MSAEVIHQVEEALDTDEKEMLLFLCRDVAIDVVPPNVRDLLDILRERGKLSVGDLAELLYRVRRFDLLKRILKMDRKAVETHLLRNPHLVSDYRVLMAEIGEDLDKSDVSSLIFLMKDYMGRGKISKEKSFLDLVVELEKLNLVAPDQLDLLEKCLKNIHRIDLKTKIQKYKQSVQGAGTSYRNVLQAAIQKSLKDPSNNFRSIPEERYKMKSKPLGICLIIDCIGNETELLRDTFTSLGYEVQKFLHLSMHGISQILGQFACMPEHRDYDSFVCVLVSRGGSQSVYGVDQTHSGLPLHHIRRMFMGDSCPYLAGKPKMFFIQNYVVSEGQLEDSSLLEVDGPAMKNVEFKAQKRGLCTVHREADFFWSLCTADMSLLEQSHSSPSLYLQCLSQKLRQERKRPLLDLHIELNGYMYDWNSRVSAKEKYYVWLQHTLRKKLILSYT

SEQ ID NO: 5209 - protein, 1043 aa, Homo sapiens
MPVRGDRGFPPRRELSGWLRAPGMEELIWEQYTVTLQKDSKRGFGIAVSGGRDNPHFENGETSIVISDVLPGGPADGLLQENDRVVMVNGTPMEDVLHSFAVQQLRKSGKVAAIVVKRPRKVQVAALQASPPLDQDDRAFEVMDEFDGRSFRSGYSERSRLNSHGGRSRSWEDSPERGRPHERARSRERDLSRDRSRGRSLERGLDQDHARTRDRSRGRSLERGLDHDFGPSRDRDRDRSRGRSIDQDYERAYHRAYDPDYERAYSPEYRRGARHDARSRGPRSRSREHPHSRSPSPEPRGRPGPIGVLLMKSRANEEYGLRLGSQIFVKEMTRTGLATKDGNLHEGDIILKINGTVTENMSLTDARKLIEKSRGKLQLVVLRDSQQTLINIPSLNDSDSEIEDISEIESNRSFSPEERRHQYSDYDYHSSSEKLKERPSSREDTPSRLSRMGATPTPFKSTGDIAGTVVPETNKEPRYQEDPPAPQPKAAPRTFLRPSPEDEAIYGPNTKMVRFKKGDSVGLRLAGGNDVGIFVAGIQEGTSAEQEGLQEGDQILKVNTQDFRGLVREDAVLYLLEIPKGEMVTILAQSRADVYRDILACGRGDSFFIRSHFECEKETPQSLAFTRGEVFRVVDTLYDGKLGNWLAVRIGNELEKGLIPNKSRAEQMASVQNAQRDNAGDRADFWRMRGQRSGVKKNLRKSREDLTAVVSVSTKFPAYERVLLREAGFKRPVVLFGPIADIAMEKLANELPDWFQTAKTEPKDAGSEKSTGVVRLNTVRQIIEQDKHALLDVTPKAVDLLNYTQWFPIVIFFNPDSRQGVKTMRQRLNPTSNKSSRKLFDQANKLKKTCAHLFTATINLNSANDSWFGSLKDTIQHQQGEAVWVSEGKMEGMDDDPEDRMSYLTAMGADYLSCDSRLISDFEDTDGEGGAYTDNELDEPAEEPLVSSITRSSEPVQHEEIEIAQKHPDIYAVPIKTHKPDPGTPQHTSSRPPEPQKAPSRPYQDTRGSYGSDAEEEEYRQQLSEHSKRGYYGQSARYRDTEL

SEQ ID NO: 5210 - protein, 83 aa, Homo sapiens
MQNDAGEFVDLYVPRKCSASNRIIGAKDHASIQMNVAEVDKVTGRFNGQFKTYAICGAIRRMGESDDSILRLAKADGIVSKNF

SEQ ID NO: 5211 - protein, 403 aa, Homo sapiens
MSHRKFSAPRHGSLGFLPRKRSSRHRGKVKSFPKDDPSKPVHLTAFLGYKAGMTHIVREVDRPGSKVNKKEVVEAVTIVETPPMVVVGIVGYVETPRGLRTFKTVFAEHISDECKRRFYKNWHKSKKKAFTKYCKKWQDEDGKKQLEKDFSSMKKYCQVIRVIAHTQMRLLPLRQKKAHLMEIQVNGGTVAEKLDWARERLEQQVPVNQVFGQDEMIDVIGVTKGKGYKGVTSRWHTKKLPRKTHRGLRKVACIGAWHPARVAFSVARAGQKGYHHRTEINKKIYKIGQGYLIKDGKLIKNNASTDYDLSDKSINPLGGFVHYGEVTNDFVMLKGCVVGTKKRVLTLRKSLLVQTKRRALEKIDLKFIDTTSKFGHGRFQTMEEKKAFMGPLKKDRIAKEEGA

SEQ ID NO: 5212 - protein, 148 aa, Homo sapiens [sequence omitted]

SEQ ID NO: 5213 - protein, 114 aa, Homo sapiens
MASVSELACIYSALILHDDEVTVTEDKINALIKAAGVNVEPFWPGLFAKALANVNIGSLICNVGAGGPAPAAGAAPAGGPAPSTAAAPAEEKKVEAKKEESEESDDDMGFGLFD

SEQ ID NO: 5214 - protein, 122 aa, Homo sapiens
MAPQKDRKPKRSTWRFNLDLTHPVEDGIFDSGNFEQFLREKVKVNGKTGNLGNVVHIERFKNKITVVSEKQFSKRYLKYLTKKYLKKNNLRDWLRVVASDKETYELRYFQISQDEDESESED

SEQ ID NO: 5215 - protein, 128 aa, Homo sapiens [sequence omitted]

SEQ ID NO: 5216 - protein, 783 aa, Homo sapiens
MPGKLRSDAGLESDTAMKKGETLRKQTEEKEKKEKPKSDKTEEIAEEEETVFPKAKQVKKKAEPSEVDMNSPKSKKAKKKEEPSQNDISPKTKSLRKKKEPIEKKVVSSKTKKVTKNEEPSEEEIDAPKPKKMKKEKEMNGETREKSPKLKNGFPHPEPDCNPSEAASEESNSEIEQEIPVEQKEGAFSNFPISEETIKLLKGRGVTFLFPIQAKTFHHVYSGKDLIAQARTGTGKTFSFAIPLIEKLHGELQDRKRGRAPQVLVLAPTRELANQVSKDFSDITKKLSVACFYGGTPYGGQFERMRNGIDILVGTPGRIKDHIQNGKLDLTKLKHVVLDEVDQMLDMGFADQVEEILSVAYKKDSEDNPQTLLFSATCPHWVFNVAKKYMKSTYEQVDLIGKKTQKTAITVEHLAIKCHWTQRAAVIGDVIRVYSGHQGRTIIFCETKKEAQELSQNSAIKQDAQSLHGDIPQKQREITLKGFRNGSFGVLVATNVAARGLDIPEVDLVIQSSPPKDVESYIHRSGRTGRAGRTGVCICFYQHKEEYQLVQVEQKAGIKFKRIGVPSATEIIKASSKDAIRLLDSVPPTAISHFKQSAEKLIEEKGAVEALAAALAHISGATSVDQRSLINSNVGFVTMILQCSIEMPNISYAWKELKEQLGEEIDSKVKGMVFLKGKLGVCFDVPTASVTEIQEKWHDSRRWQLSVATEQPELEGPREGYGGFRGQREGSRGFRGQRDGNRRFRGQREGSRGPRGQRSGGGNKSNRSQNKGQKRSFSKAFGQ

SEQ ID NO: 5217 - protein, 543 aa, Homo sapiens
MVVATYTCDQCGAETYQPIQSPTFMPLIMCPSQECQTNRSGGRLYLQTRGSRFIKFQEMKMQEHSDQVPVGNIPRSITVLVEGENTRIAQPGDHVSVTGIFLPILRTGFRQVVQGLLSETYLEAHRIVKMNKSEDDESGAGELTREELRQIAEEDFYEKLAASIAPEIYGHEDVKKALLLLLVGGVDQSPRGMKIRGNINICLMGDPGVAKSQLLSYIDRLAPRSQYTTGRGSSGVGLTAAVLRDSVSGELTLEGGALVLADQGVCCIDEFDKMAEADRTAIHEVMEQQTISIAKAGILTTLNARCSILAAANPAYGRYNPRRSLEQNIQLPAALLSRFDLLWLIQDRPDRDNDLRLAQHITYVHQHSRQPPSQFEPLDMKLMRRYIAMCREKQPMVPESLADYITAAYVEMRREAWASKDATYTSARTLLAILRLSTALARLRMVDVVEKEDVNEAIRLMEMSKDSLLGDKGQTARTQRPADVIFATVRELVSGGRSVRFSEAEQRCVSRGFTPAQFQAALDEYEELNVWQVNASRTRITFV

SEQ ID NO: 5218 - protein, 527 aa, Homo sapiens
MGSSEVSIIPGLQKEEKAAVERRRLHVLKALKKLRIEADEAPVVAVLGSGGGLRAHIACLGVLSEMKEQGLLDAVTYLAGVSGSTWAISSLYTNDGDMEALEADLKHRFTRQEWDLAKSLQKTIQAARSENYSLTDFWAYMVISKQTRELPESHLSNMKKPVEEGTLPYPIFAAIDNDLQPSWQEARAPETWFEFTPHHAGFSALGAFVSITHFGSKFKKGRLVRTHPERDLTFLRGLWGSALGNTEVIREYIFDQLRNLTLKGLWRRAVANAKSIGHLIFARLLRLQESSQGEHPPPEDEGGEPEHTWLTEMLENWTRTSLEKQEQPHEDPERKGSLSNLMDFVKKTGICASKWEWGTTHNFLYKHGGIRDKIMSSRKHLHLVDAGLAINTPFPLVLPPTREVHLILSFDFSAGDPFETIRATTDYCRRHKIPFPQVEEAELDLWSKAPASCYILKGETGPVVMHFPLFNIDACGGDIEAWSDTYDTFKLADTYTLDVVVLLLALAKKNVRENKKKILRELMNVAG

SEQ ID NO: 5219 - protein, 368 aa, Homo sapiens
MNPAAEAEFNILLATDSYKVTHYKQYPPNTSKVYSYFECREKKTENSKLRKVKYEETVFYGLQYILNKYLKGKVVTKEKIQEAKDVYKEHFQDDVFNEKGWNYILEKYDGHLPIEIKAVPEGFVIPRGNVLFTVENTDPECYWLTNWIETILVQSWYPITVATNSREQKKILAKYLLETSGNLDGLEYKLHDFGYRGVSSQETAGIGASAHLVNFKGTDTVAGLALIKKYYGTKDPVPGYSVPAAEHSTITAWGKDHEKDAFEHIVTQFSSVPVSVVSDSYDIYNACEKIWGEDLRHLIVSRSTQAPLIIRPDSGNPLDTVLKVLEILGKKFPVTENSKGYKLLPPYLRVIQGDGVDINTLQEVCVLY

SEQ ID NO: 5220 - protein, 314 aa, Homo sapiens
MQTFLKGKRVGYWLSEKKIKKLNFQAFAELCRKRGMEVVQLNLSRPIEEQGPLDVIIHKLTDVILEADQNDSQSLELVHRFQEYIDAHPETIVLDPLPAIRTLLDRSKSYELIRKIEAYMEDDRICSPPFMELTSLCGDDTMRLLEKNGLTFPFICKTRVAHGTNSHEMAIVFNQEGLNAIQPPCVVQNFINHNAVLYKVFVVGESYTVVQRPSLKNFSAGTSDRESIFFNSHNVSKPESSSVLTELDKIEGVFERPSDEVIRELSRALRQALGVSLFGIDIIINNQTGQHAVIDINAFPGDCQVCFIEGWKTD

SEQ ID NO: 5221 - protein, 1081 aa, Homo sapiens
MESAGLEQLLRELLLPDTERIRRATEQLQIVLRAPAALPALCDLLASAADPQIRQFAAVLTRRRLNTRWRRLAAEQRESLKSLILTALQRETEHCVSLSLAQLSATIFRKEGLEAWPQLLQLLQHSTHSPHSPEREMGLLLLSVVVTSRPEAFQPHHRELLRLLNETLGEVGSPGLLFYSLRTLTTMAPYLSTEDVPLARMLVPKLIMAMQTLIPIDEAKACEALEALDELLESEVPVITPYLSEVLTFCLEVARNVALGNAIRIRILCCLTFLVKVKSKALLKNRLLPPLLHTLFPIVAAEPPPGQLDPEDQDSEEEELEIELMGETPKHFAVQVVDMLALHLPPEKLCPQLMPMLEEALRSESPYQRKAGLLVLAVLSDGAGDHIRQRLLPPLLQIVCKGLEDPSQVVRNAALFALGQFSENLQPHISSYSREVMPLLLAYLKSVPLGHTHHLAKACYALENFVENLGPKVQPYLPELMECMLQLLRNPSSPRAKELAVSALGAIATAAQASLLPYFPAIMEHLREFLLTGREDLQPVQIQSLETLGVLARAVGEPMRPLAEECCQLGLGLCDQVDDPDLRRCTYSLFAALSGLMGEGLAPHLEQITTLMLLSLRSTEGIVPQYDGSSSFLLFDDESDGEEEEELMDEDVEEEDDSEISGYSVENAFFDEKEDTCAAVGEISVNTSVAFLPYMESVFEEVFKLLECPHLNVRKAAHEALGQFCCALHKACQSCPSEPNTAALQAALARVVPSYMQAVNRERERQVVMAVLEALTGVLRSCGTLTLKPPGRLAELCGVLKAVLQRKTACQDTDEEEEEEDDDQAEYDAMLLEHAGEAIPALAAAAGGDSFAPFFAGFLPLLVCKTKQGCTVAEKSFAVGTLAETIQGLGAASAQFVSRLLPVLLSTAQEADPEVRSNAIFGMGVLAEHGGHPAQEHFPKLLGLLFPLLARERHDRVRDNICGALARLLMASPTRKPEPQVLAALLHALPLKEDLEEWVTIGRLFSFLYQSSPDQVIDVAPELLRICSLILADNKIPPDTKAALLLLLTFLAKQHTDSFQAALGSLPVDKAQELQAVLGLS

SEQ ID NO: 5222 - protein, 562 aa, Homo sapiens
MNTNDAKEYLARREIPQLFESLLNGLMCSKPEDPVEYLESCLQKVKELGGCDKVKWDTFVSQEKKTLPPLNGGQSRRSFLRNVMPENSNFPYRRYDRLPPIHQFSIESDTDLSETAELIEEYEVFDPTRPRPKIILVIGGPGSGKGTQSLKIAERYGFQYISVGELLRKKIHSTSSNRKWSLIAKIITTGELAPQETTITEIKQKLMQIPDEEGIVIDGFPRDVAQALSFEDQICTPDLVVFLACANQRLKERLLKRAEQQGRPDDNVKATQRRLMNFKQNAAPLVKYFQEKGLIMTFDADRDEDEVFYDISMAVDNKLFPNKEAAAGSSDLDPSMILDTGEIIDTGSDYEDQGDDQLNVFGEDTMGGFMEDLRKCKIIFIIGGPGSGKGTQCEKLVEKYGFTHLSTGELLREELASESERSKLIRDIMERGDLVPSGIVLELLKEAMVASLGDTRGFLIDGYPREVKQGEEFGRRIGDPQLVICMDCSADTMTNRLLQRSRSSLPVDDTTKTIAKRLEAYYRASIPVIAYYETKTQLHKINAEGTPEDVFLQLCTAIDSIF

SEQ ID NO: 5223 - protein, 917 aa, Homo sapiens
MFAVHLMAFYFSKLKEDQIKKVDRFLYHMRLSDDTLLDIMRRFRAEMEKGLAKDTNPTAAVKMLPTFVRAIPDGSENGEFLSLDLGGSKFRVLKVQVAEEGKRHVQMESQFYPTPNEIIRGNGTELFEYVADCLADFMKTKDLKHKKLPLGLTFSFPCRQTKLEEGVLLSWTKKFKARGVQDTDVVSRLTKAMRRHKDMDVDILALVNDTVGTMMTCAYDDPYCEVGVIIGTGTNACYMEDMSNIDLVEGDEGRMCINTEWGAFGDDGALEDIRTEFDRELDLGSLNPGKQLFEKMISGLYLGELVRLILLKMAKAGLLFGGEKSSALHTKGKIETRHVAAMEKYKEGLANTREILVDLGLEPSEADCIAVQHVCTIVSFRSANLCAAALAAILTRLRENKKVERLRTTVGMDGTLYKIHPQYPKRLHKVVRKLVPSCDVRFLLSESGSTKGAAMVTAVASRVQAQRKQIDRVLALFQLTREQLVDVQAKMRAELEYGLKKKSHGLATVRMLPTYVCGLPDGTEKGKFLALDLGGTNFRVLLVKIRSGRRSVRMYNKIFAIPLEIMQGTGEELFDHIVQCIADFLDYMGLKGASLPLGFTFSFPCRQMSIDKGTLIGWTKGFKATDCEGEDVVDMLREAIKRRNEFDLDIVAVVNDTVGTMMTCGYEDPNCEIGLIAGTGSNMCYMEDMRNIEMVEGGEGKMCINTEWGGFGDNGCIDDIWTRYDTEVDEGSLNPGKQRYEKMTSGMYLGEIVRQILIDLTKQGLLFRGQISERLRTRGIFETKFLSQIESDRLALLQVRRILQQLGLDSTCEDSIVVKEVCGAVSRRAAQLCGAGLAAIVEKRREDQGLEHLRITVGVDGTLYKLHPHFSRILQETVKELAPRCDVTFMLSEDGSGKGAALITAVAKRLQQAQKEN

SEQ ID NO: 5224 - protein, 184 aa, Homo sapiens
MEPSQCVEELEDDVFQPEDGEPVTQPGSLLSADLFAQSLLDCPLSRLQLFPLTHCCGPGLRPTSQEDKATQTLSPASPSQGVMLPCGVTEEPQRLFYGNAGYRLPLPASFPAVLPIGEQPPEGQWQHQAEVQIARKLQCIADQFHRLHVQQHQQNQNRVWWQILLFLHNLALNGEENRNGAGPR

SEQ ID NO: 5225 - protein, 1684 aa, Homo sapiens
MLGTITITVGQRDSEDVSKRDSDKEMATKSAVVHDITDDGQEETPEIIEQIPSSESNLEELTQPTESQANDIGFKKVFKFVGFKFTVKKDKTEKPDTVQLLTVKKDEGEGAAGAGDHKDPSLGAGEAASKESEPKQSTEKPEETLKREQSHAEISPPAESGQAVEECKEEGEEKQEKEPSKSAESPTSPVTSETGSTFKKFFTQGWAGWRKKTSFRKPKEDEVEASEKKKEQEPEKVDTEEDGKAEVASEKLTASEQAHPQEPAESAHEPRLSAEYEKVELPSEEQVSGSQGPSEEKPAPLATEVFDEKIEVHQEEVVAEVHVSTVEERTEEQKTEVEETAGSVPAEELVEMDAEPQEAEPAKELVKLKETCVSGEDPTQGADLSPDEKVLSKPPEGVVSEVEMLSSQERMKVQGSPLKKLFTSTGLKKLSGKKQKGKRGGGDEESGEHTQVPADSPDSQEEQKGESSASSPEEPEEITCLEKGLAEVQQDGEAEEGATSDGEKKREGVTPWASFKKMVTPKKRVRRPSESDKEDELDKVKSATLSSTESTASEMQEEMKGSVEEPKPEEPKRKVDTSVSWEALICVGSSKKRARRGSSSDEEGGPKAMGGDHQKADEAGKDKETGTDGILAGSQEHDPGQGSSSPEQAGSPTEGEGVSTWESFKRLVTPRKKSKSKLEEKSEDSIAGSGVEHSTPDTEPGKEESWVSIKKFIPGRRKKRPDGKQEQAPVEDAGPTGANEDDSDVPAVVPLSEYDAVEREKMEAQQAQKSAEQPEQKAATEVSKELSESQVHMMAAAVADGTRAATIIEERSPSWISASVTEPLEQVEAEAALLTEEVLEREVIAEEEPPTVTEPLPENREARGDTVVSEAELTPEAVTAAETAGPLGAEEGTEASAAEETTEMVSAVSQLTDSPDTTEEATPVQEVEGGVPDIEEQERRTQEVLQAVAEKVKEESQLPGTGGPEDVLQPVQRAEAERPEEQAEASGLKKETDVVLKVDAQEAKTEPFTQGKVVGQTTPESFEKAPQVTESIESSELVTTCQAETLAGVKSQEMVMEQAIPPDSVETPTDSETDGSTPVADFDAPGTTQKDEIVEIHEENEVASGTQSGGTEAEAVPAQKERPPAPSSFVFQEETKEQSKMEDTLEHTDKEVSVETVSILSKTEGTQEADQYADEKTKDVPFFEGLEGSIDTGITVSREKVTEVALKGEGTEEAECKKDDALELQSHAKSPPSPVEREMVVQVEREKTEAEPTHVNEEKLEHETAVTVSEEVSKQLLQTVNVPIIDGAKEVSSLEGSPPPCLGQEEAVCTKIQVQSSEASFTLTAAAEEEKVLGETANILETGETLEPAGAHLVLEEKSSEKNEDFAAHPGEDAVPTGPDCQAKSTPVIVSATTKKGLSSDLEGEKTTSLKWKSDEVDEQVACQEVKVSVAIEDLEPENGILELETKSSKLVQNIIQTAVDQFVRTEETATEMLTSELQTQAHVIKADSQDAGQETEKEGEEPQASAQDETPITSAKEESESTAVGQAHSDISKDMSEASEKTMTVEVEGSTVNDQQLEEVVLPSEEEGGGAGTKSVPEDDGHALLAERIEKSLVEPKEDEKGDDVDDPENQNSALADTDASGGLTKESPDTNGPKQKEKEDAQEVELQEGKVHSESDKAITPQAQEELQKQERESAKSELTES

SEQ ID NO: 5226 - protein, 588 aa, Homo sapiens
MGGLEKKKYERGSATNYITRNKARKKLQLSLADFRRLCILKGIYPHEPKHKKKVNKGSTAARTFYLIKDIRFLLHEPIVNKFREYKVFVRKLRKAYGKSEWNTVERLKDNKPNYKLDHIIKERYPTFIDALRDLDDALSMCFLFSTFPRTGKCHVQTIQLCRRLTVEFMHYIIAARALRKVFLSIKGIYYQAEVLGQPIVWITPYAFSHDHPTDVDYRVMATFTEFYTTLLGFVNFRLYQLLNLHYPPKLEGQAQAEAKAGEGTYALDSESCMEKLAALSASLARVVVPATEEEAEVDEFPTDGEMSAQEEDRRKELEAQEKHKKLFEGLKFFLNREVPREALAFIIRSFGGEVSWDKSLCIGATYDVTDSRITHQIVDRPGQQTSVIGRCYVQPQWVFDSVNARLLLPVAEYFSGVQLPPHLSPFVTEKEGDYVPPEKLKLLALQRGEDPGNLNESEEEEEEDDNNEGDGDEEGENEEEEEDAEAGSEKEEEARLAALEEQRMEGKKPRVMAGTLKLEDKQRLAQEEESEAKRLAIMMMKKREKYLYQKIMFGKRRKIREANKLAEKRKAHDEAVRSEKKAKKARPE

SEQ ID NO: 5227 - protein, 410 aa, Homo sapiens
MAAVGAEARGAWCVPCLVSLDTLQELCRKEKLTCKSIGITKRNLNNYEVEYLCDYKVVKDMEYYLVKWKGWPDSTNTWEPLQNLKCPLLLQQFSNDKHNYLSQVKKGKAITPKDNNKTLKPAIAEYIVKKAKQRIALQRWQDELNRRKNHKGMIFVENTVDLEGPPSDFYYINEYKPAPGISLVNEATFGCSCTDCFFQKCCPAEAGVLLAYNKNQQIKIPPGTPIYECNSRCQCGPDCPNRIVQKGTQYSLCIFRTSNGRGWGVKTLVKIKRMSFVMEYVGEVITSEEAERRGQFYDNKGITYLFDLDYESDEFTVDAARYGNVSHFVNHSCDPNLQVFNVFIDNLDTRLPRIALFSTRTINAGEELTFDYQMKGSGDISSDSIDHSPAKKRVRTVCKCGAVTCRGYLN

SEQ ID NO: 5228 - protein, 142 aa, Homo sapiens
MGKSEKIALPHGQLVHGIHLYEQPKINRQKSKYNLPLTKITSAKRNENNFWQDSVSSDRIQKQEKKPFKNTENIKNSHLKKSAFLTEVSQKENYAGAKFSDPPSPSVLPKPPSHWMGSTVENSNQNRELMAVHLKTLLKVQT

SEQ ID NO: 5229 - protein, 596 aa, Homo sapiens
MEPELAAQKQPRPRRRSRRASGLSTEGATGPSADTSGSELDGRCSLRRGSSFTFLTPGPNWDFTLKRKRREKDDDVVSLSSLDLKEPSNKRVRPLARVTSLANLISPVRNGAVRRFGQTIQSFTLRGDHRSPASAQKFSSRSTVPTPAKRRSSALWSEMLDITMKESLTTREIRRQEAIYEMSRGEQDLIEDLKLARKAYHDPMLKLSIMSEEELTHIFGDLDSYIPLHEDLLTRIGEATKPDGTVEQIGHILVSWLPRLNAYRGYCSNQLAAKALLDQKKQDPRVQDFLQRCLESPFSRKLDLWSFLDIPRSRLVKYPLLLKEILKHTPKEHPDVQLLEDAILIIQGVLSDINLKKGESECQYYIDKLEYLDEKQRDPRIEASKVLLCHGELRSKSGHKLYIFLFQDILVLTRPVTRNERHSYQVYRQPIPVQELVLEDLQDGDVRMGGSFRGAFSNSEKAKNIFRIRFHDPSPAQSHTLQANDVFHKQQWFNCIRAAIAPFQSAGSPPELQGLPELHEECEGNHPSARKLTAQRRASTVSSVTQVEVDENAYRCGSGMQMAEDSKSLKTHQTQPGIRRARDKALSGGKRKETLV

SEQ ID NO: 5230 - protein, 1001 aa, Homo sapiens
MALPQSEDAMTGDTDKYLGPQDLKELGDDSLPAEGYMGFSLGARSASLRSFSSDRSYTLNRSSYARDSMMIEELLVPSKEQHLTFTREFDSDSLRHYSWAADTLDNVNLVSSPIHSGFLVSFMVDARGGSMRGSRHHGMRIIIPPRKCTAPTRITCRLVKRHKLANPPPMVEGEGLASRLVEMGPAGAQFLGPVIVEIPHFGSMRGKERELIVLRSENGETWKEHQFDSKNEDLTELLNGMDEELDSPEELGKKRICRIITKDFPQYFAVVSRIKQESNQIGPEGGILSSTTVPLVQASFPEGALTKRIRVGLQAQPVPDEIVKKILGNKATFSPIVTVEPRRRKFHKPITMTIPVPPPSGEGVSNGYKGDTTPNLRLLCSITGGTSPAQWEDITGTTPLTFIKDCVSFTTNVSARFWLADCHQVLETVGLATQLYRELICVPYMAKFVVFAKMNDPVESSLRCFCMTDDKVDKTLEQQENFEEVARSKDIEVLEGKPIYVDCYGNLAPLTKGGQQLVFNFYSFKENRLPFSIKIRDTSQEPCGRLSFLKEPKTTKGLPQTAVCNLNITLPAHKKIEKTDRRQSFASLALRKRYSYLTEPGMSPQSPCERTDIRMAIVADHLGLSWTELARELNFSVDEINQIRVENPNSLISQSFMLLKKWVTRDGKNATTDALTSVLTKINRIDIVTLLEGPIFDYGNISGTRSFADENNVFHDPVDGYPSLQVELETPTGLHYTPPTPFQQDDYFSDISSIESPLRTPSRLSDGLVPSQGNIEHSADGPPVVTAEDASLEDSKLEDSVPLTEMPEAVDVDESQLENVCLSWQNETSSGNLESCAQARRVTGGLLDRLDDSPDQCRDSITSYLKGEAGKFEANGSHTEITPEAKTKSYFPESQNDVGKQSTKETLKPKIHGSGHVEEPASPLAAYQKSLEETSKLIIEETKPCVPVSMKKMSRTSPADGKPRLSLHEEEGSSGSEQKQGEGFKVKTKKEIRHVEKKSHS

SEQ ID NO: 5231 - protein, 471 aa, Homo sapiens
MPNSEPASLLELFNSIATQGELVRSLKAGNASKDEIDSAVKMLVSLKMSYKAAAGEDYKADCPPGNPAPTSNHGPDATEAEEDFVDPWTVQTSSAKGIDYDKLIVRFGSSKIDKELINRIERATGQRPHHFLRRGIFFSHRDMNQVLDAYENKKPFYLYTGRGPSSEAMHVGHLIPFIFTKWLQDVFNVPLVIQMTDDEKYLWKDLTLDQAYSYAVENAKDIIACGFDINKTFIFSDLDYMGMSSGFYKNVVKIQKHVTFNQVKGIFGFTDSDCIGKISFPAIQAAPSFSNSFPQIFRDRTDIQCLIPCAIDQDPYFRMTRDVAPRIGYPKPALLHSTFFPALQGAQTKMSASDPNSSIFLTDTAKQIKTKVNKHAFSGGRDTIEEHRQFGGNCDVDVSFMYLTFFLEDDDKLEQIRKDYTSGAMLTGELKKALIEVLQPLIAEHQARRKEVTDEIVKEFMTPRKLSFDFQ

SEQ ID NO: 5232 - protein, 705 aa, Homo sapiens
LLLLGLARGAAGAPGPDGLDVCATCHEHATCQQREGKKICICNYGFVGNGRTQCVDKNECQFGATLVCGNHTSCHNTPGGFYCICLEGYRATNNNKTFIPNDGTFCTDIDECEVSGLCRHGGRCVNTHGSFECYCMDGYLPRNGPEPFHPTTDATSCTEIDCGTPPEVPDGYIIGNYTSSLGSQVRYACREGFFSVPEDTVSSCTGLGTWESPKLHCQEINCGNPPEMRHAILVGNHSSRLGGVARYVCQEGFESPGGKITSVCTEKGTWRESTLTCTEILTKINDVSLFNDTCVRWQINSRRINPKISYVISIKGQRLDPMESVREETVNLTTDSRTPEVCLALYPGTNYTVNISTAPPRRSMPAVIGFQTAEVDLLEDDGSFNISIFNETCLKLNRRSRKVGSEHMYQFTVLGQRWYLANFSHATSFNFTTREQVPVVCLDLYPTTDYTVNVTLLRSPKRHSVQITIATPPAVKQTISNISGFNETCLRWRSIKTADMEEMYLFHIWGQRWYQKEFAQEMTFNISSSSRDPEVCLDLRPGTNYNVSLRALSSELPVVISLTTQITEPPLPEVEFFTVHRGPLPRLRLRKAKEKNGPISSYQVLVLPLALQSTFSCDSEGASSFFSNASDADGYVAAELLAKDVPDDAMEIPIGDRLYYGEYYNAPLKRGSDYCIILRITSEWNKIRHSCCCRWRVLDWVPWLL

SEQ ID NO: 5233 - protein, 296 aa, Homo sapiens
MGCRHSRLSSCKPPKKKRQEPEPEQPPRPEPHELGPLNGDTAITVQLCASEEAERHQKDITRILQQHEEEKKKWAQQVEKERELELRDRLDEQQRVLEGKNEEALQVLRASYEQEKEALTHSFREASSTQQETIDRLTSQLEAFQAKMKRVEESILSRNYKKHIQDYGSPSQFWEQELESLHFVIEMKNERIHELDRRLILMETVKEKNLILEEKITTLQQENEDLHVRSRNQVVLSRQLSEDLLLTREALEKEVQLRRQLQQEKEELLYRVLGANASPAFPLAPVTPTEVSFLAT

SEQ ID NO: 5234 - protein, 646 aa, Homo sapiens
MNECNVHKEGYNELNQYLTTTQSKIFQCDKYVKVFHKLLNSNRHNTKHTGKKPFKCKKCGKSFCMLLHLCQHKRIHIRENSYRCEECGKAFIWFSTLTRHRRVHTGEKSYKYECGKSFNQDSNLTTHKRIHTGQKPYKCEECGTSFYQFSYLTRHKLIHTREKPYKCEQYGKTFNQSSTLTGHKIIHNGEKPYKCEECGKAFSIFSTPTKHKIIHTEEKSHRCEEYCKAYKESSHLTTHKRIHTGEKPYKCEECGKAFSIFSTLTKHKIIHTEEKSHRCEECGKAYKESSHLTTHKRIHTGEKPYKCEECGKTFSVFSILTKHKIIHTEEKPYKCEECGKAFKRSSTLTKHRIIHTEEKPYKCEECGKAFNQSSTLSIHKIIHTGEKPYKCEECGKAFKRSSTLTIHKMIHTGEKPYKCEECGKAFNRSSHLTTHKRIHTGHKPYKCKECGKSFSVFSTLTKHKIIHTDKKPYKCEECGKAFNRSSILSIHKKIHTGEKPYKCEECGKAFKRSSHLAGHKQIHSVQKPYKCEECGKAFSIFSTLTKHKIIHTEEKPYKCEKCGKTFYRFSNLNTHKIIHTGEKPCKCEECGKAFNHSSNLIKHKLIHTGDKPYKCEACGKAFRRSSHLSRHKIIHIGIHTEETVQK

SEQ ID NO: 5235 - protein, 369 aa, Homo sapiens
MWCLERLRLGPECLRRSGDWLLPGRARGAKSRTTAACANVLTPDRIPEFCIPPRLMPRLALAALRNSWVEEAGMDEGAGRTDWDPRSQAALSLPHLPRVRTAYGFCALLESPHTRRKESLLLGGPPAPRPRAHTYGGGGGPDALLGTLRVPRAPGPATPAAPGCPRPPQDALARRPRGCRLLRVPDGLLSRALRAGRSRRLTRVRSVSSGNEDKERRAGSQSPARAPSTSPPSSRVPFPERLEAEGTVALGRAGDALRLAAEYCPGTGRLRLRLLRAESPAGGAPGPRAVSCRLSLVLRPPGTALRQCSTVVGRSRKASFDQDFCFDGLSEDEVRRLAVRVKARDEGRGRERGRLLGQGELSLGALLLL

SEQ ID NO: 5236 - protein, 222 aa, Homo sapiens
MDSFKVVLEGPAPWGFRLQGGKDFNVPLSISRLTPGGKAAQAGVAVGDWVLSIDGENAGSLTHIEAQNKIRACGERLSLGLSRAQPVQSKPQKASAPAADPPRYTFAPSVSLNKTARPFGAPPPADSAPQQNGQPLRPLVPDASKQRLMENTEDWRPRPGTGQSRSFRILAHLTGTEFMQDPDEEHLKKSREKYVLELQSPRYTRLRDWHHQRSAHVLNVQS

SEQ ID NO: 5237 - protein, 183 aa, Homo sapiens
MSSPSPGKRRMDTDVVKLIESKHEVTILGGLNEFVVKFYGPQGTPYEGGVWKVRVDLPDKYPFKSPSIGFMNKIFHPNIDEASGTVCLDVINQTWTALYDLTNIFESFLPQLLAYPNPIDPLNGDAAAMYLHRPEEYKQKIKEYIQKYATEEALKEQEEGTGDSSSESSMSDFSEDEAQDMEL

SEQ ID NO: 5238 - protein, 430 aa, Homo sapiens
MEDSASASLSSAAATGTSTSTPAAPTARKQLDKEQVRKAVDALLTHCKSRKNNYGLLLNENESLFLMVVLWKIPSKELRVRLTLPHSIRSDSEDICLFTKDEPNSTPEKTEQFYRKLLNKHGIKTVSQIISLQTLKKEYKSYEAKLRLLSSFDFFLTDARIRRLLPSLIGRHFYQRKKVPVSVNLLSKNLSREINDCIGGTVLNISKSGSCSAIRIGHVGMQIEHIIENIVAVTKGLSEKLPEWESVKLLFVKTEKSAALPIFSSFVSNWDEATKRSLLNKKKKEARRKRRERNFEKQKERKKKRQQARKTASVLSKDDVAPESGDTTVKKPESKKEQTPEHGKKKRGRGKAQVKATNESEDEIPQLVPIGKKTPANEKVEIQKHATGKKSPAKSPNPSTPRGKKRKALPASETPKAAESETPGKSPEKK

SEQ ID NO: 5239 - protein, 489 aa, Homo sapiens
MPQLNGGGGDDLGANDELISFKDEGEQEEKSSENSSAERDLADVKSSLVNESETNQNSSSDSEAERRPPPRSESFRDKSRESLEEAAKRQDGGLFKGPPYPGYPFIMIPDLTSPYLPNGSLSPTARTYLQMKWPLLDVQAGSLQSRQALKDARSPSPAHIVSPLPCCTQGHDCQHFYPPSDFTVSTQVFRDMKRSHSLQKVGEPWCIESNKVPVVQHPHHVHPLTPLITYSNEHFTPGNPPPHLPADVDPKTGIPRPPHPPDISPYYPLSPGTVGQIPHPLGWLVPQQGQPVYPITTGGFRHPYPTALTVNASMSRFPPHMVPPHHTLHTTGIPHPAIVTPTVKQESSQSDVGSLHSSKHQDSKKEEEKKKPHIKKPLNAFMLYMKEMRAKVVAECTLKESAAINQILGRRWHALSREEQAKYYELARKERQLHMQLYPGWSARDNYGKKKKRKRDKQPGETNGEKKSAFATYKVKAAASAHPLQMEAY

SEQ ID NO: 5240 - protein, 643 aa, Homo sapiens
MSEETVPEAASPPPPQGQPYFDRFSEDDPEYMRLRNRAADLRQDFNLMEQKKRVTMILQSPSFREELEGLIQEQMKKGNNSSNIWALRQIADFMASTSHAVFPTSSMNVSMMTPINDLHTADSLNLAKGERLMRCKISSVYRLLDLYGWAQLSDTYVTLRVSKEQDHFLISPKGVSCSEVTASSLIKVNILGEVVEKGSSCFPVDTTGFCLHSAIYAARPDVRCIIHLHTPATAAVSAMKWGLLPVSHNALLVGDMAYYDFNGEMEQEADRINLQKCLGPTCKILVLRNHGVVALGDTVEEAFYKIFHLQAACEIQVSALSSAGGVENLILLEQEKHRPHEVGSVQWAGSTFGPMQKSRLGEHEFEALMRMLDNLGYRTGYTYRHPFVQEKTKHKSEVEIPATVTAFVFEEDGAPVPALRQHAQKQQKEKTRWLNTPNTYLRVNVADEVQRSMGSPRPKTTWMKADEVEKSSSGMPIRIENPNQFVPLYTDPQEVLEMRNKIREQNRQDVKSAGPQSQLLASVIAEKSRSPSTESQLMSKGDEDTKDDSEETVPNPFSQLTDQELEEYKKEVERKKLELDETGQEREPGSGPAVCEFFSVALHIWSNILERKKLPQKSLAHLQSLHLLLQCRAQRRRQRQRAL

SEQ ID NO: 5241 - protein, 184 aa, Homo sapiens
MLKKMGEAVARVARKVNETVESGSDTLDLAECKLVSFPIGIYKVLRNVSGQIHLITLANNELKSLTSKFMTTFSQLRELHLEGNFLHRLPSEVSALQHLKAIDLSRNQFQDFPEQLTALPALETINLEENEIVDVPVEKLAAMPALRSINLRFNPLNAEVRVIAPPLIKFDMLMSPEGARAPLP

SEQ ID NO: 5242 - protein, 457 aa, Homo sapiens
MDSFKVVLEGPAPWGFRLQGGKDFNVPLSISRLTPGGKAAQAGVAVGDWVLSIDGENAGSLTHIEAQNKIRACGERLSLGLSRAQPVQSKPQKASAPAADPPRYTFAPSVSLNKTARPFGAPPPADSAPQQNGQPLRPLVPDASKQRLMENTEDWRPRPGTGQSRSFRILAHLTGTEFMQDPDEEHLKKSSQVPRTEAPAPASSTPQEPWPGPTAPSPTSRPPWAVDPAFAERYAPDKTSTVLTRHSQPATPTPLQSRTSIVQAAAGGVPGGGSNNGKTPVCHQCHKVIRGRYLVALGHAYHPEEFVCSQCGKVLEEGGFFEEKGAIFCPPCYDVRYAPSCAKCKKKITGEIMHALKMTWHVHCFTCAACKTPIRNRAFYMEEGVPYCERDYEKMFGTKCHGCDFKIDAGDRFLEALGFSWHDTCFVCAICQINLEGKTFYSKKDRPLCKSHAFSHV

SEQ ID NO: 5243 - protein, 619 aa, Homo sapiens
MPQLNGGGGDDLGANDELISFKDEGEQEEKSSENSSAERDLADVKSSLVNESETNQNSSSDSEAERRPPPRSESFRDKSRESLEEAAKRQDGGLFKGPPYPGYPFIMIPDLTSPYLPNGSLSPTARTLHFQSGSTHYSAYKTIEHQIAVQYLQMKWPLLDVQAGSLQSRQALKDARSPSPAHIVSNKVPVVQHPHHVHPLTPLITYSNEHFTPGNPPPHLPADVDPKTGIPRPPHPPDISPYYPLSPGTVGQIPHPLGWLVPQQGQPVYPITTGGFRHPYPTALTVNASMSRFPPHMVPPHHTLHTTGIPHPAIVTPTVKQESSQSDVGSLHSSKHQDSKKEEEKKKPHIKKPLNAFMLYMKEMRAKVVAECTLKESAAINQILGRRWHALSREEQAKYYELARKERQLHMQLYPGWSARDNYGKKKKRKRDKQPGETNEHSECFLNPCLSLPPITDLSAPKKCRARFGLDQQNNWCGPCRRKKKCVRYIQGEGSCLSPPSSDGSLLDSPPPSPNLLGSPPRDAKSQTEQTQPLSLSLKPDPLAHLSMMPPPPALLLAEATHKASALCPNGALDLPPAALQPAAPSSSIAQPSTSSLHSHSSLAGTQPQPLSLVTKSLE

SEQ ID NO: 5244 - protein, 1330 aa, Homo sapiens
MMEIQMDEGGGVVVYQDDYCSGSVMSERVSGLAGSIYREFERLIHCYDEEVVKELMPLVVNVLENLDSVLSENQEHEVELELLREDNEQLLTQYEREKALRRQAEEKFIEFEDALEQEKKELQIQVEHYEFQTRQLELKAKNYADQISRLEERESEMKKEYNALHQRHTEMIQTYVEHIERSKMQQVGGNSQTESSLPGRRKERPTSLNVFPLADGTVRAQIGGKLVPAGDHWHLSDLGQLQSSSSYQCPQDEMSESGQSSAAATPSTTGTKSNTPTSSVPSAAVTPLNESLQPLGDYGVGSKNSKRAREKRDSRNMEVQVTQEMRNVSIGMGSSDEWSDVQDIIDSTPELDMCPETRLDRTGSSPTQGIVNKAFGINTDSLYHELSTAGSEVIGDVDEGADLLGEFSGMGKEVGNLLLENSQLLETKNALNVVKNDLIAKVDQLSGEQEVLRGELEAAKQAKVKLENRIKELEEELKRVKSEAIIARREPKEEAEDVSSYLCTESDKIPMAQRRRFTRVEMARVLMERNQYKERLMELQEAVRWTEMIRASREHPSVQEKKKSTIWQFFSRLFSSSSSPPPAKRPYPSVNIHYKSPTTAGFSQRRNHAMCPISAGSRPLEFFPDDDCTSSARREQKREQYRQVREHVRNDDGRLQACGWSLPAKYKQLSPNGGQEDTRMKNVPVPVYCRPLVEKDPTMKLWCAAGVNLSGWRPNEDDAGNGVKPAPGRDPLTCDREGDGEPKSAHTSPEKKKAKELPEMDATSSRVWILTSTLTTSKVVIIDANQPGTVVDQFTVCNAHVLCISSIPAASDSDYPPGEMFLDSDVNPEDPGADGVLAGITLVGCATRCNVPRSNCSSRGDTPVLDKGQGEVATIANGKVNPSQSTEEATEATEVPDPGPSEPETATLRPGPLTEHVFTDPAPTPSSGPQPGSENGPEPDSSSTRPEPEPSGDPTGAGSSAAPTMWLGAQNGWLYVHSAVANWKKCLHSIKLKDSVLSLVHVKGRVLVALADGTLAIFHRGEDGQWDLSNYHLMDLGHPHHSIRCMAVVYDRVWCGYKNKVHVIQPKTMQIEKSFDAHPRRESQVRQLAWIGDGVWVSIRLDSTLRLYHAHTHQHLQDVDIEPYVSKMLGTGKLGFSFVRITALLVAGSRLWVGTGNGVVISIPLTETVVLHRGQLLGLRANKTSPTSGEGARPGGIIHVYGDDSSDRAASSFIPYCSMAQAQLCFHGHRDAVKFFVSVPGNVLATLNGSVLDSPAEGPGPAAPASEVEGQKLRNVLVLSGGEGYIDFRIGDGEDDETEEGAGDMSQVKPVLSKAERSHIIVWQVSYTPE

SEQ ID NO: 5245 - protein, 181 aa, Homo sapiens
MTTTTTFKGVDPNSRNSSRVLRPPGGGSNFSLGFDEPTEQPVRKNKMASNIFGTPEENQASWAKSAGAKSSGGREDLESSGLQRRNSSEASSGDFLDLKKMWTQTCQAAWGRVKRSPCLLRLCPARWPRPQCHPEEIPLAASPASSWVSSDCPERCRSVCFLHACELHNLSLTVHLLDLFH

SEQ ID NO: 5246 - protein, 1319 aa, Homo sapiens
MDALNRNQIGPGCQTQTMVQKGPLDLIETGKGLKVQTDKPHLVSLGSGRLSTAITLLPLEEGRTVIGSAARDISLQGPGLAPEHCYIENLRGTLTLYPCGNACTIDGLPVRQPTRLTQGCMLCLGQSTFLRFNHPAEAKWMKSMIPAGGRAPGPPYSPVPAESESLVNGNHTPQTATRGPSACASHSSLVSSIEKDLQEIMDSLVLEEPGAAGKKPAATSPLSPMANGGRYLLSPPTSPGAMSVGSSYENTSPAFSPLSSPASSGSCASHSPSGQEPGPSVPPLVPARSSSYHLALQPPQSRPSGARSESPRLSRKGGHERPPSPGLRGLLTDSPAATVLAEARRATESPRLGGQLPVVAISLSEYPASGALSQPTSIPGSPKFQPPVPAPRNKIGTLQDRPPSPFREPPGSERVLTTSPSRQLVGRTFSDGLATRTLQPPESPRLGRRGLDSMRELPPLSPSLSRRALSPLPTRTTPDPKLNREVAESPRPRRWAAHGASPEDFSLTLGARGRRTRSPSPTLGESLAPHKGSFSGRLSPAYSLGSLTGASPCQSPCVQRKLSSGDLRVPVTRERKNSITEISDNEDDLLEYHRRQRQERLREQEMERLERQRLETILNLCAEYSRADGGPEAGELPSIGEATAALALAGRRPSRGLAGASGRSSEEPGVATQRLWESMERSDEENLKEECSSTESTQQEHEDAPSTKLQGEVLALEEERAQVLGHVEQLKVRVKELEQQLQESAREAEMERALLQGEREAERALLQKEQKAVDQLQEKLVALETGIQKERDKEAEALETETKLFEDLEFQQLERESRVEEERELAGQGLLRSKAELLRSIAKRKERLAILDSQAGQIRAQAVQESERLARDKNASLQLLQKEKEKLTVLERRYHSLTGGRPFPKTTSTLKEVYRSKMDGEATSPLPRTRSGPLPSSSGSSSSSSQLSVATLGRSPSPKSALLTQNGTGSLPRNLAATLQDIETKRQLALQQKGQQVIEEQRRRLAELKQKAAAEAQCQWDALHGAAPFPAGPSGFPPLMHHSILHHLPAGRERGEEGEHAYDTLSLESSDSMETSISTGGNSACSPDNMSSASGLDMGKIEEMEKMLKEAHAEKNRLMESREREMELRRQALEEERRRREQVERRLQSESARRQQLVEKEVKMREKQFSQARPLTRYLPIRKEDFDLKTHIESSGHGVDTCLHVVLSSKVCRGYLVKMGGKIKSWKKRWFVFDRLKRTLSYYVDKHETKLKGVIYFQAIEEVYYDHLRSAAKSPNPALTFCVKTHDRLYYMVAPSAEAMRIWMDVIVTGAEGYTQFMN

SEQ ID NO: 5247 - protein, 706 aa, Homo sapiens
MSSDASQGVITTPPPPSMPHKERYFDRINENDPEYIRERNMSPDLRQDFNMMEQRKRVTQILQSPAFREDLECLIQEQMKKGHNPTGLLALQQIADYIMANSFSGFSSPPLSLGMVTPINDLPGADTSSYVKGEKLTRCKLASLYRLVDLFGWAHLANTYISVRISKEQDHIIIIPRGLSFSEATASNLVKVNIIGEVVDQGSTNLKIDHTGFSPHAAIYSTRPDVKCVIHIHTLATAAVSSMKCGILPISQESLLLGDVAYYDYQGSLEEQEERIQLQKVLGPSCKVLVLRNHGVVALGETLEEAFHYIFNVQLACEIQVQALAGAGGVDNLHVLDFQKYKAFTYTVAASGGGGVNMGSHQKWKVGEIEFEGLMRTLDNLGYRTGYAYRHPLIREKPRHKSDVEIPATVTAFSFEDDTVPLSPLKYMAQRQQREKTRWLNSPNTYMKVNVPEESRNGETSPRTKITWMKAEDSSKVSGGTPIKIEDPNQFVPLNTNPNEVLEKRNKIREQNRYDLKTAGPQSQLLAGIVVDKPPSTMQFEDDDHGPPAPPNPFSHLTEGELEEYKRTIERKQQGLEDAEQELLSDDASSVSQIQSQTQSPQNVPEKLEENHELFSKSFISMEVPVMVVNGKDDMHDVEDELAKRVSRLSTSTTIENIEITIKSPEKIEEVLSPEGSPSKSPSKKKKKFRTPSFLKKNKKKEKVEA

SEQ ID NO: 5248 - protein, 145 aa, Homo sapiens
MGKEKTHINIVVIGHVDSGKSTTTGHLIYKCGGIDKRTIEKFEKEAAEMGKGSFKYAWVLDKLKAERERGITIDISLWKFETSKYYVTIIDAPGHRDFIKNMITGTSQADCAVLIVAAGVGEFEAGISKNGQTREHALLAYTLGV

SEQ ID NO: 5249 - protein, 1143 aa, Homo sapiens
MEKRETFVQAVSKELVGEFLQFVQLDKEASDPFSLNELLDELSRKQKEELWQRLKNLLTDVLLESPVDGWQVVEAQGEDNMETEHGSKMRKSIEIIYAITSVILASVSVINESENYEALLECVIILNGILYALPESERKLQSSIQDLCVTWWEKGLPAKEDTGKTAFVMLLRRSLETKTGADVCRLWRIHQALYCFDYDLEESGEIKDMLLECFININYIKKEEGRRFLSCLFNWNINFIKMIHGTIKNQLQGLQKSLMVYIAEIYFRAWKKASGKILEAIENDCIQDFMFHGIHLPRRSPVHSKVREVLSYFHHQKKVRQGVEEMLYRLYKPILWRGLKARNSEVRSNAALLFVEAFPIRDPNLHAIEMDSEIQKQFEELYSLLEDPYPMVRSTGILGVCKITSKYWEMMPPTILIDLLKKVTGELAFDTSSADVRCSVFKCLPMILDNKLSHPLLEQLLPALRYSLHDNSEKVRVAFVDMLLKIKAVRAAKFWKICPMEHILVRLETDSRPVSRRLVSLIFNSFLPVNQPEEVWCERCVTLVQMNHAAARRFYQYAHEHTACTNIAKLIHVIRHCLNACIQRAVREPPEDEEEEDGREKENVTVLDKTLSVNDVACMAGLLEIIVILWKSIDRSMENNKEAKLYTINKFASVLPEYLKVFKDDRCKIPLFMLMSFMPASAVPPFSCGVISTLRSREEGAVDKSYCTLLDCLCSWGQVGHILELVDNWLPTEHAQAKSNTASKGRVQIHDTRPVKPELALVYIEYLLTHPKNRECLLSAPRKKLNHLLKALETSKADLESLLQTPGGKPRGFSEAAAPRAFGLHCRLSIHLQHKFCSEGKVYLSMLEDTGFWLESKILSFIQDQEEDYLKLHRVIYQQIIQTYLTVCKDVVMVGLGDHQFQMQLLQRSLGIMQTVKGFFYVSLLLDILKEITGSSLIQKTDSDEEVAMLLDTVQKVFQKMLECIARSFRKQPEEGLRLLYSVQRPLHEFITAVQSRHTDTPVHRGVLSTLIAGPVVEISHQLRKVSDVEELTPPEHLSDLPPFSRCLIGIIIKSSNVVRSFLDELKACVASNDIEGIVCLTAAVHIILVINAGKHKSSKVREVAATVHRKLKTFMEITLEEDSIERFLYESSSRTLGELLNS

SEQ ID NO: 5250 - protein, 661 aa, Homo sapiens
MEMTEMTGVSLKRGALVVEDNDSGVPVEETKKQKLSECSLTKGQDGLQNDFLSISEDVPRPPDTVSTGKGGKNSEAQLEDEEEEEEDGLSEECEEEESESFADMMKHGLTEADVGITKFVSSHQGFSGILKERYSDFVVHEIGKDGRISHLNDLSIPVDEEDPSEDIFTVLTAEEKQRLEELQLFKNKETSVAIEVIEDTKEKRTIIHQAIKSLFPGLETKTEDREGKKYIVAYHAAGKKALANPRKHSWPKSRGSYCHFVLYKENKDTMDAINVLSKYLRVKPNIFSYMGTKDKRAITVQEIAVLKITAQRLAHLNKCLMNFKLGNFSYQKNPLKLGELQGNHFTVVLRNITGTDDQVQQAMNSLKEIGFINYYGMQRFGTTAVPTYQVGRAILQNSWTEVMDLILKPRSGAEKGYLVKCREEWAKTKDPTAALRKLPVKRCVEGQLLRGLSKYGMKNIVSAFGIIPRNNRLMYIHSYQSYVWNNMVSKRIEDYGLKPVPGDLVLKGATATYIEEDDVNNYSIHDVVMPLPGFDVIYPKHKIQEAYREMLTADNLDIDNMRHKIRDYSLSGAYRKIIIRPQNVSWEVVAYDDPKIPLFNTDVDNLEGKTPPVFASEGKYRALKMDFSLPPSTYATMAIREVLKMDTSIKNQTQLNTTWLR

SEQ ID NO: 5251 - protein, 732 aa, Homo sapiens
MTEGTCLRRRGGPYKTEPATDLGRWRLNCERGRQTWTYLQDERAGREQTGLEAYALGLDTKNYFKDLPKAHTAFEGALNGMTFYVGLQAEDGHWTGDYGGPLFLLPGLLITCHVARIPLPAGYREEIVRYLRSVQLPDGGWGLHIEDKSTVFGTALNYVSLRILGVGPDDPDLVRARNILHKKGGAVAIPSWGKFWLAVLNVYSWEGLNTLFPEMWLFPDWAPAHPSTLWCHCRQVYLPMSYCYAVRLSAAEDPLVQSLRQELYVEDFASIDWLAQRNNVAPDELYTPHSWLLRVVYALLNLYEHHHSAHLRQRAVQKLYEHIVADDRFTKSISIGPISKTINMLVRWYVDGPASTAFQEHVSRIPDYLWMGLDGMKMQGTNGSQIWDTAFAIQALLEAGGHHRPEFSSCLQKAHEFLRLSQVPDNPPDYQKYYRQMRKGGFSFSTLDCGWIVSDCTAEALKAVLLLQEKCPHVTEHIPRERLCDAVAVLLNMRNPDGGFATYETKRGGHLLELLNPSEVFGDIMIDYTYVECTSAVMQALKYFHKRFPEHRAAEIRETLTQGLEFCRRQQRADGSWEGSWGVCFTYGTWFGLEAFACMGQTYRDGTACAEVSRACDFLLSRQMADGGWGEDFESCEERRYLQSAQSQIHNTCWAMMGLMAVRHPDIEAQERGVRCLLEKQLPNGDWPQENIAGVFNKSCAISYTSYRNIFPIWALGRFSQLYPERALAGHP

SEQ ID NO: 5252 - protein, 73 aa, Homo sapiens
MPGGGPEMDDYMETLKDEEDALWENVECNRHMLSRYINPAKLTPYLRQCKVIDEQDEDEVLNAPMLPSKINRA

SEQ ID NO: 5253 - protein, 179 aa, Homo sapiens
MASQNRDPAATSVAAARKGAEPSGGAARGPVGKRLQQELMTLMMSGDKGISAFPESDNLFKWVGTIHGAAGTVYEDLRYKLSLEFPSGYPYNAPTVKFLTPCYHPNVDTQGNICLDILKEKWSALYDVRTILLSIQSLLGEPNIDSPLNTHAAELWKNPTAFKKYLQETYSKQVTSQEP

SEQ ID NO: 5254 - protein, 126 aa, Homo sapiens; identical to SEQ ID NO: 4956

SEQ ID NO: 5255 - protein, 419 aa, Homo sapiens
MPLSRWLRSVGVFLLPAPYWAPRERWLGSLRRPSLVHGYPVLAWHSARCWCQAWTEEPRALCSSLRMNGDQNSDVYAQEKQDFVQHFSQIVRVLTEDEMGHPEIGDAIARLKEVLEYNAIGGKYNRGLTVVVAFRELVEPRKQDADSLQRAWTVGWCVELLQAFFLVADDIMDSSLTRRGQICWYQKPGVGLDAINDANLLEACIYRLLKLYCREQPYYLNLIELFLQSSYQTEIGQTLDLLTAPQGNVDLVRFTEKRYKSIVKYKTAFYSFYLPIAAAMYMAGIDGEKEHANAKKILLEMGEFFQIQDDYLDLFGDPSVTGKIGTDIQDNKCSWLVVQCLQRATPEQYQILKENYGQKEAEKVARVKALYEELDLPAVFLQYEEDSYSHIMALIEQYAAPLPPAVFLGLARKIYKRRK

SEQ ID NO: 5256 - protein, 497 aa, Homo sapiens
MRTQIEVIPCKICGDKSSGIHYGVITCEGCKGFFRRSQRCNAAYSCTRQQNCPIDRTSRNRCQHCRLQKCLALGMSRDAVKFGRMSKKQRDSLHAEVQKQLQQRQQQQQEPVVKTPPAGAQGADTLTYTLGLPDGQLPLGSSPDLPEASACPPGLLKASGSGPSYSNNLAKAGLNGASCHLEYSPERGKAEGRESFYSTGSQLTPDRCGLRFEEHRHPGLGELGQGPDSYGSPSFRSTPEAPYASLTEIEHLVQSVCKSYRETCQLRLEDLLRQRSNIFSREEVTGYQRKSMWEMWERCAHHLTEAIQYVVEFAKRLSGFMELCQNDQIVLLKAGAMEVVLVRMCRAYNADNRTVFFEGKYGGMELFRALGCSELISSIFDFSHSLSALHFSEDEIALYTALVLINAHRPGLQEKRKVEQLQYNLELAFHHHLCKTHRQSILAKLPPKGKLRSLCSQHVERLQIFQHLHPIVVQAAFPPLYKELFSTETESPVGLSK

SEQ ID NO: 5257 - protein, 128 aa, Homo sapiens
IGELLWGQFISAIPTRSLKFLKEAGHGTTKEEITKDAEGLDEIDHAEMELRRGQILWFRGLNRIQTQIDVINTFQTGASFKGVLRRQNMGQHLDVKLVPSSSYVAVAPVKSSPTTSVPAVSSPPMGSE

SEQ ID NO: 5258 - protein, 2364 aa, Homo sapiens
MTTTVATDYDNIEIQQQYSDVNNRWDVDDWDNENSSARLFERSRIKALADEREAVQKKTFTKWVNSHLARVSCRITDLYTDLRDGRMLIKLLEVLSGERLPKPTKGRMRIHCLENVDKALQFLKEQRVHLENMGSHDIVDGNHRLTLGLIWTIILRFQIQDISVETEDNKEKKSAKDALLLWCQMKTAGYPNVNIHNFTTSWRDGMAFNALIHKHRPDLIDFDKLKKSNAHYNLQNAFNLAEQHLGLTKLLDPEDISVDHPDEKSIITYVVTYYHYFSKMKALAVEGKRIGKVLDNAIETEKMIEKYESLASDLLEWIEQTIIILNNRKFANSLVGVQQQLQAFNTYRTVEKPPKFTEKGNLEVLLFTIQSKMRANNQKVYMPREGKLISDINKAWERLEKAEHERELALRNELIRQEKLEQLARRFDRKAAMRETWLSENQRLVSQDNFGFDLPAVEAATKKHEAIETDIAAYEERVQAVVAVARELEAENYHDIKRITARKDNVIRLWEYLLELLRARRQRLEMNLGLQKIFQEMLYIMDWMDEMKVLVLSQDYGKHLLGVEDLLQKHTLVEADIGIQAERVRGVNASAQKFATDGEGYKPCDPQVIRDRVAHMEFCYQELCQLAAERRARLEESRRLWKFFWEMAEEEGWIREKEKILSSDDYGKDLTSVMRLLSKHRAFEDEMSGRSGHFEQAIKEGEDMIAEEHFGSEKIRERIIYIREQWANLEQLSAIRKKRLEEASLLHQFQADADDIDAWMLDILKIVSSSDVGHDEYSTQSLVKKHKDVAEEIANYRPTLDTLHEQASALPQEHAESPDVRGRLSGIEERYKEVAELTRLRKQALQDTLALYKMFSEADACELWIDEKEQWLNNMQIPEKLEDLEVIQHRFESLEPEMNNQASRVAVVNQIARQLMHSGHPSEKEIKAQQDKLNTRWSQFRELVDRKKDALLSALSIQNYHLECNETKSWIREKTKVIESTQDLGNDLAGVMALQRKLTGMERDLVAIEAKLSDLQKEAEKLESEHPDQAQAILSRLAEISDVWEEMKTTLKNREASLGEASKLQQFLRDLDDFQSWLSRTQTAIASEDMPNTLTEAEKLLTQHENIKNEIDNYEEDYQKMRDMGEMVTQGQTDAQYMFLRQRLQALDTGWNELHKMWENRQNLLSQSHAYQQFLRDTKQAEAFLNNQEYVLAHTEMPTTLEGAEAAIKKQEDFMTTMDANEEKINAVVETGRRLVSDGNINSDRIQEKVDSIDDRHRKNRETASELLMRLKDNRDLQKFLQDCQELSLWINEKMLTAQDMSYDEARNLHSKWLKHQAFMAELASNKEWLDKIEKEGMQLISEKPETEAVVKEKLTGLHKMWEVLESTTQTKAQRLFDANKAELFTQSCADLDKWLHGLESQIQSDDYGKDLTSVNILLKKQQMLENQMEVRKKEIEELQSQAQALSQEGKSTDEVDSKRLTVQTKFMELLEPLNERKHNLLASKEIHQFNRDVEDEILWVGERMPLATSTDHGHNLQTVQLLIKKNQTLQKEIQGHQPRIDDIFERSQNIVTDSSSLSAEAIRQRLADLKQLWGLLIEETEKRHRRLEEAHRAQQYYFDAAEAEAWMSEQELYMMSEEKAKDEQSAVSMLKKHQILEQAVEDYAETVHQLSKTSRALVADSHPESERISMRQSKVDKLYAGLKDLAEERRGKLDERHRLFQLNREVDDLEQWIAEREVVAGSHELGQDYEHVTMLQERFREFARDTGNIGQERVDTVNHLADELINSGHSDAATIAEWKDGLNEAWADLLELIDTRTQILAASYELHKFYHDAKEIFGRIQDKHKKLPEELGRDQNTVETLQRMHTTFEHDIQALGTQVRQLQEDAARLQAAYAGDKADDIQKRENEVLEAWKSLLDACESRRVRLVDTGDKFRFFSMVRDLMLWMEDVIRQIEAQEKPRDVSSVELLMNNHQGIKAEIDARNDSFTTCIELGKSLLARKHYASEEIKEKLLQLTEKRKEMIDKWEDRWEWLRLILEVHQFSRDASVAEAWLLGQEPYLSSREIGQSVDEVEKLIKRHEAFEKSAATWDERFSALERLTTLELLEVRRQQEEEERKRRPPSPEPSTKVSEEAESQQQWDTSKGEQVSQNGLPAEQGSPRMAETVDTSEMVNGATEQRTSSKESSPIPSPTSDRKAKTALPAQSAATLPARTQETPSAQMEGFLNRKHEWEAHNKKASSRSWHNVYCVINNQEMGFYKDAKTAASGIPYHSEVPVSLKEAVCEVALDYKKKKHVFKLRLNDGNEYLFQAKDDEEMNTWIQAISSAISSDKHEVSASTQSTPASSRAQTLPTSVVTITSESSPGKREKDKEKDKEKRFSLFGKKK

SEQ ID NO: 5259 - protein, 445 aa, Homo sapiens
MLCYVTRPDAVLMEVEVEAKANGEDCLNQVCRRLGIIEVDYFGLQFTGSKGESLWLNLRNRISQQMDGLAPYRLKLRVKFFVEPHLILQEQTRHIFFLHIKEALLAGHLLCSPEQAVELSALLAQTKFGDYNQNTAKYNYEELCAKELSSATLNSIVAKHKELEGTSQASAEYQVLQIVSAMENYGIEWHSVRDSEGQKLLIGVGPEGISICKDDFSPINRIAYPVVQMATQSGKNVYLTVTKESGNSIVLLFKMISTRAASGLYRAITETHAFYRCDTVTSAVMMQYSRDLKGHLASLFLNENINLGKKYVFDIKRTSKEVYDHARRALYNAGVVDLVSRNNQSPSHSPLKSSESSMNCSSCEGLSCQQTRVLQEKLRKLKEAMLCMVCCEEEINSTFCPCGHTVCCESCAAQLQSCPVCRSRVEHVQHVYLPTHTSLLNLTVI

SEQ ID NO: 5260 - protein, 563 aa, Homo sapiens
MNPLFGPNLFLLQQEQQGLAGPLGDSLGGDHFAGGGDLPPAPLSPAGPAAYSPPGPGPAPPAAMALRNDLGSNINVLKTLNLRFRCFLAKVHELERRNRLLEKQLQQALEEGKQGRRGLGRRDQAVQTGFVSPIRPLGLQLGARPAAVCSPSARVLGSPARSPAGPLAPSAASLSSSSTSTSTTYSSSARFMPGTIWSFSHARRLGPGLEPTLVQGPGLSWVHPDGVGVQIDTITPEIRALYNVLAKVKRERDEYKRRWEEEYTVRIQLQDRVNELQEEAQEADACQEELALKVEQLKAELVVFKGLMSNNLSELDTKIQEKAMKVDMDICRRIDITAKLCDVAQQRNCEDMIQMFQKKLVPSMGGRKRERKAAVEEDTSLSESEGPRQPDGDEEESTALSINEEMQRMLNQLREYDFEDDCDSLTWEETEETLLLWEDFSGYAMAAAEAQGEQQEDSLEKVIKDTESLFKTREKEYQETIDQIELELATAKNDMNRHLHEYMEMCSMKRGLDVQMETCRRLITQSGDRKSPAFTAVPLSDPPPPPSEAEDSDRDVSSDSSMR

SEQ ID NO: 5261 - protein, 126 aa, Homo sapiens
MPEPAKSAPAPKKGSKKAVTKAQKKDGKKRKRSRKESYSVYVYKVLKQVHPDTGISSKAMGIMNSFVNDIFERIAGEASRLAHYNKRSTITSREIQTAVRLLLPGELAKHAVSEGTKAVTKYTSAK

SEQ ID NO: 5262 - protein, 622 aa, Homo sapiens
MQTQEILRILRLPELGDLGQFFRSLSATTLDSGGARRSVIGSGPQLLTHYYDDARTMYQVFRRGLSISGNGPCLGFRKPKQPYQWLSYQEVADRAEFLGSGLLQHNCKACTDQFIGVFAQNRPEWIIVELACYTYSMVVVPLYDTLGPGAIRYIINTADISTVIVDKPQKAVLLLEHVERKETPGLKLIILMDPFEEALKERGQKCGVVIKSMQAVEDCGQENHQAPVPPQPDDLSIVCFTSGTTGNPKGAMLTHGNVVADFSGFLKVTEGDIRLLSDDMKALCPTIFPVVPRLLNRMYDKIFSQANTPLKRWLLEFAAKRKQAEVRSGIIRNDSIWDELFFNKIQASLGGCVRMIVTGAAPASPTVLGFLRAALGCQVYEGYGQTECTAGCTFTTPGDWTSGHVGAPLPCNHIKLVDVEELNYWACKGEGEICVRGPNVFKGYLKDPDRTKEALDSDGWLHTGDIGKWLPAGTLKIIDRKKHIFKLAQGEYVAPEKIENIYIRSQPVAQIYVHGDSLKAFLVGIVVPDPEVMPSWAQKRGIEGTYADLCTNKDLKKAILEDMVRLGKESGLHSFEQVKAIHIHSDMFSVQNGLLTPTLKAKRPELREYFKKQIEELYSISM

SEQ ID NO: 5263 - protein, 668 aa, Homo sapiens
MTERIHSINLHNFSNSVLETLNEQRNRGHFCDVTVRIHGSMLRAHRCVLAAGSPFFQDKLLLGYSDIEIPSVVSVQSVQKLIDFMYSGVLRVSQSEALQILTAASILQIKTVIDECTRIVSQNVGDVFPGIQDSGQDTPRGTPESGTSGQSSDTESGYLQSHPQHSVDRIYSALYACSMQNGSGERSFYSGAVVSHHETALGLPRDHHMEDPSWITRIHERSQQMERYLSTTPETTHCRKQPRPVRIQTLVGNIHIKQEMEDDYDYYGQQRVQILERNESEECTEDTDQAEGTESEPKGESFDSGVSSSIGTEPDSVEQQFGPGAARDSQAEPTQPEQAAEAPAEGGPQTNQLETGASSPERSNEVEMDSTVITVSNSSDKSVLQQPSVNTSIGQPLPSTQLYLRQTETLTSNLRMPLTLTSNTQVIGTAGNTYLPALFTTQPAGSGPKPFLFSLPQPLAGQQTQFVTVSQPGLSTFTAQLPAPQPLASSAGHSTASGQGEKKPYECTLCNKTFTAKQNYVKHMFVHTGEKPHQCSICWRSFSLKDYLIKHMVTHTGVRAYQCSICNKRFTQKSSLNVHMRLHRGEKSYECYICKKKFSHKTLLERHVALHSASNGTPPAGTPPGARAGPPGVVACTEGTTYVCSVCPAKFDQIEQFNDHMRMHVSDG

SEQ ID NO: 5264 - protein, 457 aa, Homo sapiens
MTTDEGAKNNEESPTATVAEQGEDITSKKDRGVLKIVKRVGNGEETPMIGDKVYVHYKGKLSNGKKFDSSHDRNEPFVFSLGKGQVIKAWDIGVATMKKGEICHLLCKPEYAYGSAGSLPKIPSNATLFFEIELLDFKGEDLFEDGGIIRRTKRKGEGYSNPNEGATVEIHLEGRCGGRMFDCRDVAFTVGEGEDHDIPIGIDKALEKMQREEQCILYLGPRYGFGEAGKPKFGIEPNAELIYEVTLKSFEKAKESWEMDTKEKLEQAAIVKEKGTVYFKGGKYMQAVIQYGKIVSWLEMEYGLSEKESKASESFLLAAFLNLAMCYLKLREYTKAVECCDKALGLDSANEKGLYRRGEAQLLMNEFESAKGDFEKVLEVNPQNKAARLQISMCQKKAKEHNERDRRIYANMFKKFAEQDAKEEANKAMGKKTSEGVTNEKGTDSQAMEEEKPEGHV

SEQ ID NO: 5265 - protein, 548 aa, Homo sapiens
MALAGCPDSFLHHPYYQDKVEQTPRSQQDPAGPGLPAQSDRLANHQEDDVDLEALVNDMNASLESLYSACSMQSDTVPLLQNGQHARSQPRASGPPRSIQPQVSPRQRVQRSQPVHILAVRRLQEEDQQFRTSSLPAIPNPFPELCGPGSPPVLTPGSLPPSQAAAKQDVKVFSEDGTSKVVEILADMTARDLCQLLVYKSHCVDDNSWTLVEHHPHLGLERCLEDHELVVQVESTMASESKFLFRKNYAKYEFFKNPMNFFPEQMVTWCQQSNGSQTQLLQEPRHLQLLADLEDSNIFSLIAGRKQYNAPTDHGLCIKPNKVRNETKELRLLCAEDEQTRTCWMTAFRLLKYGMLLYQNYRIPQQRKALLSPFSTPVRSVSENSLVAMDFSGQTGRVIENPAEAQSAALEEGHAWRKRSTRMNILGSQSPLHPSTLSTVIHRTQHWFHGRISREESHRIIKQQGLVDGLFLLRDSQSNPKAFVLTLCHHQKIKNFQILPCEDDGQTFFSLDDGNTKFSDLIQLVDFYQLNKGVLPCKLKHHCIRVAL

SEQ ID NO: 5266 - protein, 194 aa, Homo sapiens
MAKQKRKVPEVTEKKNKKLKKASAEGPLLGPEAAPSGEGAGSKGEAVLRPGLDAEPELSPEEQRVLERKLKKERKKEERQRLREAGLVAQHPPARRSGAELALDYLCRWAQKHKNWRFQKTRQTWLLLHMYDSDKVPDEHFSTLLAYLEGLQGRARELTVQKAEALMRELDEEGSDPPLPGRAQRIRQVLQLLS

SEQ ID NO: 5267 - protein, 368 aa, Homo sapiens
MFAKGKGSAVPSDGQAREKLALYVYEYLLHVGAQKSAQTFLSEIRWEKNITLGEPPGFLHSWWCVFWDLYCAAPERRDTCEHSSEAKAFHDYSAAAAPSPVLGNIPPNDGMPGGPIPPGFFQGPPGSQPSPHAQPPPHNPSSMMGPHSQPPGGVPGTQPLLPNSMDPTRQQGHPNMGGSMQRMNPPRGMGPMGPGPQNYGSGMRPPPNSLGPAMPGINMGPGAGRPWPNPNSANSIPYSSSSPGTYVGPPGGGGPPGTPIMPSPADSTNSSDNIYTMINPVPPGGSRSNFPMGPGSDGPMGGMGGMEPHHMNGSLGSGDIDGLPKNSPNNISGISNPPGTPRDDGELGGNFLHSFQNDNYSPSMTMSV

SEQ ID NO: 5268 - protein, 616 aa, Homo sapiens
MCLEKRYLDVLSDVTGPQVSCYITAPSYVLQQLECRIINHMSSLIVGDNEELVSNVITIECSDKEKRVPFPIGIAIPFTARYRGNYRDIMVKVCDINLQSSYLNPNSLEGMKGGYKGTCASVKVYKLGIFSVVSCLKKESFTVTKKGLALKSSMDSRISLNYPPGVFTSPVLVQLKIQPVDPALVAHLKAQQDTFYSVQSTSPLIHIQHPSTYPFQKPVTLFLPCSPYLDKNNLGSEIDHKRRASATINRITPSYFNRTKIASIRKPRKNASECLKLLGFRSQDSGWCGLDDVVKTIQSGLVSVELYEHLERFIVLHLSSTMDNSHLVTFVKSLEEAMLSTTACIVLSHQKDNPHRIAVLVVPSKDLSQVLKDLHLEGFGGPPEPSRHFQVREGEQLLLRFTGNIFASSNGKDYGKDYTLIFHLQRKPRLELQIKEVDEFGNYSCPHYKGTIVVYKVPKGKIVPNLNQSLVINENHSQLPICKLPLKLPKHKKLINRPQSTKRVSKDPVEALWDNLLHWLAEELSEENAESLSSTLPLRRSTIQLIKLKNPDDLTEQIHEFLCFWKKSLPTFTDKLRLLARHLRKIGRSDLAEELKFKWENKVFTEPQQCFDVAPE

SEQ ID NO: 5269 - protein, 128 aa, Homo sapiens
MLKKMGEAVARVARKVNETVESGSDTLDLAECKLVSFPIGIYKVLRNVSGQIHLITLANNELKSLTSKFMTTFSQLRDVPVEKLAAMPALRSINLRFNPLNAEVRVIAPPLIKFDMLMSPEGARAPLP

SEQ ID NO: 5270 - protein, 1863 aa, Homo sapiens
MDLSALRVEEVQNVINAMQKILECPICLELIKEPVSTKCDHIFCKFCMLKLLNQKKGPSQCPLCKNDITKRSLQESTRFSQLVEELLKIICAFQLDTGLEYANSYNFAKKENNSPEHLKDEVSIIQSMGYRNRAKRLLQSEPENPSLQETSLSVQLSNLGTVRTLRTKQRIQPQKTSVYIELGSDSSEDTVNKATYCSVGDQELLQITPQGTRDEISLDSAKKAACEFSETDVTNTEHHQPSNNDLNTTEKRAAERHPEKYQGSSVSNLHVEPCGTNTHASSLQHENSSLLLTKDRMNVEKAEFCNKSKQPGLARSQHNRWAGSKETCNDRRTPSTEKKVDLNADPLCERKEWNKQKLPCSENPRDTEDVPWITLNSSIQKVNEWFSRSDELLGSDDSHDGESESNAKVADVLDVLNEVDEYSGSSEKIDLLASDPHEALICKSERVHSKSVESNIEDKIFGKTYRKKASLPNLSHVTENLIIGAFVTEPQIIQERPLTNKLKRKRRPTSGLHPEDFIKKADLAVQKTPEMINQGTNQTEQNGQVMNITNSGHENKTKGDSIQNEKNPNPIESLEKESAFKTKAEPISSSISNMELELNIHNSKAPKKNRLRRKSSTRHIHALELVVSRNLSPPNCTELQIDSCSSSEEIKKKKYNQMPVRHSRNLQLMEGKEPATGAKKSNKPNEQTSKRHDSDTFPELKLTNAPGSFTKCSNTSELKEFVNPSLPREEKEEKLETVKVSNNAEDPKDLMLSGERVLQTERSVESSSISLVPGTDYGTQESISLLEVSTLGKAKTEPNKCVSQCAAFENPKGLIHGCSKDNRNDTEGFKYPLGHEVNHSRETSIEMEESELDAQYLQNTFKVSKRQSFAPFSNPGNAEEECATFSAHSGSLKKQSPKVTFECEQKEENQGKNESNIKPVQTVNITAGFPVVGQKDKPVDNAKCSIKGGSRFCLSSQFRGNETGLITPNKHGLLQNPYRIPPLFPIKSFVKTKCKKNLLEENFEEHSMSPEREMGNENIPSTVSTISRNNIRENVFKEASSSNINEVGSSTNEVGSSINEIGSSDENIQAELGRNRGPKLNAMLRLGVLQPEVYKQSLPGSNCKHPEIKKQEYEEVVQTVNTDFSPYLISDNLEQPMGSSHASQVCSETPDDLLDDGEIKEDTSFAENDIKESSAVFSKSVQKGELSRSPSPFTHTHLAQGYRRGAKKLESSEENLSSEDEELPCFQHLLFGKVNNIPSQSTRHSTVATECLSKNTEENLLSLKNSLNDCSNQVILAKASQEHHLSEETKCSASLFSSQCSELEDLTANTNTQDPFLIGSSKQMRHQSESQGVGLSDKELVSDDEERGTGLEENNQEEQSMDSNLGEAASGCESETSVSEDCSGLSSQSDILTTQQRDTMQHNLIKLQQEMAELEAVLEQHGSQPSNSYPSIISDSSALEDLRNPEQSTSEKAVLTSQKSSEYPISQNPEGLSADKFEVSADSSTSKNKEPGVERSSPSKCPSLDDRWYMHSCSGSLQNRNYPSQEELIKVVDVEEQQLEESGPHDLTETSYLPRQDLEGTPYLESGISLFSDDPESDPSEDRAPESARVGNIPSSTSALKVPQLKVAESAQSPAAAHTTDTAGYNAMEESVSREKPELTASTERVNKRMSMVVSGLTPEEFMLVYKFARKHHITLTNLITEETTHVVMKTDAEFVCERTLKYFLGIAGGKWVVSYFWVTQSIKERKMLNEHDFEVRGDVVNGRNHQGPKRARESQDRKIFRGLEICCYGPFTNMPTDQLEWMVQLCGASVVKELSSFTLGTGVHPIVVVQPDAWTEDNGFHAIGQMCEAPVVTREWVLDSVALYQCQELDTYLIPQIPHSHY

SEQ ID NO: 5271 - protein, 659 aa, Homo sapiens
MQGSSLWLSLTFRSARVLSRARFFEWQSPGLPNTAAMENGTGPYGEERPREVQETTVTEGAAKIAFPSANEVFYNPVQEFNRDLTCAVITEFARIQLGAKGIQIKVPGEKDTQKVVVDLSEQEEEKVELKESENLASGDQPRTAAVGEICEEGLHVLEGLAASGLRSIRFALEVPGLRSVVANDASTRAVDLIRRNVQLNDVAHLVQPSQADARMLMYQHQRVSERFDVIDLDPYGSPATFLDAAVQAVSEGGLLCVTCTDMAVLAGNSGETCYSKYGAMALKSRACHEMALRIVLHSLDLRANCYQRFVVPLLSISADFYVRVFVRVFTGQAKVKASASKQALVFQCVGCGAFHLQRLGKASGVPSGRAKFSAACGPPVTPECEHCGQRHQLGGPMWAEPIHDLDFVGRVLEAVSANPGRFHTSERIRGVLSVITEELPDVPLYYTLDQLSSTIHCNTPSLLQLRSALLHADFRVSLSHACKNAVKTDAPASALWDIMRCWEKECPVKRERLSETSPAFRILSVEPRLQANFTIREDANPSSRQRGLKRFQANPEANWGPRPRARPGGKAADEAMEERRRLLQNKRKEPPEDVAQRAARLKTFPCKRFKEGTCQRGDQCCYSHSPPTPRVSADAAPDCPETSNQTPPGPGAAAGPGID

SEQ ID NO: 5272 - protein, 162 aa, Homo sapiens
MTTPNKGNKALKVKREPGENGTSLTDEELVTMSVRELNQHLRGLSKEEIVQLKQRRRTLKNRGYAASCRVKRVTQKEELEKQKAELQQEVEKLASENASMKLELDALRSKYEALQTFARTVARSPVAPARGPLAAGLGPLVPGKVAATSVITIVKSKTDARS

SEQ ID NO: 5273 - protein, 98 aa, Homo sapiens
MAKQPSDVSSECDREGRQLQPAERPPQLRPGAPTSLQTEPQDRSPAPMSCDKSTQTPSPPCQAFNHYLSAMDDSAGSSLRIALHREVQWPLKWLAKSS

SEQ ID NO: 5274 - protein, 89 aa, Homo sapiens
MASVSELACIYSALILHDDEVTVTALANVNIGSLICNVGAGGPAPAAGAAPAGGPAPSTAAAPAEEKKVEAKKEESEESDDDMGFGLFD

SEQ ID NO: 5275 - protein, 1265 aa, Homo sapiens
MECPVMETGSLFTSGIKRHLKDKRISKTTKLNVSLASKIKTKILNNSSIFKISLKHNNRALAQALSREKENSRRITTEKMLLQKEVEKLNFENTFLRLKLNNLNKKLIDIEALMNNNLITAIEMSSLSEFHQSSFLLSASKKKRISKQCKLMRLPFARVPLTSNDDEDEDKEKMQCDNNIKSKTLPDIPSSGSTTQPLSTQDNSEVLFLKENNQNVYGLDDSEHISSIVDVPPRESHSHSDQSSKTSLMSEMRNAQSIGRRWEKPSPSNVTERKKRGSSWESNNLSADTPCATVLDKQHISSPELNCNNEINGHTNETNTEMQRNKQDLPGLSSESAREPNAECMNQIEDNDDFQLQKTVYDADMDLTASEVSKIVTVSTGIKKKSNKKTNEHGMKTFRKVKDSSSEKKRERSKRQFKNSSDVDIGEKIENRTERSDVLDGKRGAEDPGFIFNNEQLAQMNEQLAQVNELKKMTLQTGFEQGDRENVLCNKKEKRITNEQEETYSLSQSSGKFHQESKFDKGQNSLTCNKSKASRQTFVIHKLEKDNLLPNQKDKVTIYENLDVTNEFHTANLSTKDNGNLCDYGTHNILDLKKYVTDIQPSEQNESNINKLRKKVNRKTEIISGMNHMYEDNDKDVVHGLKKGNFFFKTQEDKEPISENIEVSKELQIPALSTRDNENQCDYRTQNVLGLQKQITNMYPVQQNESKVNKKLRQKVNRKTEIISEVNHLDNDKSIEYTVKSHSLFLTQKDKEIIPGNLEDPSEFETPALSTKDSGNLYDSEIQNVLGVKHGHDMQPACQNDSKIGKKPRLNVCQKSEIIPETNQIYENDNKGVHDLEKDNFFSLTPKDKETISENLQVTNEFQTVDLLIKDNGNLCDYDTQNILELKKYVTDRKSAEQNESKINKLRNKVNWKTEIISEMNQIYEDNDKDAHVQESYTKDLDFKVNKSKQKLECQDIINKHYMEVNSNEKESCDQILDSYKVVKKRKKESSCKAKNILTKAKNKLASQLTESSQTSISLESDLKHITSEADSDPGNPVELCKTQKQSTTTLNKKDLPFVEEIKEGECQVKKVNKMTSKSKKRKTSIDPSPESHEVMERILDSVQGKSTVSEQADKENNLENEKMVKNKPDFYTKAFRSLSEIHSPNIQDSSFDSVREGLVPLSVSSGKNVIIKENFALECSPAFQVSDDEHEKMNKMKFKVNRRTQKSGIGDRPLQDLSNTSFVSNNTAESENKSEDLSSERTSRRRRCTPFYFKEPSLRDKMRR

SEQ ID NO: 5276 - protein, 149 aa, Homo sapiens
MASSDIQVKELEKRASGQAFELILSPRSKESVPEFPLSPPKKKDLSLEEIQKKLEAAEERRKSHEAEVLKQLAEKREHEKEVLQKAIEENNNFSKMAEEKLTHKMEANKENREAQMAAKLERLREKDKHIEEVRKNKESKDPADETEAD

SEQ ID NO: 5277 - protein, 350 aa, Homo sapiens
MKEDGGAEFSARSRKRKANVTVFLQDPDEEMAKIDRTARDQCGSQPWDNNAVCADPCSLIPTPDKEDDDRVYPNSTCKPRIIAPSRGSPLPVLSWANREEVWKIMLNKEKTYLRDQHFLEQHPLLQPKMRAILLDWLMEVCEVYKLHRETFYLAQDFFDRYMATQENVVKTLLQLIGISSLFIAAKLEEIYPPKLHQFAYVTDGACSGDEILTMELMIMKLLDLCVLDVDCLEFPYGILAASALYHFSSSELMQKVSGYQWCDIENCVKWMVPFAMVIRETGSSKLKHFRGVADEDAHNIQTHRDSLDLLDKARAKKAMLSEQNRASPLPSGLLTPPQSGKKQSSGPEMA

SEQ ID NO: 5278 - protein, 236 aa, Homo sapiens [sequence omitted]

SEQ ID NO: 5279 - protein, 134 aa, Homo sapiens
MLKKMGEAVARVARKVNETVESGSDTLELHLEGNFLHRLPSEVSALQHLKAIDLSRNQFQDFPEQLTALPALETINLEENEIVDVPVEKLAAMPALRSINLRFNPLNAEVRVIAPPLIKFDMLMSPEGARAPLP

SEQ ID NO: 5280 - protein, 256 aa, Homo sapiens
MQAVVPLNKMTAISPEPQTLASTEQNEVPRVVTSGEQEAILRGNAADAESFRQRFRWFCYSEVAGPRKALSQLWELCNQWLRPDIHTKEQILELLVFEQFLTILPGEIRIWVKSQHPESSEEVVTLIEDLTQMLEEKDPVSQDSTVSQEENSKEDKMVTVCPNTESCESITLKDVAVNFSRGEWKKLEPFQKELYKEVLLENLRNLEFLDFPVSKLELISQLKWVELPWLLEEVSKSSRLDIHGAVKKMQMFSEAE

SEQ ID NO: 5281 - protein, 133 aa, Homo sapiens
MSYGRPPPDVEGMTSLKVDNLTYRTSPDTLRRVFEKYGRVGDVYIPRDRYTKESRGFAFVRFHDKRDAEDAMDAMDGAVLDGRELRVQMARYGRPPDSHHSRRGPPPRRYGGGGYGRRSRSRSRSRSRSRSRS

SEQ ID NO: 5282 - protein, 594 aa, Homo sapiens
MASSTPSSSATSSNAGADPNTTNLRPTTYDTWCGVAHGCTRKLGLKICGFLQRTNSLEEKSRLVSAFKERQSSKNLLSCENSDRDARFRRTETDFSNLFARDLLPAKNGEEQTVQFLLEVVDILLNYVRKTFDRSTKVLDFHHPHQLLEGMEGFNLELSDHPESLEQILVDCRDTLKYGVRTGHPRFFNQLSTGLDIIGLAGEWLTSTANTNMFTYEIAPVFVLMEQITLKKMREIVGWSSKDGDGIFSPGGAISNMYSIMAARYKYFPEVKTKGMAAVPKLVLFTSEQSHYSIKKAGAALGFGTDNVILIKCNERGKIIPADFEAKILEAKQKGYVPFYVNATAGTTVYGAFDPIQEIADICEKYNLWLHVDAAWGGGLLMSRKHRHKLNGIERANSVTWNPHKMMGVLLQCSAILVKEKGILQGCNQMCAGYLFQPDKQYDVSYDTGDKAIQCGRHVDIFKFWLMWKAKGTVGFENQINKCLELAEYLYAKIKNREEFEMVFNGEPEHTNVCFWYIPQSLRGVPDSPQRREKLHKVAPKIKALMMESGTTMVGYQPQGDKANFFRMVISNPAATQSDIDFLIEEIERLGQDL

SEQ ID NO: 5283 - protein, 405 aa, Homo sapiens; identical to SEQ ID NO: 4597

SEQ ID NO: 5284 - protein, 383 aa, Homo sapiens
MNAGPSWNKVQHSKNSSGKRQSKSQVPHASSQPRSSLTAVTQPTEEKLKESISPEARRKRNPLGSRCQGASGNKLFLDFQSMKIIKENADEDSASDLSDSERIPIPPSPLTPPDLNLRAEEIDPVYFDLHPGQGHTKPEYYYPNFLPSPFSSWDLRDMALLLNAENKTEAVPRVGGLLGKYIDRLIQLEWLQVQTVQCEKAKGGKARPPTAPGTSGALKSPGRSKLIASALSKPLPHQEGASKSGPSRKKAFHHEEIHPSHYAFETSPRPIDVLGGTRFCSQRQTLEMRTEEKKKKSSKSTKLQRWDLSGSGSSSKVETSGHIRVPKQAAVILDSADSCKASKTQAHAHPRKKGKAESCGHATVSSEKKLKTNGVKQNTYKLK

SEQ ID NO: 5285 - protein, 175 aa, Homo sapiens
WCVPCLVSLDTLQELCRKEKLTCKSIGITKRNLNNYEVEYLCDYKVVKVITSEEAERRGQFYDNKGITYLFDLDYESDEFTVDAARYGNVSHFVNHSCDPNLQVFNVFIDNLDTRLPRIALFSTRTINAGEELTFDYQMKGSGDISSDSIDHSPAKKRVRTVCKCGAVTCRGYLN

SEQ ID NO: 5286 - protein, 465 aa, Homo sapiens
MATEAQSEGEVPARESGRSDAICSFVICNDSSLRGQPIIFNPDFFVEKLRHEKPEIFTELVVSNITRLIDLPGTELAQLMGEVDLKLPGGAGPASGFFRSLMSLKRKEKGVIFGSPLTEEGIAQIYQLIEYLHKNLRVEGLFRVPGNSVRQQILRDALNNGTDIDLESGEFHSNDVATLLKMFLGELPEPLLTHKHFNAHLKIADLMQFDDKGNKTNIPDKDRQIEALQLLFLILPPPNRNLLKLLLDLLYQTAKKQDKNKMSAYNLALMFAPHVLWPKNAPAYIRECARLHYLGSRTQASKDDLDLIASCHTKSFQLAKSQKRNRVDSCPHQEETQHHTEEALRELFQHVHDMPESAKKKQLIRQFNKQSLTQTPGREPSTSQVQKRARSRSFSGLIKRKVLGNQMMSEKKKKNPTPESVAIGELKGTSKENRNLLFSGSPAVTMTPTRLKWSEGKKEGKKGFL

SEQ ID NO: 5287 - protein, 684 aa, Homo sapiens
MEANHSEQLSAERQSTPPGDSSSLPSHNGLEKEDGQDSPTPVQPPEKEASVHPDISEELNRQLEDIINTYGSAASTAGKEGSARASEQPENAESPDNEDGDCEETTEEAGREPVASGEPPTVKEPVSNKEQKLEKKILKGLGKEANLLMQNLNKLQTPEEKFDFLFKKYAELLDEHRTEQKKLKLLQKKQVQIQKEKDQLQGEHSRAILARSKLESLCRELQRHNKTLKEEALQRAREEEEKRKEITSHFQSTLTDIQGQIEQQSERNMKLCQENTELAEKLKSIIDQYELREEHLDKIFKHRELQQKLVDAKLEQAQEMMKEAEERHKREKEYLLNQAAEWKLQAKVLKEQETVLQAQLTLYSGRFEEFQSTLTKSNEVFATFKQEMDKTTKKMKKLEKDTATWKARFENCNKALLDMIEEKALRAKEYECFVMKIGRLENLCRALQEERNELHKKIRDAEISEKDDQSQHNSDEEPESNVSVDQEIDAEEVNSVQTAVKNLATAFMIIHHPESTPHQSKETQPEIGSSQESADAALKEPEQPPLIPSRDSESPLPPLTPQAEAEGGSDAEPPSKASNSPAGLGAETQCEGLPVGAQADQASWKPEAEASGQAPQAPTEASLQKMEADVPAPACAAEEHVAAMVPACEPSRQPPRAAAEELPVGASAGPQPRNVADTNLEGVD

SEQ ID NO: 5288 - protein, 494 aa, Homo sapiens
MATEAQSEGEVPARESGRSDAICSFVICNDSSLRGQPIIFNPDFFVEKLRHEKPEIFTELVVSNITRLIDLPGTELAQLMGEVDLKLPGGAGPASGFFRSLMSLKRKEKGVIFGSPLTEEGIAQIYQLIEYLHKNLRVEGLFRVPGNSVRQQILRDALNNGTDIDLESGEFHSNDVATLLKMFLGELPEPLLTHKHFNAHLKIADLMQFDDKGNKTNIPDKDRQIEALQLLFLILPPPNRNLLKLLLDLLYQTAKKQDKNKMSAYNLALMFAPHVLWPKNVTANDLQENITKLNSGMAFMIKHSQKLFKAPAYIRECARLHYLGSRTQASKDDLDLIASCHTKSFQLAKSQKRNRVDSCPHQEETQHHTEEALRELFQHVHDMPESAKKKQLIRQFNKQSLTQTPGREPSTSQVQKRARSRSFSGLIKRKVLGNQMMSEKKKKNPTPESVAIGELKGTSKENRNLLFSGSPAVTMTPTRLKWSEGKKEGKKGFL

SEQ ID NO: 5289 - protein, 244 aa, Homo sapiens
MDPNRISEDGTHCIYRILRLHENADFQDTTLESQDTKLIPDSCRRIKQAFQGAVQKELQHIVGSQHIRAEKAMVDGSWLDLAKRSKLEAQPFAHLTINATDIPSGSHKVSLSSWYHDRGWAKISNMTFSNGKLIVNQDGFYYLYANICFRHHETSGDLATEYLQLMVYVTKTSIKIPSSHTLMKGGSTKYWSGNSEFHFYSINVGGFFKLRSGEEISIEVSNPSLLDPDQDATYFGAFKVRDID

SEQ ID NO: 5290 - protein, 403 aa, Homo sapiens
MGATEPGGDTSSDEFHPFIEALLPHVRAFSYTWFNLQARKRKYFKKHEKRMSKDEERAVKDELLGEKPEIKQKWASRLLAKLRKDIRPEFREDFVLTITGKKPPCCVLSNPDQKGKIRRIDCLRQADKVWRLDLVMVILFKGIPLESTDGERLYKSPQCSNPGLCVQPHHIGVTIKELDLYLAYFVHTPESGQSDSSNQQGDADIKPLPNGHLSFQDCFVTSGVWNVTELVRVSQTPVATASGPNFSLADLESPSYYNINQVTLGRRSITSPPSTSTTKRPKSIDDSEMESPVDDVFYPGTGRSPAAGSSQSSGWPNDVDAGSPRATASALHFPSTSIIQQSSPYFTHPTIRYHHHHGQDSLKEFVQFVCSDGSGQATGQHSQRQAPPLPTGLSASDPGTATF

SEQ ID NO: 5291 - protein, 203 aa, Homo sapiens
MPKAPKGKSAGREKKVIHPYSRKAAQITREAHKQEKKEKLKNEKALRLNLVGEKLQWFQNHLDPQKKRYSKKDACELIERYLNRFSSELEQIELHNSIRDRQGRRHCSRETVIKQTMERERQQFEGYGLEIPDILNASNLKTFREWDFDLKKLPNIKMRKICANDAIPKTCKRKTIITVDQDLGELELNDESSDSDEEMTAVA

SEQ ID NO: 5292 - protein, 531 aa, Homo sapiens
MCPKGYEDSMEFPDHSRHLLQCLSEQRHQGFLCDCTVLVGDAQFRAHRAVLASCSMYFHLFYKDQLDKRDIVHLNSDIVTAPAFALLLEFMYEGKLQFKDLPIEDVLAAASYLHMYDIVKVCKKKLKEKATTEADSTKKEEDASSCSDKVESLSDGSSHIAGDLPSDEDEGEDEKLNILPSKRDLAAEPGNMWMRLPSDSAGIPQAGGEAEPHATAAGKTVASPCSSTESLSQRSVTSVRDSADVDCVLDLSVKSSLSGVENLNSSYFSSQDVLRSNLVQVKVEKEASCDESDVGTNDYDMEHSTVKESVSTNNRVQYEPAHLAPLREDSVLRELDREDKASDDEMMTPESERVQVEGGMESSLLPYVSNILSPAGQIFMCPLCNKVFPSPHILQIHLSTHFREQDGIRSKPAADVNVPTCSLCGKTFSCMYTLKRHERTHSGEKPYTCTQCGKSFQYSHNLSRHAVVHTREKPHACKWCERRFTQSGDLYRHIRKFHCELVNSLSVKSEALSLPTVRDWTLEDSSQELWK

SEQ ID NO: 5293 - protein, 724 aa, Homo sapiens
MSFPKAPLKRFNDPSGCAPSPGAYDVKTLEVLKGPVSFQKSQRFKQQKESKQNLNVDKDTTLPASARKVKSSESKESQKNDKDLKILEKEIRVLLQERGAQDRRIQDLETELEKMEARLNAALREKTSLSANNATLEKQLIELTRTNELLKSKFSENGNQKNLRILSLELMKLRNKRETKMRGMMAKQEGMEMKLQVTQRSLEESQGKIAQLEGKLVSIEKEKIDEKSETEKLLEYIEEISCASDQVEKYKLDIAQLEENLKEKNDEILSLKQSLEENIVILSKQVEDLNVKCQLLEKEKEDHVNRNREHNENLNAEMQNLKQKFILEQQEREKLQQKELQIDSLLQQEKELSSSLHQKLCSFQEEMVKEKNLFEEELKQTLDELDKLQQKEEQAERLVKQLEEEAKSRAEELKLLEEKLKGKEAELEKSSAAHTQATLLLQEKYDSMVQSLEDVTAQFESYKALTASEIEDLKLENSSLQEKAAKAGKNAEDVQHQILATESSNQEYVRMLLDLQTKSALKETEIKEITVSFLQKITDLQNQLKQQEEDFRKQLEDEEGRKAEKENTTAELTEEINKWRLLYEELYNKTKPFQLQLDAFEVEKQALLNEHGAAQEQLNKIRDSYAKLLGHQNLKQKIKHVVKLKDENSQLKSEVSKLRCQLAKKKQSETKLQEELNKVLGIKHFDPSKAFHHESKENFALKTPLKEGNTNCYRAPMECQESWK

SEQ ID NO: 5294 - protein, 130 aa, Homo sapiens
MSGRGKQGGKARAKAKTRSSRAGLQFPVGRVHRLLRKGNYAERVGAGAPVYLAAVLEYLTAEILELAGNAARDNKKTRIIPRHLQLAIRNDEELNKLLGKVTIAQGGVLPNIQAVLLPKKTESHHKAKGK

SEQ ID NO: 5295 - protein, 940 aa, Homo sapiens
MADEALAGLDEGALRKLLEVTADLAERRRIRSAIRELQRQELEREEEALASKRFRAERQDNKENWLHSQQREAEQRAALARLAGQLESMNDVEELTALLRSAGEYEERKLIRAAIRRVRAQEIEAATLAGRLYSGRPNSGSREDSKGLAAHRLEQCEVPEREEQEQQAEVSKPTPTPEGTSQDVTTVTLLLRAPPGSTSSSPASPSSSPTPASPEPPLEPAEAQCLTAEVPGSPEPPPSPPKTTSPEPQESPTLPSTEGQVVNKLLSGPKETPAAQSPTRGPSDTKRADVAGPRPCQRSLSVLSPRQPAQNRESTPLASGPSSFQRAGSVRDRVHKFTSDSPMAARLQDGTPQAALSPLTPARLLGPSLTSTTPASSSSGSSSRGPSDTSSRFSKEQRGVAQPLAQLRSCPQEEGPRGRGLAARPLENRAGGPVARSEEPGAPLPVAVGTAEPGGSMKTTFTIEIKDGRGQASTGRVLLPTGNQRAELTLGLRAPPTLLSTSSGGKSTITRVNSPGTLARLGSVTHVTSFSHAPPSSRGGCSIKMEAEPAEPLAAAVEAANGAEQTRVNKAPEGRSPLSAEELMTIEDEGVLDKMLDQSTDFEERKLIRAALRELRQRKRDQRDKERERRLQEARGRPGEGRGNTATETTTRHSQRAADGSAVSTVTKTERLVHSNDGTRTARTTTVESSFVRRSENGSGSTMMQTKTFSSSSSSKKMGSIFDREDQASPRAGSLAALEKRQAEKKKELMKAQSLPKTSASQARKAMIEKLEKEGAAGSPGGPRAAVQRSTSFGVPNANSIKQMLLDWCRAKTRGYEHVDIQNFSSSWSDGMAFCALVHNFFPEAFDYGQLSPQNRRQNFEVAFSSAETHADCPQLLDTEDMVRLREPDWKMLVDCVPLVEVDDMMIMGKKPDPKCVFTYVQSLYNHLRRHELRLRGKNV

SEQ ID NO: 5296 - protein, 353 aa, Homo sapiens
MATEGLHENETLASLKSEAESLKGKLEEERAKLHDVELHQVAERVEALGQFVMKTRRTLKGHGNKVLCMDWCKDKRRIVSSSQDGKVIVWDSFTTNKEHAVTMPCTWVMACAYAPSGCAIACGGLDNKCSVYPLTFDKNENMAAKKKSVAMHTNYLSACSFTNSDMQILTASGDGTCALWDVESGQLLQSFHGHGADVLCLDLAPSETGNTFVSGGCDKKAMVWDMRSGQCVQAFETHESDINSVRYYPSGDAFASGSDDATCRLYDLRADREVAIYSKESIIFGASSVDFSLSGRLLFAGYNDYTINVWDVLKGSRVSILFGHENRVSTLRVSPDGTAFCSGSWDHTLRVWA

SEQ ID NO: 5297 - protein, 590 aa, Homo sapiens
MESGSPMGEVEISRTIRTNGRGQRGYDWQCKRPIRVAEVRSSLHSWSLRWVNELKEKGNKALSVGNIDDALQCYSEAIKLDPHNHVLYSNRSAAYAKKGDYQKAYEDGCKTVDLKPDWGKGYSRKAAALEFLNRFEEAKRTYEEGLKHEANNPQLKEGLQNMEARLAERKFMNPFNMPNLYQKLESDPRTRTLLSDPTYRELIEQLRNKPSDLGTKLQDPRIMTTLSVLLGVDLGSMDEEEEIATPPPPPPPKKETKPEPMEEDLPENKKQALKEKELGNDAYKKKDFDTALKHYDKAKELDPTNMTYITNQAAVYFEKGDYNKCRELCEKAIEVGRENREDYRQIAKAYARIGNSYFKEEKYKDAIHFYNKSLAEHRTPDVLKKCQQAEKILKEQERLAYINPDLALEEKNKGNECFQKGDYPQAMKHYTEAIKRNPKDAKLYSNRAACYTKLLEFQLALKDCEECIQLEPTFIKGYTRKAAALEAMKDYTKAMDVYQKALDLDSSCKEAADGYQRCMMAQYNRHDSPEDVKRRAMADPEVQQIMSDPAMRLILEQMQKDPQALSEHLKNPVIAQKIQKLMDVGLIAIR

SEQ ID NO: 5298 - protein, 195 aa, Homo sapiens
MSYVFVNDSSQTNVPLLQACIDGDFNYSKRLLESGFDPNIRDSRGRTGLHLAAARGNVDICQLLHKFGADLLATDYQGNTALHLCGHVDTIQFLVSNGLKIDICNHQGATPLVLAKRRGVNKDVIRLLESLEEQEVKGFNRGTHSKLETMQTAESESAMESHSLLNPNLQQGEGVLSSFRTTWQEFVEDLGFWRV

SEQ ID NO: 5299 - protein, 486 aa, Homo sapiens
MAAVKTLNPKAEVARAQAALAVNISAARGLQDVLRTNLGPKGTMKMLVSGAGDIKLTKDGNVLLHEMGLHPRIITEGFEAAKEKALQFLEEVKVSREMDRETLIDVARTSLRTKVHAELADVLTEAVVDSILAIKKQDEPIDLFMIEIMEMKHKSETDTSLIRGLVLDHGARHPDMKKRVEDAYILTCNVSLEYEKTEVNSGFFYKSAEEREKLVKAERKFIEDRVKKIIELKRKVCGDSDKGFVVINQKGIDPFSLDALSKEGIVALRRAKRRNMERLTLACGGVALNSFDDLSPDCLGHAGLVYEYTLGEEKFTFIEKCNNPRSVTLLIKGPNKHTLTQIKDAVRDGLRAVKNAIDDGCVVPGAGAVEVAMAEALIKHKPSVKGRAQLGVQAFADALLIIPKVLAQNSGFDLQETLVKIQAEHSESGQLVGVDLNTGEPMVAAEVGVWDNYCVKKQLLHSCTVIATNILLVDEIMRAGMSSLKG

SEQ ID NO: 5300 - protein, 729 aa, Homo sapiens
MDDLTLLDLLECPVCFEKLDVTAKVLPCQHTFCKPCLQRVFKAHKELRCPECRTPVFSNIEALPANLLLVRLLDGVRSGQSSGRGGSFRRPGTMTLQDGRKSRTNPRRLQASPFRLVPNVRIHMDGVPRAKALCNYRGQNPGDLRFNKGDIILLRRQLDENWYQGEINGISGNFPASSVEVIKQLPQPPPLCRALYNFDLRGKDKSENQDCLTFLKDDIITVISRVDENWAEGKLGDKVGIFPILFVEPNLTARHLLEKNKGRQSSRTKNLSLVSSSSRGNTSTLRRGPGSRRKVPGQFSITTALNTLNRMVHSPSGRHMVEISTPVLISSSNPSVITQPMEKADVPSSCVGQVSTYHPAPVSPGHSTAVVSLPGSQQHLSANMFVALHSYSAHGPDELDLQKGEGVRVLGKCQDGWLRGVSLVTGRVGIFPNNYVIPIFRKTSSFPDSRSPGLYTTWTLSTSSVSSQGSISEGDPRQSRPFKSVFVPTAIVNPVRSTAGPGTLGQGSLRKGRSSMRKNGSLQRPLQSGIPTLVVGSLRRSPTMVLRPQQFQFYQPQGIPSSPSAVVVEMGSKPALTGEPALTCISRGSEAWIHSAASSLIMEDKEIPIKSEPLPKPPASAPPSILVKPENSRNGIEKQVKTVRFQNYSPPPTKHYTSHPTSGKPEQPATLKASQPEAASLGPEMTVLFAHRSGCHSGQQTDLRRKSALGKATTLVSTASGTQTVFPSK

SEQ ID NO: 5301 - protein, 1065 aa, Homo sapiens
MRKQEVRTGREAGQGHGTGSPAEQVKALMDLLAGKGSQGSQAPQALDRTPDAPLGPCSNDSRIQRHRKALLSKVGGGPELGGPWHRLASLLLVEGLTDLQLREHDFTQVEATRGGGHPARTVALDRLFLPLSRVSVPPRVSITIGVAGMGKTTLVRHFVRLWAHGQVGKDFSLVLPLTFRDLNTHEKLCADRLICSVFPHVGEPSLAVAVPARALLILDGLDECRTPLDFSNTVACTDPKKEIPVDHLITNIIRGNLFPEVSIWITSRPSASGQIPGGLVDRMTEIRGFNEEEIKVCLEQMFPEDQALLGWMLSQVQADRALYLMCTVPAFCRLTGMALGHLWRSRTGPQDAELWPPRTLCELYSWYFRMALSGEGQEKGKASPRIEQVAHGGRKMVGTLGRLAFHGLLKKKYVFYEQDMKAFGVDLALLQGAPCSCFLQREETLASSVAYCFTHLSLQEFVAAAYYYGASRRAIFDLFTESGVSWPRLGFLTHFRSAAQRAMQAEDGRLDVFLRFLSGLLSPRVNALLAGSLLAQGEHQAYRTQVAELLQGCLRPDAAVCARAINVLHCLHELQHTELARSVEEAMESGALARLTGPAHRAALAYLLQVSDACAQEANLSLSLSQGVLQSLLPQLLYCRKLRLDTNQFQDPVMELLGSVLSGKDCRIQKISLAENQISNKGAKALARSLLVNRSLTSLDLRGNSIGPQGAKALADALKINRTLTSLSLQGNTVRDDGARSMAEALASNRTLSMLHLQKNSIGPMGAQRMADALKQNRSLKELMFSSNSIGDGGAKALAEALKVNQGLESLDLQSNSISDAGVAALMGALCTNQTLLSLSLRENSISPEGAQAIAHALCANSTLKNLDLTANLLHDQGARAIAVAVRENRTLTSLHLQWNFIQAGAAQALGQALQLNRSLTSLDLQENAIGDDGACAVARALKVNTALTALYLQVASIGASGAQVLGEALAVNRTLEILDLRGNAIGVAGAKALANALKVNSSLRRLNLQENSLGMDGAICIATALSGNHRLQHINLQGNHIGDSGARMISEAIKTNAPTCTVEM

SEQ ID NO: 5302 - protein, 130 aa, Homo sapiens; identical to SEQ ID NO: 5294

SEQ ID NO: 5303 - protein, 683 aa, Homo sapiens
MNGAPSPEDGASPSSPPLPPPPPPSWREFCESHARAAALDFARRFRLYLASHPQYAGPGAEAAFSRRFAELFLQHFEAEVARASGSLSPPILAPLSPGAEISPHDLSLESCRVGGPLAVLGPSRSSEDLAGPLPSSVSSSSTTSSKPKLKKRFSLRSVGRSVRGSVRGILQWRGTVDPPSSAGPLETSSGPPVLGGNSNSNSSGGAGTVGRGLVSDGTSPGERWTHRFERLRLSRGGGALKDGAGMVQREELLSFMGAEEAAPDPAGVGRGGGVAGPPSGGGGQPQWQKCRLLLRSEGEGGGGSRLEFFVPPKASRPRLSIPCSSITDVRTTTALEMPDRENTFVVKVEGPSEYIMETVDAQHVKAWVSDIQECLSPGPCPATSPRPMTLPLAPGTSFLTRENTDSLELSCLNHSESLPSQDLLLGPSESNDRLSQGAYGGLSDRPSASISPSSASIAASHFDSMELLPPELPPRIPIEEGPPTGTVHPLSAPYPPLDTPETATGSFLFQGEPEGGEGDQPLSGYPWFHGMLSRLKAAQLVLTGGTGSHGVFLVRQSETRRGEYVLTFNFQGKAKHLRLSLNEEGQCRVQHLWFQSIFDMLEHFRVHPIPLESGGSSDVVLVSYVPSSQRQQGEQSRSAGEEVPVHPRSEAGSRLGAMRGCAREMDATPMPPAPSCPSERVTV

SEQ ID NO: 5304 - protein, 136 aa, Homo sapiens
MARTKQTARKSTGGKAPRKQLATKAARKSAPATGGVKKPHRYRPGTVALREIRRYQKSTELLIRKLPFQRLVREIAQDFKTDLRFQSSAVMALQEACEAYLVGLFEDTNLCAIHAKRVTIMPKDIQLARRIRGERA

SEQ ID NO: 5305 - protein, 628 aa, Homo sapiens
MSRSGDRTSTFDPSHSDNLLHGLNLLWRKQLFCDVTLTAQGQQFHCHKAVLASCSQYFRSLFSSHPPLGGGVGGQDGLGAPKDQQQPPQQQPSQQQQPPPQEEPGTPSSSPDDKLLTSPRAINNLVLQGCSSIGLRLVLEYLYTANVTLSLDTVEEVLSVSKILHIPQVTKLCVQFLNDQISVQNYKQVCKIAALHGLEETKKLANKYLVEDVLLLNFEEMRALLDSLPPPVESELALFQMSVLWLEHDRETRMQYAPDLMKRLRFALIPAPELVERVQSVDFMRTDPVCQKLLLDAMNYHLMPFRQHCRQSLASRIRSNKKMLLLVGGLPPGPDRLPSNLVQYYDDEKKTWKILTIMPYNSAHHCVVEVENFLFVLGGEDQWNPNGKHSTNFVSRYDPRFNSWIQLPPMQERRASFYACRLDKHLYVIGGRNETGYLSSVECYNLETNEWRYVSSLPQPLAAHAGAVHNGKIYISGGVHNGEYVPWLYCYDPVMDVWARKQDMNTKRAIHTLAVMNDRLYAIGGNHLKGFSHLDVMLVECYDPKGDQWNILQTPILEGRSGPGCAVLDDSIYLVGGYSWSMGAYKSSTICYCPEKGTWTELEGDVAEPLAGPACVTVILPSCVPYNK

SEQ ID NO: 5306 - protein, 795 aa, Homo sapiens
MATMLEGRCQTQPRSSPSGREASLWSSGFGMKLEAVTPFLGKYRPFVGRCCQTCTPKSWESLFHRSITDLGFCNVILVKEENTRFRGWLVRRLCYFLWSLEQHIPPCQDVPQKIMESTGVQNLLSGRVPGGTGEGQVPDLVKKEVQRILGHIQAPPRPFLVRLFSWALLRFLNCLFLNVQLHKGQMKMVQKAAQAGLPLVLLSTHKTLLDGILLPFMLLSQGLGVLRVAWDSRACSPALRALLRKLGGLFLPPEASLSLDSSEGLLARAVVQAVIEQLLVSGQPLLIFLEEPPGALGPRLSALGQAWVGFVVQAVQVGIVPDALLVPVAVTYDLVPDAPCDIDHASAPLGLWTGALAVLRSLWSRWGCSHRICSRVHLAQPFSLQEYIVSARSCWGGRQTLEQLLQPIVLGQCTAVPDTEKEQEWTPITGPLLALKEEDQLLVRRLSCHVLSASVGSSAVMSTAIMATLLLFKHQKLLGEFSWLTEEILLRGFDVGFSGQLRSLLQHSLSLLRAHVALLRIRQGDLLVVPQPGPGLTHLAQLSAELLPVFLSEAVGACAVRGLLAGRVPPQGPWELQGILLLSQNELYRQILLLMHLLPQDLLLLKPCQSSYCYCQEVLDRLIQCGLLVAEETPGSRPACDTGRQRLSRKLLWKPSGDFTDSDSDDFGEADGRYFRLSQQSHCPDFFLFLCRLLSPLLKAFAQAAAFLRQGQLPDTELGYTEQLFQFLQATAQEEGIFECADPKLAISAVWTFRDLGVLQQTPSPAGPRLHLSPTFASLDNQEKLEQFIRQFICS

SEQ ID NO: 5307 - protein, 130 aa, Homo sapiens; identical to SEQ ID NO: 5294

SEQ ID NO: 5308 - protein, 1677 aa, Homo sapiens
MVGQRDSEDVSKRDSDKEMATKSAVVHDITDDGQEETPEIIEQIPSSESNLEELTQPTESQANDIGFKKVFKFVGFKFTVKKDKTEKPDTVQLLTVKKDEGEGAAGAGDHKDPSLGAGEAASKESEPKQSTEKPEETLKREQSHAEISPPAESGQAVEECKEEGEEKQEKEPSKSAESPTSPVTSETGSTFKKFFTQGWAGWRKKTSFRKPKEDEVEASEKKKEQEPEKVDTEEDGKAEVASEKLTASEQAHPQEPAESAHEPRLSAEYEKVELPSEEQVSGSQGPSEEKPAPLATEVFDEKIEVHQEEVVAEVHVSTVEERTEEQKTEVEETAGSVPAEELVEMDAEPQEAEPAKELVKLKETCVSGEDPTQGADLSPDEKVLSKPPEGVVSEVEMLSSQERMKVQGSPLKKLFTSTGLKKLSGKKQKGKRGGGDEESGEHTQVPADSPDSQEEQKGESSASSPEEPEEITCLEKGLAEVQQDGEAEEGATSDGEKKREGVTPWASFKKMVTPKKRVRRPSESDKEDELDKVKSATLSSTESTASEMQEEMKGSVEEPKPEEPKRKVDTSVSWEALICVGSSKKRARRGSSSDEEGGPKAMGGDHQKADEAGKDKETGTDGILAGSQEHDPGQGSSSPEQAGSPTEGEGVSTWESFKRLVTPRKKSKSKLEEKSEDSIAGSGVEHSTPDTEPGKEESWVSIKKFIPGRRKKRPDGKQEQAPVEDAGPTGANEDDSDVPAVVPLSEYDAVEREKMEAQQAQKSAEQPEQKAATEVSKELSESQVHMMAAAVADGTRAATIIEERSPSWISASVTEPLEQVEAEAALLTEEVLEREVIAEEEPPTVTEPLPENREARGDTVVSEAELTPEAVTAAETAGPLGAEEGTEASAAEETTEMVSAVSQLTDSPDTTEEATPVQEVEGGVPDIEEQERRTQEVLQAVAEKVKEESQLPGTGGPEDVLQPVQRAEAERPEEQAEASGLKKETDVVLKVDAQEAKTEPFTQGKVVGQTTPESFEKAPQVTESIESSELVTTCQAETLAGVKSQEMVMEQAIPPDSVETPTDSETDGSTPVADFDAPGTTQKDEIVEIHEENEVASGTQSGGTEAEAVPAQKERPPAPSSFVFQEETKEQSKMEDTLEHTDKEVSVETVSILSKTEGTQEADQYADEKTKDVPFFEGLEGSIDTGITVSREKVTEVALKGEGTEEAECKKDDALELQSHAKSPPSPVEREMVVQVEREKTEAEPTHVNEEKLEHETAVTVSEEVSKQLLQTVNVPIIDGAKEVSSLEGSPPPCLGQEEAVCTKIQVQSSEASFTLTAAAEEEKVLGETANILETGETLEPAGAHLVLEEKSSEKNEDFAAHPGEDAVPTGPDCQAKSTPVIVSATTKKGLSSDLEGEKTTSLKWKSDEVDEQVACQEVKVSVAIEDLEPENGILELETKSSKLVQNIIQTAVDQFVRTEETATEMLTSELQTQAHVIKADSQDAGQETEKEGEEPQASAQDETPITSAKEESESTAVGQAHSDISKDMSEASEKTMTVEVEGSTVNDQQLEEVVLPSEEEGGGAGTKSVPEDDGHALLAERIEKSLVEPKEDEKGDDVDDPENQNSALADTDASGGLTKESPDTNGPKQKEKEDAQEVELQEGKVHSESDKAITPQAQEELQKQERESAKSELTES

SEQ ID NO: 5309 - protein, 903 aa, Homo sapiens
MLREEAAQKRKGKESGMALPQGRLTFRDVAIEFSLAEWKFLNPAQRALYREVMLENYRNLEAVDISSKHMMKEVLSTGQGNREVIHTGTLQRHQSYHIGDFCFQEIEKEIHNIEFQCQEDERNGHEAPTTKIKKLTGSTDQHDHRHAGNKPIKDQLGSSFYSHLPELHIFQIKGEIANQLEKSTSDASSVSTSQRISCRPQIHISNNYGNNPLNSSLLPQKQEVHMREKSFPCNESGKAFNCSSLLRKHQIPHLGDKQYKCDVCGKLFNHKQYLACHRRCHTGEKPYKCKECGKSFSYKSSLTCHHRLHTGVKPYKCNECGKVFRQNSALVIHKAIHTGEKPYKCNECGKAFNQQSHLSRHQRLHTGVKPYKCKICEKAFACHSYLANHTRIHSGEKTYKCNECGKAFNHQSSLARHHILHTGEKPYKCEECDKVFSQKSTLERHKRIHTGEKPYKCKVCDTAFTCNSQLARHRRIHTGEKTYKCNECRKTFSRRSSLLCHRRLHSGEKPYKCNQCGNTFRHRASLVYHRRLHTLEKSYKCTVCNKVFMRNSVLAVHTRIHTAKKPYKCNECGKAFNQQSHLSRHRRLHTGEKPYKCEACDKVFGQKSALESHKRIHTGEKPYRCQVCDTAFTWNSQLARHTRIHTGEKTYKCNECGKTFSYKSSLVWHRRLHGGEKSYKCKVCDKAFVCRSYVAKHTRIHSGMKPYKCNECSKTFSNRSSLVCHRRIHSGEKPYKCSECSKTFSQKATLLCHRRLHSGEKPYKCNDCGNTFRHWSSLVYHRRLHTGEKSYKCTVCDKAFVRNSYLARHIRIHTAEKPYKCNECGKAFNEQSHLSRHHRIHTGEKPYKCEACDKVFSRKSHLKRHRIIHTGEKPYKCNECGKAFSDRSTLIHHQAIHGIGKFD

SEQ ID NO: 5310 - protein, 763 aa, Homo sapiens
MKTSPRRPLILKRRRLPLPVQNAPSETSEEEPKRSPAQQESNQAEASKEVAESNSCKFPAGIKIINHPTMPNTQVVAIPNNANIHSIITALTAKGKESGSSGPNKFILISCGGAPTQPPGLRPQTQTSYDAKRTEVTLETLGPKPAARDVNLPRPPGALCEQKRETCADGEAAGCTINNSLSNIQWLRKMSSDGLGSRSIKQEMEEKENCHLEQRQVKVEEPSRPSASWQNSVSERPPYSYMAMIQFAINSTERKRMTLKDIYTWIEDHFPYFKHIAKPGWKNSIRHNLSLHDMFVRETSANGKVSFWTIHPSANRYLTLDQVFKPLDPGSPQLPEHLESQQKRPNPELRRNMTIKTELPLGARRKMKPLLPRVSSYLVPIQFPVNQSLVLQPSVKVPLPLAASLMSSELARHSKRVRIAPKVLLAEEGIAPLSSAGPGKEEKLLFGEGFSPLLPVQTIKEEEIQPGEEMPHLARPIKVESPPLEEWPSPAPSFKEESSHSWEDSSQSPTPRPKKSYSGLRSPTRCVSEMLVIQHRERRERSRSRRKQHLLPPCVDEPELLFSEGPSTSRWAAELPFPADSSDPASQLSYSQEVGGPFKTPIKETLPISSTPSKSVLPRTPESWRLTPPAKVGGLDFSPVQTSQGASDPLPDPLGLMDLSTTPLQSAPPLESPQRLLSSEPLDLISVPFGNSSPSDIDVPKPGSPEPQVSGLAANRSLTEGLVLDTMNDSLSKILLDISFPGLDEDPLGPDNINWSQFIPELQ

SEQ ID NO: 5311 - protein, 423 aa, Homo sapiens
MDSFKVVLEGPAPWGFRLQGGKDFNVPLSISRLTPGGKAAQAGVAVGDWVLSIDGENAGSLTHIEAQNKIRACGERLSLGLSRAQPVQSKPQKVQTPDKQPLRPLVPDASKQRLMENTEDWRPRPGTGQSRSFRILAHLTGTEFMQDPDEEHLKKSSQVPRTEAPAPASSTPQEPWPGPTAPSPTSRPPWAVDPAFAERYAPDKTSTVLTRHSQPATPTPLQSRTSIVQAAAGGVPGGGSNNGKTPVCHQCHKVIRGRYLVALGHAYHPEEFVCSQCGKVLEEGGFFEEKGAIFCPPCYDVRYAPSCAKCKKKITGEIMHALKMTWHVHCFTCAACKTPIRNRAFYMEEGVPYCERDYEKMFGTKCHGCDFKIDAGDRFLEALGFSWHDTCFVCAICQINLEGKTFYSKKDRPLCKSHAFSHV

SEQ ID NO: 5312 - protein, 1119 aa, Homo sapiens
MGNAHSKSGDRHSALPGRPELSFYGSFPRKWSENVFLDNELLTSKILSVLRPQSERGFRAGDLRYPTHFLSTNSVLASVTASLKEHPRGTLLSDGSPALSRNVGMTVSQKGGPQPTPSPAGPGTQLGPITGEMDEADSAFLKFKQTADDSLSLTSPNTESIFVEDPYTASLRSEIESDGHEFEAESWSLAVDAAYAKKQKREVVKRQDVLYELMQTEVHHVRTLKIMLKVYSRALQEELQFSSKAIGRLFPCADDLLETHSHFLARLKERRQESLEEGSDRNYVIQKIGDLLVQQFSGENGERMKEKYGVFCSGHNEAVSHYKLLLQQNKKFQNLIKKIGNFSIVRRLGVQECILLVTQRITKYPVLVERIIQNTEAGTEDYEDLTQALNLIKDIISQVDAKVSECEKGQRLREIAGKMDLKSSSKLKNGLTFRKEDMLQRQLHLEGMLCWKTTSGRLKDILAILLTDVLLLLQEKDQKYVFASVDSKPPVISLQKLIVREVANEEKAMFLISASLQGPEMYEIYTSSKEDRNAWMAHIQRAVESCPDEEEGPFSLPEEERKVVEARATRLRDFQERLSMKDQLIAQSLLEKQQIYLEMAEMGGLEDLPQPRGLFRGGDPSETLQGELILKSAMSEIEGIQSLICRQLGSANGQAEDGGSSTGPPRRAETFAGYDCTNSPTKNGSFKKKVSSTDPRPRDWRGPPNSPDLKLSDSDIPGSSEESPQVVEAPGTESDPRLPTVLESELVQRIQTLSQLLLNLQAVIAHQDSYVETQRAAIQEREKQFRLQSTRGNLLLEQERQRNFEKQREERAALEKLQSQLRHEQQRWERERQWQHQELERAGARLQEREGEARQLRERLEQERAELERQRQAYQHDLERLREAQRAVERERERLELLRRLKKQNTAPGALPPDTLAEAQPPSHPPSFNGEGLEGPRVSMLPSGVGPEYAERPEVARRDSAPTENRLAKSDVPIQLLSATNQFQRQAAVQQQIPTKLAASTKGGKDKGGKSRGSQRWESSASFDLKQQLLLNKLMGKDESTSRNRRSLSPILPGRHSPAPPPDPGFPAPSPPPADSPSEGFSLKAGGTALLPGPPAPSPLPATPLSAKEDASKEDVIFF

SEQ ID NO: 5313 - protein, 221 aa, Homo sapiens
MSYGRPPPDVEGMTSLKVDNLTYRTSPDTLRRVFEKYGRVGDVYIPRDRYTKESRGFAFVRFHDKRDAEDAMDAMDGAVLDGRELRVQMARYGRPPDSHHSRRGPPPRRYGGGGYGRRSRSPRRRRRSRSRSRSRSRSRSRSRYSRSKSRSRTRSRSRSTSKSRSARRSKSKSSSVSRSRSRSRSRSRSRSPPPVSKRESKSRSRSKSPPKSPEEEGAVSS

SEQ ID NO: 5314 - protein, 140 aa, Homo sapiens
MRKVKFTQQNYHDRLSQILTDFPKLDDIHPFYADLMNILYDKDHYKLALGQINIAKNLVDNVAKDYVRLMKYGDSLYRCKQLKRAALGRMCTVIKRQKQSLEYLEQVRQHLSRLPTIDPNTRTLLLCGYPNVGKSSFINK

SEQ ID NO: 5315 - protein, 542 aa, Homo sapiens
RFEEVLTWAKQHQQRLETALSELVANAELLEELLAWIQWAETTLIQRDQEPIPQNIDRVKALIAEHQTFMEEMTRKQPDVDRVTKTYKRKNIEPTHAPFIEKSRSGGRKSLSQPTPPPMPILSQSEAKNPRINQLSARWQQVWLLALERQRKLNDALDRLEEQLCLELKEFANFDFDVWRKKYMRWMNHKKSRVMDFFRRIDKDQDGKITRQEFIDGILASKFPTTKLEMTAVADIFDRDGDGYIDYYEFVAALHPNKDAYRPTTDADKIEDEVTRQVAQCKCAKRFQVEQIGENKYRFFLGNQFGDSQQLRLVRILRSTVMVRVGGGWMALDEFLVKNDPCRARGRTNIELREKFILPEGASQGMTPFRSRGRRSKPSSRAASPTRSSSSASQSNHSCTSMPSSPATPASGTKVIPSSGSKLKRPTPTFHSSRTSLAGDTSNSSSPASTGAKTNRADPKKSASRPGSRAGSRAGSRASSRRGSDASDFDLLETQSACSDTSESSAAGGQGNSRRGLNKPSKIPTMSKKTTTASPRTPGPKR

SEQ ID NO: 5316 - protein, 300 aa, Homo sapiens
MQSDDVIWDTLGNKQFCSFKIRTKTQSFCRNEYSLTGLCNRSSCPLANSQYATIKEEKGQCYLYMKVIERAAFPRRLWERVRLSKNYEKALEQIDENLIYWPRFIRHKCKQRFTKITQYLIRIRKLTLKRQRKLVPLSKKVERREKRREEKALIAAQLDNAIEKELLERLKQDTYGDIYNFPIHAFDKALEQQEAESDSSDTEEKDDDDDDEEDVGKREFVEDGEVDESDISDFEDMDKLDASSDEDQDGKSSSEEEEEKALSAKHKGKMPLRGPLQRKRAYVEIEYEQETEPVAKAKTT

SEQ ID NO: 5317 - protein, 381 aa, Homo sapiens
MASPPACPSEEDESLKGCELYVQLHGIQQVLKDCIVHLCISKPERPMKFLREHFEKLEKEENRQILARQKSNSQSDSHDEEVSPTPPNPVVKARRRRGGVSAEVYTEEDAVSYVRKVIPKDYKTMTALAKAISKNVLFAHLDDNERSDIFDAMFPVTHIAGETVIQQGNEGDNFYVVDQGEVDVYVNGEWVTNISEGGSFGELALIYGTPRAATVKAKTDLKLWGIDRDSYRRILMGSTLRKRKMYEEFLSKVSILESLEKWERLTVADALEPVQFEDGEKIVVQGEPGDDFYIITEGTASVLQRRSPNEEYVEVGRLGPSDYFGEIALLLNRPRAATVVARGPLKCVKLDRPRFERVLGPCSEILKRNIQRYNSFISLTV

SEQ ID NO: 5318 - protein, 1725 aa, Homo sapiens
MGNSDSQYTLQGSKNHSNTITGAKQIPCSLKIRGIHAKEEKSLHGWGHGSNGAGYKSRSLARSCLSHFKSNQPYASRLGGPTCKVSRGVAYSTHRTNAPGKDFQGISAAFSTENGFHSVGHELADNHITSRDCNGHLLNCYGRNESIASTPPGEDRKSPRVLIKTLGKLDGCLRVEFHNGGNPSKVPAEDCSEPVQLLRYSPTLASETSPVPEARRGSSADSLPSHRPSPTDSRLRSSKGSSLSSESSWYDSPWGNAGELSEAEGSFLAPGMPDPSLHASFPPGDAKKPFNQSSSLSSLRELYKDANLGSLSPSGIRLSDEYMGTHASLSNRVSFASDIDVPSRVAHGDPIQYSSFTLPCRKPKAFVEDTAKKDSLKARMRRISDWTGSLSRKKRKLQEPRSKEGSDYFDSRSDGLNTDVQGSSQASAFLWSGGSTQILSQRSESTHAIGSDPLRQNIYENFMRELEMSRTNTENIETSTETAESSSESLSSLEQLDLLFEKEQGVVRKAGWLFFKPLVTVQKERKLELVARRKWKQYWVTLKGCTLLFYETYGKNSMDQSSAPRCALFAEDSIVQSVPEHPKKENVFCLSNSFGDVYLFQATSQTDLENWVTAVHSACASLFAKKHGKEDTLRLLKNQTKNLLQKIDMDSKMKKMAELQLSVVSDPKNRKAIENQIQQWEQNLEKFHMDLFRMRCYLASLQGGELPNPKSLLAAASRPSKLALGRLGILSVSSFHALVCSRDDSALRKRTLSLTQRGRNKKGIFSSLKGLDTLARKGKEKRPSITQIFDSSGSHGFSGTQLPQNSSNSSEVDELLHIYGSTVDGVPRDNAWEIQTYVHFQDNHGVTVGIKPEHRVEDILTLACKMRQLEPSHYGLQLRKLVDDNVEYCIPAPYEYMQQQVYDEIEVFPLNVYDVQLTKTGSVCDFGFAVTAQVDERQHLSRIFISDVLPDGLAYGEGLRKGNEIMTLNGEAVSDLDLKQMEALFSEKSVGLTLIARPPDTKATLCTSWSDSDLFSRDQKSLLPPPNQSQLLEEFLDNFKKNTANDFSNVPDITTGLKRSQTDGTLDQVSHREKMEQTFRSAEQITALCRSFNDSQANGMEGPRENQDPPPRSLARHLSDADRLRKVIQELVDTEKSYVKDLSCLFELYLEPLQNETFLTQDEMESLFGSLPEMLEFQKVFLETLEDGISASSDFNTLETPSQFRKLLFSLGGSFLYYADHFKLYSGFCANHIKVQKVLERAKTDKAFKAFLDARNPTKQHSSTLESYLIKPVQRVLKYPLLLKELVSLTDQESEEHYHLTEALKAMEKVASHINEMQKIYEDYGTVFDQLVAEQSGTEKEVTELSMGELLMHSTVSWLNPFLSLGKARKDLELTVFVFKRAVILVYKENCKLKKKLPSNSRPAHNSTDLDPFKFRWLIPISALQVRLGNPAGTENNSIWELIHTKSEIEGRPETIFQLCCSDSESKTNIVKVIRSILRENFRRHIKCELPLEKTCKDRLVPLKNRVPVSAKLASSRSLKVLKNSSSNEWTGETGKGTLLDSDEGSLSSGTQSSGCPTAEGRQDSKSTSPGKYPHPGLADFADNLIKESDILSDEDDDHRQTVKQGSPTKDIEIQFQRLRISEDPDVHPEAEQQPGPESGEGQKGGEQPKLVRGHFCPIKRKANSTKRDRGTLLKAQIRHQSLDSQSENATIDLNSVLEREFSVQSLTSVVSEECFYETESHGKS

SEQ ID NO: 5319 - protein, 1287 aa, Homo sapiens
MEPIYPFARPQMNTRFPSSRMVPFHFPPSKCALWNPTPTGDFIYLHLSYYRNPKLVVTEKTIRLAYRHAKQNKKNSSCFLLGSLTADEDEEGVTLTVDRFDPGREVPECLEITPTASLPGDFLIPCKVHTQELCSREMIVHSVDDFSSALKALQCHICSKDSLDCGKLLSLRVHITSRESLDSVEFDLHWAAVTLANNFKCTPVKPIPIIPTALARNLSSNLNISQVQGTYKYGYLTMDETRKLLLLLESDPKVYSLPLVGIWLSGITHIYSPQVWACCLRYIFNSSVQERVFSESGNFIIVLYSMTHKEPEFYECFPCDGKIPDFRFQLLTSKETLHLFKNVEPPDKNPIRCELSAESQNAETEFFSKASKNFSIKRSSQKLSSGKMPIHDHDSGVEDEDFSPRPIPSPHPVSQKISKIQPSVPELSLVLDGNFIESNPLPTPLEMVNNENPPLINHLEHLKPLQPQLYDEKHSPEVEAGEPSLRGIPNQLNQDKPALLRHCKVRQPPAYKKGNPHTRNSIKPSSHNGPSHDIFEKLQTVSAGNVQNEEYPIRPSTLNSRQSSLAPQSQPHDFVFSPHNSGRPMELQIPTPPLPSYCSTNVCRCCQHHSHIQYSPLNSWQGANTVGSIQDVQSEALQKHSLFHPSGCPALYCNAFCSSSSPIALRPQGDMGSCSPHSNIEPSPVARPPSHMDLCNPQPCTVCMHTPKTESDNGMMGLSPDAYRFLTEQDRQLRLLQAQIQRLLEAQSLMPCSPKTTAVEDTVQAGRQMELVSVEAQSSPGLHMRKGVSIAVSTGASLFWNAAGEDQEPDSQMKQDDTKISSEDMNFSVDINNEVTSLPGSASSLKAVDIPSFEESNIAVEEEFNQPLSVSNSSLVVRKEPDVPVFFPSGQLAESVSMCLQTGPTGGASNNSETSEEPKIEHVMQPLLHQPSDNQKIYQDLLGQVNHLLNSSSKETEQPSTKAVIISHECTRTQNVYHTKKKTHHSRLVDKDCVLNATLKQLRSLGVKIDSPTKVKKNAHNVDHASVLACISPEAVISGLNCMSFANVGMSGLSPNGVDLSMEANAIALKYLNENQLSQLSVTRSNQNNCDPFSLLHINTDRSTVGLSLISPNNMSFATKKYMKRYGLLQSSDNSEDEEEPPDNADSKSEYLLNQNLRSIPEQLGGQKEPSKNDHEIINCSNCESVGTNADTPVLRNITNEVLQTKAKQQLTEKPAFLVKNLKPSPAVNLRTGKAEFTQHPEKENEGDITIFPESLQPSETLKQMNSMNSVGTFLDVKRLRQLPKLF

SEQ ID NO: 5320 - protein, 1075 aa, Homo sapiens
MSSQTKFKKDKEIIAEYEAQIKEIRTQLVEQFKCLEQQSESRLQLLQDLQEFFRRKAEIELEYSRSLEKLAERFSSKIRSSREHQFKKDQYLLSPVNCWYLVLHQTRRESRDHATLNDIFMNNVIVRLSQISEDVIRLFKKSKEIGLQMHEELLKVTNELYTVMKTYHMYHAESISAESKLKEAEKQEEKQFNKSGDLSMNLLRHEDRPQRRSSVKKIEKMKEKRQAKYSENKLKCTKARNDYLLNLAATNAAISKYYIHDVSDLIDCCDLGFHASLARTFRTYLSAEYNLETSRHEGLDVIENAVDNLDSRSDKHTVMDMCNQVFCPPLKFEFQPHMGDEVCQVSAQQPVQTELLMRYHQLQSRLATLKIENEEVRKTLDATMQTLQDMLTVEDFDVSDAFQHSRSTESVKSAASETYMSKINIAKRRANQQETEMFYFTKFKEYVNGSNLITKLQAKHDLLKQTLGEGERAECGTTRGRRNARTRNQDSGQAIPLVVESCIRYINLYGLQQQGIFRVPGSQVEVNDIKNSFERGEDPLVDDQNERDINSVAGVLKLYFRGLENPLFPKERFQDLISTIKLENPAERVHQIQQILVTLPRVVIVVMRYLFAFLNHLSQYSDENMMDPYNLAICFGPTLMHIPDGQDPVSCQAHINEVIKTIIIHHEAIFPSPRELEGPVYEKCMAGGEEYCDSPHSEPGAIDEVDHDNGTEPHTSDEEVEQIEAIAKFDYMGRSPRELSFKKGASLLLYHRASEDWWEGRHNGVDGLIPHQYIVVQDMDDAFSDSLSQKADSEASSGPLLDDKASSKNDLQSPTEHISDYGFGGVMGRVRLRSDGAAIPRRRSGGDTHSPPRGLGPSIDTPPRAAACPSSPHKIPLTRGRIESPEKRRMATFGSAGSINYPDKKALSEGHSMRSTCGSTRHSSLGDHKSLEAEALAEDIEKTMSTALHELRELERQNTVKQAPDVVLDTLEPLKNPPGPVSSEPASPLHTIVIRDPDAAMRRSSSSSTEMMTTFKPALSARLAGAQLRPPPMRPVRPVVQHRSSSSSSSGVGSPAVTPTEKMFPNSSADKSGTM

SEQ ID NO: 5321 - protein, 2007 aa, Homo sapiens
MAQRTGLEDPERYLFVDRAVIYNPATQADWTAKKLVWIPSERHGFEAASIKEERGDEVMVELAENGKKAMVNKDDIQKMNPPKFSKVEDMAELTCLNEASVLHNLKDRYYSGLIYTYSGLFCVVINPYKNLPIYSENIIEMYRGKKRHEMPPHIYAISESAYRCMLQDREDQSILCTGESGAGKTENTKKVIQYLAHVASSHKGRKDHNIPQESPKPVKHQGELERQLLQANPILESFGNAKTVKNDNSSRFGKFIRINFDVTGYIVGANIETYLLEKSRAVRQAKDERTFHIFYQLLSGAGEHLKSDLLLEGFNNYRFLSNGYIPIPGQQDKDNFQETMEAMHIMGFSHEEILSMLKVVSSVLQFGNISFKKERNTDQASMPENTVAQKLCHLLGMNVMEFTRAILTPRIKVGRDYVQKAQTKEQADFAVEALAKATYERLFRWLVHRINKALDRTKRQGASFIGILDIAGFEIFELNSFEQLCINYTNEKLQQLFNHTMFILEQEEYQREGIEWNFIDFGLDLQPCIDLIERPANPPGVLALLDEECWFPKATDKTFVEKLVQEQGSHSKFQKPRQLKDKADFCIIHYAGKVDYKADEWLMKNMDPLNDNVATLLHQSSDRFVAELWKDEIQNIQRASFYDSVSGLHEPPVDRIVGLDQVTGMTETAFGSAYKTKKGMFRTVGQLYKESLTKLMATLRNTNPNFVRCIIPNHEKRAGKLDPHLVLDQLRCNGVLEGIRICRQGFPNRIVFQEFRQRYEILTPNAIPKGFMDGKQACERMIRALELDPNLYRIGQSKIFFRAGVLAHLEEERDLKITDIIIFFQAVCRGYLARKAFAKKQQQLSALKVLQRNCAAYLKLRHWQWWRVFTKVKPLLQVTRQEEELQAKDEELLKVKEKQTKVEGELEEMERKHQQLLEEKNILAEQLQAETELFAEAEEMRARLAAKKQELEEILHDLESRVEEEEERNQILQNEKKKMQAHIQDLEEQLDEEEGARQKLQLEKVTAEAKIKKMEEEILLLEDQNSKFIKEKKLMEDRIAECSSQLAEEEEKAKNLAKIRNKQEVMISDLEERLKKEEKTRQELEKAKRKLDGETTDLQDQIAELQAQIDELKLQLAKKEEELQGALARGDDETLHKNNALKVVRELQAQIAELQEDFESEKASRNKAEKQKRDLSEELEALKTELEDTLDTTAAQQELRTKREQEVAELKKALEEETKNHEAQIQDMRQRHATALEELSEQLEQAKRFKANLEKNKQGLETDNKELACEVKVLQQVKAESEHKRKKLDAQVQELHAKVSEGDRLRVELAEKASKLQNELDNVSTLLEEAEKKGIKFAKDAASLESQLQDTQELLQEETRQKLNLSSRIRQLEEEKNSLQEQQEEEEEARKNLEKQVLALQSQLADTKKKVDDDLGTIESLEEAKKKLLKDAEALSQRLEEKALAYDKLEKTKNRLQQELDDLTVDLDHQRQVASNLEKKQKKFDQLLAEEKSISARYAEERDRAEAEAREKETKALSLARALEEALEAKEEFERQNKQLRADMEDLMSSKDDVGKNVHELEKSKRALEQQVEEMRTQLEELEDELQATEDAKLRLEVNMQAMKAQFERDLQTRDEQNEEKKRLLIKQVRELEAELEDERKQRALAVASKKKMEIDLKDLEAQIEAANKARDEVIKQLRKLQAQMKDYQRELEEARASRDEIFAQSKESEKKLKSLEAEILQLQEELASSERARRHAEQERDELADEITNSASGKSALLDEKRRLEARIAQLEEELEEEQSNMELLNDRFRKTTLQVDTLNAELAAERSAAQKSDNARQQLERQNKELKAKLQELEGAVKSKFKATISALEAKIGQLEEQLEQEAKERAAANKLVRRTEKKLKEIFMQVEDERRHADQYKEQMEKANARMKQLKRQLEEAEEEATRANASRRKLQRELDDATEANEGLSREVSTLKNRLRRGGPISFSSSRSGRRQLHLEGASLELSDDDTESKTSDVNETQPPQSE

SEQ ID NO: 5322 - protein, 437 aa, Homo sapiens
MADDPSAADRNVEIWKIKKLIKSLEAARGNGTSMISLIIPPKDQISRVAKMLADEFGTASNIKSRVNRLSVLGAITSVQQRLKLYNKVPPNGLVVYCGTIVTEEGKEKKVNIDFEPFKPINTSLYLCDNKFHTEALTALLSDDSKFGFIVIDGSGALFGTLQGNTREVLHKFTVDLPKKHGRGGQSALRFARLRMEKRHNYVRKVAETAVQLFISGDKVNVAGLVLAGSADFKTELSQSDMFDQRLQSKVLKLVDISYGGENGFNQAIELSTEVLSNVKFIQEKKLIGRYFDEISQDTGKYCFGVEDTLKALEMGAVEILIVYENLDIMRYVLHCQGTEEEKILYLTPEQEKDKSHFTDKETGQEHELIESMPLLEWFANNYKKFGATLEIVTDKSQEGSQFVKGFGGIGGILRYRVDFQGMEYQGGDDEFFDLDDY

SEQ ID NO: 5323 - protein, 1129 aa, Homo sapiens
MPATRKPMRYGHTEGHTEVCFDDSGSFIVTCGSDGDVRIWEDLDDDDPKFINVGEKAYSCALKSGKLVTAVSNNTIQVHTFPEGVPDGILTRFTTNANHVVFNGDGTKIAAGSSDFLVKIVDVMDSSQQKTFRGHDAPVLSLSFDPKDIFLASASCDGSVRVWQISDQTCAISWPLLQKCNDVINAKSICRLAWQPKSGKLLAIPVEKSVKLYRRESWSHQFDLSDNFISQTLNIVTWSPCGQYLAAGSINGLIIVWNVETKDCMERVKHEKGYAICGLAWHPTCGRISYTDAEGNLGLLENVCDPSGKTSSSKVSSRVEKDYNDLFDGDDMSNAGDFLNDNAVEIPSFSKGIINDDEDDEDLMMASGRPRQRSHILEDDENSVDISMLKTGSSLLKEEEEDGQEGSIHNLPLVTSQRPFYDGPMPTPRQKPFQSGSTPLHLTHRFMVWNSIGIIRCYNDEQDNAIDVEFHDTSIHHATHLSNTLNYTIADLSHEAILLACESTDELASKLHCLHFSSWDSSKEWIIDLPQNEDIEAICLGQGWAAAATSALLLRLFTIGGVQKEVFSLAGPVVSMAGHGEQLFIVYHRGTGFDGDQCLGVQLLELGKKKKQILHGDPLPLTRKSYLAWIGFSAEGTPCYVDSEGIVRMLNRGLGNTWTPICNTREHCKGKSDHYWVVGIHENPQQLRCIPCKGSRFPPTLPRPAVAILSFKLPYCQIATEKGQMEEQFWRSVIFHNHLDYLAKNGYEYEESTKNQATKEQQELLMKMLALSCKLEREFRCVELADLMTQNAVNLAIKYASRSRKLILAQKLSELAVEKAAELTATQVEEEEEEEDFRKKLNAGYSNTATEWSQPRFRNQVEEDAEDSGEADDEEKPEIHKPGQNSFSKSTNSSDVSAKSGAVTFSSQGRVNPFKVSASSKEPAMSMNSARSTNILDNMGKSSKKSTALSRTTNNEKSPIIKPLIPKPKPKQASAASYFQKRNSQTNKTEEVKEENLKNVLSETPAICPPQNTENQRPKTGFQMWLEENRSNILSDNPDFSDEADIIKEGMIRFRVLSTEERKVWANKAKGETASEGTEAKKRKRVVDESDETENQEEKAKENLNLSKKQKPLDFSTNQKLSAFAFKQE

SEQ ID NO: 5324 - protein, 326 aa, Homo sapiens
MLLSKFGSLAHLCGPGGVDHLPVKILQPAKADKESFEKAYQVGAVLGSGGFGTVYAGSRIADGLPVAVKHVVKERVTEWGSLGGATVPLEVVLLRKVGAAGGARGVIRLLDWFERPDGFLLVLERPEPAQDLFDFITERGALDEPLARRFFAQVLAAVRHCHSCGVVHRDIKDENLLVDLRSGELKLIDFGSGALLKDTVYTDFDGTRVYSPPEWIRYHRYHGRSATVWSLGVLLYDMVCGDIPFEQDEEILRGRLLFRRRVSPECQQLIRWCLSLRPSERPSLDQIAAHPWMLGADGGVPESCDLRLCTLDPDDVASTTSSSESL

SEQ ID NO: 5325 - protein, 210 aa, Homo sapiens
MGSLPSRRKSLPSPSLSSSVQGQGPVTMEAERSKATAVALGSFPAGGPAELSLRLGEPLTIVSEDGDWWTVLSEVSGREYNIPSVHVAKVSHGWLYEGLSREKAEELLLLPGNPGGAFLIRESQTRRGSYSLSVRLSRPASWDRIRHYRIHCLDNGWLYISPRLTFPSLQALVDHYSEGWPAPWQGYTPTCDCAEDTTQLERAGQLPPVF

SEQ ID NO: 5326 - protein, 807 aa, Homo sapiens
MDSGGGSLGLHTPDSRMAHTMIMQDFVAGMAGTAHIDGDHIVVSVPEAVLVSDVVTDDGITLDHGLAAEVVHGPDIITETDVVTEGVIVPEAVLEADVAIEEDLEEDDGDHILTSELITETVRVPEQVFVADLVTGPNGHLEHVVQDCVSGVDSPTMVSEEVLVTNSDTETVIQAAGGVPGSTVTIKTEDDDDDDVKSTSEDYLMISLDDVGEKLEHMGNTPLKIGSDGSQEDAKEDGFGSEVIKVYIFKAEAEDDVEIGGTEIVTESEYTSGHSVAGVLDQSRMQREKMVYMAVKDSSQEEDDISCAEIADEVYMEVIVGEEEGTSLPEIQLEDSDVNKTVVPVVWAAAYGDERRVSRRYEDCQASGNTLDSALESRSSTAAQYLQICDGINTNKVLKQKAKKRRRGETRQWQTAVIIGPDGQPLTVYPCHICTKKFKSRGFLKRHMKNHPDHLMRKKYQCTDCDFTTNKKVSFHNHLESHKLINKVDKTHEFTEYTRRYREASPLSSNKLILRDKEPKMHKCKYCDYETAEQGLLNRHLLAVHSKNFPHVCVECGKGFRHPSELKKHMRTHTGEKPYQCQYCIFRCADQSNLKTHIKSKHGNNLPYKCEHCPQAFGDERELQRHLDLFQGHKTHQCPHCDHKSTNSSDLKRHIISVHTKDFPHKCEVCDKGFHRPSELKKHSDIHKGRKIHQCRHCDFKTSDPFILSGHILSVHTKDQPLKCKRCKRGFRQQNELKKHMKTHTGRKIYQCEYCEYSTTDASGFKRHVISIHTKDYPHRCEFCKKGFRRPSEKNQHIMRHHKEALM

SEQ ID NO: 5327 - protein, 902 aa, Homo sapiens
MNISGSSCGSPNSADTSSDFKDLWTKLKECHDREVQGLQVKVTKLKQERILDAQRLEEFFTKNQQLREQQKVLHETIKVLEDRLRAGLCDRCAVTEEHMRKKQQEFENIRQQNLKLITELMNERNTLQEENKKLSEQLQQKIENDQQHQAAELECEEDVIPDSPITAFSFSGVNRLRRKENPHVRYIEQTHTKLEHSVCANEMRKVSKSSTHPQHNPNENEILVADTYDQSQSPMAKAHGTSSYTPDKSSFNLATVVAETLGLGVQEESETQGPMSPLGDELYHCLEGNHKKQPFEESTRNTEDSLRFSDSTSKTPPQEELPTRVSSPVFGATSSIKSGLDLNTSLSPSLLQPGKKKHLKTLPFSNTCISRLEKTRSKSEDSALFTHHSLGSEVNKIIIQSSNKQILINKNISESLGEQNRTEYGKDSNTDKHLEPLKSLGGRTSKRKKTEEESEHEVSCPQASFDKENAFPFPMDNQFSMNGDCVMDKPLDLSDRFSAIQRQEKSQGSETSKNKFRQVTLYEALKTIPKGFSSSRKASDGNCTLPKDSPGEPCSQECIILQPLNKCSPDNKPSLQIKEENAVFKIPLRPRESLETENVLDDIKSAGSHEPIKIQTRSDHGGCELASVLQLNPCRTGKIKSLQNNQDVSFENIQWSIDPGADLSQYKMDVTVIDTKDGSQSKLGGETVDMDCTLVSETVLLKMKKQEQKGEKSSMLFYIDEERKMNDSLEDMFDRTTHEEYESCLADSFSQAADEEEELSTATKKLHTHGDKQDKVKQKAFVEPYFKGDERETSLQNFPHIEVVRKKEERRKLLGHTCKECEIYYADMPAEEREKKLASCSRHRFRYIPPNTPENFWEVGFPSTQTCMERGYIKEDLDPCPRPKRRQPYNAIFSPKGKEQKT

SEQ ID NO: 5328 - protein, 634 aa, Homo sapiens
MAHYNFKKITVVPSAKDFIDLTLSKTQRKTPTVIHKHYQIHRIRHFYMRKVKFTQQNYHDRLSQILTDFPKLDDIHPFYADLMNILYDKDHYKLALGQINIAKNLVDNVAKDYVRLMKYGDSLYRCKQLKRAALGRMCTVIKRQKQSLEYLEQVRQHLSRLPTIDPNTRTLLLCGYPNVGKSSFINKVTRADVDVQPYAFTTKSLFVGHMDYKYLRWQVVDTPGILDHPLEDRNTIEMQAITALAHLRAAVLYVMDLSEQCGHGLREQLELFQNIRPLFINKPLIVVANKCDVKRIAELSEDDQKIFTDLQSEGFPVIETSTLTEEGVIKVKTEACDRLLAHRVETKMKGNKVNEVLNRLHLAIPTRRDDKERPPFIPEGVVARRKRMETEESRKKRERDLELEMGDDYILDLQKYWDLMNLSEKHDKIPEIWEGHNIADYIDPAIMKKLEELEKEEELRTAAGEYDSVSESEDEEMLEIRQLAKQIREKKKLKILESKEKNTQGPRMPRTAKKVQRTVLEKEMRSLGVDMDDKDDAHYAVQARRSRSITRKRKREDSAPPSSVARSGSCSRTPRDVSGLRDVKMVKKAKTMMKNAQKKMNRLGKKGEADRHVFDMKPKHLLSGKRKAGKKDRR

SEQ ID NO: 5329 - protein, 131 aa, Homo sapiens
MNDTVTIRTRKFMTNRLLQRKQMVIDVLHPGKATVPKTEIREKLAKMYKTTPDVIFVFGFRTHFGGGKTTGFGMIYDSLDYAKKNEPKHRLARHGLYEKKKTSRKQRKERKNRMKKVRGTAKANVGAGKKK

SEQ ID NO: 5330 - protein, 443 aa, Homo sapiens
MAAAVPDEAVARDVQRLLVQFQDEGGQLLGSPFDVPVDITPDRLQLVCNALLAQEDPLPLAFFVHDAEIVSSLGKTLESQAVETEKVLDIIYQPQAIFRVRAVTRCTSSLEGHSEAVISVAFSPTGKYLASGSGDTTILLWDPSTGKQVGRTLAGHSKWITGLSWEPLHANPECRYVASSSKDGSVRIWDTTAGRCERILTGHTQSVTCLRWGGDGLLYSASQDRTIKVWRAHDGVLCRTLQGHGHWVNTMALSTDYALRTGAFEPAEASVNPQDLQGSLQELKERALSRYNLVRGQGPERLVSGSDDFTLFLWSPAEDKKPLTRMTGHQALINQVLFSPDSRIVASASFDKSIKLWDGRTGKYLASLRGHVAAVYQIAWSADSRLLVSGSSDSTLKVWDVKAQKLAMDLPGHADEVYAVDWSPDGQRVASGGKDKCLRIWRR

SEQ ID NO: 5331 - protein, 768 aa, Homo sapiens
MKLLWQAKMSSIQDWGEEVEEGAVYHVTLKRVQIQQAANKGARWLGVEGDQLPPGHTVSQYETCKIRTIKAGTLEKLVENLLTAFGDNDFTYISIFLSTYRGFASTKEVLELLLDRYGNLTSPNCEEDGSQSSSESKMVIRNAIASILRAWLDQCAEDFREPPHFPCLQKLLDYLTRMMPGSDPERRAQNLLEQFQKQEVETDNGLPNTISFSLEEEEELEGGESAEFTCFSEDLVAEQLTYMDAQLFKKVVPHHCLGCIWSRRDKKENKHLAPTIRATISQFNTLTKCVVSTILGGKELKTQQRAKIIEKWINIAHECRLLKNFSSLRAIVSALQSNSIYRLKKTWAAVPRDRMLMFEELSDIFSDHNNHLTSRELLMKEGTSKFANLDSSVKENQKRTQRRLQLQKDMGVMQGTVPYLGTFLTDLTMLDTALQDYIEGGLINFEKRRREFEVIAQIKLLQSACNSYCMTPDQKFIQWFQRQQLLTEEESYALSCEIEAAADASTTSPKPRKSMVKRLSLLFLGSDMITSPTPTKEQPKSTASGSSGESMDSVSVSSCESNHSEAEEGSITPMDTPDEPQKKLSESSSSCSSIHSMDTNSSGMSSLINPLSSPPSCNNNPKIHKRSVSVTSITSTVLPPVYNQQNEDTCIIRISVEDNNGNMYKSIMLTSQDKTPAVIQRAMLKHNLDSDPAEEYELVQVISEDKELVIPDSANVFYAMNSQVNFDFILRKKNSMEEQVKLRSRTSLTLPRTAKRGCWSNRHSKITL

SEQ ID NO: 5332 - protein, 750 aa, Homo sapiens
MSQWYELQQLDSKFLEQVHQLYDDSFPMEIRQYLAQWLEKQDWEHAANDVSFATIRFHDLLSQLDDQYSRFSLENNFLLQHNIRKSKRNLQDNFQEDPIQMSMIIYSCLKEERKILENAQRFNQAQSGNIQSTVMLDKQKELDSKVRNVKDKVMCIEHEIKSLEDLQDEYDFKCKTLQNREHETNGVAKSDQKQEQLLLKKMYLMLDNKRKEVVHKIIELLNVTELTQNALINDELVEWKRRQQSACIGGPPNACLDQLQNWFTIVAESLQQVRQQLKKLEELEQKYTYEHDPITKNKQVLWDRTFSLFQQLIQSSFVVERQPCMPTHPQRPLVLKTGVQFTVKLRLLVKLQELNYNLKVKVLFDKDVNERNTVKGFRKFNILGTHTKVMNMEESTNGSLAAEFRHLQLKEQKNAGTRTNEGPLIVTEELHSLSFETQLCQPGLVIDLETTSLPVVVISNVSQLPSGWASILWYNMLVAEPRNLSFFLTPPCARWAQLSEVLSWQFSSVTKRGLNVDQLNMLGEKLLGPNASPDGLIPWTRFCKENINDKNFPFWLWIESILELIKKHLLPLWNDGCIMGFISKERERALLKDQQPGTFLLRFSESSREGAITFTWVERSQNGGEPDFHAVEPYTKKELSAVTFPDIIRNYKVMAAENIPENPLKYLYPNIDKDHAFGKYYSRPKEAPEPMELDGPKGTGYIKTELISVSEVHPSRLQTTDNLLPMSPEEFDEVSRIVGSVEFDSMMNTV

SEQ ID NO: 5333 - protein, 1631 aa, Homo sapiens
MERRAAGPGWAAYERLTAEEMDEQRRQNVAYQYLCRLEEAKRWMEACLKEELPSPVELEESLRNGVLLAKLGHCFAPSVVPLKKIYDVEQLRYQATGLHFRHTDNINFWLSAIAHIGLPSTFFPETTDIYDKKNMPRVVYCIHALSLFLFRLGLAPQIHDLYGKVKFTAEELSNMASELAKYGLQLPAFSKIGGILANELSVDEAAVHAAVLAINEAVERGVVEDTLAALQNPSALLENLREPLAAVYQEMLAQAKMEKAANARNHDDRESQDIYDHYLTQAEIQGNINHVNVHGALEVVDDALERQSPEALLKALQDPALALRGVRRDFADWYLEQLNSDREQKAQELGLVELLEKEEVQAGVAAANTKGDQEQAMLHAVQRINKAIRRRVAADTVKELMCPEAQLPPVYPVASSMYQLELAVLQQQQGELGQEELFVAVEMLSAVVLINRALEARDASGFWSSLVNPATGLAEVEGENAQRYFDALLKLRQERGMGEDFLSWNDLQATVSQVNAQTQEETDRVLAVSLINEALDKGSPEKTLSALLLPAAGLDDVSLPVAPRYHLLLVAAKRQKAQVTGDPGAVLWLEEIRQGVVRANQDTNTAQRMALGVAAINQAIKEGKAAQTERVLRNPAVALRGVVPDCANGYQRALESAMAKKQRPADTAFWVQHDMKDGTAYYFHLQTFQGIWEQPPGCPLNTSHLTREEIQSAVTKVTAAYDRQQLWKANVGFVIQLQARLRGFLVRQKFAEHSHFLRTWLPAVIKIQAHWRGYRQRKIYLEWLQYFKANLDAIIKIQAWARMWAARRQYLRRLHYFQKNVNSIVKIQAFFRARKAQDDYRILVHAPHPPLSVVRRFAHLLNQSQQDFLAEAELLKLQEEVVRKIRSNQQLEQDLNIMDIKIGLLVKNRITLQEVVSHCKKLTKRNKEQLSDMMVLDKQKGLKSLSKEKRQKLEAYQHLFYLLQTQPIYLAKLIFQMPQNKTTKFMEAVIFSLYNYASSRREAYLLLQLFKTALQEEIKSKVEQPQDVVTGNPTVVRLVVRFYRNGRGQSALQEILGKVIQDVLEDKVLSVHTDPVHLYKNWINQTEAQTGQRSHLPYDVTPEQALSHPEVQRRLDIALRNLLAMTDKFLLAITSSVDQIPYGMRYVAKVLKATLAEKFPDATDSEVYKVVGNLLYYRFLNPAVVAPDAFDIVAMAAGGALAAPQRHALGAVAQLLQHAAAGKAFSGQSQHLRVLNDYLEETHLKFRKFIHRACQVPEPEERFAVDEYSDMVAVAKPMVYITVGELVNTHRLLLEHQDCIAPDHQDPLHELLEDLGELPTIPDLIGESIAADGHTDLSKLEVSLTLTNKFEGLEADADDSNTRSLLLSTKQLLADIIQFHPGDTLKEILSLSASREQEAAHKQLMSRRQACTAQTPEPLRRHRSLTAHSLLPLAEKQRRVLRNLRRLEALGLVSARNGYQGLVDELAKDIRNQHRHRHRRKAELVKLQATLQGLSTKTTFYEEQGDYYSQYIRACLDHLAPDSKSSGKGKKQPSLHYTAAQLLEKGVLVEIEDLPASHFRNVIFDITPGDEAGKFEVNAKFLGVDMERFQLHYQDLLQLQYEGVAVMKLFNKAKVNVNLLIFLLNKKFLRK

SEQ ID NO: 5334 - protein, 748 aa, Homo sapiens
MKTSPRRPLILKRRRLPLPVQNAPSETSEEEPKRSPAQQESNQAEASKEVAESNSCKFPAGIKIINHPTMPNTQVVAIPNNANIHSIITALTAKGKESGSSGPNKFILISCGGAPTQPPGLRPQTQTSYDAKRTEVTLETLGPKPAARDVNLPRPPGALCEQKRETCADGEAAGCTINNSLSNIQWLRKMSSDGLGSRSIKQEMEEKENCHLEQRQVKVEEPSRPSASWQNSVSERPPYSYMAMIQFAINSTERKRMTLKDIYTWIEDHFPYFKHIAKPGWKNSIRHNLSLHDMFVRETSANGKVSFWTIHPSANRYLTLDQVFKQQKRPNPELRRNMTIKTELPLGARRKMKPLLPRVSSYLVPIQFPVNQSLVLQPSVKVPLPLAASLMSSELARHSKRVRIAPKVLLAEEGIAPLSSAGPGKEEKLLFGEGFSPLLPVQTIKEEEIQPGEEMPHLARPIKVESPPLEEWPSPAPSFKEESSHSWEDSSQSPTPRPKKSYSGLRSPTRCVSEMLVIQHRERRERSRSRRKQHLLPPCVDEPELLFSEGPSTSRWAAELPFPADSSDPASQLSYSQEVGGPFKTPIKETLPISSTPSKSVLPRTPESWRLTPPAKVGGLDFSPVQTSQGASDPLPDPLGLMDLSTTPLQSAPPLESPQRLLSSEPLDLISVPFGNSSPSDIDVPKPGSPEPQVSGLAANRSLTEGLVLDTMNDSLSKILLDISFPGLDEDPLGPDNINWSQFIPELQ

SEQ ID NO: 5335 - protein, 1377 aa, Homo sapiens
MDALNRNQIGPGCQTQTMVQKGPLDLIETGKGLKVQTDKPHLVSLGSGRLSTAITLLPLEEGRTVIGSAARDISLQGPGLAPEHCYIENLRGTLTLYPCGNACTIDGLPVRQPTRLTQGCMLCLGQSTFLRFNHPAEAKWMKSMIPAGGRAPGPPYSPVPAESESLVNGNHTPQTATRGPSACASHSSLVSSIEKDLQEIMDSLVLEEPGAAGKKPAATSPLSPMANGGRYLLSPPTSPGAMSVGSSYENTSPAFSPLSSPASSGSCASHSPSGQEPGPSVPPLVPARSSSYHLALQPPQSRPSGARSESPRLSRKGGHERPPSPGLRGLLTDSPAATVLAEARRATESPRLGGQLPVVAISLSEYPASGALSQPTSIPGSPKFQPPVPAPRNKIGTLQDRPPSPFREPPGSERVLTTSPSRQLVGRTFSDGLATRTLQPPESPRLGRRGLDSMRELPPLSPSLSRRALSPLPTRTTPDPKLNREVAESPRPRRWAAHGASPEDFSLTLGARGRRTRSPSPTLGESLAPHKGSFSGRLSPAYSLGSLTGASPCQSPCVQRKLSSGDLRVPVTRERKNSITEISDNEDDLLEYHRRQRQERLREQEMERLERQRLETILNLCAEYSRADGGPEAGELPSIGEATAALALAGRRPSRGLAGASGRSSEEPGVATQRLWESMERSDEENLKEECSSTESTQQEHEDAPSTKLQGEVLALEEERAQVLGHVEQLKVRVKELEQQLQESAREAEMERALLQGEREAERALLQKEQKAVDQLQEKLVALETGIQKERDKEAEALETETKLFEDLEFQQLERESRVEEERELAGQGLLRSKAELLRSIAKRKERLAILDSQAGQIRAQAVQESERLARDKNASLQLLQKEKEKLTVLERRYHSLTGGRPFPKTTSTLKEMEKLLLPAVDLEQWYQELMAGLGTGPAAASPHSSPPPLPAKASRQLQVYRSKMDGEATSPLPRTRSGPLPSSSGSSSSSSQLSVATLGRSPSPKSALLTQNGTGSLPRNLAATLQDIETKRQLALQQKGQQVIEEQRRRLAELKQKAAAEAQCQWDALHGAAPFPAGPSGFPPLMHHSILHHLPAGRERGEEGEHAYDTLSLESSDSMETSISTGGNSACSPDNMSSASGLDMGKIEEMEKMLKEAHAEKNRLMESREREMELRRQALEEERRRREQVERRLQSESARRQQLVEKEVKMREKQFSQARPLTRYLPIRKEDFDLKTHIESSGHGVDTCLHVVLSSKVCRGYLVKMGGKIKSWKKRWFVFDRLKRTLSYYVDKHETKLKGVIYFQAIEEVYYDHLRSAAKKRFFRFTMVTESPNPALTFCVKTHDRLYYMVAPSAEAMRIWMDVIVTGAEGYTQFMN

SEQ ID NO: 5336 - protein, 7461 aa, Homo sapiens
MAGYLSPAAYLYVEEQEYLQAYEDVLERYKDERDKVQKKTFTKWINQHLMKVRKHVNDLYEDLRDGHNLISLLEVLSGDTLPREKGRMRFHRLQNVQIALDYLKRRQVKLVNIRNDDITDGNPKLTLGLIWTIILHFQISDIHVTGESEDMSAKERLLLWTQQATEGYAGIRCENFTTCWRDGKLFNAIIHKYRPDLIDMNTVAVQSNLANLEHAFYVAEKIGVIRLLDPEDVDVSSPDEKSVITYVSSLYDAFPKVPEGGEGIGANDVEVKWIEYQNMVNYLIQWIRHHVTTMSERTFPNNPVELKALYNQYLQFKETEIPPKETEKSKIKRLYKLLEIWIEFGRIKLLQGYHPNDIEKEWGKLIIAMLEREKALRPEVERLEMLQQIANRVQRDSVICEDKLILAGNALQSDSKRLESGVQFQNEAEIAGYILECENLLRQHVIDVQILIDGKYYQADQLVQRVAKLRDEIMALRNECSSVYSKGRILTTEQTKLMISGITQSLNSGFAQTLHPSLTSGLTQSLTPSLTSSSMTSGLSSGMTSRLTPSVTPAYTPGFPSGLVPNFSSGVEPNSLQTLKLMQIRKPLLKSSLLDQNLTEEEINMKFVQDLLNWVDEMQVQLDRTEWGSDLPSVESHLENHKNVHRAIEEFESSLKEAKISEIQMTAPLKLTYAEKLHRLESQYAKLLNTSRNQERHLDTLHNFVSRATNELIWLNEKEEEEVAYDWSERNTNIARKKDYHAELMRELDQKEENIKSVQEIAEQLLLENHPARLTIEAYRAAMQTQWSWILQLCQCVEQHIKENTAYFEFFNDAKEATDYLRNLKDAIQRKYSCDRSSSIHKLEDLVQESMEEKEELLQYKSTIANLMGKAKTIIQLKPRNSDCPLKTSIPIKAICDYRQIEITIYKDDECVLANNSHRAKWKVISPTGNEAMVPSVCFTVPPPNKEAVDLANRIEQQYQNVLTLWHESHINMKSVVSWHYLINEIDRIRASNVASIKTMLPGEHQQVLSNLQSRFEDFLEDSQESQVFSGSDITQLEKEVNVCKQYYQELLKSAEREEQEESVYNLYISEVRNIRLRLENCEDRLIRQIRTPLERDDLHESVFRITEQEKLKKELERLKDDLGTITNKCEEFFSQAAASSSVPTLRSELNVVLQNMNQVYSMSSTYIDKLKTVNLVLKNTQAAEALVKLYETKLCEEEAVIADKNNIENLISTLKQWRSEVDEKRQVFHALEDELQKAKAISDEMFKTYKERDLDFDWHKEKADQLVERWQNVHVQIDNRLRDLEGIGKSLKYYRDTYHPLDDWIQQVETTQRKIQENQPENSKTLATQLNQQKMLVSEIEMKQSKMDECQKYAEQYSATVKDYELQTMTYRAMVDSQQKSPVKRRRMQSSADLIIQEFMDLRTRYTALVTLMTQYIKFAGDSLKRLEEEEKSLEEEKKEHVEKAKELQKWVSNISKTLKDAEKAGKPPFSKQKISSEEISTKKEQLSEALQTIQLFLAKHGDKMTDEERNELEKQVKTLQESYNLLFSESLKQLQESQTSGDVKVEEKLDKVIAGTIDQTTGEVLSVFQAVLRGLIDYDTGIRLLETQLMISGLISPELRKCFDLKDAKSHGLIDEQILCQLKELSKAKEIISAASPTTIPVLDALAQSMITESMAIKVLEILLSTGSLVIPATGEQLTLQKAFQQNLVSSALFSKVLERQNMCKDLIDPCTSEKVSLIDMVQRSTLQENTGMWLLPVRPQEGGRITLKCGRNISILRAAHEGLIDRETMFRLLSAQLLSGGLINSNSGQRMTVEEAVREGVIDRDTASSILTYQVQTGGIIQSNPAKRLTVDEAVQCDLITSSSALLVLEAQRGYVGLIWPHSGEIFPTSSSLQQELITNELAYKILNGRQKIAALYIPESSQVIGLDAAKQLGIIDNNTASILKNITLPDKMPDLGDLEACKNARRWLSFCKFQPSTVHDYRQEEDVFDGEEPVTTQTSEETKKLFLSYLMINSYMDANTGQRLLLYDGDLDEAVGMLLEGCHAEFDGNTAIKECLDVLSSSGVFLNNASGREKDECTATPSSFNKCHCGEPEHEETPENRKCAIDEEFNEMRNTVINSEFSQSGKLASTISIDPKVNSSPSVCVPSLISYLTQTELADISMLRSDSENILTNYENQSRVETNERANECSHSKNIQNFPSDLIENPIMKSKMSKFCGVNETENEDNTNRDSPIFDYSPRLSALLSHDKLMHSQGSFNDTHTPESNGNKCEAPALSFSDKTMLSGQRIGEKFQDQFLGIAAINISLPGEQYGQKSLNMISSNPQVQYHNDKYISNTSGEDEKTHPGFQQMPEDKEDESEIEEYSCAVTPGGDTDNAIVSLTCATPLLDETISASDYETSLLNDQQNNTGTDTDSDDDFYDTPLFEDDDHDSLLLDGDDRDCLHPEDYDTLQEENDETASPADVFYDVSKENENSMVPQGAPVGSLSVKNKAHCLQDFLMDVEKDELDSGEKIHLNPVGSDKVNGQSLETGSERECTNILEGDESDSLTDYDIVGGKESFTASLKFDDSGSWRGRKEEYVTGQEFHSDTDHLDSMQSEESYGDYIYDSNDQDDDDDDGIDEEGGGIRDENGKPRCQNVAEDMDIQLCASILNENSDENENINTMILLDKMHSCSSLEKQQRVNVVQLASPSENNLVTEKSNLPEYTTEIAGKSKENLLNHEMVLKDVLPPIIKDTESEKTFGPASISHDNNNISSTSELGTDLANTKVKLIQGSELPELTDSVKGKDEYFKNMTPKVDSSLDHIICTEPDLIGKPAEESHLSLIASVTDKDPQGNGSDLIKGRDGKSDILIEDETSIQKMYLGEGEVLVEGLVEEENRHLKLLPGKNTRDSFKLINSQFPFPQITNNEELNQKGSLKKATVTLKDEPNNLQIIVSKSPVQFENLEEIFDTSVSKEISDDITSDITSWEGNTHFEESFTDGPEKELDLFTYLKHCAKNIKAKDVAKPNEDVPSHVLITAPPMKEHLQLGVNNTKEKSTSTQKDSPLNDMIQSNDLCSKESISGGGTEISQFTPESIEATLSILSRKHVEDVGKNDFLQSERCANGLGNDNSSNTLNTDYSFLEINNKKERIEQQLPKEQALSPRSQEKEVQIPELSQVFVEDVKDILKSRLKEGHMNPQEVEEPSACADTKILIQNLIKRITTSQLVNEASTVPSDSQMSDSSGVSPMTNSSELKPESRDDPFCIGNLKSELLLNILKQDQHSQKITGVFELMRELTHMEYDLEKRGITSKVLPLQLENIFYKLLADGYSEKIEHVGDFNQKACSTSEMMEEKPHILGDIKSKEGNYYSPNLETVKEIGLESSTVWASTLPRDEKLKDLCNDFPSHLECTSGSKEMASGDSSTEQFSSELQQCLQHTEKMHEYLTLLQDMKPPLDNQESLDNNLEALKNQLRQLETFELGLAPIAVILRKDMKLAEEFLKSLPSDFPRGHVEELSISHQSLKTAFSSLSNVSSERTKQIMLAIDSEMSKLAVSHEEFLHKLKSFSDWVSEKSKSVKDIEIVNVQDSEYVKKRLEFLKNVLKDLGHTKMQLETTAFDVQFFISEYAQDLSPNQSKQLLRLLNTTQKCFLDVQESVTTQVERLETQLHLEQDLDDQKIVAERQQEYKEKLQGICDLLTQTENRLIGHQEAFMIGDGTVELKKYQSKQEELQKDMQGSAQALAEVVKNTENFLKENGEKLSQEDKALIEQKLNEAKIKCEQLNLKAEQSKKELDKVVTTAIKEETEKVAAVKQLEESKTKIENLLDWLSNVDKDSERAGTKHKQVIEQNGTHFQEGDGKSAIGEEDEVNGNLLETDVDGQVGTTQENLNQQYQKVKAQHEKIISQHQAVIIATQSAQVLLEKQGQYLSPEEKEKLQKNMKELKVHYETALAESEKKMKLTHSLQEELEKFDADYTEFEHWLQQSEQELENLEAGADDINGLMTKLKRQKSFSEDVISHKGDLRYITISGNRVLEAAKSCSKRDGGKVDTSATHREVQRKLDHATDRFRSLYSKCNVLGNNLKDLVDKYQHYEDASCGLLAGLQACEATASKHLSEPIAVDPKNLQRQLEETKALQGQISSQQVAVEKLKKTAEVLLDARGSLLPAKNDIQKTLDDIVGRYEDLSKSVNERNEKLQITLTRSLSVQDGLDEMLDWMGNVESSLKEQGQVPLNSTALQDIISKNIMLEQDIAGRQSSINAMNEKVKKFMETTDPSTASSLQAKMKDLSARFSEASHKHKETLAKMEELKTKVELFENLSEKLQTFLETKTQALTEVDVPGKDVTELSQYMQESTSEFLEHKKHLEVLHSLLKEISSHGLPSDKALVLEKTNNLSKKFKEMEDTIKEKKEAVTSCQEQLDAFQVLVKSLKSWIKETTKKVPIVQPSFGAEDLGKSLEDTKKLQEKWSLKTPEIQKVNNSGISLCNLISAVTTPAKAIAAVKSGGAVLNGEGTATNTEEFWANKGLTSIKKDMTDISHGYEDLGLLLKDKIAELNTKLSKLQKAQEESSAMMQWLQKMNKTATKWQQTPAPTDTEAVKTQVEQNKSFEAELKQNVNKVQELKDKLTELLEENPDTPEAPRWKQMLTEIDSKWQELNQLTIDRQQKLEESSNNLTQFQTVEAQLKQWLVEKELMVSVLGPLSIDPNMLNTQRQQVQILLQEFATRKPQYEQLTAAGQGILSRPGEDPSLRGIVKEQLAAVTQKWDSLTGQLSDRCDWIDQAIVKSTQYQSLLRSLSDKLSDLDNKLSSSLAVSTHPDAMNQQLETAQKMKQEIQQEKKQIKVAQALCEDLSALVKEEYLKAELSRQLEGILKSFKDVEQKAENHVQHLQSACASSHQFQQMSRDFQAWLDTKKEEQNKSHPISAKLDVLESLIKDHKDFSKTLTAQSHMYEKTIAEGENLLLKTQGSEKAALQLQLNTIKTNWDTFNKQVKERENKLKESLEKALKYKEQVETLWPWIDKCQNNLEEIKFCLDPAEGENSIAKLKSLQKEMDQHFGMVELLNNTANSLLSVCEIDKEVVTDENKSLIQKVDMVTEQLHSKKFCLENMTQKFKEFQEVSKESKRQLQCAKEQLDIHDSLGSQAYSNKYLTMLQTQQKSLQALKHQVDLAKRLAQDLVVEASDSKGTSDVLLQVETIAQEHSTLSQQVDEKCSFLETKLQGIGHFQNTIREMFSQFAEFDDELDSMAPVGRDAETLQKQKETIKAFLKKLEALMASNDNANKTCKMMLATEETSPDLVGIKRDLEALSKQCNKLLDRAQAREEQVEGTIKRLEEFYSKLKEFSILLQKAEEHEESQGPVGMETETINQQLNMFKVFQKEEIEPLQGKQQDVNWLGQGLIQSAAKSTSTQGLEHDLDDVNARWKTLNKKVAQRAAQLQEALLHCGRFQDALESLLSWMVDTEELVANQKPPSAEFKVVKAQIQEQKLLQRLLDDRKSTVEVIKREGEKIATTAEPADKVKILKQLSLLDSRWEALLNKAETRNRQLEGISVVAQQFHETLEPLNEWLTTIEKRLVNCEPIGTQASKLEEQIAQHKVLQEDILLRKQNVDQALLNGLELLKQTTGDEVLIIQDKLEAIKARYKDITKLSTDVAKTLEQALQLARRLHSTHEELCTWLDKVEVELLSYETQVLKGEEASQAQMRPKELKKEAKNNKALLDSLNEVSSALLELVPWRAREGLEKMVAEDNERYRLVSDTITQKVEEIDAAILRSQQFDQAADAELSWITETEKKLMSLGDIRLEQDQTSAQLQVQKTFTMEILRHKDIIDDLVKSGHKIMTACSEEEKQSMKKKLDKVLKNYDTICQINSERYLQLERAQSLVNQFWETYEELWPWLTETQSIISQLPAPALEYETLRQQQEEHRQLRELIAEHKPHIDKMNKTGPQLLELSPGEGFSIQEKYVAADTLYSQIKEDVKKRAVALDEAISQSTQFHDKIDQILESLERIVERLRQPPSISAEVEKIKEQISENKNVSVDMEKLQPLYETLKQRGEEMIARSGGTDKDISAKAVQDKLDQMVFIWENIHTLVEEREAKLLDVMELAEKFWCDHMSLIVTIKDTQDFIRDLEDPGIDPSVVKQQQEAAETIREEIDGLQEELDIVINLGSELIAACGEPDKPIVKKSIDELNSAWDSLNKAWKDRIDKLEEAMQAAVQYQDGLQAVFDWVDIAGGKLASMSPIGTDLETVKQQIEELKQFKSEAYQQQIEMERLNHQAELLLKKVTEESDKHTVQDPLMELKLIWDSLEERIINRQHKLEGALLALGQFQHALDELLAWLTHTEGLLSEQKPVGGDPKAIEIELAKHHVLQNDVLAHQSTVEAVNKAGNDLIESSAGEEASNLQNKLEVLNQRWQNVLEKTEQRKQQLDGALRQAKGFHGEIEDLQQWLTDTERHLLASKPLGGLPETAKEQLNVHMEVCAAFEAKEETYKSLMQKGQQMLARCPKSAETNIDQDINNLKEKWESVETKLNERKTKLEEALNLAMEFHNSLQDFINWLTQAEQTLNVASRPSLILDTVLFQIDEHKVFANEVNSHREQIIELDKTGTHLKYFSQKQDVVLIKNLLISVQSRWEKVVQRLVERGRSLDDARKRAKQFHEAWSKLMEWLEESEKSLDSELEIANDPDKIKTQLAQHKEFQKSLGAKHSVYDTTNRTGRSLKEKTSLADDNLKLDDMLSELRDKWDTICGKSVERQNKLEEALLFSGQFTDALQALIDWLYRVEPQLAEDQPVHGDIDLVMNLIDNHKAFQKELGKRTSSVQALKRSARELIEGSRDDSSWVKVQMQELSTRWETVCALSISKQTRLEAALRQAEEFHSVVHALLEWLAEAEQTLRFHGVLPDDEDALRTLIDQHKEFMKKLEEKRAELNKATTMGDTVLAICHPDSITTIKHWITIIRARFEEVLAWAKQHQQRLASALAGLIAKQELLEALLAWLQWAETTLTDKDKEVIPQEIEEVKALIAEHQTFMEEMTRKQPDVDKVTKTYKRRAADPSSLQSHIPVLDKGRAGRKRFPASSLYPSGSQTQIETKNPRVNLLVSKWQQVWLLALERRRKLNDALDRLEELREFANFDFDIWRKKYMRWMNHKKSRVMDFFRRIDKDQDGKITRQEFIDGILSSKFPTSRLEMSAVADIFDRDGDGYIDYYEFVAALHPNKDAYKPITDADKIEDEVTRQVAKCKCAKRFQVEQIGDNKYRFFLGNQFGDSQQLRLVRILRSTVMVRVGGGWMALDEFLVKNDPCRVHHHGSKMLRSESNSSITTTQPTIAKGRTNMELREKFILADGASQGMAAFRPRGRRSRPSSRGASPNRSTSVSSQAAQAASPQVPATTTPKGTPIQGSKLRLPGYLSGKGFHSGEDSGLITTAAARVRTQFADSKKTPSRPGSRAGSKAGSRASSRRGSDASDFDISEIQSVCSDVETVPQTHRPTPRAGSRPSTAKPSKIPTPQRKSPASKLDKSSKR

SEQ ID NO: 5337 - protein, 5430 aa, Homo sapiens
MSSSDEETLSERSCRSERSCRSERSYRSERSGSLSPCPPGDTLPWNLPLHEQKKRKSQDSVLDPAERAVVRVADERDRVQKKTFTKWVNKHLMKVRKHINDLYEDLRDGHNLISLLEVLSGIKLPREKGRMRFHRLQNVQIALDFLKQRQVKLVNIRNDDITDGNPKLTLGLIWTIILHFQISDIYISGESGDMSAKEKLLLWTQKVTAGYTGIKCTNFSSCWSDGKMFNALIHRYRPDLVDMERVQIQSNRENLEQAFEVAERLGVTRLLDAEDVDVPSPDEKSVITYVSSIYDAFPKVPEGGEGISATEVDSRWQEYQSRVDSLIPWIKQHTILMSDKTFPQNPVELKALYNQYIHFKETEILAKEREKGRIEELYKLLEVWIEFGRIKLPQGYHPNDVEEEWGKLIIEMLEREKSLRPAVERLELLLQIANKIQNGALNCEEKLTLAKNTLQADAAHLESGQPVQCESDVIMYIQECEGLIRQLQVDLQILRDENYYQLEELAFRVMRLQDELVTLRLECTNLYRKGHFTSLELVPPSTLTTTHLKAEPLTKATHSSSTSWFRKPMTRAELVAISSSEDEGNLRFVYELLSWVEEMQMKLERAEWGNDLPSVELQLETQQHIHTSVEELGSSVKEARLYEGKMSQNFHTSYAETLGKLETQYCKLKETSSFRMRHLQSLHKFVSRATAELIWLNEKEEEELAYDWSDNNSNISAKRNYFSELTMELEEKQDVFRSLQDTAELLSLENHPAKQTVEAYSAAVQSQLQWMKQLCLCVEQHVKENTAYFQFFSDARELESFLRNLQDSIKRKYSCDHNTSLSRLEDLLQDSMDEKEQLIQSKSSVASLVGRSKTIVQLKPRSPDHVLKNTISVKAVCDYRQIEITICKNDECVLEDNSQRTKWKVISPTGNEAMVPSVCFLIPPPNKDAIEMASRVEQSYQKVMALWHQLHVNTKSLISWNYLRKDLDLVQTWNLEKLRSSAPGECHQIMKNLQAHYEDFLQDSRDSVLFSVADRLRLEEEVEACKARFQHLMKSMENEDKEETVAKMYISELKNIRLRLEEYEQRVVKRIQSLASSRTDRDAWQDNALRIAEQEHTQEDLQQLRSDLDAVSMKCDSFLHQSPSSSSVPTLRSELNLLVEKMDHVYGLSTVYLNKLKTVDVIVRSIQDAELLVKGYEIKLSQEEVVLADLSALEAHWSTLRHWLSDVKDKNSVFSVLDEEIAKAKVVAEQMSRLTPERNLDLERYQEKGSQLQERWHRVIAQLEIRQSELESIQEVLGDYRACHGTLIKWIEETTAQQEMMKPGQAEDSRVLSEQLSQQTALFAEIERNQTKLDQCQKFSQQYSTIVKDYELQLMTYKAFVESQQKSPGKRRRMLSSSDAITQEFMDLRTRYTALVTLTTQHVKYISDALRRLEEEEKVVEEEKQEHVEKVKELLGWVSTLARNTQGKATSSETKESTDIEKAILEQQVLSEELTTKKEQVSEAIKTSQIFLAKHGHKLSEKEKKQISEQLNALNKAYHDLCDGSANQLQQLQSQLAHQTEQKTLQKQQNTCHQQLEDLCSWVGQAERALAGHQGRTTQQDLSALQKNQSDLKDLQDDIQNRATSFATVVKDIEGFMEENQTKLSPRELTALREKLHQAKEQYEALQEETRVAQKELEEAVTSALQQETEKSKAAKELAENKKKIDALLDWVTSVGSSGGQLLTNLPGMEQLSGASLEKGALDTTDGYMGVNQAPEKLDKQCEMMKARHQELLSQQQNFILATQSAQAFLDQHGHNLTPEEQQMLQQKLGELKEQYSTSLAQSEAELKQVQTLQDELQKFLQDHKEFESWLERSEKELENMHKGGSSPETLPSLLKRQGSFSEDVISHKGDLRFVTISGQKVLDMENSFKEGKEPSEIGNLVKDKLKDATERYTALHSKCTRLGSHLNMLLGQYHQFQNSADSLQAWMQACEANVEKLLSDTVASDPGVLQEQLATTKQLQEELAEHQVPVEKLQKVARDIMEIEGEPAPDHRHVQETTDSILSHFQSLSYSLAERSSLLQKAIAQSQSVQESLESLLQSIGEVEQNLEGKQVSSLSSGVIQEALATNMKLKQDIARQKSSLEATREMVTRFMETADSTTAAVLQGKLAEVSQRFEQLCLQQQEKESSLKKLLPQAEMFEHLSGKLQQFMENKSRMLASGNQPDQDITHFFQQIQELNLEMEDQQENLDTLEHLVTELSSCGFALDLCQHQDRVQNLRKDFTELQKTVKEREKDASSCQEQLDEFRKLVRTFQKWLKETEGSIPPTETSMSAKELEKQIEHLKSLLDDWASKGTLVEEINCKGTSLENLIMEITAPDSQGKTGSILPSVGSSVGSVNGYHTCKDLTEIQCDMSDVNLKYEKLGGVLHERQESLQAILNRMEEVHKEANSVLQWLESKEEVLKSMDAMSSPTKTETVKAQAESNKAFLAELEQNSPKIQKVKEALAGLLVTYPNSQEAENWKKIQEELNSRWERATEVTVARQRQLEESASHLACFQAAESQLRPWLMEKELMMGVLGPLSIDPNMLNAQKQQVQFMLKEFEARRQQHEQLNEAAQGILTGPGDVSLSTSQVQKELQSINQKWVELTDKLNSRSSQIDQAIVKSTQYQELLQDLSEKVRAVGQRLSVQSAISTQPEAVKQQLEETSEIRSDLEQLDHEVKEAQTLCDELSVLIGEQYLKDELKKRLETVALPLQGLEDLAADRINRLQAALASTQQFQQMFDELRTWLDDKQSQQAKNCPISAKLERLQSQLQENEEFQKSLNQHSGSYEVIVAEGESLLLSVPPGEEKRTLQNQLVELKNHWEELSKKTADRQSRLKDCMQKAQKYQWHVEDLVPWIEDCKAKMSELRVTLDPVQLESSLLRSKAMLNEVEKRRSLLEILNSAADILINSSEADEDGIRDEKAGINQNMDAVTEELQAKTGSLEEMTQRLREFQESFKNIEKKVEGAKHQLEIFDALGSQACSNKNLEKLRAQQEVLQALEPQVDYLRNFTQGLVEDAPDGSDASQLLHQAEVAQQEFLEVKQRVNSGCVMMENKLEGIGQFHCRVREMFSQLADLDDELDGMGAIGRDTDSLQSQIEDVRLFLNKIHVLKLDIEASEAECRHMLEEEGTLDLLGLKRELEALNKQCGKLTERGKARQEQLELTLGRVEDFYRKLKGLNDATTAAEEAEALQWVVGTEVEIINQQLADFKMFQKEQVDPLQMKLQQVNGLGQGLIQSAGKDCDVQGLEHDMEEINARWNTLNKKVAQRIAQLQEALLHCGKFQDALEPLLSWLADTEELIANQKPPSAEYKVVKAQIQEQKLLQRLLDDRKATVDMLQAEGGRIAQSAELADREKITGQLESLESRWTELLSKAAARQKQLEDILVLAKQFHETAEPISDFLSVTEKKLANSEPVGTQTAKIQQQIIRHKALEEDIENHATDVHQAVKIGQSLSSLTSPAEQGVLSEKIDSLQARYSEIQDRCCRKAALLDQALSNARLFGEDEVEVLNWLAEVEDKLSSVFVKDFKQDVLHRQHADHLALNEEIVNRKKNVDQAIKNGQALLKQTTGEEVLLIQEKLDGIKTRYADITVTSSKALRTLEQARQLATKFQSTYEELTGWLREVEEELATSGGQSPTGEQIPQFQQRQKELKKEVMEHRLVLDTVNEVSRALLELVPWRAREGLDKLVSDANEQYKLVSDTIGQRVDEIDAAIQRSQQYEQAADAELAWVAETKRKLMALGPIRLEQDQTTAQLQVQKAFSIDIIRHKDSMDELFSHRSEIFGTCGEEQKTVLQEKTESLIQQYEAISLLNSERYARLERAQVLVNQFWETYEELSPWIEETRALIAQLPSPAIDHEQLRQQQEEMRQLRESIAEHKPHIDKLLKIGPQLKELNPEEGEMVEEKYQKAENMYAQIKEEVRQRALALDEAVSQSTQITEFHDKIEPMLETLENLSSRLRMPPLIPAEVDKIRECISDNKSATVELEKLQPSFEALKRRGEELIGRSQGADKDLAAKEIQDKLDQMVFFWEDIKARAEEREIKFLDVLELAEKFWYDMAALLTTIKDTQDIVHDLESPGIDPSIIKQQVEAAETIKEETDGLHEELEFIRILGADLIFACGETEKPEVRKSIDEMNNAWENLNKTWKERLEKLEDAMQAAVQYQDTLQAMFDWLDNTVIKLCTMPPVGTDLNTVKDQLNEMKEFKVEVYQQQIEMEKLNHQGELMLKKATDETDRDIIREPLTELKHLWENLGEKIAHRQHKLEGALLALGQFQHALEELMSWLTHTEELLDAQRPISGDPKVIEVELAKHHVLKNDVLAHQATVETVNKAGNELLESSAGDDASSLRSRLEAMNQCWESVLQKTEEREQQLQSTLQQAQGFHSEIEDFLLELTRMESQLSASKPTGGLPETAREQLDTHMELYSQLKAKEETYNQLLDKGRLMLLSRDDSGSGSKTEQSVALLEQKWHVVSSKMEERKSKLEEALNLATEFQNSLQEFINWLTLAEQSLNIASPPSLILNTVLSQIEEHKVFANEVNAHRDQIIELDQTGNQLKFLSQKQDVVLIKNLLVSVQSRWEKVVQRSIERGRSLDDARKRAKQFHEAWKKLIDWLEDAESHLDSELEISNDPDKIKLQLSKHKEFQKTLGGKQPVYDTTIRTGRALKEKTLLPEDSQKLDNFLGEVRDKWDTVCGKSVERQHKLEEALLFSGQFMDALQALVDWLYKVEPQLAEDQPVHGDLDLVMNLMDAHKVFQKELGKRTGTVQVLKRSGRELIENSRDDTTWVKGQLQELSTRWDTVCKLSVSKQSRLEQALKQAEVFRDTVHMLLEWLSEAEQTLRFRGALPDDTEALQSLIDTHKEFMKKVEEKRVDVNSAVAMGEVILAVCHPDCITTIKHWITIIRARFEEVLTWAKQHQQRLETALSELVANAELLEELLAWIQWAETTLIQRDQEPIPQNIDRVKALIAEHQTFMEEMTRKQPDVDRVTKTYKRKNIEPTHAPFIEKSRSGGRKSLSQPTPPPMPILSQSEAKNPRINQLSARWQQVWLLALERQRKLNDALDRLEELKEFANFDFDVWRKKYMRWMNHKKSRVMDFFRRIDKDQDGKITRQEFIDGILASKFPTTKLEMTAVADIFDRDGDGYIDYYEFVAALHPNKDAYRPTTDADKIEDEVTRQVAQCKCAKRFQVEQIGENKYRFGDSQQLRLVRILRSTVMVRVGGGWMALDEFLVKNDPCRARGRTNIELREKFILPEGASQGMTPFRSRGRRSKPSSRAASPTRSSSSASQSNHSCTSMPSSPATPASGTKVIPSSGSKLKRPTPTFHSSRTSLAGDTSNSSSPASTGAKTNRADPKKSASRPGSRAGSRAGSRASSRRGSDASDFDLLETQSACSDTSESSAAGGQGNSRRGLNKPSKIPTMSKKTTTASPRTPGPKR

SEQ ID NO: 5338 - protein, 270 aa, Homo sapiens
MWWHQHNLCFRRPIEEDYSSGDVEEKVAAIAETDESAESEGVIDSHKRREILSRRPSYRKILNELSSDVPGVPKIEEERSEEEGTPPSIATMAVPTSIYQTSTGQYIAIAQGGTIQISNPGSDGVQGLQALTMTNSGAPPPGATIVQYAAQSADGTQQFFVPGSQVVVQAATGDMPTYQIRAPTAALPQGVVMAASPGSLHSPQQLAEEATRKRELRLMKNREAAKECRRRKKEYVKCLESRVAVLEVQNKKLIEELETLKDICSPKTDY

SEQ ID NO: 5339 - protein, 370 aa, Homo sapiens
MARPGLIHSAPGLPDTCALLQPPAASAAAAPSMSGPDVETPSAIQICRIMRPDDANVAGNVHGGTILKMIEEAGAIISTRHCNSQNGERCVAALARVERTDFLSPMCIGEVAHVSAEITYTSKHSVEVQVNVMSENILTGAKKLTNKATLWYVPLSLKNVDKVLEVPPVVYSRQEQEEEGRKRYEAQKLERMETKWRNGDIVQPVLNPEPNTVSYSQSSLIHLVGPSDCTLHGFVHGGVTMKLMDEVAGIVAARHCKTNIVTASVDAINFHDKIRKGCVITISGRMTFTSNKSMEIEVLVDADPVVDSSQKRYRAASAFFTYVSLSQEGRSLPVPQLVPETEDEKKRFEEGKGRYLQMKAKRQGHAEPQP

SEQ ID NO: 5340 - protein, 1522 aa, Homo sapiens
MSVRLPQSIDRLSSLSSLGDSAPERKSPSHHRQPSDASETTGLVQRCVIIQKDQHGFGFTVSGDRIVLVQSVRPGGAAMKAGVKEGDRIIKVNGTMVTNSSHLEVVKLIKSGAYVALTLLGSSPSSMGISGLQQDPSPAGAPRITSVIPSPPPPPPLPPPQRITGPKPLQDPEVQKHATQILRNMLRQEEKELQDILPLYGDTSQRPSEGRLSLDSQEGDSGLDSGTERFPSLSESLMNRNSVLSDPGLDSPRTSPVIMARVAQHHRRQGSDAAVPSTGDQGVDQSPKPLIIGPEEDYDPGYFNNESDIIFQDLEKLKSRPAHLGVFLRYIFSQADPSPLLFYLCAEVYQQASPKDSRSLGKDIWNIFLEKNAPLRVKIPEMLQAEIDSRLRNSEDARGVLCEAQEAAMPEIQEQIHDYRTKRTLGLGSLYGENDLLDLDGDPLRERQVAEKQLAALGDILSKYEEDRSAPMDFALNTYMSHAGIRLREARPSNTAEKAQSAPDKDKWLPFFPKTKKSSNSKKEKDALEDKKRNPILKYIGKPKSSSQSTFHIPLSPVEVKPGNVRNIIQHFENNQQYDAPEPGTQRLSTGSFPEDLLESDSSRSEIRLGRSESLKGREEMKRSRKAENVPRSRSDVDMDAAAEATRLHQSASSSTSSLSTRSLENPTPPFTPKMGRRSIESPSLGFCTDTLLPHLLEDDLGQLSDLEPEPDAQNWQHTVGKDVVAGLTQREIDRQEVINELFVTEASHLRTLRVLDLIFYQRMKKENLMPREELARLFPNLPELIEIHNSWCEAMKKLREEGPIIKEISDLMLARFDGPAREELQQVAAQFCSYQSIALELIKTKQRKESRFQLFMQEAESHPQCRRLQLRDLIISEMQRLTKYPLLLESIIKHTEGGTSEHEKLCRARDQCREILKYVNEAVKQTENRHRLEGYQKRLDATALERASNPLAAEFKSLDLTTRKMIHEGPLTWRISKDKTLDLHVLLLEDLLVLLQKQDEKLLLKCHSKTAVGSSDSKQTFSPVLKLNAVLIRSVATDKRAFFIICTSKLGPPQIYELVALTSSDKNTWMELLEEAVRNATRHPGAAPMPVHPPPPGPREPAQQGPTPSRVELDDSDVFHGEPEPEELPGGTGSQQRVQGKHQVLLEDPEQEGSAEEEELGVLPCPSTSLDGENRGIRTRNPIHLAFPGPLFMEGLADSALEDVENLRHLILWSLLPGHTMETQAAQEPEDDLTPTPSVISVTSHPWDPGSPGQAPPGGEGDNTQLAGLEGERPEQEDMGLCSLEHLPPRTRNSGIWESPELDRNLAEDASSTEAAGGYKVVRKAEVAGSKVVPALPESGQSEPGPPEVEGGTKATGNCFYVSMPSGPPDSSTDHSEAPMSPPQPDSLPAGQTEPQPQLQGGNDDPRRPSRSPPSLALRDVGMIFHTIEQLTLKLNRLKDMELAHRELLKSLGGESSGGTTPVGSFHTEAARWTDGSLSPPAKEPLASDSRNSHELGPCPEDGSDAPLEDSTADAAASPGP

SEQ ID NO: 5341 - protein, 606 aa, Homo sapiens
MRRSEVLAEESIVCLQKALNHLREIWELIGIPEDQRLQRTEVVKKHIKELLDMMIAEEESLKERLIKSISVCQKELNTLCSELHVEPFQEEGETTILQLEKDLRTQVELMRKQKKERKQELKLLQEQDQELCEILCMPHYDIDSASVPSLEELNQFRQHVTTLRETKASRREEFVSIKRQIILCMEALDHTPDTSFERDVVCEDEDAFCLSLENIATLQKLLRQLEMQKSQNEAVCEGLRTQIRELWDRLQIPEEEREAVATIMSGSKAKVRKALQLEVDRLEELKMQNMKKVIEAIRVELVQYWDQCFYSQEQRQAFAPFCAEDYTESLLQLHDAEIVRLKNYYEVHKELFEGVQKWEETWRLFLEFERKASDPNRFTNRGGNLLKEEKQRAKLQKMLPKLEEELKARIELWEQEHSKAFMVNGQKFMEYVAEQWEMHRLEKERAKQERQLKNKKQTETEMLYGSAPRTPSKRRGLAPNTPGKARKLNTTTMSNATANSSIRPIFGGTVYHSPVSRLPPSGSKPVAASTCSGKKTPRTGRHGANKENLELNGSILSGGYPGSAPLQRNFSINSVASTYSEFARELSKASKSDATSGILNSTNIQS

SEQ ID NO: 5342 - protein, 441 aa, Homo sapiens
MAPRAQIQGPLTFGDVAVAFTRIEWRHLDAAQRALYRDVMLENYGNLVSVGLLSSKPKLITQLEQGAEPWTEVREAPSGTHAVEDYWFETKMSALKQSTSEASVLGERTKSVMMEKGLDWEGRSSTEKNYKCKECGKVFKYNSSFISHQRNHTSEKPHKCKECGIAFMNSSSLLNHHKVHAGKQPYRCIECGKFLKKHSTFINHQRIHSREKPHKCIECGKTFRKNSILLSHQRIHTGQKPYKCNDCGKAFAQNAALTRHERIHSGEKPFKCNKCGRAFRDNSTVLEHQKIHTGEKPYQCNECGKAFRKSSTLISHQRMHTGEKPYHCSKCGKSFRYSSSFAGHQKTHSGNKPYQCRDCGKAFTKSSTLTGHQRIHTGEKPYHCKKCGKAFRHSSGLVEHQRLHTGEKPYKCNECGKAFPRSSALKQHKKIHNKERAMKCS

SEQ ID NO: 5343 - protein, 165 aa, Homo sapiens [sequence omitted]

SEQ ID NO: 5344 - protein, 301 aa, Homo sapiens
MEGDFSVCRNCKRHVVSANFTLHEAYCLRFLVLCPECEEPVPKETMEEHCKLEHQQVGCTMCQQSMQKSSLEFHKANECQERPVECKFCKLDMQLSKLELHESYCGSRTELCQGCGQFIMHRMLAQHRDVCRSEQAQLGKGERISAPEREIYCHYCNQMIPENKYFHHMGKCCPDSEFKKHFPVGNPEILPSSLPSQAAENQTSTMEKDVRPKTRSINRFPLHSESSSKKAPRSKNKTLDPLLMSEPKPRTSSPRGDKAAYDILRRCSQCGILLPLPILNQHQEKCRWLASSKGKQVRNFS

SEQ ID NO: 5345 - protein, 1036 aa, Homo sapiens
MEVVGDFEYSKRDLVGHGAFAVVFRGRHRQKTDWEVAIKSINKKNLSKSQILLGKEIKILKELQHENIVALYDVQELPNSVFLVMEYCNGGDLADYLQAKGTLSEDTIRVFLHQIAAAMRILHSKGIIHRDLKPQNILLSYANRRKSSVSGIRIKIADFGFARYLHSNMMAATLCGSPMYMAPEVIMSQHYDAKADLWSIGTVIYQCLVGKPPFQANSPQDLRMFYEKNRSLMPSIPRETSPYLANLLLGLLQRNQKDRMDFEAFFSHPFLEQGPVKKSCPVPVPMYSGSVSGSSCGSSPSCRFASPPSLPDMQHIQEENLSSPPLGPPNYLQVSKDSASTSSKNSSCDTDDFVLVPHNISSDHSCDMPVGTAGRRASNEFLVCGGQCQPTVSPHSETAPIPVPTQIRNYQRIEQNLTSTASSGTNVHGSPRSAVVRRSNTSPMGFLRPGSCSPVPADTAQTVGRRLSTGSSRPYSPSPLVGTIPEQFSQCCCGHPQGHDSRSRNSSGSPVPQAQSPQSLLSGARLQSAPTLTDIYQNKQKLRKQHSDPVCPSHTGAGYSYSPQPSRPGSLGTSPTKHLGSSPRSSDWFFKTPLPTIIGSPTKTTAPFKIPKTQASSNLLALVTRHGPAEEQSKDGNEPRECAHCLLVQGSERQRAEQQSKAVFGRSVSTGKLSDQQGKTPICRHQGSTDSLNTERPMDIAPAGACGGVLAPPAGTAASSKAVLFTVGSPPHSAAAPTCTHMFLRTRTTSVGPSNSGGSLCAMSGRVCVGSPPGPGFGSSPPGAEAAPSLRYVPYGASPPSLEGLITFEAPELPEETLMEREHTDTLRHLNVMLMFTECVLDLTAMRGGNPELCTSAVSLYQIQESVVVDQISQLSKDWGRVEQLVLYMKAAQLLAASLHLAKAQIKSGKLSPSTAVKQVVKNLNERYKFCITMCKKLTEKLNRFFSDKQRFIDEINSVTAEKLIYNCAVEMVQSAALDEMFQQTEDIVYRYHKAALLLEGLSRILQDPADIENVHKYKCSIERRLSALCHSTATV

SEQ ID NO: 5346 - protein, 75 aa, Homo sapiens
MAKQPSDVSSECDREGRQLQPAERPPQLRPGAPTSLQTEPQVSLCHPGWSALVRSWLTATSNSQVQAVLLPQPPK

SEQ ID NO: 5347 - protein, 957 aa, Homo sapiens
MSLVSQNSRRRRRRVAKATAHNSSWGEMQAPNAPGLPADVPGSDVPQGPSDSQILQGLCASEGPSTSVLPTSAEGPSTFVPPTISEASSASGQPTISEGPGTSVLPTPSEGLSTSGPPTISKGLCTSVTLAASEGRNTSRPPTSSEEPSTSVPPTASEVPSTSLPPTPGEGTSTSVPPTAYEGPSTSVVPTPDEGPSTSVLPTPGEGPGTSVPLAATEGLSTSVQATPDEGPSTSVPPTATEGLSTPVPPTRDEGPSTSVPATPGEGPSTSVLPAASDGQSISLVPTRGKGSSTSVPPTATEGLSTSVQPTAGEGSSTSVPPTPGGGLSTSVPPTATEELSTSVPPTPGEGPSTSVLPIPGEGLSTSVPPTASDGSDTSVPPTPGEGASTLVQPTAPDGPGSSVLPNPGEGPSTLFSSSASVDRNPSKCSLVLPSPRVTKASVDSDSEGPKGAEGPIEFEVLRDCESPNSISIMGLNTSRVAITLKPQDPMEQNVAELLQFLLVKDQSKYPIRESEMREYIVKEYRNQFPEILRRAAAHLECIFRFELRELDPEAHTYILLNKLGPVPFEGLEESPNGPKMGLLMMILGQIFLNGNQAKEAEIWEMLWRMGVQRERRLSIFGNPKRLLSVEFVWQRYLDYRPVTDCKPVEYEFFWGPRSHLETTKMKILKFMAKIYNKDPMDWPEKYNEALEEDAARAFAEGWQALPHFRRPFFEEAAAEVPSPDSEVSSYSSKYAPHSWPESRLESKARKLVQLFLLMDSTKLPIPKKGILYYIGRECSKVFPDLLNRAARTLNHVYGTELVVLDPRNHSYTLYNRREMEETEEIVDSPNRPGNNFLMQVLSFIFIMGNHARESAVWAFLRGLGVQAGRKHVITCRYLSQRYIDSLRVPDSDPVQYEFVWGPRARLETSKMKALRYVARIHRKEPQDWPQQYREAMEDEANRADVGHRQIFVHNFR

SEQ ID NO: 5348 - protein, 230 aa, Homo sapiens
MEAAETEAEAAALEVLAEVAGILEPVGLQEEAELPAKILVEFVVDSQKKDKLLCSQLQVADFLQNILAQEDTAKGLDPLASEDTSRQKAIAAKEQWKELKATYREHVEAIKIGLTKALTQMEEAQRKRTQLREAFEQLQAKKQMAMEKRRAVQNQWQLQQEKHLQHLAEVSAEGKLLFPEAEAEAENLPDDKPQQPTRPQEQSTGDTMGRDPGVSFKAVGLQPAGDVNLP

SEQ ID NO: 5349 - protein, 433 aa, Homo sapiens
MLPAGCSRRLVAELQGALDACAQRQLQLEQSLRVCRRLLHAWEPTGTRALKPPPGPETNGEDPLPACTPSPQDLKELEFLTQALEKAVRVRRGITKAGERDKAPSLKSRSIVTSSGTTASAPPHSPGQAGGHASDTRPTKGLRQTTVPAKGHPERRLLSVGDGTRVGMGARTPRPGAGLRDQQMAPSAAPQAPEAFTLKEKGHLLRLPAAFRKAASQNSSLWAQLSSTQTSDSTDAAAAKTQFLQNMQTASGGPQPRLSAVEVEAEAGRLRKACSLLRLRMREELSAAPMDWMQEYRCLLTLEGLQAMVGQCLHRLQELRAAVAEQPPRPCPVGRPPGASPSCGGRAEPAWSPQLLVYSSTQELQTLAALKLRVAVLDQQIHLEKVLMAELLPLVSAAQPQGPPWLALCRAVHSLLCEGGARVLTILRDEPAV

SEQ ID NO: 5350 - protein, 1023 aa, Homo sapiens
MWDQRLVRLALLQHLRAFYGIKVKGVRGQCDRRRHETAATEIGGKIFGVPFNALPHSAVPEYGHIPSFLVDACTSLEDHIHTEGLFRKSGSVIRLKALKNKVDHGEGCLSSAPPCDIAGLLKQFFRELPEPILPADLHEALLKAQQLGTEEKNKATLLLSCLLADHTVHVLRYFFNFLRNVSLRSSENKMDSSNLAVIFAPNLLQTSEGHEKMSSNTEKKLRLQAAVVQTLIDYASDIGRVPDFILEKIPAMLGIDGLCATPSLEGFEEGEYETPGEYKRKRRQSVGDFVSGALNKFKPNRTPSITPQEERIAQLSESPVILTPNAKRTLPVDSSHGFSSKKRKSIKHNFNFELLPSNLFNSSSTPVSVHIDTSSEGSSQSSLSPVLIGGNHLITAGVPRRSKRIAGKKVCRVESGKAGCFSPKISHKEKVRRSLRLKFNLGKNGREVNGCSGVNRYESVGWRLANQQSLKNRIESVKTGLLFSPDVDEKLPKKGSEKISKSEETLLTPERLVGTNYRMSWTGPNNSSFQEVDANEASSMVENLEVENSLEPDIMVEKSPATSCELTPSNLNNKHNSNITSSPLSGDENNMTKETLVKVQKAFSESGSNLHALMNQRQSSVTNVGKVKLTEPSYLEDSPEENLFETNDLTIVESKEKYEHHTGKGEKCFSERDFSPLQTQTFNRETTIKCYSTQMKMEHEKDIHSNMPKDYLSKQEFSSDEEIKKQQSPKDKLNNKLKENENMMEGNLPKCAAHSKDEARSSFSQQSTCVVTNLSKPRPMRIAKQQSLETCEKTVSESSQMTEHRKVSDHIQWFNKLSLNEPNRIKVKSPLKFQRTPVRQSVRRINSLLEYSRQPTGHKLASLGDTASPLVKSVSCDGALSSCIESASKDSSVSCIKSGPKEQKSMSCEESNIGAISKSSMELPSKSFLKMRKHPDSVNASLRSTTVYKQKILSDGQVKVPLDDLTNHDIVKPVVNNNMGISSGINNRVLRRPSERGRAWYKGSPKHPIGKTQLLPTSKPVDL

SEQ ID NO: 5351 - protein, 200 aa, Homo sapiens
MLGSGLGAEIDSAECVFRMNQAPTVGFEADVGQRSTLRVVSHTSVPLLLRNYSHYFQKARDTLYMVWGQGRHMDRVLGGRTYRTLLQLTRMYPGLQVYTFTERMMAYCDQIFQDETGKNRRQSGSFLSTGWFTMILALELCEEIVVYGMVSDSYCREKSHPSVPYHYFEKGRLDECQMYLAHEQAPRSAHRFITEKAVFS

SEQ ID NO: 5352 - protein, 590 aa, Homo sapiens
MGRARPGQRGPPSPGPAAQPPAPPRRRARSLALLGALLAAAAAAAVRVCARHAEAQAAARQELALKTLGTDGLFLFSSLDTDGDMYISPEEFKPIAEKLTGSCSVTQTGVQWCSHSSLQPQLPWLNUSSCLSLLRSTPAASCEEEELPPDPSEETLTIEARFQPLLPETMTKSKDGFLGVSRLALSGLRNWTAAASPSAVFATRHFQPFLPPPGQELGEPWWIIPSELSMFTGYLSNNRFYPPPPKGKEVIIHRLLSMFHPRPFVKTRFAPQGAVACLTAISDFYYTVMFRIHAEFQLSEPPDFPFWFSPAQFTGHIILSKDATHVRDFRLFVPNHRSLNVDMEWLYGASESSNMEVDIGYIPQMELEATGPSVPSVILDEDGSMIDSHLPSGEPLQFVFEEIKWQQELSWEEAARRLEVAMYPFKKVSYLPFTEAFDRAKAENKLVHSILLWGALDDQSCUGSGRTLRETVLESSPILTLLNESFISTWSLVKELEELQNNQENSSHQKLAGLHLEKYSFPVEMMICLPNGTVVHHINANYFLDITSVKPEEIESNLFSFSSTFEDPSTATYMQFLKEGLRRGLPLLQP

SEQ ID NO: 5353 - protein, 1395 aa, Homo sapiens
MTGAEIESGAQVKPEKKPGEEVVGGAEIENDVPLVVRPKVRTQAQIMPGARPKNKSKVMPGASTKVETSAVGGARPKSKAKAIPVSRFKEEAQMWAQPRFGAERLSKTERNSQTNIIASPLVSTDSVLVAKTKYLSEDRELVNTDTESFPRRKAHYQAGFQPSFRSKEETNMGSWCCPRPTSKQEASPNSDFKWVDKSVSSLFWSGDEVTAKFHPGNRVKDSNRSMHMANQEANTMSRSQTNQELYIASSSGSEDESVKTPWFWARDKTNTWSGPREDPNSRSRFRSKKEVYVESSSGSEHEDHLESWFGAGKEAKFRSKMRAGKEANNRARHRAKREACIDFMPGSIDVIKKESCFWPEENANTFSRPMIKKEARARAMTKEEAKTKARARAKQEARSEEEALIGTWFWATDESSMADEASIESSLQVEDESIIGSWFWTEEEASMGTGASSKSRPRTDGERIGDSLFGAREKTSMKTGAEATSESILAADDEQVIIGSWFWAGEEVNQEAEEETIFGSWFWVIDAASVESGVGVSCESRTRSEEEEVIGPWFWSGEQVDIEAGIGEEARPGAEEETIFGSWFWAENQTYMDCRAETSCDTMQGAEEEEPIIGSWFWTRVEACVEGDVNSKSSLEDKEEAMIPCFGAKEEVSMKHGTGVRCRFMAGAEETNNKSCFWAEKEPCMYPAGGGSWKSRPEEEEDIVNSWFWSRKYTKPEAIIGSWLWATEESNIDGTGEKAKLLTEEETIINSWFWKEDEAISEATDREESRPEAEEGDIIGSWFWAGEEDRLEPAAETREEDRLAAEKEGIVGSWFGAREETIRREAGSCSKSSPKAEEEEVIIGSWFWEEEASPEAVAGVGFESKPGTEEEEITVGSWFWPEEEASIQAGSQAVEEMESETEEETIFGSWFWDGKEVSEEAGPCCVSKPEDDEEMIVESWFWSRDKAIKETGTVATCESKPENEEGAIVGSWFEAEDEVDNRTDNGSNCGSRTLADEDEAIVGSWFWAGDEAHFESNPSPVFRAICRSTCSVEQEPDPSRRPQSWEEVTVQFKPGPWGRVGFPSISPFRFPKEAASLFCEMFGGKPRNMVLSPEGEDQESLLQPDQPSPEFPFQYDPSYRSVQEIREHLRAKESTEPESSSCNCIQCELKIGSEEFEELLLLMEKIRDPFIHEISKIAMGMRSASQFTRDFIRDSGVVSLIETLLNYPSSRVRTSFLENMIRMAPPYPNLNIIQTYICKVCEETLAYSVDSPEQLSGIRMIRHLTTTTDYHTLVANYMSGFLSLLATGNAKTRFHVLKMLLNLSENLFMTKELLSAEAVSEFIGLFNREETNDNIQIVLAIFENIGNNIKKETVFSDDDFNIEPLISAFHKVEKFAKELQGKTDNQNDPEGDQEN

SEQ ID NO: 5354 - protein, 437 aa, Homo sapiens
MLQGPRALASAAGQTPKVVPAMSPTELWPSGLSSPQLCPATATYYTPLYPQTAPPAAAPGTCLDATPHGPEGQVVRCLPAGRLPAKRKLDLEGIGRPVVPEFPTPKGKCIRVDGLPSPKTPKSPGEKTRYDTSLGLLTKKFIYLLSESEDGVLDLNWAAEVLDVQKRRIYDITNVLEGIQLIRKKAKNNIQWVGRGMFEDPTRPGKQQQLGQELKELMNTEQALDQLIQSCSLSFKHLTEDKANKRLAYVTYQDIRAVGNFKEQTVIAVKAPPQTRLEVPDRTEDNLQIYLKSTQGPIEVYLCPEEVQEPDSPSEEPLPSTSTLCPSPDSAQPSSSTDPSIMEPTASSVPAPAPTPQQAPPPPSLVPLEATDSLLELPHPLLQQTEDQFLSPTLACSSPLISFSPSLDQDDYLWGLEAGEGISDLFDSYDLGDLLIN

SEQ ID NO: 5355 - protein, 611 aa, Homo sapiens
MSCKKQRSRKHSVNEKCNMKIEHYFSPVSKEQQNNCSTSLMRMESRGDPRATTNTQAQRFHSPKKNPEDQTMPQNRTIYVTLKVNHRRNQDMKLKLTHSENSSLYMALNTLQAVRKEIETHQGQEMLVRGTEGIKEYINLGMPLSCFPEGGQVVITFSQSKSKQKEDNHIFGRQDKASTECVKFYIHAIGIGKCKRRIVKCGKLHKKGRKLCVYAFKGETIKDALCKDGRFLSFLENDDWKLIENNDTILESTQPVDELEGRYFQVEVEKRMVPSAAASQNPESEKRNTCVLREQIVAQYPSLKRESEKIIENFKKKMKVKNGETLFELHRTTFGKVTKNSSSIKVVKLLVRLSDSVGYLFWDSATTGYATCFVFKGLFILTCRHVIDSIVGDGIEPSKWATIIGQCVRVTFGYEELKDKETNYFFVEPWFEIHNEELDYAVLKLKENGQQVPMELYNGITPVPLSGLIHIIGHPYGEKKQIDACAVIPQGQRAKKCQERVQSKKAESPEYVHMYTQRSFQKIVHNPDVITYDTEFFFGASGSPVFDSKGSLVAMHAAGFAYTYQNETRSIIEFGSTMESILLDIKQRHKPWYEEVFVNQQDVEMMSDEDL

SEQ ID NO: 5356 - protein, 197 aa, Homo sapiens
MEERPAETNANVDNSASPSVAQLAGRFREQAAAAKETPASKPTRRKPPCSLPLFPPKVDLGQNGEEANLTFDPAALLPGASPKSPGLKAMVSPFHSPPSTPSSPGVRSRPSEAEEVPVSFDQPPEGSHLPCYNKVRTRGSIKRRPPSRRFRRSQSDCGELGDFRAVESSQQNGAKEEDGDEVLPSKSKAPGSPLSSE

SEQ ID NO: 5357 - protein, 487 aa, Homo sapiens
METPSQRRATRSGAQASSTPLSPTRITRLQEKEDLQELNDRLAVYIDRVRSLETENAGLRLRITESEEVVSREVSGIKAAYEAELGDARKTLDSVAKERARLQLELSKVREEFKELKARNTKKEGDLIAAQARLKDLEALLNSKEAALSTALSEKRTLEGELHDLRGQVAKLEAALGEAKKQLQDEMLRRVDAENRLQTMKEELDFQKNIYSEELRETKRRHETRLVEIDNGKQREFESRLADALQELRAQHEDQVEQYKKELEKTYSAKLDNARQSAERNSNLVGAAHEELQQSRIRIDSLSAQLSQLQKQLAAKEAKLRDLEDSLARERDTSRRLLAEKEREMAEMRARMQQQLDEYQELLDIKLALDMEIHAYRKLLEGEEERLRLSPSPTSQRSRGRASSHSSQTQGGGSVTKKRKLESTESRSSFSQHARTSGNSLRTALINSTGEEVAMRKLVRSVTVVEDDEDEDGDDLLHHHHVSGSRR

SEQ ID NO: 5358 - protein, 263 aa, Homo sapiens
MALASVLERPLPVNQRGFFGLGGRADLLDLGPGSLSDGLSLAAPGWGVPEEPGIEMLHGTTTLAFKFRHGVIVAADSRATAGAYIASQTVKKVIEINPYLLGTMAGGAADCSFWERLLARQCRIYELRNKERISVAAASKLLANMVYQYKGMGLSMGTMICGWDKRGPGLYYVDSEGNRISGATFSVGSGSVYAYGVMDRGYSYDLEVEQAYDLARRAIYQATYRDAYSGGAVNLYHVREDGWIRVSSDNVADLHEKYSGSTP

SEQ ID NO: 5359 - protein, 79 aa, Homo sapiens
MAAPSMKERQVCWGARDEYWKCLDENLEDASQCKKLRSSFESSCPQQWIKYFDKRRDYLKFKEKFEAGQFEPSETTAKS

SEQ ID NO: 5360 - protein, 125 aa, Homo sapiens
MGPGGPLLSPSRGFLLCKTGWHSNRLLGDCGPHTPVSTALSFIAVGMAAPSMKERQVCWGARDEYWKCLDENLEDASQCKKLRSSFESSCPQQWIKYFDKRRDYLKFKEKFEAGQFEPSETTAKS

SEQ ID NO: 5361 - protein, 155 aa, Homo sapiens
MVARKGQKSPRFRRVSCFLRLGRSTLLELEPAGRPCSGRTRHRALHRRLVACVTVSSRRHRKEAGRGRAESFIAVGMAAPSMKERQVCWGARDEYWKCLDENLEDASQCKKLRSSFESSCPQQWIKYFDKRRDYLKFKEKFEAGQFEPSETTAKS

SEQ ID NO: 5362 - protein, 382 aa, Homo sapiens
MPGGGPQGAPAAAGGGGVSHRAGSRDCLPPAACFRRRRLARRPGYMRSSTGPGIGFLSPAVGTLFRFPGGVSGEESHHSESRARQCGLDSRGLLVRSPVSKSAAAPTVTSVRGTSAHFGIQLRGGTRLPDRLSWPCGPGSAGWQQEFAAMDSSETLDASWEAACSDGARRVRAAGSLPSAELSSNSCSPGCGPEVPPTPPGSHSAFTSSFSFIRLSLGSAGERGEAEGCPPSREAESHCQSPQEMGAKAASLDGPHEDPRCLSRPFSLLATRVSADLAQAARNSSRPERDMHSLPDMDPGSSSSLDPSLAGCGGDGSSGSGDAHSWDTLLRKWEPVLRDCLLRNRRQMEVISLRLKLQKLQEDAVENDDYDKGPAEMTPTPH

SEQ ID NO: 5363 - protein, 755 aa, Homo sapiens
MPGGGPQGAPAAAGGGGVSHRAGSRDCLPPAACFRRRRLARRPGYMRSSTGPGIGFLSPAVGTLFRFPGGVSGEESHHSESRARQCGLDSRGLLVRSPVSKSAAAPTVTSVRGTSAHFGIQLRGGTRLPDRLSWPCGPGSAGWQQEFAAMDSSETLDASWEAACSDGARRVRAAGSLPSAELSSNSCSPGCGPEVPPTPPGSHSAFTSSFSFIRLSLGSAGERGEAEGCPPSREAESHCQSPQEMGAKAASLDGPHEDPRCLSRPFSLLATRVSADLAQAARNSSRPERDMHSLPDMDPGSSSSLDPSLAGCGGDGSSGSGDAHSWDTLLRKWEPVLRDCLLRNRRQMEVISLRLKLQKLQEDAVENDDYDKAETLQQRLEDLEQEKISLHFQLPSRQPALSSFLGHLAAQVQAALRRGATQQASGDDTHTPLRMEPRLLEPTAQDSLHVSITRRDWLLQEKQQLQKEIEALQARMFVLEAKDQQLRREIEEQEQQLQWQGCDLTPLVGQLSLGQLQEVSKALQDTLASAGQIPFHAEPPETIRSLQERIKSLNLSLKEITTKVCMSEKFCSTLRKKVNDIETQLPALLEAKMHAISGNHFWTAKDLTEEIRSLTSEREGLEGLLSKLLVLSSRNVKKLGSVKEDYNRLRREVEHQETAYDGVSLCRPVWSAVVRSCSLQPLPPEFKQFSCLSLRSSWDYRCPPPCLANFVFLVEMGFYHVDQTGLKLLTSSDPPSSASQSAGITDMSHCAWPLQ

SEQ ID NO: 5364 - protein, 678 aa, Homo sapiens
MPGGGPQGAPAAAGGGGVSHRAGSRDCLPPAACFRRRRLARRPGYMRSSTGPGIGFLSPAVGTLFRFPGGVSGEESHHSESRARQCGLDSRGLLVRSPVSKSAAAPTVTSVRGTSAHFGIQLRGGTRLPDRLSWPCGPGSAGWQQEFAAMDSSETLDASWEAACSDGARRVRAAGSLPSAELSSNSCSPGCGPEVPPTPPGSHSAFTSSFSFIRLSLGSAGERGEAEGCPPSREAESHCQSPQEMGAKAASLDGPHEDPRCLSRPFSLLATRVSADLAQAARNSSRPERDMHSLPDMDPGSSSSLDPSLAGCGGDGSSGSGDAHSWDTLLRKWEPVLRDCLLRNRRQMEVISLRLKLQKLQEDAVENDDYDKAETLQQRLEDLEQEKISLHFQLPSRQPALSSFLGHLAAQVQAALRRGATQQASGDDTHTPLRMEPRLLEPTAQDSLHVSITRRDWLLQEKQQLQKEIEALQARMFVLEAKDQQLRREIEEQEQQLQWQGCDLTPLVGQLSLGQLQEVSKALQDTLASAGQIPFHAEPPETIRSLQERIKSLNLSLKEITTKVCMSEKFCSTLRKKVNDIETQLPALLEAKMHAISGNHFWTAKDLTEEIRSLTSEREGLEGLLSKLLVLSSRNVKKLGSVKEDYNRLRREVEHQETAYGYKYCDAESWTQRSQQLA

SEQ ID NO: 5365 - protein, 832 aa, Homo sapiens
MPGGGPQGAPAAAGGGGVSHRAGSRDCLPPAACFRRRRLARRPGYMRSSTGPGIGFLSPAVGTLFRFPGGVSGEESHHSESRARQCGLDSRGLLVRSPVSKSAAAPTVTSVRGTSAHFGIQLRGGTRLPDRLSWPCGPGSAGWQQEFAAMDSSETLDASWEAACSDGARRVRAAGSLPSAELSSNSCSPGCGPEVPPTPPGSHSAFTSSFSFIRLSLGSAGERGEAEGCPPSREAESHCQSPQEMGAKAASLDGPHEDPRCLSRPFSLLATRVSADLAQAARNSSRPERDMHSLPDMDPGSSSSLDPSLAGCGGDGSSGSGDAHSWDTLLRKWEPVLRDCLLRNRRQMEVISLRLKLQKLQEDAVENDDYDKAETLQQRLEDLEQEKISLHFQLPSRQPALSSFLGHLAAQVQAALRRGATQQASGDDTHTPLRMEPRLLEPTAQDSLHVSITRRDWLLQEKQQLQKEIEALQARMFVLEAKDQQLRREIEEQEQQLQWQGCDLTPLVGQLSLGQLQEVSKALQDTLASAGQIPFHAEPPETIRSLQERIKSLNLSLKEITTKVCMSEKFCSTLRKKVNDIETQLPALLEAKMHAISGNHFWTAKDLTEEIRSLTSEREGLEGLLSKLLVLSSRNVKKLGSVKEDYNRLRREVEHQETAYETSVKENTMKYMETLKNKLCSCKCPLLGKVWEADLEACRLLIQSLQLQEARGSLSVEDERQMDDLEGAAPPIPPRLHSEDKRKTPLKESYILSAELGEKCEDIGKKLLYLEDQLHTAIHSHDEDLIQSLRRELQMVKETLQAMILQLQPAKEAGEREAAASCMTAGVHEAQA

SEQ ID NO: 5366 - protein, 258 aa, Homo sapiens
MPPQQGDPAFPDRCEAPPVPPRRERGGRGGRGPGEPGGRGRAGGAEGRGVKCVLVGDGAVGKTSLVVSYTTNGYPTEYIPTAFDNFSAVVSVDGRPVRLQLCDTAGQDEFDKLRPLCYTNTDIFLLCFSVVSPSSFQNVSEKWVPEIRCHCPKAPIILVGTQSDLREDVKVLIELDKCKEKPVPEEAAKLCAEEIKAASYIECSALTQKNLKEVFDAAIVAGIQYSDTQQQPKKSKSRTPDKMKNLSKSWWKKYCCFV

SEQ ID NO: 5367 - protein, 130 aa, Homo sapiens
MSGRGKQGGKARAKAKSRSSRAGLQFPVGRVHRLLRKGNYSERVGAGAPVYLAAVLEYLTAEILELAGNAARDNKKTRIIPRHLQLAIRNDEELNKLLGRVTIAQGGVLPNIQAVLLPKKTESHHKAKGK

SEQ ID NO: 5368 - protein, 1699 aa, Homo sapiens
MSGEVRLRQLEQFILDGPAQTNGQCFSVETLLDILICLYDECNNSPLRREKNILEYLEWAKPFTSKVKQMRLHREDFEILKVIGRGAFGEVAVVKLKNADKVFAMKILNKWEMLKRAETACFREERDVLVNGDNKWITTLHYAFQDDNNLYLVMDYYVGGDLLTLLSKFEDRLPEDMARFYLAEMVIAIDSVHQLHYVHRDIKPDNILMDMNGHIRLADFGSCLKLMEDGTVQSSVAVGTPDYISPEILQAMEDGKGRYGPECDWWSLGVCMYEMLYGETPFYAESLVETYGKIMNHKERFQFPAQVTDVSENAKDLIRRLICSREHRLGQNGIEDFKKHPFFSGIDWDNIRNCEAPYIPEVSSPTDTSNFDVDDDCLKNSETMPPPTHTAFSGHHLPFVGFTYTSSCVLSDRSCLRVTAGPTSLDLDVNVQRTLDNNLATEAYERRIKRLEQEKLELSRKLQESTQTVQALQYSTVDGPLTASKDLEIKNLKEEIEKLRKQVTESSHLEQQLEEANAVRQELDDAFRQIKAYEKQIKTLQQEREDLNKELVQASERLKNQSKELKDAHCQRKLAMQEFMEINERLTELHTQKQKLARHVRDKEEEVDLVMQKVESLRQELRRTERAKKELEVHTEALAAEASKDRKLREQSEHYSKQLENELEGLKQKQISYSPGVCSIEHQQEITKLKTDLEKKSIFYEEELSKREGIHANEIKNLKKELHDSEGQQLALNKEIMILKDKLEKTRRESQSEREEFESEFKQQYEREKVLLTEENKKLTSELDKLTTLYENLSIHNQQLEEEVKDLADKKESVAHWEAQITEIIQWVSDEKDARGYLQALASKMTEELEALRNSSLGTRATDMPWKMRRFAKLDMSARLELQSALDAEIRAKQAIQEELNKVKASNIITECKLKDSEKKNLELLSEIEQLIKDTEELRSEKASKGRRTVDSTPLSVHTPTLRKKGCPGSTGFPPKRKTHQFFVKSFTTPTKCHQCTSLMVGLIRQGCSCEVCGFSCHITCVNKAPTTCPVPPEQTKGPLGIDPQKGIGTAYEGHVRIPKPAGVKKGWQRALAIVCDFKLFLYDIAEGKASQPSVVISQVIDMRDEEFSVSSVLASDVIHASRKDIPCIFRVTASQLSASNNKCSILMLADTENEKNKWVGVLSELHKILKKNKFRDRSVYVPKEAYDSTLPLIKTTQAAAIIDHERIALGNEEGLFVVHVTKDEIIRVGDNKKIHQIELIPNDQLVAVISGRNRHVRLFPMSALDGRETDFYKLSETKGCQTVTSGKVRHGALTCLCVAMKRQVLCYELFQSKTRHRKFKEIQVPYNVQWMAIFSEQLCVGFQSGFLRYPLNGEGNPYSMLHSNDHTLSFIAHQPMDAICAVEISSKEYLLCFNSIGIYTDCQGRRSRQQELMWPANPSSCCYNAPYLSVYSENAVDIFDVNSMEWIQTLPLKKVRPLNNEGSLNLLGLETIRLIYFKNKMAEGDELVVPETSDNSRKQMVRNINNKRRYSFRVPEEERMQQRREMLRDPEMRNKLISNPTNFNHIAHMGPGDGIQILKDLPMNPRPQESRTVFSGSVSIPSITKSRPEPGRSMSASSGLSARSSAQNGSALKREFSGGSYSAKRQPMPSPSEGSLSSGGMDQGSDAPARDFDGEDSDSPRHSTASNSSNLSSPPSPASPRKTKSLSLESTDRGSWDP

SEQ ID NO: 5369 - protein, 1018 aa, Homo sapiens
MILKDKLEKTRRESQSEREEFESEFKQQYEREKVLLTEENKKLTSELDKLTTLYENLSIHNQQLEEEVKDLADKKESVAHWEAQITEIIQWVSDEKDARGYLQALASKMTEELEALRNSSLGTRATDMPWKMRRFAKLDMSARLELQSALDAEIRAKQAIQEELNKVKASNIITECKLKDSEKKNLELLSEIEQLIKDTEELRSEKGIEHQDSQHSFLAFLNTPTDALDQFETDPVENTYVWNPSVKFHIQSRSTSPSTSSEAEPVKTVDSTPLSVHTPTLRKKGCPGSTGFPPKRKTHQFFVKSFTTPTKCHQCTSLMVGLIRQGCSCEVCGFSCHITCVNKAPTTCPVPPEQTKGPLGIDPQKGIGTAYEGHVRIPKPAGVKKGWQRALAIVCDFKLFLYDIAEGKASQPSVVISQVIDMRDEEFSVSSVLASDVIHASRKDIPCIFRVTASQLSASNNKCSILMLADTENEKNKWVGVLSELHKILKKNKFRDRSVYVPKEAYDSTLPLIKTTQAAAIIDHERIALGNEEGLFVVHVTKDEIIRVGDNKKIHQIELIPNDQLVAVISGRNRHVRLFPMSALDGRETDFYKLSETKGCQTVTSGKVRHGALTCLCVAMKRQVLCYELFQSKTRHRKFKEIQVPYNVQWMAIFSEQLCVGFQSGFLRYPLNGEGNPYSMLHSNDHTLSFIAHQPMDAICAVEISSKEYLLCFNSIGIYTDCQGRRSRQQELMWPANPSSCCYNAPYLSVYSENAVDIFDVNSMEWIQTLPLKKVRPLNNEGSLNLLGLETIRLIYFKNKMAEGDELVVPETSDNSRKQMVRNINNKRRYSFRVPEEERMQQRREMLRDPEMRNKLISNPTNFNHIAHMGPGDGIQILKDLPMNPRPQESRTVFSGSVSIPSITKSRPEPGRSMSASSGLSARSSAQNGSALKREFSGGSYSAKRQPMPSPSEGSLSSGGMDQGSDAPARDFDGEDSDSPRHSTASNSSNLSSPPSPASPRKTKSLSLESTDRGSWDP

SEQ ID NO: 5370 - protein, 1638 aa, Homo sapiens
MSGEVRLRQLEQFILDGPAQTNGQCFSVETLLDILICLYDECNNSPLRREKNILEYLEWAKPFTSKVKQMRLHREDFEILKVIGRGAFGEVAVVKLKNADKVFAMKILNKWEMLKRAETACFREERDVLVNGDNKWITTLHYAFQDDNNLYLVMDYYVGGDLLTLLSKFEDRLPEDMARFYLAEMVIAIDSVHQLHYVHRDIKPDNILMDMNGHIRLADFGSCLKLMEDGTVQSSVAVGTPDYISPEILQAMEDGKGRYGPECDWWSLGVCMYEMLYGETPFYAESLVETYGKIMNHKERFQFPAQVTDVSENAKDLIRRLICSREHRLGQNGIEDFKKHPFFSGIDWDNIRNCEAPYIPEVSSPTDTSNFDVDDDCLKNSETMPPPTHTAFSGHHLPFVGFTYTSSCVLSDRSCLRVTAGPTSLDLDVNVQRTLDNNLATEAYERRIKRLEQEKLELSRKLQESTQTVQALQYSTVDGPLTASKDLEIKNLKEEIEKLRKQVTESSHLEQQLEEANAVRQELDDAFRQIKAYEKQIKTLQQEREDLNKLEVHTEALAAEASKDRKLREQSEHYSKQLENELEGLKQKQISYSPGVCSIEHQQEITKLKTDLEKKSIFYEEELSKREGIHANEIKNLKKELHDSEGQQLALNKEIMILKDKLEKTRRESQSEREEFESEFKQQYEREKVLLTEENKKLTSELDKLTTLYENLSIHNQQLEEEVKDLADKKESVAHWEAQITEIIQWVSDEKDARGYLQALASKMTEELEALRNSSLGTRATDMPWKMRRFAKLDMSARLELQSALDAEIRAKQAIQEELNKVKASNIITECKLKDSEKKNLELLSEIEQLIKDTEELRSEKGIEHQDSQHSFLAFLNTPTDALDQFETVDSTPLSVHTPTLRKKGCPGSTGFPPKRKTHQFFVKSFTTPTKCHQCTSLMVGLIRQGCSCEVCGFSCHITCVNKAPTTCPVPPEQTKGPLGIDPQKGIGTAYEGHVRIPKPAGVKKGWQRALAIVCDFKLFLYDIAEGKASQPSVVISQVIDMRDEEFSVSSVLASDVIHASRKDIPCIFRVTASQLSASNNKCSILMLADTENEKNKWVGVLSELHKILKKNKFRDRSVYVPKEAYDSTLPLIKTTQAAAIIDHERIALGNEEGLFVVHVTKDEIIRVGDNKKIHQIELIPNDQLVAVISGRNRHVRLFPMSALDGRETDFYKLSETKGCQTVTSGKVRHGALTCLCVAMKRQVLCYELFQSKTRHRKFKEIQVPYNVQWMAIFSEQLCVGFQSGFLRYPLNGEGNPYSMLHSNDHTLSFIAHQPMDAICAVEISSKEYLLCFNSIGIYTDCQGRRSRQQELMWPANPSSCCYNAPYLSVYSENAVDIFDVNSMEWIQTLPLKKVRPLNNEGSLNLLGLETIRLIYFKNKMAEGDELVVPETSDNSRKQMVRNINNKRRYSFRVPEEERMQQRREMLRDPEMRNKLISNPTNFNHIAHMGPGDGIQILKDLPMNPRPQESRTVFSGSVSIPSITKSRPEPGRSMSASSGLSARSSAQNGSALKREFSGGSYSAKRQPMPSPSEGSLSSGGMDQGSDAPARDFDGEDSDSPRHSTASNSSNLSSPPSPASPRKTKSLSLESTDRGSWDP

SEQ ID NO: 5371 - protein, 1719 aa, Homo sapiens
MSGEVRLRQLEQFILDGPAQTNGQCFSVETLLDILICLYDECNNSPLRREKNILEYLEWAKPFTSKVKQMRLHREDFEILKVIGRGAFGEVAVVKLKNADKVFAMKILNKWEMLKRAETACFREERDVLVNGDNKWITTLHYAFQDDNNLYLVMDYYVGGDLLTLLSKFEDRLPEDMARFYLAEMVIAIDSVHQLHYVHRDIKPDNILMDMNGHIRLADFGSCLKLMEDGTVQSSVAVGTPDYISPEILQAMEDGKGRYGPECDWWSLGVCMYEMLYGETPFYAESLVETYGKIMNHKERFQFPAQVTDVSENAKDLIRRLICSREHRLGQNGIEDFKKHPFFSGIDWDNIRNCEAPYIPEVSSPTDTSNFDVDDDCLKNSETMPPPTHTAFSGHHLPFVGFTYTSSCVLSDRSCLRVTAGPTSLDLDVNVQRTLDNNLATEAYERRIKRLEQEKLELSRKLQESTQTVQALQYSTVDGPLTASKDLEIKNLKEEIEKLRKQVTESSHLEQQLEEANAVRQELDDAFRQIKAYEKQIKTLQQEREDLNKELVQASERLKNQSKELKDAHCQRKLAMQEFMEINERLTELHTQKQKLARHVRDKEEEVDLVMQKVESLRQELRRTERAKKELEVHTEALAAEASKDRKLREQSEHYSKQLENELEGLKQKQISYSPGVCSIEHQQEITKLKTDLEKKSIFYEEELSKREGIHANEIKNLKKELHDSEGQQLALNKEIMILKDKLEKTRRESQSEREEFESEFKQQYEREKVLLTEENKKLTSELDKLTTLYENLSIHNQQLEEEVKDLADKKESVAHWEAQITEIIQWVSDEKDARGYLQALASKMTEELEALRNSSLGTRATDMPWKMRRFAKLDMSARLELQSALDAEIRAKQAIQEELNKVKASNIITECKLKDSEKKNLELLSEIEQLIKDTEELRSEKGIEHQDSQHSFLAFLNTPTDALDQFETVDSTPLSVHTPTLRKKGCPGSTGFPPKRKTHQFFVKSFTTPTKCHQCTSLMVGLIRQGCSCEVCGFSCHITCVNKAPTTCPVPPEQTKGPLGIDPQKGIGTAYEGHVRIPKPAGVKKGWQRALAIVCDFKLFLYDIAEGKASQPSVVISQVIDMRDEEFSVSSVLASDVIHASRKDIPCIFRVTASQLSASNNKCSILMLADTENEKNKWVGVLSELHKILKKNKFRDRSVYVPKEAYDSTLPLIKTTQAAAIIDHERIALGNEEGLFVVHVTKDEIIRVGDNKKIHQIELIPNDQLVAVISGRNRHVRLFPMSALDGRETDFYKLSETKGCQTVTSGKVRHGALTCLCVAMKRQVLCYELFQSKTRHRKFKEIQVPYNVQWMAIFSEQLCVGFQSGFLRYPLNGEGNPYSMLHSNDHTLSFIAHQPMDAICAVEISSKEYLLCFNSIGIYTDCQGRRSRQQELMWPANPSSCCYNAPYLSVYSENAVDIFDVNSMEWIQTLPLKKVRPLNNEGSLNLLGLETIRLIYFKNKMAEGDELVVPETSDNSRKQMVRNINNKRRYSFRVPEEERMQQRREMLRDPEMRNKLISNPTNFNHIAHMGPGDGIQILKDLPMNPRPQESRTVFSGSVSIPSITKSRPEPGRSMSASSGLSARSSAQNGSALKREFSGGSYSAKRQPMPSPSEGSLSSGGMDQGSDAPARDFDGEDSDSPRHSTASNSSNLSSPPSPASPRKTKSLSLESTDRGSWDP

SEQ ID NO: 5372 - protein, 282 aa, Homo sapiens
MAAAAPDSRVSEEENLKKTPKKKMKMVTGAVASVLEDEATDTSDSEGSCGSEKDHFYSDDDAIEADSEGDAEPCDKENENDGESSVGTNMGWADAMAKVLNKKTPESKPTILVKNKKLEKEKEKLKQERLEKIKQRDKRLEWEMMCRVKPDVVQDKETERNLQRIATRGVVQLFNAVQKHQKNVDEKVKEAGSSMRKRAKLISTVSKKDFISVLRGMDGSTNETASSRKKPKAKQTEVKSEEGPGWTILRDDFMMGASMKDWDKESDGPDDSRPESASDSDT

SEQ ID NO: 5373 - protein, 3114 aa, Homo sapiens
MSWALEEWKEGLPTRALQKIQELEGQLDKLKKEKQQRQFQLDSLEAALQKQKQKVENEKTEGTNLKRENQRLMEICESLEKTKQKISHELQVKESQVNFQEGQLNSGKKQIEKLEQELKRCKSELERSQQAAQSADVSLNPCNTPQKIFTTPLTPSQYYSGSKYEDLKEKYNKEVEERKRLEAEVKALQAKKASQTLPQATMNHRDIARHQASSSVFSWQQEKTPSHLSSNSQRTPIRRDFSASYFSGEQEVTPSRSTLQIGKRDANSSFFDNSSSPHLLDQLKAQNQELRNKINELELRLQGHEKEMKGQVNKFQELQLQLEKAKVELIEKEKVLNKCRDELVRTTAQYDQASTKYTALEQKLKKLTEDLSCQRQNAESARCSLEQKIKEKEKEFQEELSRQQRSFQTLDQECIQMKARLTQELQQAKNMHNVLQAELDKLTSVKQQLENNLEEFKQKLCRAEQAFQASQIKENELRRSMEEMKKENNLLKSHSEQKAREVCHLEAELKNIKQCLNQSQNFAEEMKAKNTSQETMLRDLQEKINQQENSLTLEKLKLAVADLEKQRDCSQDLLKKREHHIEQLNDKLSKTEKESKALLSALELKKKEYEELKEEKTLFSCWKSENEKLLTQMESEKENLQSKINHLETCLKTQQIKSHEYNERVRTLEMDRENLSVEIRNLHNVLDSKSVEVETQKLAYMELQQKAEFSDQKHQKEIENMCLKTSQLTGQVEDLEHKLQLLSNEIMDKDRCYQDLHAEYESLRDLLKSKDASLVTNEDHQRSLLAFDQQPAMHHSFANIIGEQGSMPSERSECRLEADQSPKNSAILQNRVDSLEFSLESQKQMNSDLQKQCEELVQIKGEIEENLMKAEQMHQSFVAETSQRISKLQEDTSAHQNVVAETLSALENKEKELQLLNDKVETEQAEIQELKKSNHLLEDSLKELQLLSETLSLEKKEMSSIISLNKREIEELTQENGTLKEINASLNQEKMNLIQKSESFANYIDEREKSISELSDQYKQEKLILLQRCEETGNAYEDLSQKYKAAQEKNSKLECLLNECTSLCENRKNELEQLKEAFAKEHQEFLTKLAFAEERNQNLMLELETVQQALRSEMTDNQNNSKSEAGGLKQEIMTLKEEQNKMQKEVNDLLQENEQLMKVMKTKHECQNLESEPIRNSVKERESERNQCNFKPQMDLEVKEISLDSYNAQLVQLEAMLRNKELKLQESEKEKECLQHELQTIRGDLETSNLQDMQSQEISGLKDCEIDAEEKYISGPHELSTSQNDNAHLQCSLQTTMNKLNELEKICEILQAEKYELVTELNDSRSECITATRKMAEEVGKLLNEVKILNDDSGLLHGELVEDIPGGEFGEQPNEQHPVSLAPLDESNSYEHLTLSDKEVQMHFAELQEKFLSLQSEHKILHDQHCQMSSKMSELQTYVDSLKAENLVLSTNLRNFQGDLVKEMQLGLEEGLVPSLSSSCVPDSSSLSSLGDSSFYRALLEQTGDMSLLSNLEGAVSANQCSVDEVFCSSLQEENLTRKETPSAPAKGVEELESLCEVYRQSLEKLEEKMESQGIMKNKEIQELEQLLSSERQELDCLRKQYLSENEQWQQKLTSVTLEMESKLAAEKKQTEQLSLELEVARLQLQGLDLSSRSLLGIDTEDAIQGRNESCDISKEHTSETTERTPKHDVHQICDKDAQQDLNLDIEKITETGAVKPTGECSGEQSPDTNYEPPGEDKTQGSSECISELSFSGPNALVPMDFLGNQEDIHNLQLRVKETSNENLRLLHVIEDRDRKVESLLNEMKELDSKLHLQEVQLMTKIEACIELEKIVGELKKENSDLSEKLEYFSCDHQELLQRVETSEGLNSDLEMHADKSSREDIGDNVAKVNDSWKERFLDVENELSRIRSEKASIEHEALYLEADLEVVQTEKLCLEKDNENKQKVIVCLEEELSVVTSERNQLRGELDTMSKKTTALDQLSEKMKEKTQELESHQSECLHCIQVAEAEVKEKTELLQTLSSDVSELLKDKTHLQEKLQSLEKDSQALSLTKCELENQIAQLNKEKELLVKESESLQARLSESDYEKLNVSKALEAALVEKGEFALRLSSTQEEVHQLRRGIEKLRVRIEADEKKQLHIAEKLKERERENDSLKDKVENLERELQMSEENQELVILDAENSKAEVETLKTQIEEMARSLKVFELDLVTLRSEKENLTKQIQEKQGQLSELDKLLSSFKSLLEEKEQAEIQIKEESKTAVEMLQNQLKELNEAVAALCGDQEIMKATEQSLDPPIEEEHQLRNSIEKLRARLEADEKKQLCVLQQLKESEHHADLLKGRVENLERELEIARTNQEHAALEAENSKGEVETLKAKIEGMTQSLRGLELDVVTIRSEKENLTNELQKEQERISELEIINSSFENILQEKEQEKVQMKEKSSTAMEMLQTQLKELNERVAALHNDQEACKAKEQNLSSQVECLELEKAQLLQGLDEAKNNYIVLQSSVNGLIQEVEDGKQKLEKKDEEISRLKNQIQDQEQLVSKLSQVEGEHQLWKEQNLELRNLTVELEQKIQVLQSKNASLQDTLEVLQSSYKNLENELELTKMDKMSFVEKVNKMTAKETELQREMHEMAQKTAELQEELSGEKNRLAGELQLLLEEIKSSKDQLKELTLENSELKKSLDCMHKDQVEKEGKVREEIAEYQLRLHEAEKKHQALLLDTNKQYEVEIQTYREKLTSKEECLSSQKLEIDLLKSSKEELNNSLKATTQILEELKKTKMDNLKYVNQLKKENERAQGKMKLLIKSCKQLEEEKEILQKELSQLQAAQEKQKTGTVMDTKVDELTTEIKELKETLEEKTKEADEYLDKYCSLLISHEKLEKAKEMLETQVAHLCSQQSKQDSRGSPLLGPVVPGPSPIPSVTEKRLSSGQNKASGKRQRSSGIWENGRGPTPATPESFSKKSKKAVMSGIHPAEDTEGTEFEPEGLPEVVKKGFADIPTGKTSPYILRRTTMATRTSPRLAAQKLALSPLSLGKENLAESSKPTAGGSRSQKVKVAQRSPVDSGTILREPTTKSVPVNNLPERSPTDSPREGLRVKRGRLVPSPKAGLESNGSENCKVQ

SEQ ID NO: 5374 - protein, 730 aa, Homo sapiens
MLFNSVLRQPQLGVLRNGWSSQYPLQSLLTGYQCSGNDEHTSYGETGVPVPPFGCTFSSAPNMEHVLAVANEEGFVRLYNTESQSFRKKCFKEWMAHWNAVFDLAWVPGELKLVTAAGDQTAKFWDVKAGELIGTCKGHQCSLKSVAFSKFEKAVFCTGGRDGNIMVWDTRCNKKDGFYRQVNQISGAHNTSDKQTPSKPKKKQNSKGLAPSVDFQQSVTVVLFQDENTLVSAGAVDGIIKVWDLRKNYTAYRQEPIASKSFLYPGSSTRKLGYSSLILDSTGSTLFANCTDDNIYMFNMTGLKTSPVAIFNGHQNSTFYVKSSLSPDDQFLVSGSSDEAAYIWKVSTPWQPPTVLLGHSQEVTSVCWCPSDFTKIATCSDDNTLKIWRLNRGLEEKPGGDKLSTVGWASQKKKESRPGLVTVTSSQSTPAKAPRAKCNPSNSSPSSAACAPSCAGDLPLPSNTPTFSIKTSPAKARSPINRRGSVSSVSPKPPSSFKMSIRNWVTRTPSSSPPITPPASETKIMSPRKALIPVSQKSSQAEACSESRNRVKRRLDSSCLESVKQKCVKSCNCVTELDGQVENLHLDLCCLAGNQEDLSKDSLGPTKSSKIEGAGTSISEPPSPISPYASESCGTLPLPLRPCGEGSEMVGKENSSPENKNWLLAMAAKRKAENPSPRSPSSQTPNSRRQSGKKLPSPVTITPSSMRKICTYFHRKSQEDFCGPEHSTEL

SEQ ID NO: 5375 - protein, 384 aa, Homo sapiens
MPSRAEDYEVLYTIGTGSYGRCQKIRRKSDGKILVWKELDYGSMTEAEKQMLVSEVNLLRELKHPNIVRYYDRIIDRTNTTLYIVMEYCEGGDLASVITKGTKERQYLDEEFVLRVMTQLTLALKECHRRSDGGHTVLHRDLKPANVFLDGKQNVKLGDFGLARILNHDTSFAKTFVGTPYYMSPEQMNRMSYNEKSDIWSLGCLLYELCALMPPFTAFSQKELAGKIREGKFRRIPYRYSDELNEIITRMLNLKDYHRPSVEEILENPLIADLVADEQRRNLERRGRQLGEPEKSQDSSPVLSELKLKEIQLQERERALKAREERLEQKEQELCVRERLAEDKLARAENLLKNYSLLKERKFLSLASNPGMRINLVNRSWCYK

SEQ ID NO: 5376 - protein, 445 aa, Homo sapiens
MPSRAEDYEVLYTIGTGSYGRCQKIRRKSDGKILVWKELDYGSMTEAEKQMLVSEVNLLRELKHPNIVRYYDRIIDRTNTTLYIVMEYCEGGDLASVITKGTKERQYLDEEFVLRVMTQLTLALKECHRRSDGGHTVLHRDLKPANVFLDGKQNVKLGDFGLARILNHDTSFAKTFVGTPYYMSPEQMNRMSYNEKSDIWSLGCLLYELCALMPPFTAFSQKELAGKIREGKFRRIPYRYSDELNEIITRMLNLKDYHRPSVEEILENPLIADLVADEQRRNLERRGRQLGEPEKSQDSSPVLSELKLKEIQLQERERALKAREERLEQKEQELCVRERLAEDKLARAENLLKNYSLLKERKFLSLASNPELLNLPSSVIKKKVHFSGESKENIMRSENSESQLTSKSKCKDLKKRLHAAQLRAQALSDIEKNYQLKSRQILGMR

SEQ ID NO: 5377 - protein, 397 aa, Homo sapiens
MNAGSDPVVIVSAARTIIGSFNGALAAVPVQDLGSTVIKEVLKRATVAPEDVSEVIFGHVLAAGCGQNPVRQASVGAGIPYSVPAWSCQMICGSGLKAVCLAVQSIGIGDSSIVVAGGMENMSKAPHLAYLRTGVKIGEMPLTDSILCDGLTDAFHNCHMGITAENVAKKWQVSREDQDKVAVLSQNRTENAQKAGHFDKEIVPVLVSTRKGLIEVKTDEFPRHGSNIEAMSKLKPYFLTDGTGTVTPANASGINDGAAAVVLMKKSEADKRGLTPLARIVSWSQVGVEPSIMGIGPIPAIKQAVTKAGWSLEDVDIFEINEAFAAVSAAIVKELGLNPEKVNIEGGAIALGHPLGASGCRILVTLLHTLERMGRSRGVAALCIGGGMGIAMCVQRE

SEQ ID NO: 5378 - protein, 731 aa, Homo sapiens
MKLRSSHNASKTLNANNMETLIECQSEGDIKEHPLLASCESEDSICQLIEVKKRKKVLSWPFLMRRLSPASDFSGALETDLKASLFDQPLSIICGDSDTLPRPIQDILTILCLKGPSTEGIFRRAANEKARKELKEELNSGDAVDLERLPVHLLAVVFKDFLRSIPRKLLSSDLFEEWMGALEMQDEEDRIEALKQVADKLPRPNLLLLKHLVYVLHLISKNSEVNRMDSSNLAICIGPNMLTLENDQSLSFEAQKDLNNKVKTLVEFLIDNCFEIFGENIPVHSSITSDDSLEHTDSSDVSTLQNDSAYDSNDPDVESNSSSGISSPSRQPQVPMATAAGLDSAGPQDAREVSPEPIVSTVARLKSSLAQPDRRYSEPSMPSSQECLESRVTNQTLTKSEGDFPVPRVGSRLESEEAEDPFPEEVFPAVQGKTKRPVDLKIKNLAPGSVLPRALVLKAFSSSSLDASSDSSPVASPSSPKRNFFSRHQSFTTKTEKGKPSREIKKHSMSFTFAPHKKVLTKNLSAGSGKSQDFTRDHVPRGVRKESQLAGRIVQENGCETHNQTARGFCLRPHALSVDDVFQGADWERPGSPPSYEEAMQGPAARLVASESQTVGSMTVGSMRARMLEAHCLLPPLPPAHHVEDSRHRGSKEPLPGHGLSPLPERWKQSRTVHASGDSLGHVSGPGRPELLPLRTVSESVQRNKRDCLVRRCSQPVFEADQFQYAKESYI

SEQ ID NO: 5379 - protein, 94 aa, Homo sapiens
MSELEKAMVALIDVFHQYSGREGDKHKLKKSELKELINNELSHFLERWSLPMLPRLVSNFLCSSYPPALASQSAGITGNQRAGGCGQSHGNTGQ

SEQ ID NO: 5380 - protein, 154 aa, Homo sapiens
MNFQQRLQSLWTLASRPFCPPLLATASQMQMVVLPCLGFTLLLWSQVSGAQGQEFHFGPCQVKGVVPQKLWEAFWAVKDTMQAQDNITSARLLQQEVLQNVSQENEMFSIRDSAHRRFLLFRRAFKQLDVEAALTKALGEVDILLTWMQKFYKL

SEQ ID NO: 5381 - protein, 628 aa, Homo sapiens
MESLVFARRSGPTPSAAELARPLAEGLIKSPKPLMKKQAVKRHHHKHNLRHRYEFLETLGKGTYGKVKKARESSGRLVAIKSIRKDKIKDEQDLMHIRREIEIMSSLNHPHIIAIHEVFENSSKIVIVMEYASRGDLYDYISERQQLSEREARHFFRQIVSAVHYCHQNRVVHRDLKLENILLDANGNIKIADFGLSNLYHQGKFLQTFCGSPLYASPEIVNGKPYTGPEVDSWSLGVLLYILVHGTMPFDGHDHKILVKQISNGAYREPPKPSDACGLIRWLLMVNPTRRATLEDVASHWWVNWGYATRVGEQEAPHEGGHPGSDSARASMADWLRRSSRPLLENGAKVCSFFKQHAPGGGSTTPGLERQHSLKKSRKENDMAQSLHSDTADDTAHRPGKSNLKLPKGILKKKVSASAEGVQEDPPELSPIPASPGQAAPLLPKKGILKKPRQRESGYYSSPEPSESGELLDAGDVFVSGDPKEQKPPQASGLLLHRKGILKLNGKFSQTALELAAPTTFGSLDELAPPRPLARASRPSGAVSEDSILSSESFDQLDLPERLPEPPLRGCVSVDNLTGLEEPPSEGPGSCLRRWRQDPLGDSCFSLTDCQEVTATYRQALRVCSKLT

SEQ ID NO: 5382 - protein, 401 aa, Homo sapiens
MKCDFNCNHVHSGLKLVKPDDIGRLVSYTPAYLEGSCKDCIKDYERLSCIGSPIVSPRIVQLETESKRLHNKENQHVQQTLNSTNEIEALETSRLYEDSGYSSFSLQSGLSEHEEGSLLEENFGDSLQSCLLQIQSPDQYPNKNLLPVLHFEKVVCSTLKKNAKRNPKVDREMLKEIIARGNFRLQNIIGRKMGLECVDILSELFRRGLRHVLATILAQLSDMDLINVSKVSTTWKKILEDDKGAFQLYSKAIQRVTENNNKFSPHASTREYVMFRTPLASVQKSAAQTSLKKDAQTKLSNQGDQKGSTYSRHNEFSEVAKTLKKNESLKACIRCNSPAKYDCYLQRATCKREGCGFDYCTKCLCNYHTTKDCSDGKLLKASCKIGPLPGTKKSKKNLRRL

SEQ ID NO: 5383 - protein, 1433 aa, Homo sapiens
MATSRGASRCPRDIANVMQRLQDEQEIVQKRTFTKWINSHLAKRKPPMVVDDLFEDMKDGVKLLALLEVLSGQKLPCEQGRRMKRIHAVANIGTALKFLEGRKSMHRGSPIKLVNINSTDIADGRPSIVLGLMWTIILYFQIEELTSNLPQLQSLSSSASSVDSIVSSETPSPPSKRKVTTKIQGNAKKALLKWVQYTAGKQTGIEVKDFGKSWRSGVAFHSVIHAIRPELVDLETVKGRSNRENLEDAFTIAETELGIPRLLDPEDVDVDKPDEKSIMTYVAQFLKHYPDIHNASTDGQEDDREDRVIFKEMKVWIEQFERDLTRAQMVESNLQDKYQSFKHFRVQYEMKRKQIEHLIQPLHRDGKLSLDQALVKQSWDRVTSRLFDWHIQLDKSLPAPLGTIGAWLYRAEVALREEITVQQVHEETANTIQRKLEQHKDLLQNTDAHKRAFHEIYRTRSVNGIPVPPDQLEDMAERFHFVSSTSELHLMKMEFLELKYRLLSLLVLAESKLKSWIIKYGRRESVEQLLQNYVSFIENSKFFEQYEVTYQILKQTAEMYVKADGSVEEAENVMKFMNETTAQWRNLSVEVRSVRSMLEEVISNWDRYGNTVASLQAWLEDAEKMLNQSENAKKDFFRNLPHWIQQHTAMNDAGNFLIETCDEMVSRDLKQQLLLLNGRWRELFMEVKQYAQADEMDRMKKEYTDCVVTLSAFATEAHKKLSEPLEVSFMNVKLLIQDLEDIEQRVPVMDAQYKIITKTAHLITKESPQEEGKEMFATMSKLKEQLTKVKECYSPLLYESQQLLIPLEELEKQMTSFYDSLGKINEIITVLEREAQSSALFKQKHQELLACQENCKKTLTLIEKGSQSVQKFVTLSNVLKHFDQTRLQRQIADIHVAFQSMVKKTGDWKKHVETNSRLMKKFEESRAELEKVLRIAQEGLEEKGDPEELLRRHTEFFSQLDQRVLNAFLKACDELTDILPEQEQQGLQEAVRKLHKQWKDLQGEAPYHLLHLKIDVEKNRFLASVEECRTELDRETKLMPQEGSEKIIKEHRVFFSDKGPHHLCEKRLQLIEELCVKLPVRDPVRDTPGTCHVTLKELRAAIDSTYRKLMEDPDKWKDYTSRFSEFSSWISTNETQLKGIKGEAIDTANHGEVKRAVEEIRNGVTKRGETLSWLKSRLKVLTEVSSENEAQKQGDELAKLSSSFKALVTLLSEVEKMLSNFGDCVQYKEIVKNSLEELISGSKEVQEQAEKILDTENLFEAQQLLLHHQQKTKRISAKKRDVQQQIAQAQQGEGGLPDRGHEELRKLESTLDGLERSRERQERRIQVTLRKWERFETNKETVVRYLFQTGSSHERFLSFSSLESLSSELEQTKEFSKRTESIAVQAENLVKEASEIPLGPQNKQLLQQQAKSIKEQVKKLEDTLEEEYVIDKS

SEQ ID NO: 5384 - protein, 1483 aa, Homo sapiens
MLHLPLPRSGRTVNFPRSWDESSSISSGLSDASDNLSSEEFNASSSLNSLPSTPTASRRNSTIVLRTDSEKRSLAESGLSWFSESEEKAPKKLEYDSGSLKMEPGTSKWRRERPESCDDSSKGGELKKPISLGHPGSLKKGKTPPVAVTSPITHTAQSALKVAGKPEGKATDKGKLAVKNTGLQRSSSDAGRDRLSDAKKPPSGIARPSTSGSFGYKKPPPATGTATVMQTGGSATLSKIQKSSGIPVKPVNGRKTSLDVSNSAEPGFLAPGARSNIQYRSLPRPAKSSSMSVTGGRGGPRPVSSSIDPSLLSTKQGGLTPSRLKEPTKVASGRTTPAPVNQTDREKEKAKAKAVALDSDNISLKSIGSPESTPKNQASHPTATKLAELPPTPLRATAKSFVKPPSLANLDKVNSNSLDLPSSSDTTHASKVPDLHATSSASGGPLPSCFTPSPAPILNINSASFSQGLELMSGFSVPKETRMYPKLSGLHRSMESLQMPMSLPSAFPSSTPVPTPPAPPAAPTEEETEELTWSGSPRAGQLDSNQRDRNTLPKKGLRYQLQSQEETKERRHSHTIGGLPESDDQSELPSPPALPMSLSAKGQLTNIVSPTAATTPRITRSNSIPTHEAAFELYSGSQMGSTLSLAERPKGMIRSGSFRDPTDDVHGSVLSLASSASSTYSSAEERMQSEQIRKLRRELESSQEKVATLTSQLSANANLVAAFEQSLVNMTSRLRHLAETAEEKDTELLDLRETIDFLKKKNSEAQAVIQGALNASETTPKELRIKRQNSSDSISSLNSITSHSSIGSSKDADAKKKKKKSWLRSSFNKAFSIKKGPKSASSYSDIEEIATPDSSAPSSPKLQHGSTETASPSIKSSTSSSVGTDVTEGPAHPAPHTRLFHANEEEEPEKKEVSELRSELWEKEMKLTDIRLEALNSAHQLDQLRETMHNMQLEVDLLKAENDRLKVAPGPSSGSTPGQVPGSSALSSPRRSLGLALTHSFGPSLADTDLSPMDGISTCGPKEEVTLRVVVRMPPQHIIKGDLKQQEFFLGCSKVSGKVDWKMLDEAVFQVFKDYISKMDPASTLGLSTESIHGYSISHVKRVLDAEPPEMPPCRRGVNNISVSLKGLKEKCVDSLVFETLIPKPMMQHYISLLLKHRRLVLSGPSGTGKTYLTNRLAEYLVERSGREVTEGIVSTFNMHQQSCKDLQLYLSNLANQIDRETGIGDVPLVILLDDLSEAGSISELVNGALTCKYHKCPYIIGTTNQPVKMTPNHGLHLSFRMLTFSNNVEPANGFLVRYLRRKLVESDSDINANKEELLRVLDWVPKLWYHLHTFLEKHSTSDFLIGPCFFLSCPIGIEDFRTWFIDLWNNSIIPYLQEGAKDGIKVHGQKAAWEDPVEWVRDTLPWPSAQQDQSKLYHLPPPTVGPHSIASPPEDRTVKDSTPSSLDSDPLMAMLLKLQEAANYIESPDRETILDPNLQATL

SEQ ID NO: 5385 - protein, 1877 aa, Homo sapiens
MLGSSVKSVQPEVELSSGGGDEGADEPRGAGRKAAAADGRGMLPKRAKAPGGGGGMAKASAAELKVFKSGSVDSRVPGGPPASNLRKQKSLTNLSFLTDSEKKLQLYEPEWSDDMAKAPKGLGKVGSKGREAPLMSKTLSKSEHSLFQAKGSPAGGAKTPLAPLAPNLGKPSRIPRGPYAEVKPLSKAPEAAVSEDGKSDDELLSSKAKAQKSSGPVPSAKGQEERAFLKVDPELVVTVLGDLEQLLFSQMLDPESQRKRTVQNVLDLRQNLEETMSSLRGSQVTHSSLEMTCYDSDDANPRSVSSLSNRSSPLSWRYGQSSPRLQAGDAPSVGGSCRSEGTPAWYMHGERAHYSHTMPMRSPSKLSHISRLELVESLDSDEVDLKSGYMSDSDLMGKTMTEDDDITTGWDESSSISSGLSDASDNLSSEEFNASSSLNSLPSTPTASRRNSTIVLRTDSEKRSLAESGLSWFSESEEKAPKKLEYDSGSLKMEPGTSKWRRERPESCDDSSKGGELKKPISLGHPGSLKKGKTPPVAVTSPITHTAQSALKVAGKPEGKATDKGKLAVKNTGLQRSSSDAGRDRLSDAKKPPSGIARPSTSGSFGYKKPPPATGTATVMQTGGSATLSKIQKSSGIPVKPVNGRKTSLDVSNSAEPGFLAPGARSNIQYRSLPRPAKSSSMSVTGGRGGPRPVSSSIDPSLLSTKQGGLTPSRLKEPTKVASGRTTPAPVNQTDREKEKAKAKAVALDSDNISLKSIGSPESTPKNQASHPTATKLAELPPTPLRATAKSFVKPPSLANLDKVNSNSLDLPSSSDTTHASKVPDLHATSSASGGPLPSCFTPSPAPILNINSASFSQGLELMSGFSVPKETRMYPKLSGLHRSMESLQMPMSLPSAFPSSTPVPTPPAPPAAPTEEETEELTWSGSPRAGQLDSNQRDRNTLPKKGLRYQLQSQEETKERRHSHTIGGLPESDDQSELPSPPALPMSLSAKGQLTNIVSPTAATTPRITRSNSIPTHEAAFELYSGSQMGSTLSLAERPKGMIRSGSFRDPTDDVHGSVLSLASSASSTYSSAEERMQSEQIRKLRRELESSQEKVATLTSQLSANANLVAAFEQSLVNMTSRLRHLAETAEEKDTELLDLRETIDFLKKKNSEAQAVIQGALNASETTPKELRIKRQNSSDSISSLNSITSHSSIGSSKDADAKKKKKKSWVYELRSSFNKAFSIKKGPKSASSYSDIEEIATPDSSAPSSPKLQHGSTETASPSIKSSTSSSVGTDVTEGPAHPAPHTRLFHANEEEEPEKKEVSELRSELWEKEMKLTDIRLEALNSAHQLDQLRETMHNMQLEVDLLKAENDRLKVAPGPSSGSTPGQVPGSSALSSPRRSLGLALTHSFGPSLADTDLSPMDGISTCGPKEEVTLRVVVRMPPQHIIKGDLKQQEFFLGCSKVSGKVDWKMLDEAVFQVFKDYISKMDPASTLGLSTESIHGYSISHVKRVLDAEPPEMPPCRRGVNNISVSLKGLKEKCVDSLVFETLIPKPMMQHYISLLLKHRRLVLSGPSGTGKTYLTNRLAEYLVERSGREVTEGIVSTFNMHQQSCKDLQLYLSNLANQIDRETGIGDVPLVILLDDLSEAGSISELVNGALTCKYHKCPYIIGTTNQPVKMTPNHGLHLSFRMLTFSNNVEPANGFLVRYLRRKLVESDSDINANKEELLRVLDWVPKLWYHLHTFLEKHSTSDFLIGPCFFLSCPIGIEDFRTWFIDLWNNSIIPYLQEGAKDGIKVHGQKAAWEDPVEWVRDTLPWPSAQQDQSKLYHLPPPTVGPHSIASPPEDRTVKDSTPSSLDSDPLMAMLLKLQEAANYIESPDRETILDPNLQATL

SEQ ID NO: 5386 - protein, 1830 aa, Homo sapiens
MDARIVHALLAGRMLGSSVKSVQPEVELSSGGGDEGADEPRGAGRKAAAADGRGMLPKRAKAPGGGGGMAKASAAELKVFKSGSVDSRVPGGPPASNLRKQKSLTNLSFLTDSEKKLQLYEPEWSDDMAKAPKGLGKVGSKGREAPLMSKTLSKSEHSLFQAKGSPAGGAKTPLAPLAPNLGKPSRIPRGPYAEVKPLSKAPEAAVSEDGKSDDELLSSKAKAQKSSGPVPSAKGQEERAFLKVDPELVVTVLGDLEQLLFSQMLDPESQRKRTVQNVLDLRQNLEETMSSLRGSQVTHSSLEMTCYDSDDANPRSVSSLSNRSSPLSWRYGQSSPRLQAGDAPSVGGSCRSEGTPAWYMHGERAHYSHTMPMRSPSKLSHISRLELVESLDSDEVDLKSGYMSDSDLMGKTMTEDDDITTGWDESSSISSGLSDASDNLSSEEFNASSSLNSLPSTPTASRRNSTIVLRTDSEKRSLAESGLSWFSESEEKAPKKLEYDSGSLKMEPGTSKWRRERPESCDDSSKGGELKKPISLGHPGSLKKGKTPPVAVTSPITHTAQSALKVAGKPEGKATDKGKLAVKNTGLQRSSSDAGRDRLSDAKKPPSGIARPSTSGSFGYKKPPPATGTATVMQTGGSATLSKIQKSSGIPVKPVNGRKTSLDVSNSAEPGFLAPGARSNIQYRSLPRPAKSSSMSVTGGRGGPRPVSSSIDPSLLSTKQGGLTPSRLKEPTKVASGRTTPAPVNQTDREKEKAKAKAVALDSDNISLKSIGSPESTPKNQASHPTATKLAELPPTPLRATAKSFVKPPSLANLDKVNSNSLDLPSSSDTTHASKVPDLHATSSASGGPLPSCFTPSPAPILNINSASFSQGLELMSGFSVPKETRMYPKLSGLHRSMESLQMPMSLPSAFPSSTPVPTPPAPPAAPTEEETEELTWSGSPRAGQLDSNQRDRNTLPKKGLRYQLQSQEETKERRHSHTIGGLPESDDQSELPSPPALPMSLSAKGQLTNIVHGSVLSLASSASSTYSSAEERMQSEQIRKLRRELESSQEKVATLTSQLSANANLVAAFEQSLVNMTSRLRHLAETAEEKDTELLDLRETIDFLKKKNSEAQAVIQGALNASETTPKELRIKRQNSSDSISSLNSITSHSSIGSSKDADAKKKKKKSWLRSSFNKAFSIKKGPKSASSYSDIEEIATPDSSAPSSPKLQHGSTETASPSIKSSTSSSVGTDVTEGPAHPAPHTRLFHANEEEEPEKKEVSELRSELWEKEMKLTDIRLEALNSAHQLDQLRETMHNMQLEVDLLKAENDRLKVAPGPSSGSTPGQVPGSSALSSPRRSLGLALTHSFGPSLADTDLSPMDGISTCGPKEEVTLRVVVRMPPQHIIKGDLKQQEFFLGCSKVSGKVDWKMLDEAVFQVFKDYISKMDPASTLGLSTESIHGYSISHVKRVLDAEPPEMPPCRRGVNNISVSLKGLKEKCVDSLVFETLIPKPMMQHYISLLLKHRRLVLSGPSGTGKTYLTNRLAEYLVERSGREVTEGIVSTFNMHQQSCKDLQLYLSNLANQIDRETGIGDVPLVILLDDLSEAGSISELVNGALTCKYHKCPYIIGTTNQPVKMTPNHGLHLSFRMLTFSNNVEPANGFLVRYLRRKLVESDSDINANKEELLRVLDWVPKLWYHLHTFLEKHSTSDFLIGPCFFLSCPIGIEDFRTWFIDLWNNSIIPYLQEGAKDGIKVHGQKAAWEDPVEWVRDTLPWPSAQQDQSKLYHLPPPTVGPHSIASPPEDRTVKDSTPSSLDSDPLMAMLLKLQEAANYIESPDRETILDPNLQATL

SEQ ID NO: 5387 - protein, 275 aa, Homo sapiens
MGTRLPLVLRQLRRPPQPPGPPRRLRVPCRASSGGGGGGGGGREGLLGQRRPQDGQARSSCSPGGRTPAARDSIVREVIQNSKEVLSLLQEKNPAFKPVLAIIQAGDDNLMQEINQNLAEEAGLNITHICLPPDSSEAEIIDEILKINEDTRVHGLALQISENLFSNKVLNALKPEKDVDGVTDINLGKLVRGDAHECFVSPVAKAVIELLEKSGVNLDGKKILVVGAHGSLEAALQCLFQRKGSMTMSIQWKTRQLQSKTESRSVTRLECRRVI

SEQ ID NO: 5388 - protein, 331 aa, Homo sapiens
GREGLLGQRRPQDGQARSSCSPGGRTPAARDSIVREVIQNSKEVLSLLQEKNPAFKPVLAIIQAGDDNLMQEINQNLAEEAGLNITHICLPPDSSEAEIIDEILKINEDTRVHGLALQISENLFSNKVLNALKPEKDVDGVTDINLGKLVRGDAHECFVSPVAKAVIELLEKSVGVNLDGKKILVVGAHGSLEAALQCLFQRKGSMTMSIQWKTRQLQSKLHEADIVVLGSPKPEEIPLTWIQPGTTVLNCSHDFLSGKVGCGSPRIHFGGLIEEDDVILLAAALRIQNMVSSGRRWLREQQHRRWRLHCLKLQPLSPVPSDIEISRGQTP

SEQ ID NO: 5389 - protein, 127 aa, Homo sapiens
MTAAATATVLKEGVLEKRSGGLLQLWKRKRCVLTERGLQLFEAKGTGGRPKELSFARIKAVECVESTGRHIYFTLVTEGGGEIDFRCPLEDPGWNAQITLGLVKFKNQQAIQTVRARQSLGTGTLVS

SEQ ID NO: 5390 - protein, 978 aa, Homo sapiens
MGTRLPLVLRQLRRPPQPPGPPRRLRVPCRASSGGGGGGGGGREGLLGQRRPQDGQARSSCSPGGRTPAARDSIVREVIQNSKEVLSLLQEKNPAFKPVLAIIQAGDDNLMQEINQNLAEEAGLNITHICLPPDSSEAEIIDEILKINEDTRVHGLALQISENLFSNKVLNALKPEKDVDGVTDINLGKLVRGDAHECFVSPVAKAVIELLEKSGVNLDGKKILVVGAHGSLEAALQCLFQRKGSMTMSIQWKTRQLQSKLHEADIVVLGSPKPEEIPLTWIQPGTTVLNCSHDFLSGKVGCGSPRIHFGGLIEEDDVILLAAALRIQNMVSSGRRWLREQQHRRWRLHCLKLQPLSPVPSDIEISRGQTPKAVDVLAKEIGLLADEIEIYGKSKAKVRLSVLERLKDQADGKYVLVAGITPTPLGEGKSTVTIGLVQALTAHLNVNSFACLRQPSQGPTFGVKGGAAGGGYAQVIPMEEFNLHLTGDIHAITAANNLLAAAIDTRILHENTQTDKALYNRLVPLVNGVREFSEIQLARLKKLGINKTDPSTLTEEEVSKFARLDIDPSTITWQRVLDTNDRFLRKITIGQGNTEKGHYRQAQFDIAVASEIMAVLALTDSLADMKARLGRMVVASDKSGQPVTADDLGVTGALTVLMKDAIKPNLMQTLEGTPVFVHAGPFANIAHGNSSVLADKIALKLVGEEGFVVTEAGFGADIGMEKFFNIKCRASGLVPNVVVLVATVRALKMHGGGPSVTAGVPLKKEYTEENIQLVADGCCNLQKQIQITQLFGVPVVVALNVFKTDTRAEIDLVCELAKRAGAFDAVPCYHWSVGGKGSVDLARAVREAASKRSRFQFLYDVQVPIVDKIRTIAQAVYGAKDIELSPEAQAKIDRYTQQGFGNLPICMAKTHLSLSHQPDKKGVPRDFILPISDVRASIGAGFIYPLVGTMSTMPGLPTRPCFYDIDLDTETEQVKGLF

SEQ ID NO: 5391 - protein, 1648 aa, Homo sapiens
MSLHSTHNRNNSGDILDIPSSQNSSSLNALTHSSRLKLHLKSDMSECENDDPLLRSAGKVRDINRTYVISASRKTADMPLTPNPVGRLALQRRTTRNKESSLLVSELEDTTEKTAETRLTLQRRAKTDSAEKWKTAEIDSVKMTLNVGGETENNGVSKESRTNVRIVNNAKNSFVASSVPLDEDPQVIEMMADKKYKETFSAPSRANENVALKYSSNRPPIASLSQTEVVRSGHLTTKPTQSKLDIKVLGTGNLYHRSIGKEIAKTSNKFGSLEKRTPTKCTTEHKLTTKCSLPQLKSPAPSILKNRMSNLQVKQRPKSSFLANKQERSAENTILPEEETVVQNTSAGKDPLKVENSQVTVAVRVRPFTKREKIEKASQVVFMSGKEITVEHPDTKQVYNFIYDVSFWSFDECHPHYASQTTVYEKLAAPLLERAFEGFNTCLFAYGQTGSGKSYTMMGFSEEPGIIPRFCEDLFSQVARKQTQEVSYHIEMSFFEVYNEKIHDLLVCKDENGQRKQPLRVREHPVYGPYVEALSMNIVSSYADIQSWLELGNKQRATAATGMNDKSSRSHSVFTLVMTQTKTEFVEGEEHDHRITSRINLIDLAGSERCSTAHTNGDRLKEGVSINKSLLTLGKVISALSEQANQRSVFIPYRESVLTWLLKESLGGNSKTAMIATISPAASNIEETLSTLRYANQARLIVNIAKVNEDMNAKLIRELKAEIAKLKAAQRNSRNIDPERYRLCRQEITSLRMKLHQQERDMAEMQRVWKEKFEQAEKRKLQETKELQKAGIMFQMDNHLPNLVNLNEDPQLSEMLLYMIKEGTTTVGKYKPNSSHDIQLSGVLIADDHCTIKNFGGTVSIIPVGEAKTYVNGKHILEITVLRHGDRVILGGDHYFRFNHPVEVQKGKRPSGRDTPISEGPKDFEFAKNELLMAQRSQLEAEIKEAQLKAKEEMMQGIQIAKEMAQQELSSQKAAYESKIKALEAELREESQRKKMQEINNQKANHKIEELEKAKQHLEQEIYVNKKRLEMETLATKQALEDHSIRHARILEALETEKQKIAKEVQILQQNRNNRDKTFTVQTTWSSMKLSMMIQEANAISSKLKTYYVFGRHDISDKSSSDTSIRVRNLKLGISTFWSLEKFESKLAAMKELYESNGSNRGEDAFCDPEDEWEPDITDAPVSSLSRRRSRSLMKNRRISGCLHDIQVHPIKNLHSSHSSGLMDKSSTIYSNSAESFLPGICKELIGSSLDFFGQSYDEERTIADSLINSFLKIYNGLFAISKAHEEQDEESQDNLFSSDRAIQSLTIQTACAFEQLVVLMKHWLSDLLPCTNIARLEDELRQEVKKLGGYLQLFLQGCCLDISSMIKEAQKNAIQIVQQAVKYVGQLAVLKGSKLHFLENGNNKAASVQEEFMDAVCDGVGLGMKILLDSGLEKAKELQHELFRQCTKNEVTKEMKTNAMGLIRSLENIFAESKIKSFRRQVQEENFEYQDFKRMVNRAPEFLKLKHCLEKAIEIIISALKGCHSDINLLQTCVESIRNLASDFYSDFSVPSTSVGSYESRVTHIVHQELESLAKSLLFCFESEESPDLLKPWETYNQNTKEEHQQSKSSGIDGSKNKGVPKRVYELHGSSPAVSSEECTPSRIQWV

SEQ ID NO: 5392 - protein, 1142 aa, Homo sapiens
MSLRAYTARCRLNRLRRAACRLFTSEKMVKAIKKLEIEIEARRLIVRKDRHLWKDVGERQKVLNWLLSYNPLWLRIGLETTYGELISLEDNSDVTGLAMFILNRLLWNPDIAAEYRHPTVPHLYRDGHEEALSKFTLKKLLLLVCFLDYAKISRLIDHDPCLFCKDAEFKASKEILLAFSRDFLSGEGDLSRHLGLLGLPVNHVQTPFDEFDFAVTNLAVDLQCGVRLVRTMELLTQNWDLSKKLRIPAISRLQKMHNVDIVLQVLKSRGIELSDEHGNTILSKDIVDRHREKTLRLLWKIAFAFQVDISLNLDQLKEEIAFLKHTKSIKKTISLLSCHSDDLINKKKGKRDSGSFEQYSENIKLLMDWVNAVCAFYNKKVENFTVSFSDGRVLCYLIHHYHPCYVPFDAICQRTTQTVECTQTGSVVLNSSSESDDSSLDMSLKAFDHENTSELYKELLENEKKNFHLVRSAVRDLGGIPAMINHSDMSNTIPDEKVVITYLSFLCARLLDLRKEIRAARLIQTTWRKYKLKTDLKRHQEREKAARIIQLAVINFLAKQRLRKRVNAALVIQKYWRRVLAQRKLLMLKKEKLEKVQNKAASLIQAMWRRYRAKKYLCKVKAACKIQAWYRCWRAHKEYLAILKAVKIIQGCFYTKLERTRFLNVRASAIIIQRKWRAILPAKIAHEHFLMIKRHRAACLIQAHYRGYKGRQVFLRQKSAALIIQKYIRAREAGKHERIKYIEFKKSTVILQALVRGWLVRKRFLEQRAKIRLLHFTAAAYYHLNAVRIQRAYKLYLAVKNANKQVNSVICIQRWFRARLQEKRFIQKYHSIKKIEHEGQECLSQRNRAASVIQKAVRHFLLRKKQEKFTSGIIKIQALWRGYSWRKKNDCTKIKAIRLSLQVVNREIREENKLYKRTALALHYLLTYKHLSAILEALKHLEVVTRLSPLCCENMAQSGAISKIFVLIRSCNRSIPCMEVIRYAVQVLLNVSKYEKTTSAVYDVENCIDILLELLQIYREKPGNKVADKGGSIFTKTCCLLAILLKTTNRASDVRSRSKVVDRIYSLYKLTAHKHKMNTERILYKQKKNSSISIPFIPETPVRTRIVSRLKPDWVLRRDNMEEITNPLQAIQMVMDTLGIPY

SEQ ID NO: 5393 - protein, 3477 aa, Homo sapiens
MANRRVGRGCWEVSPTERRPPAGLRGPAAEEEASSPPVLSLSHFCRSPFLCFGDVLLGASRTLSLALDNPNEEVAEVKISHFPAADLGFSVSQRCFVLQPKEKIVISVNWTPLKEGRVREIMTFLVNDVLKHQAILLGNAEEQKKKKRSLWDTIKKKKISASTSHNRRVSNIQNVNKTFSVSQKVDRVRSPLQACENLAMNEGGPPTENNSLILEENKIPISPISPAFNECHGATCLPLSVRRSTTYSSLHASENRELLNVHSANVSKVSFNEKAVTETSFNSVNVNGQRGENSKLSLTPNCSSTLNITQSQIHFLSPDSFVNNSHGANNELELVTCLSSDMFMKDNSQPVHLESTIAHEIYQKILSPDSFIKDNYGLNQDLESESVNPILSPNQFLKDNMAYMCTSQQTCKVPLSNENSQVPQSPEDWRKSEVSPRIPECQGSKSPKAIFEELVEMKSNYYSFIKQNNPKFSAVQDISSHSHNKQPKRRPILSATVTKRKATCTRENQTEINKPKAKRCLNSAVGEHEKVINNQKEKEDFHSYLPIIDPILSKSKSYKNEVTPSSTTASVARKRKSDGSMEDANVRVAITEHTEVREIKRIHFSPSEPKTSAVKKTKNVTTPISKRISNREKLNLKKKTDLSIFRTPISKTNKRTKPIIAVAQSSLTFIKPLKTDIPRHPMPFAAKNMFYDERWKEKQEQGFTWWLNFILTPDDFTVKTNISEVNAATLLLGIENQHKISVPRAPTKEEMSLRAYTARCRLNRLRRAACRLFTSEKMVKAIKKLEIEIEARRLIVRKDRHLWKDVGERQKVLNWLLSYNPLWLRIGLETTYGELISLEDNSDVTGLAMFILNRLLWNPDIAAEYRHPTVPHLYRDGHEEALSKFTLKKLLLLVCFLDYAKISRLIDHDPCLFCKDAEFKASKEILLAFSRDFLSGEGDLSRHLGLLGLPVNHVQTPFDEFDFAVTNLAVDLQCGVRLVRTMELLTQNWDLSKKLRIPAISRLQKMHNVDIVLQVLKSRGIELSDEHGNTILSKDIVDRHREKTLRLLWKIAFAFQVDISLNLDQLKEEIAFLKHTKSIKKTISLLSCHSDDLINKKKGKRDSGSFEQYSENIKLLMDWVNAVCAFYNKKVENFTVSFSDGRVLCYLIHHYHPCYVPFDAICQRTTQTVECTQTGSVVLNSSSESDDSSLDMSLKAFDHENTSELYKELLENEKKNFHLVRSAVRDLGGIPAMINHSDMSNTIPDEKVVITYLSFLCARLLDLRKEIRAARLIQTTWRKYKLKTDLKRHQEREKAARIIQLAVINFLAKQRLRKRVNAALVIQKYWRRVLAQRKLLMLKKEKLEKVQNKAASLIQGYWRRYSTRQRFLKLKYYSIILQSRIRMIIAVTSYKRYLWATVTIQRHWRAYLRRKQDQQRYEMLKSSTLIIQSMFRKWKQRKMQSQVKATVILQRAFREWHLRKQAKEENSAIIIQSWYRMHKELRKYIYIRSCVVIIQKRFRCFQAQKLYKRRKESILTIQKYYKAYLKGKIERTNYLQKRAAAIQLQAAFRRLKAHNLCRQIRAACVIQSYWRMRQDRVRFLNLKKTIIKFQAHVRKHQQRQKYKKMKKAAVIIQTHFRAYIFAMKVLASYQKTRSAVIVLQSAYRGMQARKMYIHILTSVIKIQSYYRAYVSKKEFLSLKNATIKLQSTVKMKQTRKQYLHLRAAALFIQQCYRSKKIAAQKREEYMQMRESCIKLQAFVRGYLVRKQMRLQRKAVISLQSYFRMRKARQYYLKMYKAIIVIQNYYHAYKAQVNQRKNFLQVKKAATCLQAAYRGYKVRQLIKQQSIAALKIQSAFRGYNKRVKYQSVLQSIIKIQRWYRAYKTLHDTRTHFLKTKAAVISLQSAYRGWKVRKQIRREHQAALKIQSAFRMAKAQKQFRLFKTAALVIQQNFRAWTAGRKQCMEYIELRHAVLVLQSMWKGKTLRRQLQRQHKCAIIIQSYYRMHVQQKKWKIMKKAALLIQKYYRAYSIGREQNHLYLKTKAAVVTLQSAYRGMKVRKRIKDCNKAAVTIQSKYRAYKTKKKYATYRASAIIIQRWYRGIKITNHQHKEYLNLKKTAIKIQSVYRGIRVRRHIQHMHRAATFIKAMFKMHQSRISYHTMRKAAIVIQVRCRAYYQGKMQREKYLTILKAVKVLQASFRGVRVRRTLRKMQTAATLIQSNYRRYRQQTYFNKLKKITKTVQQRYWAMKERNIQFQRYNKLRHSVIYIQAIFRGKKARRHLKMMHIAATLIQRRFRTLMMRRRFLSLKKTAILIQRKYRAHLCTKHHLQFLQVQNAVIKIQSSYRRWMIRKRMREMHRAATFIQSTFRMHRLHMRYQALKQASVVIQQQYQANRAAKLQRQHYLRQRHSAVILQAAFRGMKTRRHLKSMHSSATLIQSRFRSLLVRRRFISLKKATIFVQRKYRATICAKHKLYQFLHLRKAAITIQSSYRRLMVKKKLQEMQRAAVLIQATFRMYRTYITFQTWKHASILIQQHYRTYRAAKLQRENYIRQWHSAVVIQAAYKGMKARQLLREKHKASIVIQSTYRMYRQYCFYQKLQWATKIIQEKYRANKKKQKVFQHNELKKETCVQAGFQDMNIKKQIQEQHQAAIIIQKHCKAFKIRKHYLHLRATVVSIQRRYRKLTAVRTQAVICIQSYYRGFKVRKDIQNMHRAATLIQSFYRMHRAKVDYETKKTAIVVIQNYYRLYVRVKTERKNFLAVQKSVRTIQAAFRGMKVRQKLKNVSEEKMAAIVNQSALCCYRSKTQYEAVQSEGVMIQEWYKASGLACSQEAEYHSQSRAAVTIQKAFCRMVTRKLETQKCAALRIQFFLQMAVYRRRFVQQKRAAITLQHYFRTWQTRKQFLLYRKAAVVLQNHYRAFLSAKHQRQVYLQIRSSVIIIQARSKGFIQKRKFQEIKNSTIKIQAMWRRYRAKKYLCKVKAACKIQAWYRCWRAHKEYLAILKAVKIIQGCFYTKLERTRFLNVRASAIIIQRKWRAILPAKIAHEHFLMIKRHRAACLIQAHYRGYKGRQVFLRQKSAALIIQKYIRAREAGKHERIKYIEFKKSTVILQALVRGWLVRKRFLEQRAKIRLLHFTAAAYYHLNAVRIQRAYKLYLAVKNANKQVNSVICIQRWFRARLQEKRFIQKYHSIKKIEHEGQECLSQRNRAASVIQKAVRHFLLRKKQEKFTSGIIKIQALWRGYSWRKKNDCTKIKAIRLSLQVVNREIREENKLYKRTALALHYLLTYKHLSAILEALKHLEVVTRLSPLCCENMAQSGAISKIFVLIRSCNRSIPCMEVIRYAVQVLLNVSKYEKTTSAVYDVENCIDILLELLQIYREKPGNKVADKGGSIFTKTCCLLAILLKTTNRASDVRSRSKVVDRIYSLYKLTAHKHKMNTERILYKQKKNSSISIPFIPETPVRTRIVSRLKPDWVLRRDNMEEITNPLQAIQMVMDTLGIPY

SEQ ID NO: 5394 - protein, 209 aa, Homo sapiens
MRAAAISTPKLDKMPGMFFSANPKELKGTTHSLLDDKMQKRRPKTFGMDMKAYLRSMIPHLESGMKSSKSKDVLSAAEVMQWSQSLEKLLANQTGQNVFGSFLKSEFSEENIEFWLACEDYKKTESDLLPCKAEEIYKAFVHSDAAKQINIDFRTRESTAKKIKAPTPTCFDEAQKVIYTLMEKDSYPRFLKSDIYLNLLNDLQANSLK

SEQ ID NO: 5395 - protein, 250 aa, Homo sapiens
IGLMSLSKGLLEEKYRYLFKEVAGPTEMCDQRQLGLLLHDAIQIPRQLGEVAAFGGSNIEPSVRSCFQQNNNKPEISVKEFIDWMHLEPQSMVWLPVLHRVAAAETAKHQAKCNICKECPIVGFRYRSLKHFNYDVCQSCFFSGRTAKGHKLHYPMVEYCIPTTSGEDVRDFTKVLKNKFRSKKYFAKHPRLGYLPVQTVLEGDNLETPSQSPQLFHDDTHSRIEQYATRLAQMERTNGSFLTDSSSTTG

SEQ ID NO: 5396 - protein, 66 aa, Homo sapiens
MIGLNFNLRELLTKFEKDIQAEIDAHNDIFKSIDGNRQKMVKALGNSEEATMLQHRLDDMNQRWND

SEQ ID NO: 5397 - protein, 988 aa, Homo sapiens
MQILRCLQKCGKLKMMAVVRTSLQKVVVLLHRLQRMAVSSPRYQKLCKDIQAEIDAHNDIFKSIDGNRQKMVKALGNSEEATMLQHRLDDMNQRWNDLKAKSASIRAHLEASAEKWNRLLMSLEELIKWLNMKDEELKKQMPIGGDVPALQLQYDHCKALRRELKEKEYSVLNAVDQARVFLADQPIEAPEEPRRNLQSKTELTPEERAQKIAKAMRKQSSEVKEKWESLNAVTSNWQKQVDKALEKLRDLQGAMDDLDADMKEAESVRNGWKPVGDLLIDSLQDHIEKIMAFREEIAPINFKVKTVNDLSSQLSPLDLHPSLKMSRQLDDLNMRWKLLQVSVDDRLKQLQEAHRDFGPSSQHFLSTSVQLPWQRSISHNKVPYYINHQTQTTCWDHPKMTELFQSLADLNNVRFSAYRTAIKIRRLQKALCLDLLELSTTNEIFKQHKLNQNDQLLSVPDVINCLTTTYDGLEQMHKDLVNVPLCVDMCLNWLLNVYDTGRTGKIRVQSLKIGLMSLSKGLLEEKYRYLFKEVAGPTEMCDQRQLGLLLHDAIQIPRQLGEVAAFGGSNIEPSVRSCFQQNNNKPEISVKEFIDWMHLEPQSMVWLPVLHRVAAAETAKHQAKCNICKECPIVGFRYRSLKHFNYDVCQSCFFSGRTAKGHKLHYPMVEYCIPTTSGEDVRDFTKVLKNKFRSKKYFAKHPRLGYLPVQTVLEGDNLETPITLISMWPEHYDPSQSPQLFHDDTHSRIEQYATRLAQMERTNGSFLTDSSSTTGSVEDEHALIQQYCQTLGGESPVSQPQSPAQILKSVEREERGELERIIADLEEEQRNLQVEYEQLKDQHLRRGLPVGSPPESIISPHHTSEDSELIAEAKLLRQHKGRLEARMQILEDHNKQLESQLHRLRQLLEQPESDSRINGVSPWASPQHSALSYSLDPDASGPQFHQAAGEDLLAPPHDTSTDLTEVMEQIHSTFPSCCPNVPSRPQAM

SEQ ID NO: 5398 - protein, 526 aa, Homo sapiens
MSLVEAISLWNEGVLAADKKDWKGALDAFSAVQDPHSRICFNIGCMYTILKNMTEAEKAFTRSINRDKHLAVAYFQRGMLYYQTEKYDLAIKDLKEALIQLRGNQLIDYKILGLQFKLFACEVLYNIAFMYAKKEEWKKAEEQLALATSMKSEPRHSKIDKAMECVWKQKLYEPVVIPVGKLFRPNERQVAQLAKKDYLGKATVVASVVDQDSFSGFAPLQPQAAEPPPRPKTPEIFRALEGEAHRVLFGFVPETKEELQVMPGNIVFVLKKGNDNWATVMFNGQKGLVPCNYLEPVELRIHPQQQPQEESSPQSDIPAPPSSKAPGRPQLSPGQKQKEEPKEVKLSVPMPYTLKVHYKYTVVMKTQPGLPYSQVRDMVSKKLELRLEHTKLSYRPRDSNELVPLSEDSMKDAWGQVKNYCLTLWCENTVGDQGFPDEPKESEKADANNQTTEPQLKKGSQVEALFSYEATQPEDLEFQEGDIILVLSKVNEEWLEGECKGKVGIFPKVFVEDCATTDLESTRREV

SEQ ID NO: 5399 - protein, 3433 aa, Homo sapiens
MAKYGEHEASPDNGQNEFSDIIKSRSDEHNDVQKKTFTKWINARFSKSGKPPINDMFTDLKDGRKLLDLLEGLTGTSLPKERGSTRVHALNNVNRVLQVLHQNNVELVNIGGTDIVDGNHKLTLGLLWSIILHWQVKDVMKDVMSDLQQTNSEKILLSWVRQTTRPYSQVNVLNFTTSWTDGLAFNAVLHRHKPDLFSWDKVVKMSPIERLEHAFSKAQTYLGIEKLLDPEDVAVQLPDKKSIIMYLTSLFEVLPQQVTIDAIREVETLPRKYKKECEEEAINIQSTAPEEEHESPRAETPSTVTEVDMDLDSYQIALEEVLTWLLSAEDTFQEQDDISDDVEEVKDQFATHEAFMMELTAHQSSVGSVLQAGNQLITQGTLSDEEEFEIQEQMTLLNARWEALRVESMDRQSRLHDVLMELQKKQLQQLSAWLTLTEERIQKMETCPLDDDVKSLQKLLEEHKSLQSDLEAEQVKVNSLTHMVVIVDENSGESATAILEDQLQKLGERWTAVCRWTEERWNRLQEINILWQELLEEQCLLKAWLTEKEEALNKVQTSNFKDQKELSVSVRRLAILKEDMEMKRQTLDQLSEIGQDVGQLLDNSKASKKINSDSEELTQRWDSLVQRLEDSSNQVTQAVAKLGMSQIPQKDLLETVRVREQAITKKSKQELPPPPPPKKRQIHVDIEAKKKFDAISAELLNWILKWKTAIQTTEIKEYMKMQDTSEMKKKLKALEKEQRERIPRADELNQTGQILVEQMGKEGLPTEEIKNVLEKVSSEWKNVSQHLEDLERKIQLQEDINAYFKQLDELEKVIKTKEEWVKHTSISESSRQSLPSLKDSCQRELTNLLGLHPKIEMARASCSALMSQPSAPDFVQRGFDSFLGRYQAVQEAVEDRQQHLENELKGQPGHAYLETLKTLKDVLNDSENKAQVSLNVLNDLAKVEKALQEKKTLDEILENQKPALHKLAEETKALEKNVHPDVEKLYKQEFDDVQGKWNKLKVLVSKDLHLLEEIALTLRAFEADSTVIEKWMDGVKDFLMKQQAAQGDDAGLQRQLDQCSAFVNEIETIESSLKNMKEIETNLRSGPVAGIKTWVQTRLGDYQTQLEKLSKEIATQKSRLSESQEKAANLKKDLAEMQEWMTQAEEEYLERDFEYKSPEELESAVEEMKRAKEDVLQKEVRVKILKDNIKLLAAKVPSGGQELTSELNVVLENYQLLCNRIRGKCHTLEEVWSCWIELLHYLDLETTWLNTLEERMKSTEVLPEKTDAVNEALESLESVLRHPADNRTQIRELGQTLIDGGILDDIISEKLEAFNSRYEDLSHLAESKQISLEKQLQVLRETDQMLQVLQESLGELDKQLTTYLTDRIDAFQVPQEAQKIQAEISAHELTLEELRRNMRSQPLTSPESRTARGGSQMDVLQRKLREVSTKFQLFQKPANFEQRMLDCKRVLDGVKAELHVLDVKDVDPDVIQTHLDKCMKLYKTLSEVKLEVETVIKTGRHIVQKQQTDNPKGMDEQLTSLKVLYNDLGAQVTEGKQDLERASQLARKMKKEAASLSEWLSATETELVQKSTSEGLLGDLDTEISWAKNVLKDLEKRKADLNTITESSAALQNLIEGSEPILEERLCVLNAGWSRVRTWTEDWCNTLMNHQNQLEIFDGNVAHISTWLYQAEALLDEIEKKPTSKQEEIVKRLVSELDDANLQVENVRDQALILMNARGSSSRELVEPKLAELNRNFEKVSQHIKSAKLLIAQEPLYQCLVTTETFETGVPFSDLEKLENDIENMLKFVEKHLESSDEDEKMDEESAQIEEVLQRGEEMLHQPMEDNKKEKIRLQLLLLHTRYNKIKAIPIQQRKMGQLASGIRSSLLPTDYLVEINKILLCMDDVELSLNVPELNTAIYEDFSFQEDSLKNIKDQLDKLGEQIAVIHEKQPDVILEASGPEAIQIRDTLTQLNAKWDRINRMYSDRKGCFDRAMEEWRQFHCDLNDLTQWITEAEELLVDTCAPGGSLDLEKARIHQQELEVGISSHQPSFAALNRTGDGIVQKLSQADGSFLKEKLAGLNQRWDAIVAEVKDRQPRLKGESKQVMKYRHQLDEIICWLTKAEHAMQKRSTTELGENLQELRDLTQEMEVHAEKLKWLNRTELEMLSDKSLSLPERDKISESLRTVNMTWNKICREVPTTLKECIQEPSSVSQTRIAAHPNVQKVVLVSSASDIPVQSHRTSEISIPADLDKTITELADWLVLIDQMLKSNIVTVGDVEEINKTVSRMKITKADLEQRHPQLDYVFTLAQNLKNKASSSDMRTAITEKLERVKNQWDGTQHGVELRQQQLEDMIIDSLQWDDHREETEELMRKYEARLYILQQARRDPLTKQISDNQILLQELGPGDGIVMAFDNVLQKLLEEYGSDDTRNVKETTEYLKTSWINLKQSIADRQNALEAEWRTVQASRRDLENFLKWIQEAETTVNVLVDASHRENALQDSILARELKQQMQDIQAEIDAHNDIFKSIDGNRQKMVKALGNSEEATMLQHRLDDMNQRWNDLKAKSASIRAHLEASAEKWNRLLMSLEELIKWLNMKDEELKKQMPIGGDVPALQLQYDHCKALRRELKEKEYSVLNAVDQARVFLADQPIEAPEEPRRNLQSKTELTPEERAQKIAKAMRKQSSEVKEKWESLNAVTSNWQKQVDKALEKLRDLQGAMDDLDADMKEAESVRNGWKPVGDLLIDSLQDHIEKIMAFREEIAPINFKVKTVNDLSSQLSPLDLHPSLKMSRQLDDLNMRWKLLQVSVDDRLKQLQEAHRDFGPSSQHFLSTSVQLPWQRSISHNKVPYYINHQTQTTCWDHPKMTELFQSLADLNNVRFSAYRTAIKIRRLQKALCLDLLELSTTNEIFKQHKLNQNDQLLSVPDVINCLTTTYDGLEQMHKDLVNVPLCVDMCLNWLLNVYDTGRTGKIRVQSLKIGLMSLSKGLLEEKYRYLFKEVAGPTEMCDQRQLGLLLHDAIQIPRQLGEVAAFGGSNIEPSVRSCFQQNNNKPEISVKEFIDWMHLEPQSMVWLPVLHRVAAAETAKHQAKCNICKECPIVGFRYRSLKHFNYDVCQSCFFSGRTAKGHKLHYPMVEYCIPTTSGEDVRDFTKVLKNKFRSKKYFAKHPRLGYLPVQTVLEGDNLETPITLISMWPEHYDPSQSPQLFHDDTHSRIEQYATRLAQMERTNGSFLTDSSSTTGSVEDEHALIQQYCQTLGGESPVSQPQSPAQILKSVEREERGELERIIADLEEEQRNLQVEYEQLKDQHLRRGLPVGSPPESIISPHHTSEDSELIAEAKLLRQHKGRLEARMQILEDHNKQLESQLHRLRQLLEQPESDSRINGVSPWASPQHSALSYSLDPDASGPQFHQAAGEDLLAPPHDTSTDLTEVMEQIHSTFPSCCPNVPSRPQAM

SEQ ID NO: 5400 - protein, 301 aa, Homo sapiens
MSRAPGILASWRRAPSLSVQKGSQTARHTCHPEVPLGNCFLPVYKASPLTVTRLWAERLDQVIIHVGALSLKESQELAQHAAEIGADGIAVIAPFFLKPWTKDILINFLKEVAAAAPALPFYYYHIPALTGVKIRAEELLDGILDKIPTFQGLKFSDTDLLDFGQCVDQNRQQQFAFLFGVDEQLLSALVMGATGAVGSTYNYLGKKTNQMLEAFEQKDFSLALNYQFCIQRFINFVVKLGFGVSQTKAIMTLVSGIPMGPPRLPLQKASREFTDSAEAKLKSLDFLSFTDLKDGNLEAGS

SEQ ID NO: 5401 - protein, 202 aa, Homo sapiens
MCRTLAAFPTTCLERAKEFKTRLGIFLHKSELGCDTGSTGKFEWGSKHSKENRNFSEDVLGWRESFDLLLSSKNGVAAFHAFLKTEFSEENLEFWLACEEFKKIRSATKLASRAHQIFEEFICSEAPKEVNIDHETHELTRMNLQTATATCFDAAQGKTRTLMEKDSYPRFLKSPAYRDLAAQASAASATLSSCSLDEPSHT

SEQ ID NO: 5402 - protein, 557 aa, Homo sapiens
MDLMNGQASSVNIAATASEKSSSSESLSDKGSELKKSFDAVVFDVLKVTPEEYAGQITLMDVPVFKAIQPDELSSCGWNKKEKYSSAPNAVAFTRRFNHVSFWVVREILHAQTLKIRAEVLSHYIKTAKKLYELNNLHALMAVVSGLQSAPIFRLTKTWALLSRKDKTTFEKLEYVMSKEDNYKRLRDYISSLKMTPCIPYLGIYLSDLTYIDSAYPSTGSILENEQRSNLMNNILRIISDLQQSCEYDIPMLPHVQKYLNSVQYIEELQKFVEDDNYKLSLKIEPGTSTPRSAASREDLVGPEVGASPQSGRKSVAAEGALLPQTPPSPRNLIPHGHRKCHSLGYNFIHKMNTAEFKSATFPNAGPRHLLDDSVMEPHAPSRGQAESSTLSSGISIGSSDGSELSEETSWPAFESSAESEDLAVHLYPGAVTIQGVLRRKTLLKEGKKPTVASWTKYWAALCGTQLFYYAAKSLKATERKHFKSTSNKNVSVIGWMVMMADDPEHPDLFLLTDSEKGNSYKFQAGNRMNAMLWFKHLSAACQSNKQQVPTNLMTFE

SEQ ID NO: 5403 - protein, 583 aa, Homo sapiens
MDLMNGQASSVNIAATASEKSSSSESLSDKGSELKKSFDAVVFDVLKVTPEEYAGQITLMDVPVFKAIQPDELSSCGWNKKEKYSSAPNAVAFTRRFNHVSFWVVREILHAQTLKIRAEVLSHYIKTAKKLYELNNLHALMAVVSGLQSAPIFRLTKTWALLSRKDKTTFEKLEYVMSKEDNYKRLRDYISSLKMTPCIPYLGIYLSDLTYIDSAYPSTGSILENEQRSNLMNNILRIISDLQQSCEYDIPMLPHVQKYLNSVQYIEELQKFVEDDNYKLSLKIEPGTSTPRSAASREDLVGPEVGASPQSGRKSVAAEGALLPQTPPSPRNLIPHGHRKCHSLGYNFIHKMNTAEFKSATFPNAGPRHLLDDSVMEPHAPSRGQAESSTLSSGISIGSSDGSELSEETSWPAFERNRLYHSLGPVTRVARNGYRSHMKASSSAESEDLAVHLYPGAVTIQGVLRRKTLLKEGKKPTVASWTKYWAALCGTQLFYYAAKSLKATERKHFKSTSNKNVSVIGWMVMMADDPEHPDLFLLTDSEKGNSYKFQAGNRMNAMLWFKHLSAACQSNKQQVPTNLMTFE

SEQ ID NO: 5404 - protein, 270 aa, Homo sapiens
MADHMMAMNHGRFPDGTNGLHHHPAHRMGMGQFPSPHHHQQQQPQHAFNALMGEHIHYGAGNMNATSGIRHAMGPGTVNGGHPPSALAPAARFNNSQFMGPPVASQGGSLPASMQLQKLNNQYFNHHPYPHNHYMPDLHPAAGHQMNGTNQHFRDCNPKHSGGSSTPGGSGGSSTPGGSGSSSGGGAGSSNSGGGSGSGNMPASVAHVPAAMLPPNVIDTDFIDEEVLMSLVIEMGLDRIKELPELWLGQNEFDFMTDFVCKQQPSRVSC

SEQ ID NO: 5405 - protein, 253 aa, Homo sapiens
MIENSSWSMTFEERENRRLQEASMRLEQENDDLAHELVTSKIALRNDLDQAEDKADVLNKELLLTKQRLVETEEEKRKQEEETAQLKEVFRKQLEKAEYEIKKTTAIIAEYKQICSQLSTRLEKQQAASKEELEVVKGKMMACKHCSDIFSKEGALKLAATGREDQGIETDDEKDSLKKQLREMELELAQTKLQLVEAKCKIQELEHQRGALMNEIQAAKNSWFSKTLNSIKTATGTQPLQPAPVTQPPKEST

SEQ ID NO: 5406 - protein, 361 aa, Homo sapiens
MEKGGNIQLEIPDFSNSVLSHLNQLRMQGRLCDIVVNVQGQAFRAHKVVLAASSPYFRDHMSLNEMSTVSISVIKNPTVFEQLLSFCYTGRICLQLADIISYLTAASFLQMQHIIDKCTQILEGIHFKINVAEVEAELSQTRTKHQERPPESHRVTPNLNRSLSPRHNTPKGNRRGQVSAVLDIRELSPPEESTSPQIIEPSSDVESREPILRINRAGQWYVETGVADRGGRSDDEVRVLGAVHIKTENLEEWLGPENQPSGEDGSSAEEVTAMVIDTTGHGSVGQENYTLGSSGAKVARPTSSEVDRFSPSGSVVPLTERHRARSESPGRMDEPKQPSSQVWSCGFRTALVVGGIATVYE

SEQ ID NO: 5407 - protein, 308 aa, Homo sapiens
MEKGGNIQLEIPDFSNSVLSHLNQLRMQGRLCDIVVNVQGQAFRAHKVVLAASSPYFRDHMSLNEMSTVSISVIKNPTVFEQLLSFCYTGRICLQLADIISYLTAASFLQMQHIIDKCTQILEGIHFKINVAEVEAELSQTRTKHQERPPESHRVTPNLNRSLSPRHNTPKGNRRGQVSAVLDIRELSPPEESTSPQIIEPSSDVESREPILRINRAGQWYVETGVADRGGRSDDEVRVLGAVHIKTENLEEWLGPENQPSGEDGSSAEEVTAMVIDTTGHGSVGQENYTLGSSGAKVARPTSSEVDR

SEQ ID NO: 5408 - protein, 133 aa, Homo sapiens
MVSHRYPRIQSIKVQFTEYKKEKGFILTSQKEDEIMKVQNNSVIINCDGFYLISLKGYFSQEVNISLHYQKDEEPLFQLKKVRSVNSLMVASLTYKDKVYLNVTTDNTSLDDFHVNGGELILIHQNPGEFCVL

SEQ ID NO: 5409 - protein, 272 aa, Homo sapiens
MNSDSSSVSSRASSPDMDEMYLRDHHHRHHHHQESRLNSVSSTQGDMMQKMPGESLSRAGAKAAGESSKYKIKKQLSEQDLQQLRLKINGRERKRMHDLNLAMDGLREVMPYAHGPSVRKLSKIATLLLARNYILMLTSSLEEMKRLVGEIYGGHHSAFHCGTVGHSAGHPAHAANSVHPVHPILGGALSSGNASSPLSAASLPAIGTIRPPHSLLKAPSTPPALQLGSGFQHWAGLPCPCTICQMPPPPHLSALSTANMARLSAESKDLLK

SEQ ID NO: 5410 - protein, 666 aa, Homo sapiens
MARRPRHSIYSSDEDDEDFEMCDHDYDGLLPKSGKRHLGKTRWTREEDEKLKKLVEQNGTDDWKVIANYLPNRTDVQCQHRWQKVLNPELIKGPWTKEEDQRVIELVQKYGPKRWSVIAKHLKGRIGKQCRERWHNHLNPEVKKTSWTEEEDRIIYQAHKRLGNRWAEIAKLLPGRTDNAIKNHWNSTMRRKVEQEGYLQESSKASQPAVATSFQKNSHLMGFAQAPPTAQLPATGQPTVNNDYSYYHISEAQNVSSHVPYPVALHVNIVNVPQPAAAAIQRHYNDEDPEKEKRIKELELLLMSTENELKGQQVLPTQNHTCSYPGWHSTTIADHTRPHGDSAPVSCLGEHHSTPSLPADPGSLPEESASPARCMIVHQGTILDNVKNLLEFAETLQFIDSFLNTSSNHENSDLEMPSLTSTPLIGHKLTVTTPFHRDQTVKTQKENTVFRTPAIKRSILESSPRTPTPFKHALAAQEIKYGPLKMLPQTPSHLVEDLQDVIKQESDESGIVAEFQENGPPLLKKIKQEVESPTDKSGNFFCSHHWEGDSLNTQLFTQTSPVADAPTGVQWHDFGSLQPLPPGFKRFSCLSLPRSWDYRHPPPRPANFEFLVETGFLHVGQAGLELLTSGDLPASASQSARITGVSHRARPEYSYKLRFNGTSIRR

SEQ ID NO: 5411 - protein, 640 aa, Homo sapiens
MARRPRHSIYSSDEDDEDFEMCDHDYDGLLPKSGKRHLGKTRWTREEDEKLKKLVEQNGTDDWKVIANYLPNRTDVQCQHRWQKVLNPELIKGPWTKEEDQRVIELVQKYGPKRWSVIAKHLKGRIGKQCRERWHNHLNPEVKKTSWTEEEDRIIYQAHKRLGNRWAEIAKLLPGRTDNAIKNHWNSTMRRKVEQEGYLQESSKASQPAVATSFQKNSHLMGFAQAPPTAQLPATGQPTVNNDYSYYHISEAQNVSSHVPYPVALHVNIVNVPQPAAAAIQRHYNDEDPEKEKRIKELELLLMSTENELKGQQVLPTQNHTCSYPGWHSTTIADHTRPHGDSAPVSCLGEHHSTPSLPADPGSLPEESASPARCMIVHQGTILDNVKNLLEFAETLQFIDSFLNTSSNHENSDLEMPSLTSTPLIGHKLTVTTPFHRDQTVKTQKENTVFRTPAIKRSILESSPRTPTPFKHALAAQEIKYGPLKMLPQTPSHLVEDLQDVIKQESDESGIVAEFQENGPPLLKKIKQEVESPTDKSGNFFCSHHWEGDSLNTQLFTQTSPVADAPNILTSSVLMAPASEDEDNVLKAFTVPKNRSLASPLQPCSSTWEPASCGKMEEQMTSSSQARKYVNAFSARTLVM

SEQ ID NO: 5412 - protein, 421 aa, Homo sapiens
MKPSKRFFISPPSSTAFMKQRRMGLNDFIQKIANNSYACKHPEVQSILKISQPQEPELMNANPSPPPSPSQQINLGPSSNPHAKPSDFHFLKVIGKGSFGKVLLARHKAEEVFYAVKVLQKKAILKKKEEKHIMSERNVLLKNVKHPFLVGLHFSFQTADKLYFVLDYINGGELFYHLQRERCFLEPRARFYAAEIASALGYLHSLNIVYRDLKPENILLDSQGHIVLTDFGLCKENIEHNSTTSTFCGTPEYLAPEVLHKQPYDRTVDWWCLGAVLYEMLYGLPPFYSRNTAEMYDNILNKPLQLKPNITNSARHLLEGLLQKDRTKRLGAKDDFMEIKSHVFFSLINWDDLINKKITPPFNPNVSGPNDLRHFDPEFTEEPVPNSIGKSPDSVLVTASVKEAAEAFLGFSYAPPTDSFL

SEQ ID NO: 5413 - protein, 526 aa, Homo sapiens
MVNKDMNGFPVKKCSAFQFFKKRVRRWIKSPMVSVDKHQSPSLKYTGSSMVHIPPGEPDFESSLCQTCLGEHAFQRGVLPQENESCSWETQSGCEVREPCNHANILTKPDPRTFWTNDDPAFMKQRRMGLNDFIQKIANNSYACKHPEVQSILKISQPQEPELMNANPSPPPSPSQQINLGPSSNPHAKPSDFHFLKVIGKGSFGKVLLARHKAEEVFYAVKVLQKKAILKKKEEKHIMSERNVLLKNVKHPFLVGLHFSFQTADKLYFVLDYINGGELFYHLQRERCFLEPRARFYAAEIASALGYLHSLNIVYRDLKPENILLDSQGHIVLTDFGLCKENIEHNSTTSTFCGTPEYLAPEVLHKQPYDRTVDWWCLGAVLYEMLYGLPPFYSRNTAEMYDNILNKPLQLKPNITNSARHLLEGLLQKDRTKRLGAKDDFMEIKSHVFFSLINWDDLINKKITPPFNPNVSGPNDLRHFDPEFTEEPVPNSIGKSPDSVLVTASVKEAAEAFLGFSYAPPTDSFL

SEQ ID NO: 5414 - protein, 261 aa, Homo sapiens
MAGDSEQTLQNHQQPNGGEPFLIGVSGGTASGKSSVCAKIVQLLGQNEVDYRQKQVVILSQDSFYRVLTSEQKAKALKGQFNFDHPDAFDNELILKTLKEITEGKTVQIPVYDFVSHSRKEETVTVYPADVVLFEGILAFYSQEVRDLFQMKLFVDTDADTRLSRRVLRDISERGRDLEQILSQYITFVKPAFEEFCLPTKKYADVIIPRGADNLVAINLIVQHIQDILNGGPSKRQTNGCLNGYTPSRKRQASESSSRPH

SEQ ID NO: 5415 - protein, 308 aa, Homo sapiens
MGNTLGLAPMGTLPRRSPRREEPLPNPGSFDELHRLCKDVFPAQMEGVKLVVNKVLSSHFQVAHTIHMSALGLPGYHLHAAYAGDWQLSPTEVFPTVVGDMDSSGSLNAQVLLLLAERLRAKAVFQTQQAKFLTWQFDGEYRGDDYTATLTLGNPDLIGESVIMVAHFLQSLTHRLVLGGELVYHRRPGEEGAILTLAGKYSAVHWVATLNVGSGGAHASYYHRANEQVQVGVEFEANTRLQDTTFSFGYHLTLPQANMVFRGLVDSNWCVGAVLEKKMPPLPVTLALGAFLNHWRNRFHCGFSITVG

SEQ ID NO: 5416 - protein, 520 aa, Homo sapiens
METWSVEQVCSWLVEKNLGELVHRFQEEEVSGAALLALNDRMVQQLVKKIGHQAVLMDLIKKYKQNTQGLKSPENPKKAALVMQTEAARDYRDEESSSPARHGEQMPSFYPAENLDNGLIDQRVLKQRRNVKQILARSKALQWTKSYVLPEFPYDVKCMLAEQKCPDHSMRIRIIEFLQADMTKYLEGSLYPSTQQYNDVVNALLQAHPFLDEDGCGFFLWKRALKDRFKYVRRPIEDDEQVIRNKCKFGHRRGQTRKSLADIRFDEIKLVQIKEEAVCFDSELDEHIKWFQQEYVKTEKDWREIDKRMSQTLEIRRKMIGSRTPLKDILKLFPFLKCPYQMFREFQLLTRTDIYKKTRHILESYSENILTSFSVVDNPINIVLQEKMKHYTDEDMLKYMKMTATCLLLPDVFGDDPSLFVIMNEQVQVSTPVLEVKNPFNMEVCEFSLYLERERLTKVDDCVTALAALVAAFHVFRIECPRRLSQTFNFLETLIFDMHSPYFPSLKEKENEVGFQHPLT

SEQ ID NO: 5417 - protein, 245 aa, Homo sapiens
MANNYKKIVLLKGLEVINDYHFRIVKSLLSNDLKLNPKMKEEYDKIQIADLMEEKFPGDAGLGKLIEFFKEIPTLGDLAETLKREKLKVANKIESIPVKGIIPSKKTKQKEVYPATPACTPSNRLTAKGAEETLGPQKRKKPSEEETGTKRSKMSKEQTRPSCSAGASTSTAMGRSPPPQTSSSAPPNTSSTEAYLMNLTLSLTAGSFLSCAVWGRDRELRNLELSATDSLSTAPIYYTPIPFAH

SEQ ID NO: 5418 - protein, 483 aa, Homo sapiens
MANNYKKIVLLKGLEVINDYHFRIVKSLLSNDLKLNPKMKEEYDKIQIADLMEEKFPGDAGLGKLIEFFKEIPTLGDLAETLKREKLKVKGIIPSKKTKQKEVYPATPACTPSNRLTAKGAEETLGPQKRKKPSEEETGTKRSKMSKEQTRPSCSAGASTSTAMGRSPPPQTSSSAPPNTSSTESLKPLANRHATASKNIFREDPIIAMVLNATKVFKYESSENEQRRMFHATVATQTQFFHVKVLNINLKRKFIKKRIIIISNYSKRNSLLEVNEASSVSEAGPDQTFEVPKDIIRRAKKIPKINILHKQTSGYIVYGLFMLHTKIVNRKTTIYEIQDKTGSMAVVGKGECHNIPCEKGDKLRLFCFRLRKRENMSKLMSEMHSFIQIQKNTNQRSHDSRSMALPQEQSQHPKPSEASTTLPESHLKTPQMPPTTPSSSSFTKKDETHPGAQSSPANFRITSPTVAPPLSSDTSTNRHPAVP

SEQ ID NO: 5419 - protein, 492 aa, Homo sapiens
MANNYKKIVLLKGLEVINDYHFRIVKSLLSNDLKLNPKMKEEYDKIQIADLMEEKFPGDAGLGKLIEFFKEIPTLGDLAETLKREKLKVANKIESIPVKGIIPSKKTKQKEVYPATPACTPSNRLTAKGAEETLGPQKRKKPSEEETGTKRSKMSKEQTRPSCSAGASTSTAMGRSPPPQTSSSAPPNTSSTESLKPLANRHATASKNIFREDPIIAMVLNATKVFKYESSENEQRRMFHATVATQTQFFHVKVLNINLKRKFIKKRIIIISNYSKRNSLLEVNEASSVSEAGPDQTFEVPKDIIRRAKKIPKINILHKQTSGYIVYGLFMLHTKIVNRKTTIYEIQDKTGSMAVVGKGECHNIPCEKGDKLRLFCFRLRKRENMSKLMSEMHSFIQIQKNTNQRSHDSRSMALPQEQSQHPKPSEASTTLPESHLKTPQMPPTTPSSSSFTKKDETHPGAQSSPANFRITSPTVAPPLSSDTSTNRHPAVP

SEQ ID NO: 5420 - protein, 1562 aa, Homo sapiens
MSVRLPQSIDRLSSLSSLGDSAPERKSPSHHRQPSDASETTGLVQRCVIIQKDQHGFGFTVSGDRIVLVQSVRPGGAAMKAGVKEGDRIIKVNGTMVTNSSHLEVVKLIKSGAYVALTLLGSSPSSMGISGLQQDPSPAGAPRITSVIPSPPPPPPLPPPQRITGPKPLQDPEVQKHATQILRNMLRQEEKELQRICEVYSRNPASLLEEQIEGARRRVTQLQLKIQQETGGSVDILPLYGDTSQRPSEGRLSLDSQEGDSGLDSGTERFPSLSESLMNRNSVLSDPGLDSPRTSPVIMARVAQHHRRQGSDAAVPSTGDQGVDQSPKPLIIGPEEDYDPGYFNNESDIIFQDLEKLKSRPAHLGVFLRYIFSQADPSPLLFYLCAEVYQQASPKDSRSLGKDIWNIFLEKNAPLRVKIPEMLQAEIDSRLRNSEDARGVLCEAQEAAMPEIQEQIHDYRTKRTLGLGSLYGENDLLDLDGDPLRERQVAEKQLAALGDILSKYEEDRSAPMDFALNTYMSHAGIRLREARPSNTAEKAQSAPDKDKWLPFFPKTKKSSNSKKEKDALEDKKRNPILKYIGKPKSSSQSTFHIPLSPVEVKPGNVRNIIQHFENNQQYDAPEPGTQRLSTGSFPEDLLESDSSRSEIRLGRSESLKGREEMKRSRKAENVPRSRSDVDMDAAAEATRLHQSASSSTSSLSTRSLENPTPPFTPKMGRRSIESPSLGFCTDTLLPHLLEDDLGQLSDLEPEPDAQNWQHTVGKDVVAGLTQREIDRQEVINELFVTEASHLRTLRVLDLIFYQRMKKENLMPREELARLFPNLPELIEIHNSWCEAMKKLREEGPIIKEISDLMLARFDGPAREELQQVAAQFCSYQSIALELIKTKQRKESRFQLFMQEAESHPQCRRLQLRDLIISEMQRLTKYPLLLESIIKHTEGGTSEHEKLCRARDQCREILKYVNEAVKQTENRHRLEGYQKRLDATALERASNPLAAEFKSLDLTTRKMIHEGPLTWRISKDKTLDLHVLLLEDLLVLLQKQDEKLLLKCHSKTAVGSSDSKQTFSPVLKLNAVLIRSVATDKRAFFIICTSKLGPPQIYELVALTSSDKNTWMELLEEAVRNATRHPGAAPMPVHPPPPGPREPAQQGPTPSRVELDDSDVFHGEPEPEELPGGTGSQQRVQGKHQVLLEDPEQEGSAEEEELGVLPCPSTSLDGENRGIRTRNPIHLAFPGPLFMEGLADSALEDVENLRHLILWSLLPGHTMETQAAQEPEDDLTPTPSVISVTSHPWDPGSPGQAPPGGEGDNTQLAGLEGERPEQEDMGLCSLEHLPPRTRNSGIWESPELDRNLAEDASSTEAAGGYKVVRKAEVAGSKVVPALPESGQSEPGPPEVEGGTKATGNCFYVSMPSGPPDSSTDHSEAPMSPPQPDSLPAGQTEPQPQLQGGNDDPRRPSRSPPSLALRDVGMIFHTIEQLTLKLNRLKDMELAHRELLKSLGGESSGGTTPVGSFHTEAARWTDGSLSPPAKEPLASDSRNSHELGPCPEDGSDAPLEDSTADAAASPGP

SEQ ID NO: 5421 - protein, 370 aa, Homo sapiens
MNVTPEVKSRGMKFAEEQLLKHGWTQGKGLGRKENGITQALRVTLKQDTHGVGHDPAKEFTNHWWNELFNKTAANLVVETGQDGVQIRSLSKETTRYNHPKPNLLYQKFVKMATLTSGGEKPNKDLESCSDDDNQGSKSPKILTDEMLLQACEGRTAHKAARLGITMKAKLARLEAQEQAFLARLKGQDPGAPQLQSESKPPKKKKKKRRQKEEEEATASERNDADEKHPEHAEQNIRKSKKKKRRHQEGKVSDEREGTTKGNEKEDAAGTSGLGELNSREQTNQSLRKGKKKKRWHHEEEKMGVLEEGGKGKEAAGSVRTEEVESRAYADPCSRRKKRQQQEEEDLNLEDRGEETFRWWNQGSREQSMQ

SEQ ID NO: 5422 - protein, 40 aa, Homo sapiens
MMGHRPVLVLNYCRYHPNMFGTQVHDEDAFGPNGRHCDDQ

SEQ ID NO: 5423 - protein, 491 aa, Homo sapiens
MQPLLCLGNLEDARERTGTLLAQHPAWGRTRAKPGSPLNTKKEGDLIAAQARLKDLEALLNSKEAALSTALSEKRTLEGELHDLRGQVAKLEAALGEAKKQLQDEMLRRVDAENRLQTMKEELDFQKNIYSEELRETKRRHETRLVEIDNGKQREFESRLADALQELRAQHEDQVEQYKKELEKTYSAKLDNARQSAERNSNLVGAAHEELQQSRIRIDSLSAQLSQLQKQLAAKEAKLRDLEDSLARERDTSRRLLAEKEREMAEMRARMQQQLDEYQELLDIKLALDMEIHAYRKLLEGEEERLRLSPSPTSQRSRGRASSHSSQTQGGGSVTKKRKLESTESRSSFSQHARTSGRVAVEEVDEEGKFVRLRNKSNEDQSMGNWQIKRQNGDDPLLTYRFPPKFTLKAGQVVTIWAAGAGATHSPPTDLVWKAQNTWGCGNSLRTALINSTGEEVAMRKLVRSVTVVEDDEDEDGDDLLHHHHVSGSRR

SEQ ID NO: 5424 - protein, 614 aa, Homo sapiens
METPSQRRATRSGAQASSTPLSPTRITRLQEKEDLQELNDRLAVYIDRVRSLETENAGLRLRITESEEVVSREVSGIKAAYEAELGDARKTLDSVAKERARLQLELSKVREEFKELKARNTKKEGDLIAAQARLKDLEALLNSKEAALSTALSEKRTLEGELHDLRGQVAKLEAALGEAKKQLQDEMLRRVDAENRLQTMKEELDFQKNIYSEELRETKRRHETRLVEIDNGKQREFESRLADALQELRAQHEDQVEQYKKELEKTYSAKLDNARQSAERNSNLVGAAHEELQQSRIRIDSLSAQLSQLQKQLAAKEAKLRDLEDSLARERDTSRRLLAEKEREMAEMRARMQQQLDEYQELLDIKLALDMEIHAYRKLLEGEEERLRLSPSPTSQRSRGRASSHSSQTQGGGSVTKKRKLESTESRSSFSQHARTSGRVAVEEVDEEGKFVRLRNKSNEDQSMGNWQIKRQNGDDPLLTYRFPPKFTLKAGQVVTIWAAGAGATHSPPTDLVWKAQNTWGCGNSLRTALINSTGEEVAMRKLVRSVTVVEDDEDEDGDDLLHHHHGSHCSSSGDPAEYNLRSRTVLCGTCGQPADKASASGSGAQSPQNCSIM

SEQ ID NO: 5425 - protein, 664 aa, Homo sapiens
METPSQRRATRSGAQASSTPLSPTRITRLQEKEDLQELNDRLAVYIDRVRSLETENAGLRLRITESEEVVSREVSGIKAAYEAELGDARKTLDSVAKERARLQLELSKVREEFKELKARNTKKEGDLIAAQARLKDLEALLNSKEAALSTALSEKRTLEGELHDLRGQVAKLEAALGEAKKQLQDEMLRRVDAENRLQTMKEELDFQKNIYSEELRETKRRHETRLVEIDNGKQREFESRLADALQELRAQHEDQVEQYKKELEKTYSAKLDNARQSAERNSNLVGAAHEELQQSRIRIDSLSAQLSQLQKQLAAKEAKLRDLEDSLARERDTSRRLLAEKEREMAEMRARMQQQLDEYQELLDIKLALDMEIHAYRKLLEGEEERLRLSPSPTSQRSRGRASSHSSQTQGGGSVTKKRKLESTESRSSFSQHARTSGRVAVEEVDEEGKFVRLRNKSNEDQSMGNWQIKRQNGDDPLLTYRFPPKFTLKAGQVVTIWAAGAGATHSPPTDLVWKAQNTWGCGNSLRTALINSTGEEVAMRKLVRSVTVVEDDEDEDGDDLLHHHHGSHCSSSGDPAEYNLRSRTVLCGTCGQPADKASASGSGAQVGGPISSGSSASSVTVTRSYRSVGGSGGGSFGDNLVTRSYLLGNSSPRTQSPQNCSIM

SEQ ID NO: 5426 - protein, 572 aa, Homo sapiens
METPSQRRATRSGAQASSTPLSPTRITRLQEKEDLQELNDRLAVYIDRVRSLETENAGLRLRITESEEVVSREVSGIKAAYEAELGDARKTLDSVAKERARLQLELSKVREEFKELKARNTKKEGDLIAAQARLKDLEALLNSKEAALSTALSEKRTLEGELHDLRGQVAKLEAALGEAKKQLQDEMLRRVDAENRLQTMKEELDFQKNIYSEELRETKRRHETRLVEIDNGKQREFESRLADALQELRAQHEDQVEQYKKELEKTYSAKLDNARQSAERNSNLVGAAHEELQQSRIRIDSLSAQLSQLQKQLAAKEAKLRDLEDSLARERDTSRRLLAEKEREMAEMRARMQQQLDEYQELLDIKLALDMEIHAYRKLLEGEEERLRLSPSPTSQRSRGRASSHSSQTQGGGSVTKKRKLESTESRSSFSQHARTSGRVAVEEVDEEGKFVRLRNKSNEDQSMGNWQIKRQNGDDPLLTYRFPPKFTLKAGQVVTIWAAGAGATHSPPTDLVWKAQNTWGCGNSLRTALINSTGEEVAMRKLVRSVTVVEDDEDEDGDDLLHHHHVSGSRR

SEQ ID NO: 5427 - protein, 103 aa, Homo sapiens
MALSTIVSQRKQIKRKAPRGFLKRVFKRKKPQLRLEKSGDLLVRFHPFSGWEWGTGEVHLNCLLFVHRLAEESRTNACASKCRVINKEHVLAAAKVILKKSRG

SEQ ID NO: 5428 - protein, 67 aa, Homo sapiens
MALSTIVSQRKQIKRKAPRGFLKRVFKRKKPQLRLEKSGDLLKSPGQTLVRVNVESLTRSMYWPQQR

SEQ ID NO: 5429 - protein, 88 aa, Homo sapiens
MALSTIVSQRKQIKRKAPRGFLKRVFKRKKPQLRLEKSGDLLVHLNCLLFVHRLAEESRTNACASKCRVINKEHVLAAAKVILKKSRG

SEQ ID NO: 5430 - protein, 524 aa, Homo sapiens
MAGGAREVLTLQLGHFAGFVGAHWWNQQDAALGRATDSKEPPGELCPDVLYRTGRTLHGQETYTPRLILMDLKGSLSSLKEEGGLYRDKQLDAAIAWQGKLTTHKGSSPLPTATTPKPLIPTEASIRVWSDFLRVHLHPRSICMIQKYNHDGEAGRLEAFGQGESVLKEPKYQEELEDRLHFYVEECDYLQGFQILCDLHDGFSGVGAKAAELLQDEYSGRGIITWGLLPGPYHRGEAQRNIYRLLNTAFGLVHLTAHSSLVCPLSLGGSLGLRPEPPVSFPYLHYDATLPFHCSAILATALDTVTVPYRLCSSPVSMVHLADMLSFCGKKVVTAGAIIPFPLAPGQSLPDSLMQFGGATPWTPLSACGEPSGTRCFAQSVVLRGIDRACHTSQLTPGTPPPSALHACTTGEEILAQYLQQQQPGVMSSSHLLLTPCRVAPPYPHLFSSCSPPAVESIPVFGALCSSSSLHQTLEALARDLTKLDLRRWASFMDAGVEHDDVAELLQELQSLAQCYQGGDSLVD

SEQ ID NO: 5431 - protein, 315 aa, Homo sapiens
MASCPDSDNSWVLAGSESLPVETLGPASRMDPESERALQAPHSPSKTDGKELAGTMDGEGTLFQTESPQSGSILTEETEVKGTLEGDVCGVEPPGPGDTVVQGDLQETTVVTGLGPDTQDLEGQSPPQSLPSTPKAAWIREEGRCSSSDDDTDVDMEGLRRRRGREAGPPQPMVPLAVENQAGGGLSESETGPMEEVERQVLPDPEVLEAVGDRQDGLREQLQAPVPPDSVPSLQNMGLLLDKLAKENQDIRLLQAQLQVGTGRRGWARVTHLGQASVLASSPKRNVSYLPTHPDPPLSHYSQGVFPVLGSHPLC

SEQ ID NO: 5432 - protein, 192 aa, Homo sapiens
MAPLGGAPRLVLLFSGKRKSGKDFVTEALQSRLGADVCAVLRLSGPLKEQYAQEHGLNFQRLLDTSTYKEAFRKDMIRWGEEKRQADPGFFCRKIVEGISQPIWLVSDTRRVSDIQWFREAYGAVTQTVRVVALEQSRQQRGWVFTPGVDDAESECGLDNFGDFDWVIENHGVEQRLEEQLENLIEFIRSRL

SEQ ID NO: 5433 - protein, 203 aa, Homo sapiens
MAKAYDHLFKLLLIGDSGVGKTCLIIRFAEDNFNNTYISTIGIDFKIRTVDIEGKKIKLQVWDTAGQERFKTITTAYYRGAMGIILVYDITDEKSFENIQNWMKSIKENASAGVERLLLGNKCDMEAKRKVQKEQADKLAREHGIRFFETSAKSSMNVDEAFSSLARDILLKSGGRRSGNGNKPPSTDLKTCDKKNTNKCSLG

SEQ ID NO: 5434 - protein, 239 aa, Homo sapiens
MLSAVWGAGGPGAGGAARGQPSRKELLLRHHLWSGPRCLSFPLGSLPASLLGLPGATSHRSCLSPNLASGLAARGTQTQSVLFGEVRLPLDGGVRGARKRMNFDHFQILRAIGKGSFGKVSPRVPRRPQASCRTALCPPGVHCAEAGHGEDVRHEVHEQAAVHRARRGPQRLPGAGDPAGDRARLPGEPLVLLPGRGGHVHGRGPATGRGPALPPAAERAVLRGHGEAVHLRDGTGSGL

SEQ ID NO: 5435 - protein, 2896 aa, Homo sapiens
MWPTRRLVTIKRSGVDGPHFPLSLSTCLFGRGIECDIRIQLPVVSKQHCKIEIHEQEAILHNFSSTNPTQVNGSVIDEPVRLKHGDVITIIDRSFRYENESLQNGRKSTEFPRKIREQEPARRVSRSSFSSDPDESEGIPLKRRRVSFGGHLRPELFDENLPPNTPLKRGEAPTKRKSLVMHTPPVLKKIIKEQPQPSGKQESGSEIHVEVKAQSLVISPPAPSPRKTPVASDQRRRSCKTAPASSSKSQTEVPKRGGRKSGNLPSKRVSISRSQHDILQMICSKRRSGASEANLIVAKSWADVVKLGAKQTQTKVIKHGPQRSMNKRQRRPATPKKPVGEVHSQFSTGHANSPCTIIIGKAHTEKVHVPARPYRVLNNFISNQKMDFKEDLSGIAEMFKTPVKEQPQLTSTCHIAISNSENLLGKQFQGTDSGEEPLLPTSESFGGNVFFSAQNAAKQPSDKCSASPPLRRQCIRENGNVAKTPRNTYKMTSLETKTSDTETEPSKTVSTANRSGRSTEFRNIQKLPVESKSEETNTEIVECILKRGQKATLLQQRREGEMKEIERPFETYKENIELKENDEKMKAMKRSRTWGQKCAPMSDLTDLKSLPDTELMKDTARGQNLLQTQDHAKAPKSEKGKITKMPCQSLQPEPINTPTHTKQQLKASLGKVGVKEELLAVGKFTRTSGETTHTHREPAGDGKSIRTFKESPKQILDPAARVTGMKKWPRTPKEEAQSLEDLAGFKELFQTPGPSEESMTDEKTTKIACKSPPPESVDTPTSTKQWPKRSLRKADVEEEFLALRKLTPSAGKAMLTPKPAGGDEKDIKAFMGTPVQKLDLAGTLPGSKRQLQTPKEKAQALEDLAGFKELFQTPGHTEELVAAGKTTKIPCDSPQSDPVDTPTSTKQRPKRSIRKADVEGELLACRNLMPSAGKAMHTPKPSVGEEKDIIIFVGTPVQKLDLTENLTGSKRRPQTPKEEAQALEDLTGFKELFQTPGHTEEAVAAGKTTKMPCESSPPESADTPTSTRRQPKTPLEKRDVQKELSALKKLTQTSGETTHTDKVPGGEDKSINAFRETAKQKLDPAASVTGSKRHPKTKEKAQPLEDLAGLKELFQTPVCTDKPTTHEKTTKIACRSQPDPVDTPTSSKPQSKRSLRKVDVEEEFFALRKRTPSAGKAMHTPKPAVSGEKNIYAFMGTPVQKLDLTENLTGSKRRLQTPKEKAQALEDLAGFKELFQTRGHTEESMTNDKTAKVACKSSQPDPDKNPASSKRRLKTSLGKVGVKEELLAVGKLTQTSGETTHTHTEPTGDGKSMKAFMESPKQILDSAASLTGSKRQLRTPKGKSEVPEDLAGFIELFQTPSHTKESMTNEKTTKVSYRASQPDLVDTPTSSKPQPKRSLRKADTEEEFLAFRKQTPSAGKAMHTPKPAVGEEKDINTFLGTPVQKLDQPGNLPGSNRRLQTRKEKAQALEELTGFRELFQTPCTDNPTTDEKTTKKILCKSPQSDPADTPTNTKQRPKRSLKKADVEEEFLAFRKLTPSAGKAMHTPKAAVGEEKDINTFVGTPVEKLDLLGNLPGSKRRPQTPKEKAKALEDLAGFKELFQTPGHTEESMTDDKITEVSCKSPQPDPVKTPTSSKQRLKISLGKVGVKEEVLPVGKLTQTSGKTTQTHRETAGDGKSIKAFKESAKQMLDPANYGTGMERWPRTPKEEAQSLEDLAGFKELFQTPDHTEESTTDDKTTKIACKSPPPESMDTPTSTRRRPKTPLGKRDIVEELSALKQLTQTTHTDKVPGDEDKGINVFRETAKQKLDPAASVTGSKRQPRTPKGKAQPLEDLAGLKELFQTPICTDKPTTHEKTTKIACRSPQPDPVGTPTIFKPQSKRSLRKADVEEESLALRKRTPSVGKAMDTPKPAGGDEKDMKAFMGTPVQKLDLPGNLPGSKRWPQTPKEKAQALEDLAGFKELFQTPGTDKPTTDEKTTKIACKSPQPDPVDTPASTKQRPKRNLRKADVEEEFLALRKRTPSAGKAMDTPKPAVSDEKNINTFVETPVQKLDLLGNLPGSKRQPQTPKEKAEALEDLVGFKELFQTPGHTEESMTDDKITEVSCKSPQPESFKTSRSSKQRLKIPLVKVDMKEEPLAVSKLTRTSGETTQTHTEPTGDSKSIKAFKESPKQILDPAASVTGSRRQLRTRKEKARALEDLVDFKELFSAPGHTEESMTIDKNTKIPCKSPPPELTDTATSTKRCPKTRPRKEVKEELSAVERLTQTSGQSTHTHKEPASGDEGIKVLKQRAKKKPNPVEEEPSRRRPRAPKEKAQPLEDLAGFTELSETSGHTQESLTAGKATKIPCESPPLEVVDTTASTKRHLRTRVQKVQVKEEPSAVKFTQTSGETTDADKEPAGEDKGIKALKESAKQTPAPAASVTGSRRRPRAPRESAQAIEDLAGFKDPAAGHTEESMTDDKTTKIPCKSSPELEDTATSSKRRPRTRAQKVEVKEELLAVGKLTQTSGETTHTDKEPVGEGKGTKAFKQPAKRKLDAEDVIGSRRQPRAPKEKAQPLEDLASFQELSQTPGHTEELANGAADSFTSAPKQTPDSGKPLKISRRVLRAPKVEPVGDVVSTRDPVKSQSKSNTSLPPLPFKRGGGKDGSVTGTKRLRCMPAPEEIVEELPASKKQRVAPRARGKSSEPVVIMKRSLRTSAKRIEPAEELNSNDMKTNKEEHKLQDSVPENKGISLRSRRQNKTEAEQQITEVFVLAERIEINRNEKKPMKTSPEMDIQNPDDGARKPIPRDKVTENKRCLRSARQNESSQPKVAEESGGQKSAKVLMQNQKGKGEAGNSDSMCLRSRKTKSQPAASTLESKSVQRVTRSVKRCAENPKKAEDNVCVKKIRTRSHRDSEDI

SEQ ID NO: 5436 - protein, 3256 aa, Homo sapiens
MWPTRRLVTIKRSGVDGPHFPLSLSTCLFGRGIECDIRIQLPVVSKQHCKIEIHEQEAILHNFSSTNPTQVNGSVIDEPVRLKHGDVITIIDRSFRYENESLQNGRKSTEFPRKIREQEPARRVSRSSFSSDPDEKAQDSKAYSKITEGKVSGNPQVHIKNVKEDSTADDSKDSVAQGTTNVHSSEHAGRNGRNAADPISGDFKEISSVKLVSRYGELKSVPTTQCLDNSKKNESPFWKLYESVKKELDVKSQKENVLQYCRKSGLQTDYATEKESADGLQGETQLLVSRKSRPKSGGSGHAVAEPASPEQELDQNKGKGRDVESVQTPSKAVGASFPLYEPAKMKTPVQYSQQQNSPQKHKNKDLYTTGRRESVNLGKSEGFKAGDKTLTPRKLSTRNRTPAKVEDAADSATKPENLSSKTRGSIPTDVEVLPTETEIHNEPFLTLWLTQVERKIQKDSLSKPEKLGTTAGQMCSGLPGLSSVDINNFGDSINESEGIPLKRRRVSFGGHLRPELFDENLPPNTPLKRGEAPTKRKSLVMHTPPVLKKIIKEQPQPSGKQESGSEIHVEVKAQSLVISPPAPSPRKTPVASDQRRRSCKTAPASSSKSQTEVPKRGGRKSGNLPSKRVSISRSQHDILQMICSKRRSGASEANLIVAKSWADVVKLGAKQTQTKVIKHGPQRSMNKRQRRPATPKKPVGEVHSQFSTGHANSPCTIIIGKAHTEKVHVPARPYRVLNNFISNQKMDFKEDLSGIAEMFKTPVKEQPQLTSTCHIAISNSENLLGKQFQGTDSGEEPLLPTSESFGGNVFFSAQNAAKQPSDKCSASPPLRRQCIRENGNVAKTPRNTYKMTSLETKTSDTETEPSKTVSTANRSGRSTEFRNIQKLPVESKSEETNTEIVECILKRGQKATLLQQRREGEMKEIERPFETYKENIELKENDEKMKAMKRSRTWGQKCAPMSDLTDLKSLPDTELMKDTARGQNLLQTQDHAKAPKSEKGKITKMPCQSLQPEPINTPTHTKQQLKASLGKVGVKEELLAVGKFTRTSGETTHTHREPAGDGKSIRTFKESPKQILDPAARVTGMKKWPRTPKEEAQSLEDLAGFKELFQTPGPSEESMTDEKTTKIACKSPPPESVDTPTSTKQWPKRSLRKADVEEEFLALRKLTPSAGKAMLTPKPAGGDEKDIKAFMGTPVQKLDLAGTLPGSKRQLQTPKEKAQALEDLAGFKELFQTPGHTEELVAAGKTTKIPCDSPQSDPVDTPTSTKQRPKRSIRKADVEGELLACRNLMPSAGKAMHTPKPSVGEEKDIIIFVGTPVQKLDLTENLTGSKRRPQTPKEEAQALEDLTGFKELFQTPGHTEEAVAAGKTTKMPCESSPPESADTPTSTRRQPKTPLEKRDVQKELSALKKLTQTSGETTHTDKVPGGEDKSINAFRETAKQKLDPAASVTGSKRHPKTKEKAQPLEDLAGLKELFQTPVCTDKPTTHEKTTKIACRSQPDPVDTPTSSKPQSKRSLRKVDVEEEFFALRKRTPSAGKAMHTPKPAVSGEKNIYAFMGTPVQKLDLTENLTGSKRRLQTPKEKAQALEDLAGFKELFQTRGHTEESMTNDKTAKVACKSSQPDPDKNPASSKRRLKTSLGKVGVKEELLAVGKLTQTSGETTHTHTEPTGDGKSMKAFMESPKQILDSAASLTGSKRQLRTPKGKSEVPEDLAGFIELFQTPSHTKESMTNEKTTKVSYRASQPDLVDTPTSSKPQPKRSLRKADTEEEFLAFRKQTPSAGKAMHTPKPAVGEEKDINTFLGTPVQKLDQPGNLPGSNRRLQTRKEKAQALEELTGFRELFQTPCTDNPTTDEKTTKKILCKSPQSDPADTPTNTKQRPKRSLKKADVEEEFLAFRKLTPSAGKAMHTPKAAVGEEKDINTFVGTPVEKLDLLGNLPGSKRRPQTPKEKAKALEDLAGFKELFQTPGHTEESMTDDKITEVSCKSPQPDPVKTPTSSKQRLKISLGKVGVKEEVLPVGKLTQTSGKTTQTHRETAGDGKSIKAFKESAKQMLDPANYGTGMERWPRTPKEEAQSLEDLAGFKELFQTPDHTEESTTDDKTTKIACKSPPPESMDTPTSTRRRPKTPLGKRDIVEELSALKQLTQTTHTDKVPGDEDKGINVFRETAKQKLDPAASVTGSKRQPRTPKGKAQPLEDLAGLKELFQTPICTDKPTTHEKTTKIACRSPQPDPVGTPTIFKPQSKRSLRKADVEEESLALRKRTPSVGKAMDTPKPAGGDEKDMKAFMGTPVQKLDLPGNLPGSKRWPQTPKEKAQALEDLAGFKELFQTPGTDKPTTDEKTTKIACKSPQPDPVDTPASTKQRPKRNLRKADVEEEFLALRKRTPSAGKAMDTPKPAVSDEKNINTFVETPVQKLDLLGNLPGSKRQPQTPKEKAEALEDLVGFKELFQTPGHTEESMTDDKITEVSCKSPQPESFKTSRSSKQRLKIPLVKVDMKEEPLAVSKLTRTSGETTQTHTEPTGDSKSIKAFKESPKQILDPAASVTGSRRQLRTRKEKARALEDLVDFKELFSAPGHTEESMTIDKNTKIPCKSPPPELTDTATSTKRCPKTRPRKEVKEELSAVERLTQTSGQSTHTHKEPASGDEGIKVLKQRAKKKPNPVEEEPSRRRPRAPKEKAQPLEDLAGFTELSETSGHTQESLTAGKATKIPCESPPLEVVDTTASTKRHLRTRVQKVQVKEEPSAVKFTQTSGETTDADKEPAGEDKGIKALKESAKQTPAPAASVTGSRRRPRAPRESAQAIEDLAGFKDPAAGHTEESMTDDKTTKIPCKSSPELEDTATSSKRRPRTRAQKVEVKEELLAVGKLTQTSGETTHTDKEPVGEGKGTKAFKQPAKRKLDAEDVIGSRRQPRAPKEKAQPLEDLASFQELSQTPGHTEELANGAADSFTSAPKQTPDSGKPLKISRRVLRAPKVEPVGDVVSTRDPVKSQSKSNTSLPPLPFKRGGGKDGSVTGTKRLRCMPAPEEIVEELPASKKQRVAPRARGKSSEPVVIMKRSLRTSAKRIEPAEELNSNDMKTNKEEHKLQDSVPENKGISLRSRRQNKTEAEQQITEVFVLAERIEINRNEKKPMKTSPEMDIQNPDDGARKPIPRDKVTENKRCLRSARQNESSQPKVAEESGGQKSAKVLMQNQKGKGEAGNSDSMCLRSRKTKSQPAASTLESKSVQRVTRSVKRCAENPKKAEDNVCVKKIRTRSHRDSEDI

SEQ ID NO: 5437 - protein, 150 aa, Homo sapiens
MRGDRGRGRGGRFGSRGGPGGGFRPFVPHIPFDFYLCEMAFPRVKPAPDETSFSEALLKRNQDLAPNSAEQASILSLVTKINNVIDNLIVAPGTFEVQIEEVRQVGSYKKGTMTTGHNVADLVVILKILPTCECACFWSWEQNIALGLGV

SEQ ID NO: 5438 - protein, 93 aa, Homo sapiens
MLTELEKALNSIIDVYHKYSLIKGNFHAVYRDDLKKLLETECPQYIRKKGADVWFKELDINTDGAVNFQEFLILVIKMGVAAHKKSHEESHKE

SEQ ID NO: 5439 - protein, 114 aa, Homo sapiens
MTCKMSQLERNIETIINTFHQYSVKLGHPDTLNQGEFKELVRKDLQNFLKKENKNEKVIEHIMEDLDTNADKQLSFEEFIMLMARLTWASHEKMHEGDEGPGHHHKPGLGEGTP

SEQ ID NO: 5440 - protein, 240 aa, Homo sapiens
MLRSCAARLRTLGALCLPPVGRRLPGSEPRPELRSFSSEEVILKDCSVPNPSWNKDLRLLFDQFMKKCEDGSWKRLPSYKRTPTEWIQDFKTHFLDPKLMKEEQMSQAQLFTRSFDDGLGFEYVMFYNDIEKRMVCLFQGGPYLEGPPGFIHGGAIATMIDATVGMCAMMAGGIVMTANLNINYKRPIPLCSVVMINSQLDKVEGRKFFVSCNVQSVDEKTLYSEATSLFIKLNPAKSLT

SEQ ID NO: 5441 - protein, 76 aa, Homo sapiens
MDTLDRVVKPKTKRAKRFLEKREPKLNENIKNAMLIKGGNANATVTKVLKDVNVFCFESYKFCFTVCTEKTIRCTI

SEQ ID NO: 5442 - protein, 227 aa, Homo sapiens
MASPSRQPPPGGSGLLQGSRARSYGSLVQSACSPVRERRLEHQLEPGDTLAGLALKYGVTMEQIKRANRLYTNDSIFLKKTLYIPILTEPRDLFNGLDSEEEKDGEEKVHPSNSEVWPHSTERKKQETGAGRANGEVLPTPGQETPTPIHDLSASDFLKKLDSQISLSKKAAAQKLKKGENGVPGEDAGLHLSSPWMQQRAVLGPVPLTRTSRTRTLRDQEDEIFKL

SEQ ID NO: 5443 - protein, 391 aa, Homo sapiens
MDSELMHSIVGSYHKPPERVFVPSFTQNEPSQNCHPANLEVTSPKILHSPNSQALILALKTLQEKIHRLELERTQAEDNLNILSREAAQYKKALENETNERNLAHQELIKQKKDISIQLSSAQSRCTLLEKQLEYTKRMVLNVEREKNMILEQQAQLQREKEQDQMKLYAKLEKLDVLEKECFRLTTTQKTAEDKIKHLEEKLKEEEHQRKLFQDKASELQTGLEISKIIMSSVSNLKHSKEKKKSSKKTKCIKRRPPWQICSKFGALPFVAEKMRQHRDPHILQKPFNVTETRCLPKPSRTTSWCKAIPPDSEKSISICDNLSELLMAMQDELDQMSMEHQELLKQMKETESHSVCDDIECELECLLKKMEIKGEQISKLKKHQDSVRRL

SEQ ID NO: 5444 - protein, 334 aa, Homo sapiens
MPYVDRQNRICGFLDIEENENSGKFLRRYFILDTREDSFVWYMDNPQNLPSGSSRVGAIKLTYISKVSDATKLRPKAEFCFVMNAGMRKYFLQANDQQDLVEWVNVLNKAIKITVPKQSDSQPNSDNLSRHGECGKKQVSYRTDIVGGVPIITPTQKEEVNECGESIDRNNLKRSQSHLPYFTPKPPQDSAVIKAGYCVKQGAVMKNWKRRYFQLDENTIGYFKSELEKEPLRVIPLKEVHKVQECKQSDIMMRDNLFEIVTTSRTFYVQADSPEEMHSWIKAVSGAIVAQRGPGRSASSMRQARRLSNPCIQRYTSRAGECSTYVGSHANVPS

SEQ ID NO: 5445 - protein, 383 aa, Homo sapiens
MPYVDRQNRICGFLDIEENENSGKFLRRYFILDTREDSFVWYMDNPQNLPSGSSRVGAIKLTYISKVSDATKLRPKAEFCFVMNAGMRKYFLQANDQQDLVEWVNVLNKAIKITVPKQSDSQPNSDNLSRHGECGKKQVSYRTDIVGGVPIITPTQKEEVNECGESIDRNNLKRSQSHLPYFTPKPPQDSAVIKAGYCVKQGAVMKNWKRRYFQLDENTIGYFKSELEKEPLRVIPLKEVHKVQECKQSDIMMRDNLFEIVTTSRTFYVQADSPEEMHSWIKAVSGAIVAQRGPGRSASSMRQARRLSNPCIQRSIPPVLQNPNTLSVLPTQPPPPHIPQPLAATLWSQPLPWRSEDFTSLLPRSSQGTSRSRLSLQENQLPK

SEQ ID NO: 5446 - protein, 404 aa, Homo sapiens
MPYVDRQNRICGFLDIEENENSGKFLRRYFILDTREDSFVWYMDNPQNLPSGSSRVGAIKLTYISKVSDATKLRPKAEFCFVMNAGMRKYFLQANDQQDLVEWVNVLNKAIKITVPKQSDSQPNSDNLSRHGECGKKQVSYRTDIVGGVPIITPTQKEEVNECGESIDRNNLKRSQSHLPYFTPKPPQDSAVIKAGYCVKQGAVMKNWKRRYFQLDENTIGYFKSELEKEPLRVIPLKEVHKVQECKQSDIMMRDNLFEIVTTSRTFYVQADSPEEMHSWIKAVSGAIVAQRGPGRSASSEHPPGPSESKHAFRPTNAATATSHSTASRSNSLVSTFTMEKRGFYESLAKVKPGNFKVQTVSPREPASKVTEQALLRPQSKNGPQEKDCDLVDLDDASLPVSDV

SEQ ID NO: 5447 - protein, 305 aa, Homo sapiens
MPCQRTAWIGCDRQRTPPFHWREIKSRVLMTPLALSPPRSTPEPDLSSIPQDAATVPSLAAPQALTVCLYINKQANAGPYLERKKVQQLPEHFGPERPSAVLQQAVQACIDCAHQQKLVFSLVKQGYGGEMVSVSASFDGKQHLRSLPVVNSIGYVLRFLAKLCRSLLCDDLFSHQPFPRGCSASEKVQEKEEGRMESVKTVTTEEYLVNPVGMNRYSVDTSASTFNHRGSLHPSSSLYCKRQNSGDSHLGGGPAATAGGPRTSPMSSGGPSAPGLRPPASSPKRNTTSLEGNRCGNVMHASASH

SEQ ID NO: 5448 - protein, 828 aa, Homo sapiens
MNSTEFTEDVEEVLKSITVKVETEAEDAALDCSVNSRTSEKHSVDSVLTALQDSSKRKQLVSDGLLDSVPGVKRRRLIPEALLAGMRNRENSSPCQGNGEQAGRGRSLGNVWPGEEEPCNDATTPSYKKPLYGISHKIMEKKNPPSGDLLNVYELFEKANASNSPSSLRLLNEPQKRDCGSTGAGTDNDPNIYFLIQKMFYMLNTLTSNMSQLHSKVDLLSLEVSRIKKQVSPTEMVAKFQPPPEYQLTAAELKQIVDQSLSGGDLACRLLVQLFPELFSDVDFSRGCSACGFAAKRKLESLHLQLIRNYVEVYYPSVKDTAVWQAECLPQLNDFFSRFWAQREMEDSQPSGQVASFFEAEQVDPGHFLDNKDQEEALSLDRSSTIASDHVVDTQDLTEFLDEASSPGEFAVFLLHRLFPELFDHRKLGEQYSCYGDGGKQELDPQRLQIIRNYTEIYFPDMQEEEAWLQQCAQRINDELEGLGLDAGSEGDPPRDDCYDSSSLPDDISVVKVEDSFEGERPGRRSKKIWLVPIDFDKLEIPQPDFEVPGADCLLSKEQLRSIYESSLSIGNFASRLLVHLFPELFTHENLRKQYNCSGSLGKKQLDPSRIKLIRHYVQLLYPRAKNDRVWTLEFVGKLDERCRRRDTEQRRSYQQQRKVHVPGPECRDLTSYAINPERFREEFEGPPLPPERSSKDFCKIPLDELVVPSPDFPVPSPYLLSDKEVREIVQQSLSVGNFAARLLVRLFPELFTAENLRLQYNHSGACNKKQLDPTRLRLIRHYVEAVYPVEKMEEVWHYECIPSIDERCRRPNRKKCDILKKAKKVEK

SEQ ID NO: 5449 - protein, 297 aa, Homo sapiens
MAGSGAKRSRDGELETSLNTQGCTTEGDLLFAQKCKELQGFIPPLTDLLNGLKMGRFERGLSSFQQSVAMDRIQRIVGVLQKPQMGERYLGTLLQVEGMLKTWFPQIAAQKSSLGGGKHQLTKHFPSHHSDSAASSPASPMEKMDQTQLGHLALKPKQPWHLTQWPAMNLTWIHTTPICNPPLSSPGTISFSHGPLGTGTGIGVILFLQHGVQPFTHSAPTTPVPPTTASPVIPGEPMKLSGEGPRCYSLPVTLPSDWSYTLSPPSLPTLARKMTIGHREQQRSHPPVAADAHLLNL

SEQ ID NO: 5450 - protein, 126 aa, Homo sapiens
MPEPAKSAPAPKKGSKKAVTKAQKKDGKKRKRSRKESYSIYVYKVLKQVHPDTGISSKAMGIMNSFVNDIFERIAGEASRLAHYNKRSTITSREIQTAVRLLLPGELAKHAVSEGTKAVTKYTSSK

SEQ ID NO: 5451 - protein, 136 aa, Homo sapiens; identical to SEQ ID NO: 5304

SEQ ID NO: 5452 - protein, 126 aa, Homo sapiens
MPDPAKSAPAPKKGSKKAVTKVQKKDGKKRKRSRKESYSVYVYKVLKQVHPDTGISSKAMGIMNSFVNDIFERIAGEASRLAHYNKRSTITSREIQTAVRLLLPGELAKHAVSEGTKAVTKYTSSK

SEQ ID NO: 5453 - protein, 218 aa, Homo sapiens
MASRGGGRGRGRGQLTFNVEAVGIGKGDALPPPTLQPSPLFPPLEFRPVPLPSGEEGEYVLALKQELRGAMRQLPYFIRPAVPKRDVERYSDKYQMSGPIDNAIDWNPDWRRLPRELKIRVRKLQKERITILLPKRPPKTTEDKEETIQKLETLEKKEEEVTSEEDEEKEEEEEKEEEEEEEYDEEEHEEETDYIMSYFDNGEDFGGDSDDNMDEAIY

SEQ ID NO: 5454 - protein, 167 aa, Homo sapiens
MSNKVPVVQHPHHVHPLTPLITYSNEHFTPGNPPPHLPADVDPKTGIPRPPHPPDISPYYPLSPGTVGQIPHPLGWLVPQQGQPVYPITTGGFRHPYPTALTVNASMSRFPPHMVPPHHTLHTTGIPHPAIVTPTVKQESSQSDVGSLHSSKHQDSKKEEEKKKPHI

SEQ ID NO: 5455 - protein, 455 aa, Homo sapiens
MPQLNGGGGDDLGANDELISFKDEGEQEEKSSENSSAERDLADVKSSLVNESETNQNSSSDSEAERRPPPRSESFRDKSRESLEEAAKRQDGGLFKGPPYPGYPFIMIPDLTSPYLPNGSLSPTARTYLQMKWPLLDVQAGSLQSRQALKDARSPSPAHIVSNKVPVVQHPHHVHPLTPLITYSNEHFTPGNPPPHLPADVDPKTGIPRPPHPPDISPYYPLSPGTVGQIPHPLGWQGQPVYPITTGGFRHPYPTALTVNASMSRFPPHMVPPHHTLHTTGIPHPAIVTPTVKQESSQSDVGSLHSSKHQDSKKEEEKKKPHIKKPLNAFMLYMKEMRAKVVAECTLKESAAINQILGRRWHALSREEQAKYYELARKERQLHMQLYPGWSARDNYGKKKKRKRDKQPGETNEHSECFLNPCLSLPPITDLSAPKKCRARFGLDQQNNWCGPCSL

SEQ ID NO: 5456 - protein, 596 aa, Homo sapiens
MPQLNGGGGDDLGANDELISFKDEGEQEEKSSENSSAERDLADVKSSLVNESETNQNSSSDSEAERRPPPRSESFRDKSRESLEEAAKRQDGGLFKGPPYPGYPFIMIPDLTSPYLPNGSLSPTARTYLQMKWPLLDVQAGSLQSRQALKDARSPSPAHIVSNKVPVVQHPHHVHPLTPLITYSNEHFTPGNPPPHLPADVDPKTGIPRPPHPPDISPYYPLSPGTVGQIPHPLGWLVPQQGQPVYPITTGGFRHPYPTALTVNASMSRFPPHMVPPHHTLHTTGIPHPAIVTPTVKQESSQSDVGSLHSSKHQDSKKEEEKKKPHIKKPLNAFMLYMKEMRAKVVAECTLKESAAINQILGRRWHALSREEQAKYYELARKERQLHMQLYPGWSARDNYGKKKKRKRDKQPGETNEHSECFLNPCLSLPPITDLSAPKKCRARFGLDQQNNWCGPCRRKKKCVRYIQGEGSCLSPPSSDGSLLDSPPPSPNLLGSPPRDAKSQTEQTQPLSLSLKPDPLAHLSMMPPPPALLLAEATHKASALCPNGALDLPPAALQPAAPSSSIAQPSTSSLHSHSSLAGTQPQPLSLVTKSLE

SEQ ID NO: 5457 - protein, 532 aa, Homo sapiens
MAFANLRKVLISDSLDPCCRKILQDGGLQVVEKQNLSKEELIAELQDCEGLIVRSATKVTADVINAAEKLQVVGRAGTGVDNVDLEAATRKGILVMNTPNGNSLSAAELTCGMIMCLARQIPQATASMKDGKWERKKFMGTELNGKTLGILGLGRIGREVATRMQSFGMKTIGYDPIISPEVSASFGVQQLPLEEIWPLCDFITVHTPLLPSTTGLLNDNTFAQCKKGVRVVNCARGGIVDEGALLRALQSGQCAGAALDVFTEEPPRDRALVDHENVISCPHLGASTKEAQSRCGEEIAVQFVDMVKGKSLTGVVNAQALTSAFSPHTKPWIGLAEALGTLMRAWAGSPKGTIQVITQGTSLKNAGNCLSPAVIVGLLKEASKQADVNLVNAKLLVKEAGLNVTTSHSPAAPGEQGFGECLLAVALAGAPYQAVGLVQGTTPVLQGLNGAVFRPEVPLRRDLPLLLFRTQTSDPAMLPTMIGVSSISRPPGRGRRAAAVLPDFTGVRWGDLARHGHLLLAAQPGSVEAACD

SEQ ID NO: 5458 - protein, 391 aa, Homo sapiens
MAEESSCTRDCMSFSVLNWDQVSRLHEVLTEVVPIHGRGNFPTLEITLKDIVQTVRSRLEEAGIKVHDVRLNGSAAGHVLVKDNGLGCKDLDLIFHVALPTEAEFQLVRDVVLCSLLNFLPEGVNKLKISPVTLKEAYVQKLVKVCTDTDRWSLISLSNKNGKNVELKFVDSIRRQFEFSVDSFQIILDSLLFFYDCSNNPISEHFHPTVIGESMYGDFEEAFDHLQNRLIATKNPEEIRGGGLLKYSNLLVRDFRPTDQEEIKTLERYMCSRFFIDFPDILEQQRKLETYLQNHFAEEERSKYDYLMILRRVVNESTVCLMGHERRQTLNLISLLALRVLAEQNIIPSATNVTCYYQPAPYVSDGNFSNYYVAHPPVTYSQPYPTWLPCN

SEQ ID NO: 5459 - protein, 131 aa, Homo sapiens
MTLKASEGESGGSMHTALSDLYLEHLLQKRSRPEAVSHPLNTVTEDMYTNGSPAPGSPAQVKGQEGITLKLNEKQSCTVARILHGGMIHRQGSLHVGDEILEINGTNVTNHSVDQLQKAMKETKGMISLKV

SEQ ID NO: 5460 - protein, 466 aa, Homo sapiens
MTLKASEGESGGSMHTALSDLYLEHLLQKRSRPEAVSHPLNTVTEDMYTNGSPAPGSPAQVKGQEVRKVRLIQFEKVTEEPMGITLKLNEKQSCTVARILHGGMIHRQGSLHVGDEILEINGTNVTNHSVDQLQKAMKETKGMISLKVIPNQQSRLPALQMFMRAQFDYDPKKDNLIPCKEAGLKFATGDIIQIINKDDSNWWQGRVEGSSKESAGLIPSPELQEWRVASMAQSAPSEAPSCSPFGKKKKYKDKYLAKHSSIFDQLDVVSYEEVVRLPAFKRKTLVLIGASGVGRSHIKNALLSQNPEKFVYPVPYTTRPPRKSEEDGKEYHFISTEEMTRNISANEFLEFGSYQGNMFGTKFETVHQIHKQNKIAILDIEPQTLKIVRTAELSPFIVFIAPTDQGTQTEALQQLQKDSEAIRSQYAHYFDLSLVNNGVDETLKKLQEAFDQACSSPQWVPVSWVY

SEQ ID NO: 5461 - protein, 586 aa, Homo sapiens
MSAGDAVCTGWLVKSPPERKLQRYAWRKRWFVLRRGRMSGNPDVLEYYRNKHSSKPIRVIDLSECAVWKHVGPSFVRKEFQNNFVFIVKTTSRTFYLVAKTEQEMQVWVHSISQVCNLGHLEDGADSMESLSYTPSSLQPSSASSLLTAHAASSSLPRDDPNTNAVATEETRSESELLFLPDYLVLSNCETGRLHHTSLPTRCDSWSNSDRSLEQASFDDVFVDCLQPLPSSHLVHPSCHGSGAQEVPSSRPQAALIWSREINGPPRDHLSSSPLLESSLSSTIQVDKNQGSLPCGAKELDIMSNTPPPRPPKPSHLSERRQEEWSTHSGSKKPECTLVPRRISLSGLDNMRTWKADVEGQSLRHRDKRLSLNLPCRFSPMYPTASASIEDSYVPMSPQAGASGLGPHCSPDDYIPMNSGSISSPLPELPANLEPPPVNRDLKPQRKSRPPPLDLRNLSIIREHASLTRTRTVPCSRTSFLSPERNGINSARFFANPVSREDEESYIEMEEHRTASSLSSGALTWTKKFSLDYLALDFNSASPAPMQQKLLLSEEQRVDYVQVDEQKTQALQSTKQEWTDERQSKV

SEQ ID NO: 5462 - protein, 384 aa, Homo sapiens
MKVTSLDGRQLRKMLRKEAAARCVVLDCRPYLAFAASNVRGSLNVNLNSVVLRRARGGAVSARYVLPDEAARARLLQEGGGGVAAVVVLDQGSRHWQKLREESAARVVLTSLLACLPAGPRVYFLKGGYETFYSEYPECCVDVKPISQEKIESERALISQCGKPVVNVSYRPAYDQGGPVEILPFLYLGSAYHASKCEFLANLHITALLNVSRRTSEACATHLHYKWIPVEDSHTADISSHFQEAIDFIDCVREKGGKVLVHCEAGISRSPTICMAYLMKTKQFRLKEAFDYIKQRRSMVSPNFGFMGQLLQYESEILPSTPNPQPPSCQGEAAGSSLIGHLQTLSPDMQGAYCTFPASVLAPVPTHSTVSELSRSPVATATSC

SEQ ID NO: 5463 - protein, 199 aa, Homo sapiens
MAAIRKKLVIVGDGACGKTCLLIVFSKDQFPEVYVPTVFENYIADIEVDGKQVELALWDTAGQEDYDRLRPLSYPDTDVILMCFSIDSPDSLENIPEKWTPEVKHFCPNVPIILVGNKKDLRKAGTWRTGSVPLATLSAQPRPRRECGRCLRWPLGLASRSARTSVGGAVPFSEIPKAFPTCPLPSQGYRNYPPTTPAS

SEQ ID NO: 5464 - protein, 180 aa, Homo sapiens
MQLTVKALQGRECSLQVPEDELVSTLKQLVSEKLNVPVRQQRLLFKGKALADGKRLSDYSIGPNSKLNLVVKPLEKVLLEEGEAQRLADSPPPQVWQLISKVLARHFSAADASRVLEQLQRDYERSLSRLTLDDIERWAHHHHSWHVPGSGQVLGTPHSLTWVCFHTLRRGEPAQQRHRR

SEQ ID NO: 5465 - protein, 157 aa, Homo sapiens
MQLTVKALQGRECSLQVPEDELVSTLKQLVSEKLNVPVRQQRLLFKGKALADGKRLSDYSIGPNSKLNLVVKPLEKVLLEEGEAQRLADSPPPQVWQLISKVLARHFSAADASRVLEQLQRDYERSLSRLTLDDIERLASRFLHPEVTETMEKGFSK

SEQ ID NO: 5466 - protein, 572 aa, Homo sapiens
MEPEAPRRRHTHQRGYLLTRNPHLNKDLAFTLEERQQLNIHGLLPPSFNSQEIQVLRVVKNFEHLNSDFDRYLLLMDLQDRNEKLFYRVLTSDIEKFMPIVYTPTVGLACQQYSLVFRKPRGLFITIHDRGHIASVLNAWPEDVIKAIVVTDGERILGLGDLGCNGMGIPVGKLALYTACGGMNPQECLPVILDVGTENEELLKDPLYIGLRQRRVRGSEYDDFLDEFMEAVSSKYGMNCLIQFEDFANVNAFRLLNKYRNQYCTFNDDIQGTASVAVAGLLAALRITKNKLSDQTILFQGAGEAALGIAHLIVMALEKEGLPKEKAIKKIWLVDSKGLIVKGRASLTQEKEKFAHEHEEMKNLEAIVQEIKPTALIGVAAIGGAFSEQILKDMAAFNERPIIFALSNPTSKAECSAEQCYKITKGRAIFASGSPFDPVTLPNGQTLYPGQGNNSYVFPGVALGVVACGLRQITDNIFLTTAEVIAQQVSDKHLEEGRLYPPLNTIRDVSLKIAEKIVKDAYQEKTATVYPEPQNKEAFVRSQMYSTDYDQILPDCYSWPEEVQKIQTKVDQ

SEQ ID NO: 5467 - protein, 380 aa, Homo sapiens
MGATTMDQKSLWAGSAYKLVCYFTNWSQDRQEPGKFTPENIDPFLCSHLIYSFASIENNKVIIKDKSEVMLYQTINSLKTKNPKLKILLSIGGYLFGSKGFHPMVDSSTSRLEFINSIILFLRNHNFDGLDVSWIYPDQKENTHFTVLIHELAEAFQKDFTKSTKERLLLTAGVSAGRQMIDNSYQVEKLAKDLDFINLLSFDFHGSWEKPLITGHNSPLSKGWQDRGPSSYYNVEYAVGYWIHKGMPSEKVVMGIPTYGHSFTLASAETTVGAPASGPGAAGPITESSGFLAYYEICQFLKGAKITRLQDQQVPYAVKGNQWVGYDDVKSMETKVQFLKNLNLGGAMIWSIDMDDFTGKSCNQGPYPLVQAVKRSLGSL

SEQ ID NO: 5468 - protein, 390 aa, Homo sapiens
MGATTMDQKSLWAGVVVLLLLQGGSAYKLVCYFTNWSQDRQEPGKFTPENIDPFLCSHLIYSFASIENNKVIIKDKSEVMLYQTINSLKTKNPKLKILLSIGGYLFGSKGFHPMVDSSTSRLEFINSIILFLRNHNFDGLDVSWIYPDQKENTHFTVLIHELAEAFQKDFTKSTKERLLLTAGVSAGRQMIDNSYQVEKLAKDLDFINLLSFDFHGSWEKPLITGHNSPLSKGWQDRGPSSYYNVEYAVGYWIHKGMPSEKVVMGIPTYGHSFTLASAETTVGAPASGPGAAGPITESSGFLAYYEICQFLKGAKITRLQDQQVPYAVKGNQWVGYDDVKSMETKVQFLKNLNLGGAMIWSIDMDDFTGKSCNQGPYPLVQAVKRSLGSL

SEQ ID NO: 5469 - protein, 461 aa, Homo sapiens
MHQRYFWTDQGQVALGGHYMAEGEGYFAMSEDELACSPYIPLGGDFGGGDFGGGDFGGGDFGGGGSFGGHCLDYCESPTAHCNVLNWEQVQRLDGILSETIPIHGRGNFPTLELQPSLIVKVVRRRLAEKRIGVRDVRLNGSAASHVLHQDSGLGYKDLDLIFCADLRGEGEFQTVKDVVLDCLLDFLPEGVNKEKITPLTLKEAYVQKMVKVCNDSDRWSLISLSNNSGKNVELKFVDSLRRQFEFSVDSFQIKLDSLLLFYECSENPMTETFHPTIIGESVYGDFQEAFDHLCNKIIATRNPEEIRGGGLLKYCNLLVRGFRPASDEIKTLQRYMCSRFFIDFSDIGEQQRKLESYLQNHFVGLEDRKYEYLMTLHGVVNESTVCLMGHERRQTLNLITMLAIRVLADQNVIPNVANVTCYYQPAPYVADANFSNYYIAQVQPVFTCQQQTYSTWLPCN

SEQ ID NO: 5470 - protein, 523 aa, Homo sapiens
MQMRRVWRTCRSGPRKRREARYKKSTEDIFPAQLLKLQRHERVWQQEPPVRDHRSWGGSGAGGVAGREWTDQGQVALGGHYMAEGEGYFAMSEDELACSPYIPLGGDFGGGDFGGGDFGGGDFGGGGSFGGHCLDYCESPTAHCNVLNWEQVQRLDGILSETIPIHGRGNFPTLELQPSLIVKVVRRRLAEKRIGVRDVRLNGSAASHVLHQDSGLGYKDLDLIFCADLRGEGEFQTVKDVVLDCLLDFLPEGVNKEKITPLTLKEAYVQKMVKVCNDSDRWSLISLSNNSGKNVELKFVDSLRRQFEFSVDSFQIKLDSLLLFYECSENPMTETFHPTIIGESVYGDFQEAFDHLCNKIIATRNPEEIRGGGLLKYCNLLVRGFRPASDEIKTLQRYMCSRFFIDFSDIGEQQRKLESYLQNHFVGLEDRKYEYLMTLHGVVNESTVCLMGHERRQTLNLITMLAIRVLADQNVIPNVANVTCYYQPAPYVADANFSNYYIAQVQPVFTCQQQTYSTWLPCN

SEQ ID NO: 5471 - protein, 334 aa, Homo sapiens
MGGAVSAGEDNDELIDNLKEAQYIRTELVEQAFRAIDRADYYLEEFKENAYKDLAWKHGNIHLSAPCIYSEVMEALDLQPGLSFLNLGSGTGYLSSMVGLILGPFGVNHGVELHSDVIEYAKQKLDFFIRTSDSFDKFDFCEPSFVTGNCLEISPDCSQYDRVYCGAGVQKEHEEYMKNLLKVGGILVMPLEEKPCHSESGKSRLVQLPPVAVRSLQDLARIAIRGTIKKIIHQETVSKNGNGLKNTPRFKRRRVRRRRMETIVFLDKEVFASRISNPSDDNSCEDLEEERREEEEKTPPETKPDPPVNFLRQKVLSLPLPDPLKYYLLYYREK

SEQ ID NO: 5472 - protein, 857 aa, Homo sapiens
MESEDLSGRELTIDSIMNKVRDIKNKFKNEDLTDELSLNKISADTTDNSGTVNQIMMMANNPEDWLSLLLKLEKNSVPLSDALLNKLIGRYSQAIEALPPDKYGQNESFARIQVRFAELKAIQEPDDARDYFQMARANCKKFAFVHISFAQFELSQGNVKKSKQLLQKAVERGAVPLEMLEIALRNLNLQKKQLLSEEEKKNLSASTVLTAQESFSGSLGHLQNRNNSCDSRGQTTKARFLYGENMPPQDAEIGYRNSLRQTNKTKQSCPFGRVPVNLLNSPDCDVKTDDSVVPCFMKRQTSRSECRDLVVPGSKPSGNDSCELRNLKSVQNSHFKEPLVSDEKSSELIITDSITLKNKTESSLLAKLEETKEYQEPEVPESNQKQWQSKRKSECINQNPAASSNHWQIPELARKVNTEQKHTTFEQPVFSVSKQSPPISTSKWFDPKSICKTPSSNTLDDYMSCFRTPVVKNDFPPACQLSTPYGQPACFQQQQHQILATPLQNLQVLASSSANECISVKGRIYSILKQIGSGGSSKVFQVLNEKKQIYAIKYVNLEEADNQTLDSYRNEIAYLNKLQQHSDKIIRLYDYEITDQYIYMVMECGNIDLNSWLKKKKSIDPWERKSYWKNMLEAVHTIHQHGIVHSDLKPANFLIVDGMLKLIDFGIANQMQPDTTSVVKDSQVGTVNYMPPEAIKDMSSSRENGKSKSKISPKSDVWSLGCILYYMTYGKTPFQQIINQISKLHAIIDPNHEIEFPDIPEKDLQDVLKCCLKRDPKQRISIPELLAHPYVQIQTHPVNQMAKGTTEEMKYVLGQLVGLNSPNSILKAAKTLYEHYSGGESHNSSSSKTFEKKRGKK

SEQ ID NO: 5473 - protein, 202 aa, Homo sapiens
MLGSLLAQLSFPGFPSIQLPYLIDGAHKITQSNAILCYIARKHNLCGETEEEKIRVDILENQAMDVSNQLARVCYSPDFEKLKPEYLEELPTMMQHFSQFLGKRPWFVGDKITFVDFLAYDVLDLHRIFEPNCLDAFPNLKDFISRFEVMPPSSFLFDAPCSVTSFQMLSQSWSYIKNNLHLLSAGFMPGTLPSTLYLSCGI

SEQ ID NO: 5474 - protein, 107 aa, Homo sapiens
MVIRVFIASSSGFVAIKKKQQDVVRFLEANKIEFEEVDITMSEEQRQWMYKNVPPEKKPTQGNPLPPQIFNGDRYCGDYDSFFESKESNTVFSFLGLKPRLASKAEP

SEQ ID NO: 5475 - protein, 375 aa, Homo sapiens
MAALRDAEIQKDVQTYYGQVLKRSADLQTNGCVTTARPVPKHIREALQNVHEEVALRYYGCGLVIPEHLENCWILDLGSGSGRDCYVLSQLVGEKGHVTGIDMTKGQVEVAEKYLDYHMEKYGFQASNVTFIHGYIEKLGEAGIKNESHDIVVSNCVINLVPDKQQVLQEAYRVLKHGGELYFSDVYTSLELPEEIRTHKVLWGECLGGALYWKELAVLAQKIGFCPPRLVTANLITIQNKELERVIGDCRFVSATFRLFKHSKTGPTKRCQVIYNGGITGHEKELMFDANFTFKEGEIVEVDEETAAILKNSRFAQDFLIRPIGEKLPTSGGCSALELKDIITDPFKLAEESDSMKSRCVPDAAGGCCGTKKSC

SEQ ID NO: 5476 - protein, 333 aa, Homo sapiens
MEDLEEDVRFIVDETLDFGGLSPSDSREEEDITVLVTPEKPLRRGLSHRSDPNAVAPAPQGVRLSLGPLSPEKLEEILDEANRLAAQLEQCALQDRESAGEGLGPRRVKPSPRRETFVLKDSPVRDLLPTVNSLTRSTPSPSSLTPRLRSNDRKGSVRALRATSGKRPSNMKRESPTCNLFPASKSPASSPLTRSTPPVRGRAGPSGRAAASPPTPIRSVLAPQPSTSNSQRLPRPQGAAAKSSSQLPIPSAIPRPASRMPLTSRSVPPGRGALPPDSLSTRKGLPRPSTAGHRVRESGHKVPVSQRLNLPVMGATRSNLQPPRKVAVPGPTR

SEQ ID NO: 5477 - protein, 310 aa, Homo sapiens
MEDLEEDVRFIVDETLDFGGLSPSDSREEEDITVLVTPEKPLRRGLSHRSDPNAVAPAPQGVRLSLGPLSPEKLEEILDEANRLAAQLEQCALQDRESAGEGLGPRRVKPSPRRETFVLKDSPVRDLLPTVNSLTRSTPSPSSLTPRLRSNDRKGSVRALRATSGKRPSNMKRESPTCNLFPASKSPASSPLTRSTPPVRGRAGPSGRAAASEETRAAKLRACQPNATHQPECATWQRCPTSGFSVNSKRASKTKHCRTQSAGKWTQGSCFPATKSSCHGCHSQQSAAPQESGSPRTYQVKRSGQQARLQ

SEQ ID NO: 5478 - protein, 900 aa, Homo sapiens
MESCYNPGLDGIIEYDDFKLNSSIVEPKEPAPETADGPYLVIVEQPKQRGFRFRYGCEGPSHGGLPGASSEKGRKTYPTVKICNYEGPAKIEVDLVTHSDPPRAHAHSLVGKQCSELGICAVSVGPKDMTAQFNNLGVLHVTKKNMMGTMIQKLQRQRLRSRPQGLTEAEQRELEQEAKELKKVMDLSIVRLRFSAFLRASDGSFSLPLKPVISQPIHDSKSPGASNLKISRMDKTAGSVRGGDEVYLLCDKVQKDDIEVRFYEDDENGWQAFGDFSPTDVHKQYAIVFRTPPYHKMKIERPVTVFLQLKRKRGGDVSDSKQFTYYPLVEDKEEVQRKRRKALPTFSQPFGGGSHMGGGSGGAAGGYGGAGGGGSLGFFPSSLAYSPYQSGAGPMGCYPGGGGGAQMAATVPSRDSGEEAAEPSAPSRTPQCEPQAPEMLQRAREYNARLFGLAQRSARALLDYGVTADARALLAGQRHLLTAQDENGDTPLHLAIIHGQTSVIEQIVYVIHHAQDLGVVNLTNHLHQTPLHLAVITGQTSVVSFLLRVGADPALLDRHGDSAMHLALRAGAGAPELLRALLQSGAPAVPQLLHMPDFEGLYPVHLAVRARSPECLDLLVDSGAEVEATERQGGRTALHLATEMEELGLVTHLVTKLRANVNARTFAGNTPLHLAAGLGYPTLTRLLLKAGADIHAENEEPLCPLPSPPTSDSDSDSEGPEKDTRSSFRGHTPLDLTCSTKVKTLLLNAAQNTMEPPLTPPSPAGPGLSLGDTALQNLEQLLDGPEAQGSWAELAERLGLRSLVDTYRQTTSPSGSLLRSYELAGGDLAGLLEALSDMGLEEGVRLLRGPETRDKLPSTAEVKEDSAYGSQSVEQEAEKLGPPPEPPGGLCHGHPQPQVH

SEQ ID NO: 5479 - protein, 1253 aa, Homo sapiens
MEDGKPVWAPHPTDGFQMGNIVDIGPDSLTIEPLNQKGKTFLALINQVFPAEEDSKKDVEDNCSLMYLNEATLLHNIKVRYSKDRIYTYVANILIAVNPYFDIPKIYSSEAIKSYQGKSLGTRPPHVFAIADKAFRDMKVLKMSQSIIVSGESGAGKTENTKFVLRYLTESYGTGQDIDDRIVEANPLLEAFGNAKTVRNNNSSRFGKFVEIHFNEKSSVVGGFVSHYLLEKSRICVQGKEERNYHIFYRLCAGASEDIREKLHLSSPDNFRYLNRGCTRYFANKETDKQILQNRKSPEYLKAGSMKDPLLDDHGDFIRMCTAMKKIGLDDEEKLDLFRVVAGVLHLGNIDFEEAGSTSGGCNLKNKSAQSLEYCAELLGLDQDDLRVSLTTRVMLTTAGGTKGTVIKVPLKVEQANNARDALAKTVYSHLFDHVVNRVNQCFPFETSSYFIGVLDIAGFEYFEHNSFEQFCINYCNEKLQQFFNERILKEEQELYQKEGLGVNEVHYVDNQDCIDLIEAKLVGILDILDEENRLPQPSDQHFTSAVHQKHKDHFRLTIPRKSKLAVHRNIRDDEGFIIRHFAGAVCYETTQFVEKNNDALHMSLESLICESRDKFIRELFESSTNNNKDTKQKAGKLSFISVGNKFKTQLNLLLDKLRSTGASFIRCIKPNLKMTSHHFEGAQILSQLQCSGMVSVLDLMQGGYPSRASFHELYNMYKKYMPDKLARLDPRLFCKALFKALGLNENDYKFGLTKVFFRPGKFAEFDQIMKSDPDHLAELVKRVNHWLTCSRWKKVQWCSLSVIKLKNKIKYRAEACIKMQKTIRMWLCKRRHKPRIDGLVKVGTLKKRLDKFNEVVSVLKDGKPEMNKQIKNLEISIDTLMAKIKSTMMTQEQIQKEYDALVKSSEELLSALQKKKQQEEEAERLRRIQEEMEKERKRREEDEKRRRKEEEERRMKLEMEAKRKQEEEERKKREDDEKRIQAEVEAQLARQKEEESQQQAVLEQERRDRELALRIAQSEAELISDEAQADLALRRGPAVLATKAAAGTKKYDLSKWKYAELRDTINTSCDIELLAACREEFHRRLKVYHAWKSKNKKRNTETEQRAPKSVTDYAQQNPAAQIPARQREIEMNRQQRFFRIPFIRPADQYKDPQSKKKGWWYAHFDGPWIARQMELHPDKPPILLVAGKDDMEMCELNLEETGLTRKRGAEILPRQFEEIWERCGGIQYLQNAIESRQARPTYATAMLQSLLK

SEQ ID NO: 5480 - protein, 1285 aa, Homo sapiens
MEDGKPVWAPHPTDGFQMGNIVDIGPDSLTIEPLNQKGKTFLALINQVFPAEEDSKKDVEDNCSLMYLNEATLLHNIKVRYSKDRIYTYVANILIAVNPYFDIPKIYSSEAIKSYQGKSLGTRPPHVFAIADKAFRDMKVLKMSQSIIVSGESGAGKTENTKFVLRYLTESYGTGQDIDDRIVEANPLLEAFGNAKTVRNNNSSRFGKFVEIHFNEKSSVVGGFVSHYLLEKSRICVQGKEERNYHIFYRLCAGASEDIREKLHLSSPDNFRYLNRGCTRYFANKETDKQILQNRKSPEYLKAGSMKDPLLDDHGDFIRMCTAMKKIGLDDEEKLDLFRVVAGVLHLGNIDFEEAGSTSGGCNLKNKSAQSLEYCAELLGLDQDDLRVSLTTRVMLTTAGGTKGTVIKVPLKVEQANNARDALAKTVYSHLFDHVVNRVNQCFPFETSSYFIGVLDIAGFEYFEHNSFEQFCINYCNEKLQQFFNERILKEEQELYQKEGLGVNEVHYVDNQDCIDLIEAKLVGILDILDEENRLPQPSDQHFTSAVHQKHKDHFRLTIPRKSKLAVHRNIRDDEGFIIRHFAGAVCYETTQFVEKNNDALHMSLESLICESRDKFIRELFESSTNNNKDTKQKAGKLSFISVGNKFKTQLNLLLDKLRSTGASFIRCIKPNLKMTSHHFEGAQILSQLQCSGMVSVLDLMQGGYPSRASFHELYNMYKKYMPDKLARLDPRLFCKALFKALGLNENDYKFGLTKVFFRPGKFAEFDQIMKSDPDHLAELVKRVNHWLTCSRWKKVQWCSLSVIKLKNKIKYRAEACIKMQKTIRMWLCKRRHKPRIDGLVKVGTLKKRLDKFNEVVSVLKDGKPEMNKQIKNLEISIDTLMAKIKSTMMTQEQIQKEYDALVKSSEELLSALQKKKQQEEEAERLRRIQEEMEKERKRREEDEKRRRKEEEERRMKLEMEAKRKQEEEERKKREDDEKRIQAEVEAQLARQKEEESQQQAVLEQERRDRELALRIAQSEAELISDEAQADLALRRNDGTRPKMTPEQMAKEMSEFLSRGPAVLATKAAAGTKKYDLSKWKYAELRDTINTSCDIELLAACREEFHRRLKVYHAWKSKNKKRNTETEQRAPKSVTDYDFAPFLNNSPQQNPAAQIPARQREIEMNRQQRFFRIPFIRPADQYKDPQSKKKGWWYAHFDGPWIARQMELHPDKPPILLVAGKDDMEMCELNLEETGLTRKRGAEILPRQFEEIWERCGGIQYLQNAIESRQARPTYATAMLQSLLK

SEQ ID NO: 5481 - protein, 1295 aa, Homo sapiens [sequence omitted]

SEQ ID NO: 5482 - protein, 1262 aa, Homo sapiens
MEDGKPVWAPHPTDGFQMGNIVDIGPDSLTIEPLNQKGKTFLALINQVFPAEEDSKKDVEDNCSLMYLNEATLLHNIKVRYSKDRIYTYVANILIAVNPYFDIPKIYSSEAIKSYQGKSLGTRPPHVFAIADKAFRDMKVLKMSQSIIVSGESGAGKTENTKFVLRYLTESYGTGQDIDDRIVEANPLLEAFGNAKTVRNNNSSRFGKFVEIHFNEKSSVVGGFVSHYLLEKSRICVQGKEERNYHIFYRLCAGASEDIREKLHLSSPDNFRYLNRGCTRYFANKETDKQILQNRKSPEYLKAGSMKDPLLDDHGDFIRMCTAMKKIGLDDEEKLDLFRVVAGVLHLGNIDFEEAGSTSGGCNLKNKSAQSLEYCAELLGLDQDDLRVSLTTRVMLTTAGGTKGTVIKVPLKVEQANNARDALAKTVYSHLFDHVVNRVNQCFPFETSSYFIGVLDIAGFEYFEHNSFEQFCINYCNEKLQQFFNERILKEEQELYQKEGLGVNEVHYVDNQDCIDLIEAKLVGILDILDEENRLPQPSDQHFTSAVHQKHKDHFRLTIPRKSKLAVHRNIRDDEGFIIRHFAGAVCYETTQFVEKNNDALHMSLESLICESRDKFIRELFESSTNNNKDTKQKAGKLSFISVGNKFKTQLNLLLDKLRSTGASFIRCIKPNLKMTSHHFEGAQILSQLQCSGMVSVLDLMQGGYPSRASFHELYNMYKKYMPDKLARLDPRLFCKALFKALGLNENDYKFGLTKVFFRPGKFAEFDQIMKSDPDHLAELVKRVNHWLTCSRWKKVQWCSLSVIKLKNKIKYRAEACIKMQKTIRMWLCKRRHKPRIDGLVKVGTLKKRLDKFNEVVSVLKDGKPEMNKQIKNLEISIDTLMAKIKSTMMTQEQIQKEYDALVKSSEELLSALQKKKQQEEEAERLRRIQEEMEKERKRREEDEKRRRKEEEERRMKLEMEAKRKQEEEERKKREDDEKRIQAEVEAQLARQKEEESQQQAVLEQERRDRELALRIAQSEAELISDEAQADLALRRGPAVLATKAAAGTKKYDLSKWKYAELRDTINTSCDIELLAACREEFHRRLKVYHAWKSKNKKRNTETEQRAPKSVTDYDFAPFLNNSPQQNPAAQIPARQREIEMNRQQRFFRIPFIRPADQYKDPQSKKKGWWYAHFDGPWIARQMELHPDKPPILLVAGKDDMEMCELNLEETGLTRKRGAEILPRQFEEIWERCGGIQYLQNAIESRQARPTYATAMLQSLLK

SEQ ID NO: 5483 - protein, 707 aa, Homo sapiens
DAGIRRVVPSDLYPLVLGFLRDNQLSEVANKFAKATGATQQDANASSLLDIYSFWLKSAKVPERKLQANGPVAKKAKKKASSSDSEDSSEEEEEVQGPPAKKAAVPAKRVGLPPGKAAAKASESSSSEESSDDDDEEDQKKQPVQKGVKPQAKAAKAPPKKAKSSDSDSDSSSEDEPPKNQKPKITPVTVKAQTKAPPKPARAAPKIANGKAASSSSSSSSSSSSDDSEEEKAAATPKKVWTITSVRAETVPKKQVVAKAPVKAATTPTRKSSSSEDSSSDEEEEQKKPMKNKPGPYSSVPPPSAPPPKKSLGTQPPKKAVEKQQPVESSEDSSDESDSSSEEEKKPPTKAVVSKATTKPPPAKKAAESSSDSSDSDSSEDDEAPSKPAGTTKNSSNKPAVTTKSPAVKPAAAPKQPVGGGQKLLTRKADSSSSEEESSSSEEEKTKKMVATTKPKATAKAALSLPAKQAPQGSRDSSSDSDSSSSEEEEEKTSKSAVKKKPQKVAGGAAPSKPASAKKGKAESSNSSSSDDSSEEEEEKLKGKGSPRPQAPKANGTSALTAQNGKAAKNSEEEEEEKKKAAVVVSKSGSLKKRKQNEAAKEAETPQAKKIKLQTPNTFPKRKKGEKRASSPFRRVREEEIEVDSRVADNSFDAKRGAAGDWGERANQVLKFTKGKSFRHEKTKKKRGSYRGGSISVQVNSIKFDSE

SEQ ID NO: 5484 - protein, 220 aa, Homo sapiens
MNIRNARPEDLMNMQHCNLLCLPENYQMKYYFYHGLSWPQLSYIAEDENGKIVGYVLAKMEEDPDDVPHGHITSLAVKRSHRRLGLAQKLMDQASRAMIENFNAKYVSLHVRKRISEVEPKYYADGEDAYAMKRDLTQMADELRRHLELKEKGRHVVLGAIENKVESKGNSPPSSGEACREEKGLAAEDSGGDSKDLSEVSETTESTDVKDSSEASDSAS

SEQ ID NO: 5485 - protein, 178 aa, Homo sapiens
MAAGTAAALAFLSQESRTRAGGVGGLRVPAPVTMDSFFFGCELSGHTRSFTFKVEEEDDAEHVLALTMLCLTEGAKDECNVVEVVARNHDHQEIAVPVANLKLSCQPMLSLDDFQLQPPVTFRLKSGSGPVRITGRHQIVTMSNDVSEEESEEEEEDSDEEEVELCPILPAKKQGGRP

SEQ ID NO: 5486 - protein, 582 aa, Homo sapiens
MWVLLRSGYPLRILLPLRGEWMGRRGLPRNLAPGPPRRRYRKETLQALDMPVLPVTATEIRQYLRGHGIPFQDGHSCLRALSPFAESSQLKGQTGVTTSFSLFIDKTTGHFLCMTSLAEGSWEDFQASVEGRGDGAREGFLLSKAPEFEDSEEVRRIWNRAIPLWELPDQEEVQLADTMFGLTKVTDDTLKRFSVRYLRPARSLVFPWFSPGGSGLRGLKLLEAKCQGDGVSYEETTIPRPSAYHNLFGLPLISRRDAEVVLTSRELDSLALNQSTGLPTLTLPRGTTCLPPALLPYLEQFRRIVFWLGDDLRSWEAAKLFARKLNPKRCFLVRPGDQQPRPLEALNGGFNLSRILRTALPAWHKSIVSFRQLREEVLGELSNVEQAAGLRWSRFPDLNRILKGHRKGELTVFTGPTGSGKTTFISEYALDLCSQGVNTLWGSFEISNVRLARVMLTQFAEGRLEDQLDKYDHWADRFEDLPLYFMTFHGQQSIRTVIDTMQHAVYVYDICHVIIDNLQFMMGHEQLSTDRIAAQDYIIGVFRKFATDNNCHVTLVIHPRKEDDDKELQTASIFGSAKVSGL

SEQ ID NO: 5487 - protein, 522 aa, Homo sapiens
MQPWHGKAMQRASEAGATAPKASARNARGAPMDPTESPAAPEAALPKAGKFGPARKSGSRQKKSAPDTQERPPVRATGARAKKAPQRAQDTQPSDATSAPGAEGLEPPAAREPALSRAGSCRQRGARCSTKPRPPPGPWDVPSPGLPVSAPILVRRDAAPGASKLRAVLEKLKLSRDDISTAAGMVKGVVDHLLLRLKCDSAFRGVGLLNTGSYYEHVKISAPNEFDVMFKLEVPRIQLEEYSNTRAYYFVKFKRNPKENPLSQFLEGEILSASKMLSKFRKIIKEEINDIKDTDVIMKRKRGGSPAVTLLISEKISVDITLALESKSSWPASTQEGLRIQNWLSAKVRKQLRLKPFYLVPKHAKEGNGFQEETWRLSFSHIEKEILNNHGKSKTCCENKEEKCCRKDCLKLMKYLLEQLKERFKDKKHLDKFSSYHVKTAFFHVCTQNPQDSQWDRKDLGLCFDNCVTYFLQCLRTEKLENYFIPEFNLFSSNLIDKRSKEFLTKQIEYERNNEFPVFDEF

SEQ ID NO: 5488 - protein, 447 aa, Homo sapiens
MQPWHGKAMQRASEAGATAPKASARNARGAPMDPTESPAAPEAALPKAGKFGPARKSGSRQKKSAPDTQERPPVRATGARAKKAPQRAQDTQPSDATSAPGAEGLEPPAAREPALSRAGSCRQRGARCSTKPRPPPGPWDVPSPGLPVSAPILVRRDAAPGASKLRAVLEKLKLSRDDISTAAGMVKGVVDHLLLRLKCDSAFRGVGLLNTGSYYEHVKISAPNEFDVMFKLEVPRIQLEEYSNTRAYYFVKFKRNPKENPLSQFLEGEILSASKMLSKFRKIIKEEINDIKDTDVIMKRKRGGSPAVTLLISEKISVDITLALESKSSWPASTQEGLRIQNWLSAKVRKQLRLKPFYLVPKHAKEGNGFQEETWRLSFSHIEKEILNNHGKSKTCCENKEEKCCRKDCLKLMKYLLEQLKERFKDKKHLDKFSSYHVKTAFFHRLY

SEQ ID NO: 5489 - protein, 297 aa, Homo sapiens [sequence omitted]

SEQ ID NO: 5490 - protein, 1179 aa, Homo sapiens
MKLKELERPAVQAWSPASQYPLYLATGTSAQQLDSSFSTNGTLEIFEVDFRDPSLDLKHRGVLSALSRFHKLVWGSFGSGLLESSGVIVGGGDNGMLILYNVTHILSSGKEPVIAQKQKHTGAVRALDLNPFQGNLLASGASDSEIFIWDLNNLNVPMTLGSKSQQPPEDIKALSWNRQAQHILSSAHPSGKAVVWDLRKNEPIIKVSDHSNRMHCSGLAWHPDIATQLVLCSEDDRLPVIQLWDLRFASSPLKVLESHSRGILSVSWSQADAELLLTSAKDSQILCRNLGSSEVVYKLPTQSSWCFDVQWCPRDPSVFSAASFNGWISLYSVMGRSWEVQHMRQADKISSSFSKGQPLPPLQVPEQVAQAPLIPPLKKPPKWIRRPTGVSFAFGGKLVTFGLPSTPAHLVPQPCPRLVFISQVTTESEFLMRSAELQEALGSGNLLNYCQNKSQQALLQSEKMLWQFLKVTLEQDSRMKFLKLLGYSKDELQKKVATWLKSDVGLGESPQPKGNDLNSDRQQAFCSQASKHTTKEASASSAFFDELVPQNMTPWEIPITKDIDGLLSQALLLGELGPAVELCLKEERFADAIILAQAGGTDLLKQTQERYLAKKKTKISSLLACVVQKNWKDVVCTCSLKNWREALALLLTYSGTEKFPELCDMLGTRMEQEGSRALTSEARLCYVCSGSVERLVECWAKCHQALSPMALQDLMEKVMVLNRSLEQLRGPHGVSPGPATTYRVTQYANLLAAQGSLATAMSFLPRDCAQPPVQQLRDRLFHAQGSAVLGQQSPPFPFPRIVVGATLHSKETSSYRLGSQPSHQVPTPSPRPRVFTPQSSPAMPLAPSHPSPYQGPRTQNISDYRAPGPQAIQPLPLSPGVRPASSQPQLLGGQRVQVPNPVGFPGTWPLPGSPLPMACPGIMRPGSTSLPETPRLFPLLPLRPLGPGRMVSHTPAPPASFPVPYLPGDPGAPCSSVLPTTGILTPHPGPQDSWKEAPAPRGNLQRNKLPETFMPPAPITAPVMSLTPELQGILPSQPPVSSVSHAPPGVPGELSLQLQHLPPEKMERKELPPEHQSLKSSFEALLQRCSLSATDLKTKRKLEEAAQRLEYLYEKLCEGTLSPHVVAGLHEVARCVDAGSFEQGLAVHAQVAGCSSFSEVSSFMPILKAVLIIAHKLLV

SEQ ID NO: 5491 - protein, 200 aa, Homo sapiens
MAKGDPKKPKGKMSAYAFFVQTCREEHKKKNPEVPVNFAEFSKKCSERWKTMSGKEKSKFDEMAKADKVRYDREMKDYGPAKGGKKKKDPNAPKRPPSGFFLFCSEFRPKIKSTNPGISIGDVAKKLGEMWNNLNDSEKQPYITKAAKLKEKYEKDVADYKSKGKFDGAKGPAKVARKKVEEEDEEEEEEEEEEEEEEDE

SEQ ID NO: 5492 - protein, 66 aa, Homo sapiens
MQNDAGEFVDLYVPRKCSASNRIIGAKDHASIQMNVAEVSWEPGRREGCDICAGKAGCPIVEEPLG

SEQ ID NO: 5493 - protein, 90 aa, Homo sapiens
MQNDAGEFVDLYVPRKCSASNRIIGAKDHASIQMNVAEVDKVTGRFNGQFKTYAICGAIRRMVSVSLGFAHHFGTSWTLPCALECVMVPE

SEQ ID NO: 5494 - protein, 622 aa, Homo sapiens
MTENGSHQLIVKARFNFKQTNEDELSVCKGDIIYVTRVEEGGWWEGTLNGRTGWFPSNYVREIKSSERPLSPKAVKGFETAPLTKNYYTVVLQNILDTEKEYAKELQSLLVTYLRPLQSNNNLSTVEVTSLLGNFEEVCTFQQTLCQALEECSKFPENQHKVGGCLLSLMPHFKSMYLAYCANHPSAVNVLTQHSDELEQFMENQGASSPGILILTTNLSKPFMRLEKYVTLLQELERHMEDTHPDHQDILKAIVAFKTLMGQCQDLRKRKQLELQILSEPIQAWEGEDIKNLGNVIFMSQVMVQYGACEEKEERYLMLFSNVLIMLSASPRMSGFIYQGKIPIAGTVVTRLDEIEGNDCTFEITGNTVERIVVHCNNNQDFQEWLEQLNRLIRGPASCSSLSKTSSSSCSAHSSFSSTGQPRGPLEPPQIIKPWSLSCLRPAPPLRPSAALGYKERMSYILKESSKSPKTMKKFLHKRKTERKPSEEEYVIRKSTAALEEDAQILKVIEAYCTSANFQQGHGSSTRKDSIPQVLLPEEEKLIIEETRSNGQTIMEEKSLVDTVYALKDEVRELKQENKRMKQCLEEELKSRRDLEKLVRRLLKQTDECIRGESSSKTSILP

SEQ ID NO: 5495 - protein, 452 aa, Homo sapiens
MEVTTRLTWNDENHLRKLLGNVSLSLLYKSSVHGGSIEDMVERCSRQGCTITMAYIDYNMIVAFMLGNYINLHESSTEPNDSLWFSLQKKNDTTEIETLLLNTAPKIIDEQLVCRLSKTDIFIICRDNKIYLDKMITRNLKLRFYGHRQYLECEVFRVEGIKDNLDDIKRIIKAREHRNRLLADIRDYRPYADLVSEIRILLVGPVGSGKSSFFNSVKSIFHGHVTGQAVVGSDITSITERYRIYSVKDGKNGKSLPFMLCDTMGLDGAEGAGLCMDDIPHILKGCMPDRYQFNSRKPITPEHSTFITSPSLKDRIHCVAYVLDINSIDNLYSKMLAKVKQVHKEVLNCGIAYVALLTKVDDCSEVLQDNFLNMSRSMTSQSRVMNVHKMLGIPISNILMVGNYASDLELDPMKDILILSALRQMLRAADDFLEDLPLEETGAIERALQPCI

SEQ ID NO: 5496 - protein, 152 aa, Homo sapiens
MAQEKMKLGFKSLPSSTTADGNILRRVNSAPLINGLGFNSQVLQADMLRIRTNRTTFRNRRSLLLPPPPFHGSISRLHQIKQEEAMDLINRETMSEWKLQSEIQISHSWEEGLKLNDNGLQKSSSLKCIDLTPVSSMASSIKKTGKSTSSYF

SEQ ID NO: 5497 - protein, 5375 aa, Homo sapiens
MAGYLSPAAYLYVEEQEYLQAYEDVLERYKDERDKVQKKTFTKWINQHLMKVRKHVNDLYEDLRDGHNLISLLEVLSGDTLPREKGRMRFHRLQNVQIALDYLKRRQVKLVNIRNDDITDGNPKLTLGLIWTIILHFQISDIHVTGESEDMSAKERLLLWTQQATEGYAGIRCENFTTCWRDGKLFNAIIHKYRPDLIDMNTVAVQSNLANLEHAFYVAEKIGVIRLLDPEDVDVSSPDEKSVITYVSSLYDAFPKVPEGGEGIGANDVEVKWIEYQNMVNYLIQWIRHHVTTMSERTFPNNPVELKALYNQYLQFKETEIPPKETEKSKIKRLYKLLEIWIEFGRIKLLQGYHPNDIEKEWGKLIIAMLEREKALRPEVERLEMLQQIANRVQRDSVICEDKLILAGNALQSDSKRLESGVQFQNEAEIAGYILECENLLRQHVIDVQILIDGKYYQADQLVQRVAKLRDEIMALRNECSSVYSKGRILTTEQTKLMISGITQSLNSGFAQTLHPSLTSGLTQSLTPSLTSSSMTSGLSSGMTSRLTPSVTPAYTPGFPSGLVPNFSSGVEPNSLQTLKLMQIRKPLLKSSLLDQNLTEEEINMKFVQDLLNWVDEMQVQLDRTEWGSDLPSVESHLENHKNVHRAIEEFESSLKEAKISEIQMTAPLKLTYAEKLHRLESQYAKLLNTSRNQERHLDTLHNFVSRATNELIWLNEKEEEEVAYDWSERNTNIARKKDYHAELMRELDQKEENIKSVQEIAEQLLLENHPARLTIEAYRAAMQTQWSWILQLCQCVEQHIKENTAYFEFFNDAKEATDYLRNLKDAIQRKYSCDRSSSIHKLEDLVQESMEEKEELLQYKSTIANLMGKAKTIIQLKPRNSDCPLKTSIPIKAICDYRQIEITIYKDDECVLANNSHRAKWKVISPTGNEAMVPSVCFTVPPPNKEAVDLANRIEQQYQNVLTLWHESHINMKSVVSWHYLINEIDRIRASNVASIKTMLPGEHQQVLSNLQSRFEDFLEDSQESQVFSGSDITQLEKEVNVCKQYYQELLKSAEREEQEESVYNLYISEVRNIRLRLENCEDRLIRQIRTPLERDDLHESVFRITEQEKLKKELERLKDDLGTITNKCEEFFSQAAASSSVPTLRSELNVVLQNMNQVYSMSSTYIDKLKTVNLVLKNTQAAEALVKLYETKLCEEEAVIADKNNIENLISTLKQWRSEVDEKRQVFHALEDELQKAKAISDEMFKTYKERDLDFDWHKEKADQLVERWQNVHVQIDNRLRDLEGIGKSLKYYRDTYHPLDDWIQQVETTQRKIQENQPENSKTLATQLNQQKMLVSEIEMKQSKMDECQKYAEQYSATVKDYELQTMTYRAMVDSQQKSPVKRRRMQSSADLIIQEFMDLRTRYTALVTLMTQYIKFAGDSLKRLEEEEKSLEEEKKEHVEKAKELQKWVSNISKTLKDAEKAGKPPFSKQKISSEEISTKKEQLSEALQTIQLFLAKHGDKMTDEERNELEKQVKTLQESYNLLFSESLKQLQESQTSGDVKVEEKIVAERQQEYKEKLQGICDLLTQTENRLIGHQEAFMIGDGTVELKKYQSKQEELQKDMQGSAQALAEVVKNTENFLKENGEKLSQEDKALIEQKLNEAKIKCEQLNLKAEQSKKELDKVVTTAIKEETEKVAAVKQLEESKTKIENLLDWLSNVDKDSERAGTKHKQVIEQNGTHFQEGDGKSAIGEEDEVNGNLLETDVDGQVGTTQENLNQQYQKVKAQHEKIISQHQAVIIATQSAQVLLEKQGQYLSPEEKEKLQKNMKELKVHYETALAESEKKMKLTHSLQEELEKFDADYTEFEHWLQQSEQELENLEAGADDINGLMTKLKRQKSFSEDVISHKGDLRYITISGNRVLEAAKSCSKRDGGKVDTSATHREVQRKLDHATDRFRSLYSKCNVLGNNLKDLVDKYQHYEDASCGLLAGLQACEATASKHLSEPIAVDPKNLQRQLEETKALQGQISSQQVAVEKLKKTAEVLLDARGSLLPAKNDIQKTLDDIVGRYEDLSKSVNERNEKLQITLTRSLSVQDGLDEMLDWMGNVESSLKEQGQVPLNSTALQDIISKNIMLEQDIAGRQSSINAMNEKVKKFMETTDPSTASSLQAKMKDLSARFSEASHKHKETLAKMEELKTKVELFENLSEKLQTFLETKTQALTEVDVPGKDVTELSQYMQESTSEFLEHKKHLEVLHSLLKEISSHGLPSDKALVLEKTNNLSKKFKEMEDTIKEKKEAVTSCQEQLDAFQVLVKSLKSWIKETTKKVPIVQPSFGAEDLGKSLEDTKKLQEKWSLKTPEIQKVNNSGISLCNLISAVTTPAKAIAAVKSGGAVLNGEGTATNTEEFWANKGLTSIKKDMTDISHGYEDLGLLLKDKIAELNTKLSKLQKAQEESSAMMQWLQKMNKTATKWQQTPAPTDTEAVKTQVEQNKSFEAELKQNVNKVQELKDKLTELLEENPDTPEAPRWKQMLTEIDSKWQELNQLTIDRQQKLEESSNNLTQFQTVEAQLKQWLVEKELMVSVLGPLSIDPNMLNTQRQQVQILLQEFATRKPQYEQLTAAGQGILSRPGEDPSLRGIVKEQLAAVTQKWDSLTGQLSDRCDWIDQAIVKSTQYQSLLRSLSDKLSDLDNKLSSSLAVSTHPDAMNQQLETAQKMKQEIQQEKKQIKVAQALCEDLSALVKEEYLKAELSRQLEGILKSFKDVEQKAENHVQHLQSACASSHQFQQMSRDFQAWLDTKKEEQNKSHPISAKLDVLESLIKDHKDFSKTLTAQSHMYEKTIAEGENLLLKTQGSEKAALQLQLNTIKTNWDTFNKQVKERENKLKESLEKALKYKEQVETLWPWIDKCQNNLEEIKFCLDPAEGENSIAKLKSLQKEMDQHFGMVELLNNTANSLLSVCEIDKEVVTDENKSLIQKVDMVTEQLHSKKFCLENMTQKFKEFQEVSKESKRQLQCAKEQLDIHDSLGSQAYSNKYLTMLQTQQKSLQALKHQVDLAKRLAQDLVVEASDSKGTSDVLLQVETIAQEHSTLSQQVDEKCSFLETKLQGIGHFQNTIREMFSQFAEFDDELDSMAPVGRDAETLQKQKETIKAFLKKLEALMASNDNANKTCKMMLATEETSPDLVGIKRDLEALSKQCNKLLDRAQAREEQVEGTIKRLEEFYSKLKEFSILLQKAEEHEESQGPVGMETETINQQLNMFKVFQKEEIEPLQGKQQDVNWLGQGLIQSAAKSTSTQGLEHDLDDVNARWKTLNKKVAQRAAQLQEALLHCGRFQDALESLLSWMVDTEELVANQKPPSAEFKVVKAQIQEQKLLQRLLDDRKSTVEVIKREGEKIATTAEPADKVKILKQLSLLDSRWEALLNKAETRNRQLEGISVVAQQFHETLEPLNEWLTTIEKRLVNCEPIGTQASKLEEQIAQHKVLQEDILLRKQNVDQALLNGLELLKQTTGDEVLIIQDKLEAIKARYKDITKLSTDVAKTLEQALQLARRLHSTHEELCTWLDKVEVELLSYETQVLKGEEASQAQMRPKELKKEAKNNKALLDSLNEVSSALLELVPWRAREGLEKMVAEDNERYRLVSDTITQKVEEIDAAILRSQQFDQAADAELSWITETEKKLMSLGDIRLEQDQTSAQLQVQKTFTMEILRHKDIIDDLVKSGHKIMTACSEEEKQSMKKKLDKVLKNYDTICQINSERYLQLERAQSLVNQFWETYEELWPWLTETQSIISQLPAPALEYETLRQQQEEHRQLRELIAEHKPHIDKMNKTGPQLLELSPGEGFSIQEKYVAADTLYSQIKEDVKKRAVALDEAISQSTQFHDKIDQILESLERIVERLRQPPSISAEVEKIKEQISENKNVSVDMEKLQPLYETLKQRGEEMIARSGGTDKDISAKAVQDKLDQMVFIWENIHTLVEEREAKLLDVMELAEKFWCDHMSLIVTIKDTQDFIRDLEDPGIDPSVVKQQQEAAETIREEIDGLQEELDIVINLGSELIAACGEPDKPIVKKSIDELNSAWDSLNKAWKDRIDKLEEAMQAAVQYQDGLQAVFDWVDIAGGKLASMSPIGTDLETVKQQIEELKQFKSEAYQQQIEMERLNHQAELLLKKVTEESDKHTVQDPLMELKLIWDSLEERIINRQHKLEGALLALGQFQHALDELLAWLTHTEGLLSEQKPVGGDPKAIEIELAKHHVLQNDVLAHQSTVEAVNKAGNDLIESSAGEEASNLQNKLEVLNQRWQNVLEKTEQRKQQLDGALRQAKGFHGEIEDLQQWLTDTERHLLASKPLGGLPETAKEQLNVHMEVCAAFEAKEETYKSLMQKGQQMLARCPKSAETNIDQDINNLKEKWESVETKLNERKTKLEEALNLAMEFHNSLQDFINWLTQAEQTLNVASRPSLILDTVLFQIDEHKVFANEVNSHREQIIELDKTGTHLKYFSQKQDVVLIKNLLISVQSRWEKVVQRLVERGRSLDDARKRAKQFHEAWSKLMEWLEESEKSLDSELEIANDPDKIKTQLAQHKEFQKSLGAKHSVYDTTNRTGRSLKEKTSLADDNLKLDDMLSELRDKWDTICGKSVERQNKLEEALLFSGQFTDALQALIDWLYRVEPQLAEDQPVHGDIDLVMNLIDNHKAFQKELGKRTSSVQALKRSARELIEGSRDDSSWVKVQMQELSTRWETVCALSISKQTRLEAALRQAEEFHSVVHALLEWLAEAEQTLRFHGVLPDDEDALRTLIDQHKEFMKKLEEKRAELNKATTMGDTVLAICHPDSITTIKHWITIIRARFEEVLAWAKQHQQRLASALAGLIAKQELLEALLAWLQWAETTLTDKDKEVIPQEIEEVKALIAEHQTFMEEMTRKQPDVDKVTKTYKRRAADPSSLQSHIPVLDKGRAGRKRFPASSLYPSGSQTQIETKNPRVNLLVSKWQQVWLLALERRRKLNDALDRLEELREFANFDFDIWRKKYMRWMNHKKSRVMDFFRRIDKDQDGKITRQEFIDGILSSKFPTSRLEMSAVADIFDRDGDGYIDYYEFVAALHPNKDAYKPITDADKIEDEVTRQVAKCKCAKRFQVEQIGDNKYRFFLGNQFGDSQQLRLVRILRSTVMVRVGGGWMALDEFLVKNDPCRVHHHGSKMLRSESNSSITTTQPTIAKGRTNMELREKFILADGASQGMAAFRPRGRRSRPSSRGASPNRSTSVSSQAAQAASPQVPATTTPKGTPIQGSKLRLPGYLSGKGFHSGEDSGLITTAAARVRTQFADSKKTPSRPGSRAGSKAGSRASSRRGSDASDFDISEIQSVCSDVETVPQTHRPTPRAGSRPSTAKPSKIPTPQRKSPASKLDKSSKR

SEQ ID NO: 5498 - protein, 152 aa, Homo sapiens
MGTPQKDVIIKSDAPDTLLLEKHADYIASYGSKKDDYEYCMSEYLRMSGIYWGLTVMDLMGQLHRMNREEILAFIKSCQHECGGISASIGHDPHLLYTLSAVQILTLYDSINVIDVNKVVEYVKGLQKEDGSFAGDIWGNVRFSPFYPKYQY

SEQ ID NO: 5499 - protein, 405 aa, Homo sapiens
MQEKDASSQGFLPHFQHFATQAIHVGQDPEQWTSRAVVPPISLSTTFKQGAPGQHSGFEYSRSGNPTRNCLEKAVAALDGAKYCLAFASGLAATVTITHLLKAGDQIICMDDVYGGTNRYFRQVASEFGLKISFVDCSKIKLLEAAITPETKLVWIETPTNPTQKVIDIEGCAHIVHKHGDIILVVDNTFMSPYFQRPLALGADISMYSATKYMNGHSDVVMGLVSVNCESLHNRLRFLQNSLGAVPSPIDCYLCNRGLKTLHVRMEKHFKNGMAVAQFLESNPWVEKVIYPGLPSHPQHELVKRQCTGCTGMVTFYIKGTLQHAEIFLKNLKLFTLAESLGGFESLAELPAIMTHASVLKNDRDVLGISDTLIRLSVGLEDEEDLLEDLDQALKAAHPPSGSHS

SEQ ID NO: 5500 - protein, 222 aa, Homo sapiens
MAARPKLHYPNGRGRMESVRWVLAAAGVEFDEEFLETKEQLYKLQDGNHLLFQQVPMVEIDGMKLVQTRSILHYIADKHNLFGKNLKERTLIDMYVEGTLDLLELLIMHPFLKPDDQQKEVVNMAQKAIIRYFPVFEKILRGHGQSFLVGNQLSLADVILLQTILALEEKIPNILSAFPFLQEYTVKLSNIPTIKRFLEPGSKKKPPPDEIYVRTVYNIFRP

SEQ ID NO: 5501 - protein, 129 aa, Homo sapiens
MYVEGTLDLLELLIMHPFLKPDDQQKEVVNMAQKAIIRYFPVFEKILRGHGQSFLVGNQLSLADVILLQTILALEEKIPNILSAFPFLQEYTVKLSNIPTIKRFLEPGSKKKPPPDEIYVRTVYNIFRP

SEQ ID NO: 5502 - protein, 527 aa, Homo sapiens
MESQGVPPGPYRATKLWNEVTTSFRAGMPLRKHRQHFKKYGNCFTAGEAVDWLYDLLRNNSNFGPEVTRQQTIQLLRKFLKNHVIEDIKGRWGSENVDDNNQLFRFPATSPLKTLPRRYPELRKNNIENFSKDKDSIFKLRNLSRRTPKRHGLHLSQENGEKIKHEIINEDQENAIDNRELSQEDVEEVWRYVILIYLQTILGVPSLEEVINPKQVIPQYIMYNMANTSKRGVVILQNKSDDLPHWVLSAMKCLANWPRSNDMNNPTYVGFERDVFRTIADYFLDLPEPLLTFEYYELFVNILGLLQPHLERVAIDALQLCCLLLPPPNRRKLQLLMRMISRMSQNVDMPKLHDAMGTRSLMIHTFSRCVLCCAEEVDLDELLAGRLVSFLMDHHQEILQVPSYLQTAVEKHLDYLKKGHIENPGDGLFAPLPTYSYCKQISAQEFDEQKVSTSQAAIAELLENIIKNRSLPLKEKRKKLKQFQKEYPLIYQKRFPTTESEAALFGDKPTIKQPMLILRKPKFRSLR

SEQ ID NO: 5503 - protein, 131 aa, Homo sapiens
MTLEEFSAGEQKTESDPDNVVLCLLAADEDDDRDVALQIHFTLIQAFCCENDINILRVSNPGRLAELLLLETDAGPAASEGAEQPPDLHCVLVTNPHSSQWKDPALSQLICFCRESRYMDQWVPVINLPER

SEQ ID NO: 5504 - protein, 165 aa, Homo sapiens
MTLEEFSAGEQKTERMDKVGDALEEVLSKALSQRTITVGVYEAAKLLNVDPDNVVLCLLAADEDDDRDVALQIHFTLIQAFCCENDINILRVSNPGRLAELLLLETDAGPAASEGAEQPPDLHCVLVTNPHSSQWKDPALSQLICFCRESRYMDQWVPVINLPER

SEQ ID NO: 5505 - protein, 1297 aa, Homo sapiens
MGRSGKLPSGVSAKLKRWKKGHSSDSNPAICRHRQAARSRFFSRPSGRSDLTVDAVKLHNELQSGSLRLGKSEAPETPMEEEAELVLTEKSSGTFLSGLSDCTNVTFSKVQRFWESNSAAHKEICAVLAAVTEVIRSQGGKETETEYFAALMTTMEAVESPESLAAVAYLLNLVLKRVPSPVLIKKFSDTSKAFMDIMSAQASSGSTSVLRWVLSCLATLLRKQDLEAWGYPVTLQVYHGLLSFTVHPKPKIRKAAQHGVCSVLKGSEFMFEKAPAHHPAAISTAKFCIQEIEKSGGSKEATTTLHMLTLLKDLLPCFPEGLVKSCSETLLRVMTLSHVLVTACAMQAFHSLFHARPGLSTLSAELNAQIITALYDYVPSENDLQPLLAWLKVMEKAHINLVRLQWDLGLGHLPRFFGTAVTCLLSPHSQVLTAATQSLKEILKECVAPHMADIGSVTSSASGPAQSVAKMFRAVEEGLTYKFHAAWSSVLQLLCVFFEACGRQAHPVMRKCLQSLCDLRLSPHFPHTAALDQAVGAAVTSMGPEVVLQAVPLEIDGSEETLDFPRSWLLPVIRDHVQETRLGFFTTYFLPLANTLKSKAMDLAQAGSTVESKIYDTLQWQMWTLLPGFCTRPTDVAISFKGLARTLGMAISERPDLRVTVCQALRTLITKGCQAEADRAEVSRFAKNFLPILFNLYGQPVAAGDTPAPRRAVLETIRTYLTITDTQLVNSLLEKASEKVLDPASSDFTRLSVLDLVVALAPCADEAAISKLYSTIRPYLESKAHGVQKKAYRVLEEVCASPQGPGALFVQSHLEDLKKTLLDSLRSTSSPAKRPRLKCLLHIVRKLSAEHKEFITALIPEVILCTKEVSVGARKNAFALLVEMGHAFLRFGSNQEEALQCYLVLIYPGLVGAVTMVSCSILALTHLLFEFKGLMGTSTVEQLLENVCLLLASRTRDVVKSALGFIKVAVTVMDVAHLAKHVQLVMEAIGKLSDDMRRHFRMKLRNLFTKFIRKFGFELVKRLLPEEYHRVLVNIRKAEARAKRHRALSQAAVEEEEEEEEEEEPAQGKGDSIEEILADSEDEEDNEEEERSRGKEQRKLARQRSRAWLKEGGGDEPLNFLDPKVAQRVLATQPGPGRGRKKDHGFKVSADGRLIIREEADGNKMEEEEGAKGEDEEMADPMEDVIIRNKKHQKLKHQKEAEEEELEIPPQYQAGGSGIHRPVAKKAMPGAEYKAKKAKGDVKKKGRPDPYAYIPLNRSKLNRRKKMKLQGQFKGLVKAARRGSQVGHKNRRKDRRP

SEQ ID NO: 5506 - protein, 485 aa, Homo sapiens
MPHQKLSALIDAICSFVICNDSSLRGQPIIFNPDFFVEKLRHEKPEIFTELVVSNITRLIDLPGTELAQLMGEVDLKLPGGAGPASGFFRSLMSLKRKEKGVIFGSPLTEEGIAQIYQLIEYLHKNLRVEGLFRVPGNSVRQQILRDALNNGTDIDLESGEFHSNDVATLLKMFLGELPEPLLTHKHFNAHLKIADLMQFDDKGNKTNIPDKDRQIEALQLLFLILPPPNRNLLKLLLDLLYQTAKKQDKNKMSAYNLALMFAPHVLWPKNVTANDLQENITKLNSGMAFMIKHSQKLFKAPAYIRECARLHYLGSRTQASKDDLDLIASCHTKSFQLAKSQKRNRVDSCPHQEETQHHTEEALRELFQHVHDMPESAKKKQLIRQFNKQSLTQTPGREPSTSQVQKRARSRSFSGLIKRKVLGNQMMSEKKKKNPTPESVAIGELKGTSKENRNLLFSGSPAVTMTPTRLKWSEGKKEGKKGFL

SEQ ID NO: 5507 - protein, 564 aa, Homo sapiens
MKEHGGTFSSTGISGGSGDSAMDSLQPLQPNYMPVCLFAEESYQKLAMETLEELDWCLDQLETIQTYRSVSEMASNKFKRMLNRELTHLSEMSRSGNQVSEYISNTFLDKQNDVEIPSPTQKDREKKKKQQLMTQISGVKKLMHSSSLNNTSISRFGVNTENEDHLAKELEDLNKWGLNIFNVAGYSHNRPLTCIMYAIFQERDLLKTFRISSDTFITYMMTLEDHYHSDVAYHNSLHAADVAQSTHVLLSTPALDAVFTDLEILAAIFAAAIHDVDHPGVSNQFLINTNSELALMYNDESVLENHHLAVGFKLLQEEHCDIFMNLTKKQRQTLRKMVIDMVLATDMSKHMSLLADLKTMVETKKVTSSGVLLLDNYTDRIQVLRNMVHCADLSNPTKSLELYRQWTDRIMEEFFQQGDKERERGMEISPMCDKHTASVEKSQVGFIDYIVHPLWETWADLVQPDAQDILDTLEDNRNWYQSMIPQSPSPPLDEQNRDCQGLMEKFQFELTLDEEDSEGPEKEGEGHSYFSSTKTLCVIDPENRDSLGETDIDIATEDKSPVDT

SEQ ID NO: 5508 - protein, 1070 aa, Homo sapiens
MEQDTAAVAATVAAADATATIVVIEDEQPGPSTSQEEGAAAAATEATAATEKGEKKKEKNVSSFQLKLAAKAPKSEKEMDPEYEEKMKADRAKRFEFLLKQTELFAHFIQPSAQKSPTSPLNMKLGRPRIKKDEKQSLISAGDYRHRRTEQEEDEELLSESRKTSNVCIRFEVSPSYVKGGPLRDYQIRGLNWLISLYENGVNGILADEMGLGKTLQTIALLGYLKHYRNIPGPHMVLVPKSTLHNWMNEFKRWVPSLRVICFVGDKDARAAFIRDEMMPGEWDVCVTSYEMVIKEKSVFKKFHWRYLVIDEAHRIKNEKSKLSEIVREFKSTNRLLLTGTPLQNNLHELWALLNFLLPDVFNSADDFDSWFDTKNCLGDQKLVERLHAVLKPFLLRRIKTDVEKSLPPKKEIKIYLGLSKMQREWYTKILMKDIDVLNSSGKMDKMRLLNILMQLRKCCNHPYLFDGAEPGPPYTTDEHIVSNSGKMVVLDKLLAKLKEQGSRVLIFSQMTRLLDILEDYCMWRGYEYCRLDGQTPHEEREDKFLEVEFLGQREAIEAFNAPNSSKFIFMLSTRAGGLGINLASADVVILYDSDWNPQVDLQAMDRAHRIGQKKPVRVFRLITDNTVEERIVERAEIKLRLDSIVIQQGRLIDQQSNKLAKEEMLQMIRHGATHVFASKESELTDEDITTILERGEKKTAEMNERLQKMGESSLRNFRMDIEQSLYKFEGEDYREKQKLGMVEWIEPPKRERKANYAVDAYFREALRVSEPKIPKAPRPPKQPNVQDFQFFPPRLFELLEKEILYYRKTIGYKVPRNPDIPNPALAQREEQKKIDGAEPLTPEETEEKEKLLTQGFTNWTKRDFNQFIKANEKYGRDDIDNIAREVEGKSPEEVMEYSAVFWERCNELQDIEKIMAQIERGEARIQRRISIKKALDAKIARYKAPFHQLRIQYGTSKGKNYTEEEDRFLICMLHKMGFDRENVYEELRQCVRNAPQFRFDWFIKSRTAMEFQRRCNTLISLIEKENMEIEERERAEKKKRATKTPMSQKRKAESATESSGKKDVKKVKS

SEQ ID NO: 5509 - protein, 1054 aa, Homo sapiens
MEQDTAAVAATVAAADATATIVVIEDEQPGPSTSQEEGAAAAATEATAATEKGEKKKEKNVSSFQLKLAAKAPKSEKEMDPEYEEKMKADRAKRFEFLLKQTELFAHFIQPSAQKSPTSPLNMKLGRPRIKKDEKQSLISAGDYRHRRTEQEEDEELLSESRKTSNVCIRFEVSPSYVKGGPLRDYQIRGLNWLISLYENGVNGILADEMGLGKTLQTIALLGYLKHYRNIPGPHMVLVPKSTLHNWMNEFKRWVPSLRVICFVGDKDARAAFIRDEMMPGEWDVCVTSYEMVIKEKSVFKKFHWRYLVIDEAHRIKNEKSKLSEIVREFKSTNRLLLTGTPLQNNLHELWALLNFLLPDVFNSADDFDSWFDTKNCLGDQKLVERLHAVLKPFLLRRIKTDVEKSLPPKKEIKIYLGLSKMQREWYTKILMKDIDVLNSSGKMDKMRLLNILMQLRKCCNHPYLFDGAEPGPPYTTDEHIVSNSGKMVVLDKLLAKLKEQGSRVLIFSQMTRLLDILEDYCMWRGYEYCRLDGQTPHEEREDKFLEVEFLGQREAIEAFNAPNSSKFIFMLSTRAGGLGINLASADVVILYDSDWNPQVDLQAMDRAHRIGQKKPVRVFRLITDNTVEERIVERAEIKLRLDSIVIQQGRLIDQQSNKLAKEEMLQMIRHGATHVFASKESELTDEDITTILERGEKKTAEMNERLQKMGESSLRNFRMDIEQSLYKFEGEDYREKQKLGMVEWIEPPKRERKANYAVDAYFREALRVSEPKIPKAPRPPKQPNVQDFQFFPPRLFELLEKEILYYRKTIGYKVPRNPDIPNPALAQREEQKKIDGAEPLTPEETEEKEKLLTQGFTNWTKRDFNQFIKANEKYGRDDIDNIAREVEGKSPEEVMEYSAVFWERCNELQDIEKIMAQIERGEARIQRRISIKKALDAKIARYKAPFHQLRIQYGTSKGKNYTEEEDRFLICMLHKMGFDRENVYEELRQCVRNAPQFRFDWFIKSRTAMEFQRRCNTLISLIEKENMEIEERERAEKKKRATKTPMVKFSAFS

SEQ ID NO: 5510 - protein, 1058 aa, Homo sapiens
MEQDTAAVAATVAAADATATIVVIEDEQPGPSTSQEEGAAAAATEATAATEKGEKKKEKNVSSFQLKLAAKAPKSEKEMDPEYEEKMKADRAKRFEFLLKQTELFAHFIQPSAQKSPTSPLNMKLGRPRIKKDEKQSLISAGDYRHRRTEQEEDEELLSESRKTSNVCIRFEVSPSYVKGGPLRDYQIRGLNWLISLYENGVNGILADEMGLGKTLQTIALLGYLKHYRNIPGPHMVLVPKSTLHNWMNEFKRWVPSLRVICFVGDKDARAAFIRDEMMPGEWDVCVTSYEMVIKEKSVFKKFHWRYLVIDEAHRIKNEKSKLSEIVREFKSTNRLLLTGTPLQNNLHELWALLNFLLPDVFNSADDFDSWFDTKNCLGDQKLVERLHAVLKPFLLRRIKTDVEKSLPPKKEIKIYLGLSKMQREWYTKILMKDIDVLNSSGKMDKMRLLNILMQLRKCCNHPYLFDGAEPGPPYTTDEHIVSNSGKMVVLDKLLAKLKEQGSRVLIFSQMTRLLDILEDYCMWRGYEYCRLDGQTPHEEREEAIEAFNAPNSSKFIFMLSTRAGGLGINLASADVVILYDSDWNPQVDLQAMDRAHRIGQKKPVRVFRLITDNTVEERIVERAEIKLRLDSIVIQQGRLIDQQSNKLAKEEMLQMIRHGATHVFASKESELTDEDITTILERGEKKTAEMNERLQKMGESSLRNFRMDIEQSLYKFEGEDYREKQKLGMVEWIEPPKRERKANYAVDAYFREALRVSEPKIPKAPRPPKQPNVQDFQFFPPRLFELLEKEILYYRKTIGYKVPRNPDIPNPALAQREEQKKIDGAEPLTPEETEEKEKLLTQGFTNWTKRDFNQFIKANEKYGRDDIDNIAREVEGKSPEEVMEYSAVFWERCNELQDIEKIMAQIERGEARIQRRISIKKALDAKIARYKAPFHQLRIQYGTSKGKNYTEEEDRFLICMLHKMGFDRENVYEELRQCVRNAPQFRFDWFIKSRTAMEFQRRCNTLISLIEKENMEIEERERAEKKKRATKTPMSQKRKAESATESSGKKDVKKVKS

SEQ ID NO: 5511 - protein, 1801 aa, Homo sapiens
MPENPATDKLQVLQVLDRLKMKLQEKGDTSQNEKLSMFYETLKSPLFNQILTLQQSIKQLKGQLNHIPSDCSANFDFSRKGLLVFTDGSITNGNVHRPSNNSTVSGLFPWTPKLGNEDFNSVIQQMAQGRQIEYIDIERPSTGGLGFSVVALRSQNLGKVDIFVKDVQPGSVADRDQRLKENDQILAINHTPLDQNISHQQAIALLQQTTGSLRLIVAREPVHTKSSTSSSLNDTTLPETVCWGHVEEVELINDGSGLGFGIVGGKTSGVVVRTIVPGGLADRDGRLQTGDHILKIGGTNVQGMTSEQVAQVLRNCGNSVRMLVARDPAGDISVTPPAPAALPVALPTVASKGPGSDSSLFETYNVELVRKDGQSLGIRIVGYVGTSHTGEASGIYVKSIIPGSAAYHNGHIQVNDKIVAVDGVNIQGFANHDVVEVLRNAGQVVHLTLVRRKTSSSTSPLEPPSDRGTVVEPLKPPALFLTGAVETETNVDGEDEEIKERIDTLKNDNIQALEKLEKVPDSPENELKSRWENLLGPDYEVMVATLDTQIADDAELQKYSKLLPIHTLRLGVEVDSFDGHHYISSIVSGGPVDTLGLLQPEDELLEVNGMQLYGKSRREAVSFLKEVPPPFTLVCCRRLFDDEASVDEPRRTETSLPETEVDHNMDVNTEEDDDGELALWSPEVKIVELVKDCKGLGFSILDYQDPLDPTRSVIVIRSLVADGVAERSGGLLPGDRLVSVNEYCLDNTSLAEAVEILKAVPPGLVHLGICKPLVEDNEEESCYILHSSSNEDKTEFSGTIHDINSSLILEAPKGFRDEPYFKEELVDEPFLDLGKSFHSQQKEIEQSKEAWEMHEFLTPRLQEMDEEREILVDEEYELYQDPSPSMELYPLSHIQEATPVPSVNELHFGTQWLHDNEPSESQEARTGRTVYSQEAQPYGYCPENVMKENFVMESLPSVPSTEGNSQQGRFDDLENLNSLAKTSLDLGMIPNDVQGPSLLIDLPVVAQRREQEDLPLYQHQATRVISKASAYTGMLSSRYATDTCELPEREEGEGEETPNFSHWGPPRIVEIFREPNVSLGISIVGGQTVIKRLKNGEELKGIFIKQVLEDSPAGKTNALKTGDKILEVSGVDLQNASHSEAVEAIKNAGNPVVFIVQSLSSTPRVIPNVHNKANKITGNQNQDTQEKKEKRQGTAPPPMKLPPPYKALTDDSDENEEEDAFTDQKIRQRYADLPGELHIIELEKDKNGLGLSLAGNKDRSRMSIFVVGINPEGPAAADGRMRIGDELLEINNQILYGRSHQNASAIIKTAPSKVKLVFIRNEDAVNQMAVTPFPVPSSSPSSIEDQSGTEPISSEEDGSVEVGIKQLPESESFKLAVSQMKQQKYPTKVSFSSQEIPLAPASSYHSTDADFTGYGGFQAPLSVDPATCPIVPGQEMIIEISKGRSGLGLSIVGGKDTPLNAIVIHEVYEEGAAARDGRLWAGDQILEVNGVDLRNSSHEEAITALRQTPQKVRLVVYRDEAHYRDEENLEIFPVDLQKKAGRGLGLSIVGKRNGSGVFISDIVKGGAADLDGRLIQGDQILSVNGEDMRNASQETVATILKCAQGLVQLEIGRLRAGSWTSARTTSQNSQGSQQSAHSSCHPSFAPVITGLQNLVGTKRVSDPSQKNSGTDMEPRTVEINRELSDALGISIAGGRGSPLGDIPVFIAMIQASGVAARTQKLKVGDRIVSINGQPLDGLSHADVVNLLKNAYGRIILQVVADTNISAIAAQLENMSTGYHLGSPTAEHHPEDTEEQLQMTAD

SEQ ID NO: 5512 - protein, 429 aa, Homo sapiens
MAQAPADPGREGHLEQRILQVLTEAGSPVKLAQLVKECQAPKRELNQVLYRMKKELKVSLTSPATWCLGGTDPEGEGPAELALSSPAERPQQHAATIPETPGPQFSQQREEDIYRFLKDNGPQRALVIAQALGMRTAKDVNRDLYRMKSRHLLDMDEQSKAWTIYRPEDSGRRAKSASIIYQHNPINMICQNGPNSWISIANSEAIQIGHGNIITRQTVSREDGSAGPRHLPSMAPGDSSTWGTLVDPWGPQDIHMEQSILRRVQLGHSNEMRLHGVPSEGPAHIPPGSPPVSATAAGPEASFEARIPSPGTHPEGEAAQRIHMKSCFLEDATIGNSNKMSISPGVAGPGGVAGSGEGEPGEDAGRRPADTQSRSHFPRDIGQPITPSHSKLTPKLETMTLGNRSHKAAEGSHYVDEASHEGSWWGGGI

SEQ ID NO: 5513 - protein, 728 aa, Homo sapiens
MEETQPPPQPKLPLCDSLMIWLQTFNTASPCQDVKQLTSGVAMAQVLHQIDAAWFNESWLSRIKEDVGDNWRIKASNVKKVLQGIMSYYHEFLGQQISEALIPDLNQITECSDPVELGRLLQLILGCAINCEKKQEHIQNIMTLEESVQHVVMTAIQELMSKEILSSPPNDAVGELEQQLKRALEELQEALAEKEELRQRCEELDMQVTTLQDEKNSLVSENEMMNEKLDQLDGSFDDPNTVVAKKYFHAQLQLEQLQEENFRLEAAKDDYRVHCEELEKQLIEFQHRNDELTSLAEETRALKDEIDVLRATSDKANKLESTVEIYRQKLQDLNDLRKQVKTLQETNMMYMHNTVSLEEELKKANAARTQLETYKRQVQDLHVKLSSESKRADTLAFEMKRLEEKHEALLKEKERLIEQRDTLKETNEELRCSQVQQDHLNQTDASATKSYENLAAEIMPVEYREVFIRLQHENKMLRLQQEGSENERIEELQEQLEQKHRKMNELETEQRLSKERIRELQQQIEDLQKSLQEQGSKSEGESSSKLKQKLEAHMEKLTEVHEELQKKQELIEDLQPDINQNVQKINELEAALQKKDEDMKAMEERYKMYLEKARNVIKTLDPKLNPASAEIMLLRKQLAEKERRIEILESECKVAKFRDYEEKLIVSAWYNKSLAFQKLGMESRLVSGGGACSDTGACTPARSFLAQQRHITNTRRNLSVKVPATTSD

SEQ ID NO: 5514 - protein, 331 aa, Homo sapiens
MTAKMETTFYDDALNASFLPSESGPYGYSNPKILKQSMTLNLADPVGSLKPHLRAKNSDLLTSPDVGLLKLASPELERLIIQSSNGHITTTPTPTQFLCPKNVTDEQEGFAEGFVRALAELHSQNTLPSVTSAAQPVNGAGMVAPAVASVAGGSGSGGFSASLHSEPPVYANLSNFNPGALSSGGGAPSYGAAGLAFPAQPQQQQQPPHHLPQQMPVQHPRLQALKEEPQTVPEMPGETPPLSPIDMESQERIKAERKRMRNRIAASKCRKRKLERIARLEEKVKTLKAQNSELASTANMLREQVAQLKQKVMNHVNSGCQLMLTQQLQTF

SEQ ID NO: 5515 - protein, 329 aa, Homo sapiens
MTTQQIDLQGPGPWGFRLVGGKDFEQPLAISRVTPGSKAALANLCIGDVITAIDGENTSNMTHLEAQNRIKGCTDNLTLTVARSEHKVWSPLVTEEGKRHPYKMNLASEPQEVLHIGSAHNRSAMPFTASPASSTTARVITNQYNNPAGLYSSENISNFNNALESKTAASGVEANSRPLDHAQPPSSLVIDKESEVYKMLQEKQELNEPPKQSTSFLVLQEILESEEKGDPNKPSGFRSVKAPVTKVAASIGNAQKLPMCDKCGTGIVGVFVKLRDRHRHPECYVCTDCGTNLKQKGHFFVEDQIYCEKHARERVTPPEGYEVVTVFPK

SEQ ID NO: 5516 - protein, 361 aa, Homo sapiens
MFAKGKGSAVPSDGQAREKLALYVYEYLLHVGAQKSAQTFLSEIRWEKNITLGEPPGFLHSWWCVFWDLYCAAPERRDTCEHSSEAKAFHDYSAAAAPSPVLGNIPPNDGMPGGPIPPGFFQPFMSPRYAGGPRPPIRMGNQPPGGVPGTQPLLPNSMDPTRQQGHPNMGGSMQRMNPPRGMGPMGPGPQNYGSGMRPPPNSLGPAMPGINMGPGAGRPWPNPNSANSIPYSSSSPGTYVGPPGGGGPPGTPIMPSPADSTNSSDNIYTMINPVPPGGSRSNFPMGPGSDGPMGGMGGMEPHHMNGSLGSGDIDGLPKNSPNNISGISNPPGTPRDDGELGGNFLHSFQNDNYSPSMTMSV

SEQ ID NO: 5517 - protein, 388 aa, Homo sapiens
MFAKGKGSAVPSDGQAREKLALYVYEYLLHVGAQKSAQTFLSEIRWEKNITLGEPPGFLHSWWCVFWDLYCAAPERRDTCEHSSEAKAFHDYSAAAAPSPVLGNIPPNDGMPGGPIPPGFFQGPPGSQPSPHAQPPPHNPSSMMGPHSQPFMSPRYAGGPRPPIRMGNQPPGGVPGTQPLLPNSMDPTRQQGHPNMGGSMQRMNPPRGMGPMGPGPQNYGSGMRPPPNSLGPAMPGINMGPGAGRPWPNPNSANSIPYSSSSPGTYVGPPGGGGPPGTPIMPSPADSTNSSDNIYTMINPVPPGGSRSNFPMGPGSDGPMGGMGGMEPHHMNGSLGSGDIDGLPKNSPNNISGISNPPGTPRDDGELGGNFLHSFQNDNYSPSMTMSV

SEQ ID NO: 5518 - protein, 310 aa, Homo sapiens
MMLLRKCCNHPYLIEYPIDPVTQEFKIDEELVTNSGKFLILDRMLPELKKRGHKVLLFSQMTSMLDILMDYCHLRDFNFSRLDGSMSYSEREKNMHSFNTDPEVFIFLVSTRAGGLGINLTAADTVIIYDSDWNPQSDLQAQDRCHRIGQTKPVVVYRLVTANTIDQKIVERAAAKRKLEKLIIHKNHFKGGQSGLNLSKNFLDPKELMELLKSRDYEREIKGSREKVISDKDLELLLDRSDLIDQMNASGPIKEKMGIFKILENSEDSSPELETGFHHLGLTGPELISGDLPTSASQSAGITSVSHCVA

SEQ ID NO: 5519 - protein, 700 aa, Homo sapiens
MQVKRSQEILSVAKKNKKENEDENSSSTNLCVEDLQKNKDSNSIIKDRLSETVRQNTKFFFDPVRKCNGQPVPFQQPKHFTGGVMRWYQVEGMEWLRMLWENGINGILADEMGLGKTVQCIATIALMIQRGVPGPFLVCGPLSTLPNWMAEFKRFTPDIPTMLYHGTQEERQKLVRNIYKRKGTLQIHPVVITSFEIAMRDRNALQHCYWKYLIVDEGHRIKNMKCRLIRELKRFNADNKLLLTGTPLQNNLSELWSLLNFLLPDVFDDLKSFESWFDITSLSETAEDIIAKEREQNVLHMLHQILTPFLLRRLKSDVALEVPPKREVVVYAPLSKKQEIFYTAIVNRTIANMFGSSEKETIELSPTGRPKRRTRKSINYSKIDDFPNELEKLISQIQPEVDRERAVVEVNIPVESEVNLKLQNIMMLLRKCCNHPYLIEYPIDPVTQEFKIDEELVTNSGKFLILDRMLPELKKRGHKVLLFSQMTSMLDILMDYCHLRDFNFSRLDGSMSYSEREKNMHSFNTDPEVFIFLVSTRAGGLGINLTAADTVIIYDSDWNPQSDLQAQDRCHRIGQTKPVVVYRLVTANTIDQKIVERAAAKRKLEKLIIHKNHFKGGQSGLNLSKNFLDPKELMELLKSRDYEREIKGSREKVISDKDLELLLDRSDLIDQMNASGPIKEKMGIFKILENSEDSSPECLF

SEQ ID NO: 5520 - protein, 137 aa, Homo sapiens [sequence omitted]

SEQ ID NO: 5521 - protein, 464 aa, Homo sapiens
MSSRSTKDLIKSKWGSKPSNSKSETTLEKLKGEIAHLKTSVDEITSGKGKLTDKERHRLLEKIRVLEAEKEKNAYQLTEKDKEIQRLRDQLKARYSTTTLLEQLEETTREGERREQVLKALSEEKDVLKQQLSAATSRIAELESKTNTLRLSQTVAPNCFNSSINNIHEMEIQLKDALEKNQQWLVYDQQREVYVKGLLAKIFELEKKTETAAHSLPQQTKKPESEGYLQEEKQKCYNDLLASAKKDLEVERQTITQLSFELSEFRRKYEETQKEVHNLNQLLYSQRRADVQHLEDDRHKTEKIQKLREENDIARGKLEEEKKRSEELLSQVQFLYTSLLKQQEEQTRVALLEQQMQACTLDFENEKLDRQHVQHQLHVILKELRKARNQITQLESLKQLHEFAITEPLVTFQGETENREKVAASPKSPTAALNESLVECPKCNIQYPATEHRDLLVHVEYCSK

SEQ ID NO: 5522 - protein, 160 aa, Homo sapiens
MLRVIVESASNIPKTKFGKPDPIVSVIFKDEKKKTKKVDNELNPVWNEILEFDLRGIPLDFSSSLGIIVKDFETIGQNKLIGTATVALKDLTGDQSRSLPYKLISLLNEKGQDTGATIDLVIGYDPPSAPHPNDLSGPSVPGMGGKLTLLKAQPPPGGGC

SEQ ID NO: 5523 - protein, 231 aa, Homo sapiens
MAGMVDFQDEEQVKSFLENMEVECNYHCYHEKDPDGCYRLVDYLEGIRKNFDEAAKVLKFNCEENQHSDSCYKLGAYYVTGKGGLTQDLKAAARCFLMACEKPGKKSIAACHNVGLLAHDGQVNEDGQPDLGKARDYYTRACDGGYTSSCFNLSAMFLQGAPGFPKDMDLACKYSMKACDLGHIWACANASRMYKLGDGVDKDEAKAEVLKNRAQQLHKEQQKGVQPLTFG

SEQ ID NO: 5524 - protein, 861 aa, Homo sapiens
MAHYPTRLKTRKTYSWVGRPLLDRKLHYQTYREMCVKTEGCSTEIHIQIGQFVLIEGDDDENPYVAKLLELFEDDSDPPPKKRARVQWFVRFCEVPACKRHLLGRKPGAQEIFWYDYPACDSNINAETIIGLVRVIPLAPKDVVPTNLKNEKTLFVKLSWNEKKFRPLSSELFAELNKPQESAAKCQKPVRAKSKSAESPSWTPAEHVAKRIESRHSASKSRQTPTHPLTPRARKRLELGNLGNPQMSQQTSCASLDSPGRIKRKVAFSEITSPSKRSQPDKLQTLSPALKAPEKTRETGLSYTEDDKKASPEHRIILRTRIAASKTIDIREERTLTPISGGQRSSVVPSVILKPENIKKRDAKEAKAQNEATSTPHRIRRKSSVLTMNRIRQQLRFLGNSKSDQEEKEILPAAEISDSSSDEEEASTPPLPRRAPRTVSRNLRSSLKSSLHTLTKVPKKSLKPRTPRCAAPQIRSRSLAAQEPASVLEEARLRLHVSAVPESLPCREQEFQDIYNFVESKLLDHTGGCMYISGVPGTGKTATVHEVIRCLQQAAQANDVPPFQYIEVNGMKLTEPHQVYVQILQKLTGQKATANHAAELLAKQFCTRGSPQETTVLLVDELDLLWTHKQDIMYNLFDWPTHKEARLVVLAIANTMDLPERIMMNRVSSRLGLTRMCFQPYTYSQLQQILRSRLKHLKAFEDDAIQLVARKVAALSGDARRCLDICRRATEICEFSQQKPDSPGLVTIAHSMEAVDEMFSSSYITAIKNSSVLEQSFLRAILAEFRRSGLEEATFQQIYSQHVALCRMEGLPYPTMSETMAVCSHLGSCRLLLVEPSRNDLLLRVRLNVSQDDVLYALKDE

SEQ ID NO: 5525 - protein, 298 aa, Homo sapiens
MTDAAVSFAKDFLAGGVAAAISKTAVAPIERVKLLLQVQHASKQITADKQYKGIIDCVVRIPKEQGVLSFWRGNLANVIRYFPTQALNFAFKDKYKQIFLGGVDKRTQFWLYFAGNLASGGAAGATSLCFVYPLDFARTRLAADVGKAGAEREFRGLGDCLVKIYKSDGIKGLYQGFNVSVQGIIIYRAAYFGIYDTAKGMLPDPKNTHIVISWMIAQTVTAVAGLTSYPFDTVRRRMMMQSGRKGTDIMYTGTLDCWRKIARDEGGKAFFKGAWSNVLRGMGGAFVLVLYDEIKKYT

SEQ ID NO: 5526 - protein, 759 aa, Homo sapiens
MESVRIEQMLSLPAEVSSDNLESAERGASAAQVDMGPHPKVAAEGPAPLPTREPEQEQSPGTSTPESKVLLTQADALASRGRIREALEVYRQLSERQQLVAEQLEQLVRCLAEKVPQGEALAPAPPDEGSTASGTVAAEETGAAAAAAATEVWDGFKCRKCHGFLSDPVSLSCGHTFCKLCLERGRAADRRCALCGVKLSALMVATGRARGARRAGQQPPPPLRVNVVLSGLLGKLFPGPARASQLRHEGNRLYRERQVEAALLKYNEAVKLAPNDHLLYSNRSQIYFTLESHENALHDAEIACKLRPMGFKAHFRKAQALATLGKVEEALREFLYCVSLDGKNKRARCEAQRDNLELPHCSSQEEAAARGDGSSLMDPAKVKGDGQQHHMKDQEEEEEKWDATSPKAASSKTGKCQEKKRKHCQIESQEETGMPNKASKQDPPTDQGDKPALSLPLASFDASDLECALCMRLFYEPVTTPCGHTFCLKCLERCLDHNAKCPLCKDGLSQCLASRKYSKNVIMEELIAKFLPEELKERRKLYEEEMEELSNLNKNVPIFVCTMAYPTVPCPLHIFEPCYRLMIRRCIETGTRQFGMCLGDPVKGFAEYGCILEIRNVQFFADGRSVVDSIGKRRFRVLHQSQRDGYNTADIEYIEDQKVQGEDCAELMGLHNCVYQQASLWFHSLKLSLKNRILNHFGPMPEKDADPQMNPNGPAWCWWMLAVLPLESRAQLPFLAMRSLKDRLNGIRRVLAFISRNQN

SEQ ID NO: 5527 - protein, 478 aa, Homo sapiens
MSTNGDDHQVKDSLEQLRCHFTWELSIDDDEMPDLENRVLDQIEFLDTKYSVGIHNLLAYVKHLKGQNEEALKSLKEAENLMQEEHDNQANVRSLVTWGNFAWMYYHMGRLAEAQTYLDKVENICKKLSNPFRYRMECPEIDCEEGWALLKCGGKNYERAKACFEKVLEVDPENPESSAGYAISAYRLDGFKLATKNHKPFSLLPLRQAVRLNPDNGYIKVLLALKLQDEGQEAEGEKYIEEALANMSSQTYVFRYAAKFYRRKGSVDKALELLKKALQETPTSVLLHHQIGLCYKAQMIQIKEATKGQPRGQNREKLDKMIRSAIFHFESAVEKKPTFEVAHLDLARMYIEAGNHRKAEENFQKLLCMKPVVEETMQDIHFHYGRFQEFQKKSDVNAIIHYLKAIKIEQASLTRDKSINSLKKLVLRKLRRKALDLESLSLLGFVYKLEGNMNEALEYYERALRLAADFENSVRQGP

SEQ ID NO: 5528 - protein, 490 aa, Homo sapiens
MSEVTKNSLEKILPQLKCHFTWNLFKEDSVSRDLEDRVCNQIEFLNTEFKATMYNLLAYIKHLDGNNEAALECLRQAEELIQQEHADQAEIRSLVTWGNYAWVYYHLGRLSDAQIYVDKVKQTCKKFSNPYSIEYSELDCEEGWTQLKCGRNERAKVCFEKALEEKPNNPEFSSGLAIAMYHLDNHPEKQFSTDVLKQAIELSPDNQYVKVLLGLKLQKMNKEAEGEQFVEEALEKSPCQTDVLRSAAKFYRRKGDLDKAIELFQRVLESTPNNGYLYHQIGCCYKAKVRQMQNTGESEASGNKEMIEALKQYAMDYSNKALEKGLNPLNAYSDLAEFLETECYQTPFNKEVPDAEKQQSHQRYCNLQKYNGKSEDTAVQHGLEGLSISKKSTDKEEIKDQPQNVSENLLPQNAPNYWYLQGLIHKQNGDLLQAAKCYEKELGRLLRDAPSGIGSIFLSASELEDGSEEMGQGAVSSSPRELLSNSEQLN

SEQ ID NO: 5529 - protein, 490 aa, Homo sapiens; identical to SEQ ID NO: 5528

SEQ ID NO: 5530 - protein, 1288 aa, Homo sapiens
MEPIYPFARPQMNTRFPSSRMVPFHFPPSKCALWNPTPTGDFIYLHLSYYRNPKLVVTEKTIRLAYRHAKQNKKNSSCFLLGSLTADEDEEGVTLTVDRFDPGREVPECLEITPTASLPGDFLIPCKVHTQELCSREMIVHSVDDFSSALKALQCHICSKDSLDCGKLLSLRVHITSRESLDSVEFDLHWAAVTLANNFKCTPVKPIPIIPTALARNLSSNLNISQVQGTYKYGYLTMDETRKLLLLLESDPKVYSLPLVGIWLSGITHIYSPQVWACCLRYIFNSSVQERVFSESGNFIIVLYSMTHKEPEFYECFPCDGKIPDFRFQLLTSKETLHLFKNVEPPDKNPIRCELSAESQNAETEFFSKASKNFSIKRSSQKLSSGKMPIHDHDSGVEDEDFSPRPIPSPHPVSQKISKIQPSVPELSLVLDGNFIESNPLPTPLEMVNNENPPLINHLEHLKPLQPQLYDEKHSPEVEAGEPSLRGIPNQLNQDKPALLRHCKVRQPPAYKKGNPHTRNSIKPSSHNGPSHDIFEKLQTVSAGNVQNEEYPIRPSTLNSRQSSLAPQSQPHDFVFSPHNSGRPMELQIPTPPLPSYCSTNVCRCCQHHSHIQYSPLNSWQGANTVGSIQDVQSEALQKHSLFHPSGCPALYCNAFCSSSSPIALRPQGDMGSCSPHSNIEPSPVARPPSHMDLCNPQPCTVCMHTPKTESDNGMMGLSPDAYRFLTEQDRQLRLLQAQIQRLLEAQSLMPCSPKTTAVEDTVQAGRQMELVSVEAQSSPGLHMRKGVSIAVSTGASLFWNAAGEDQEPDSQMKQDDTKISSEDMNFSVDINNEVTSLPGSASSLKAVDIPSFEESNIAVEEEFNQPLSVSNSSSLVVRKEPDVPVFFPSGQLAESVSMCLQTGPTGGASNNSETSEEPKIEHVMQPLLHQPSDNQKIYQDLLGQVNHLLNSSSKETEQPSTKAVIISHECTRTQNVYHTKKKTHHSRLVDKDCVLNATLKQLRSLGVKIDSPTKVKKNAHNVDHASVLACISPEAVISGLNCMSFANVGMSGLSPNGVDLSMEANAIALKYLNENQLSQLSVTRSNQNNCDPFSLLHINTDRSTVGLSLISPNNMSFATKKYMKRYGLLQSSDNSEDEEEPPDNADSKSEYLLNQNLRSIPEQLGGQKEPSKNDHEIINCSNCESVGTNADTPVLRNITNEVLQTKAKQQLTEKPAFLVKNLKPSPAVNLRTGKAEFTQHPEKENEGDITIFPESLQPSETLKQMNSMNSVGTFLDVKRLRQLPKLF

SEQ ID NO: 5531 - protein, 1084 aa, Homo sapiens
MRNSEEQPSGGTTVLQRLLQEQLRYGNPSENRSLLAIHQQATGNGPPFPSGSGNPGPQSDVLSPQDHHQQLVAHAARQEPQGQEIQSENLIMEKQLSPRMQNNEELPTYEEAKVQSQYFRGQQHASVGAAFYVTGVTNQKMRTEGRPSVQRLNPGKMHQDEGLRDLKQGHVRSLSERLMQMSLATSGVKAHPPVTSAPLSPPQPNDLYKNPTSSSEFYKAQGPLPNQHSLKGMEHRGPPPEYPFKGMPPQSVVCKPQEPGHFYSEHRLNQPGRTEGQLMRYQHPPEYGAARPAQDISLPLSARNSQPHSPTSSLTSGGSLPLLQSPPSTRLSPARHPLVPNQGDHSAHLPRPQQHFLPNQAHQGDHYRLSQPGLSQQQQQQQQQHHHHHHHQQQQQQQPQQQPGEAYSAMPRAQPSSASYQPVPADPFAIVSRAQQMVEILSDENRNLRQELEGCYEKVARLQKVETEIQRVSEAYENLVKSSSKREALEKAMRNKLEGEIRRMHDFNRDLRERLETANKQLAEKEYEGSEDTRKTISQLFAKNKESQREKEKLEAELATARSTNEDQRRHIEIRDQALSNAQAKVVKLEEELKKKQVYVDKVEKMQQALVQLQAACEKREQLEHRLRTRLERELESLRIQQRQGNCQPTNVSEYNAAALMELLREKEERILALEADMTKWEQKYLEENVMRHFALDAAATVAAQRDTTVISHSPNTSYDTALEARIQKEEEEILMANKRCLDMEGRIKTLHAQIIEKDAMIKVLQQRSRKEPSKTEQLSCMRPAKSLMSISNAGSGLLSHSSTLTGSPIMEEKRDDKSWKGSLGILLGGDYRAEYVPSTPSPVPPSTPLLSAHSKTGSRDCSTQTERGTESNKTAAVAPISVPAPVAAAATAAAITATAATITTTMVAAAPVAVAAAAAPAAAAAPSPATAAATAAAVSPAAAGQIPAAASVASAAAVAPSAAAAAAVQVAPAAPAPVPAPALVPVPAPAAAQASAPAQTQAPTSAPAVAPTPAPTPTPAVAQAEVPASPATGPGPHRLSIPSLTCNPDKTDGPVFHSNTLERKTPIQILGQEPDAEMVEYLI

SEQ ID NO: 5532 - protein, 852 aa, Homo sapiens
MEHRGPPPEYPFKGMPPQSVVCKPQEPGHFYSEHRLNQPGRTEGQLMRYQHPPEYGAARPAQDISLPLSARNSQPHSPTSSLTSGGSLPLLQSPPSTRLSPARHPLVPNQGDHSAHLPRPQQHFLPNQAHQGDHYRLSQPGLSQQQQQQQQQHHHHHHHQQQQQQQPQQQPGEAYSAMPRAQPSSASYQPVPADPFAIVSRAQQMVEILSDENRNLRQELEGCYEKVARLQKVETEIQRVSEAYENLVKSSSKREALEKAMRNKLEGEIRRMHDFNRDLRERLETANKQLAEKEYEGSEDTRKTISQLFAKNKESQREKEKLEAELATARSTNEDQRRHIEIRDQALSNAQAKVVKLEEELKKKQVYVDKVEKMQQALVQLQAACEKREQLEHRLRTRLERELESLRIQQRQGNCQPTNVSEYNAAALMELLREKEERILALEADMTKWEQKYLEENVMRHFALDAAATVAAQRDTTVISHSPNTSYDTALEARIQKEEEEILMANKRCLDMEGRIKTLHAQIIEKDAMIKVLQQRSRKEPSKTEQLSCMRPAKSLMSISNAGSGLLSHSSTLTGSPIMEEKRDDKSWKGSLGILLGGDYRAEYVPSTPSPVPPSTPLLSAHSKTGSRDCSTQTERGTESNKTAAVAPISVPAPVAAAATAAAITATAATITTTMVAAAPVAVAAAAAPAAAAAPSPATAAATAAAVSPAAAGQIPAAASVASAAAVAPSAAAAAAVQVAPAAPAPVPAPALVPVPAPAAAQASAPAQTQAPTSAPAVAPTPAPTPTPAVAQAEVPASPATGPGPHRLSIPSLTCNPDKTDGPVFHSNTLERKTPIQILGQEPDAEMVEYLI

SEQ ID NO: 5533 - protein, 747 aa, Homo sapiens
MRRSLAPSQLAKRKPEGRSCDDEDWQPGLVTPRKRKSSSETQIQECFLSPFRKPLSQLTNQPPCLDSSQHEAFIRSILSKPFKVPIPNYQGPLGSRALGLKRAGVRRALHDPLEKDALVLYEPPPLSAHDQLKLDKEKLPVHVVVDPILSKVLRPHQREGVKFLWECVTSRRIPGSHGCIMADEMGLGKTLQCITLMWTLLRQSPECKPEIDKAVVVSPSSLVKNWYNEVGKWLGGRIQPLAIDGGSKDEIDQKLEGFMNQRGARVSSPILIISYETFRLHVGVLQKGSVGLVICDEGHRLKNSENQTYQALDSLNTSRRVLISGTPIQNDLLEYFSLVHFVNSGILGTAHEFKKHFELPILKGRDAAASEADRQLGEERLRELTSIVNRCLIRRTSDILSKYLPVKIEQVVCCRLTPLQTELYKRFLRQAKPAEELLEGKMSVSSLSSITSLKKLCNHPALIYDKCVEEEDGFVGALDLFPPGYSSKALEPQLSGKMLVLDYILAVTRSRSSDKVVLVSNYTQTLDLFEKLCRARRYLYVRLDGTMSIKKRAKVVERFNSPSSPDFVFMLSSKAGGCGLNLIGANRLVMFDPDWNPANDEQAMARVWRDGQKKTCYIYRLLSAGTIEEKIFQRQSHKKALSSCVVDEEQDVERHFSLGELKELFILDEASLSDTHDRLHCRRCVNSRQIRPPPDGSDCTSDLAGWNHCTDKWGLRDEVLQAAWDAASTAITFVFHQRSHEEQRGLR

SEQ ID NO: 5534 - protein, 151 aa, Homo sapiens
MAPLYQAAGKGDVPTKRPPVLRAGVNTVTTLVENKKAQLVVIAHDVDPIELVVFLPALCRKMGVPYCIIKGKARLGRLVHRKTCTTVAFTQVNSEDKGALAKLVEAIRTNYNDRYDEIRRHWGGNVLGPKSVARIAKLEKAKAKELATKLG

SEQ ID NO: 5535 - protein, 266 aa, Homo sapiens [sequence omitted]

SEQ ID NO: 5536 - protein, 902 aa, Homo sapiens
MVQRMWAEAAGPAGGAEPLFPGSRRSRSVWDAVRLEVGVPDSCPVVLHSFTQLDPDLPRPESSTQEIGEELINGVIYSISLRKVQLHHGGNKGQRWLGYENESALNLYETCKVRTVKAGTLEKLVEHLVPAFQGSDLSYVTIFLCTYRAFTTTQQVLDLLFKRYGCILPYSDEDGGPQDQLKNAISSILGTWLDQYSEDFCQPPDFPCLKQLVAYVQLNMPGSDLERRAHLLLAQLEHSEPIEAEPEALSPVPALKPTPELELALTPARAPSPVPAPAPEPEPAPTPAPGSELEVAPAPAPELQQAPEPAVGLESAPAPALELEPAPEQDPAPSQTLELEPAPAPVPSLQPSWPSPVVAENGLSEEKPHLLVFPPDLVAEQFTLMDAELFKKVVPYHCLGSIWSQRDKKGKEHLAPTIRATVTQFNSVANCVITTCLGNRSTKAPDRARVVEHWIEVARECRILKNFSSLYAILSALQSNSIHRLKKTWEDVSRDSFRIFQKLSEIFSDENNYSLSRELLIKEGTSKFATLEMNPKRAQKRPKETGIIQGTVPYLGTFLTDLVMLDTAMKDYLYGRLINFEKRRKEFEVIAQIKLLQSACNNYSIAPDEQFGAWFRAVERLSETESYNLSCELEPPSESASNTLRTKKNTAIVKRWSDRQAPSTELSTSGSSHSKSCDQLRCGPYLSSGDIADALSVHSAGSSSSDVEEINISFVPESPDGQEKKFWESASQSSPETSGISSASSSTSSSSASTTPVAATRTHKRSVSGLCNSSSALPLYNQQVGDCCIIRVSLDVDNGNMYKSILVTSQDKAPAVIRKAMDKHNLEEEEPEDYELLQILSDDRKLKIPENANVFYAMNSTANYDFVLKKRTFTKGVKVKHGASSTLPRMKQKGLKIAKGIF

SEQ ID NO: 5537 - protein, 914 aa, Homo sapiens
MVQRMWAEAAGPAGGAEPLFPGSRRSRSVWDAVRLEVGVPDSCPVVLHSFTQLDPDLPRPESSTQEIGEELINGVIYSISLRKVQLHHGGNKGQRWLGYENESALNLYETCKVRTVKAGTLEKLVEHLVPAFQGSDLSYVTIFLCTYRAFTTTQQVLDLLFKRYGRCDALTASSRYGCILPYSDEDGGPQDQLKNAISSILGTWLDQYSEDFCQPPDFPCLKQLVAYVQLNMPGSDLERRAHLLLAQLEHSEPIEAEPEALSPVPALKPTPELELALTPARAPSPVPAPAPEPEPAPTPAPGSELEVAPAPAPELQQAPEPAVGLESAPAPALELEPAPEQDPAPSQTLELEPAPAPVPSLQPSWPSPVVAENGLSEEKPHLLVFPPDLVAEQFTLMDAELFKKVVPYHCLGSIWSQRDKKGKEHLAPTIRATVTQFNSVANCVITTCLGNRSTKAPDRARVVEHWIEVARECRILKNFSSLYAILSALQSNSIHRLKKTWEDVSRDSFRIFQKLSEIFSDENNYSLSRELLIKEGTSKFATLEMNPKRAQKRPKETGIIQGTVPYLGTFLTDLVMLDTAMKDYLYGRLINFEKRRKEFEVIAQIKLLQSACNNYSIAPDEQFGAWFRAVERLSETESYNLSCELEPPSESASNTLRTKKNTAIVKRWSDRQAPSTELSTSGSSHSKSCDQLRCGPYLSSGDIADALSVHSAGSSSSDVEEINISFVPESPDGQEKKFWESASQSSPETSGISSASSSTSSSSASTTPVAATRTHKRSVSGLCNSSSALPLYNQQVGDCCIIRVSLDVDNGNMYKSILVTSQDKAPAVIRKAMDKHNLEEEEPEDYELLQILSDDRKLKIPENANVFYAMNSTANYDFVLKKRTFTKGVKVKHGASSTLPRMKQKGLKIAKGIF

SEQ ID NO: 5538 - protein, 885 aa, Homo sapiens
MCLWGHSTAPAHTLSSPPLLFCSLPCALHLQPGTGHPPGQVPRKSSTQEIGEELINGVIYSISLRKVQLHHGGNKGQRWLGYENESALNLYETCKVRTVKAGTLEKLVEHLVPAFQGSDLSYVTIFLCTYRAFTTTQQVLDLLFKRYGCILPYSDEDGGPQDQLKNAISSILGTWLDQYSEDFCQPPDFPCLKQLVAYVQLNMPGSDLERRAHLLLAQLEHSEPIEAEPEALSPVPALKPTPELELALTPARAPSPVPAPAPEPEPAPTPAPGSELEVAPAPAPELQQAPEPAVGLESAPAPALELEPAPEQDPAPSQTLELEPAPAPVPSLQPSWPSPVVAENGLSEEKPHLLVFPPDLVAEQFTLMDAELFKKVVPYHCLGSIWSQRDKKGKEHLAPTIRATVTQFNSVANCVITTCLGNRSTKAPDRARVVEHWIEVARECRILKNFSSLYAILSALQSNSIHRLKKTWEDVSRDSFRIFQKLSEIFSDENNYSLSRELLIKEGTSKFATLEMNPKRAQKRPKETGIIQGTVPYLGTFLTDLVMLDTAMKDYLYGRLINFEKRRKEFEVIAQIKLLQSACNNYSIAPDEQFGAWFRAVERLSETESYNLSCELEPPSESASNTLRTKKNTAIVKRWSDRQAPSTELSTSGSSHSKSCDQLRCGPYLSSGDIADALSVHSAGSSSSDVEEINISFVPESPDGQEKKFWESASQSSPETSGISSASSSTSSSSASTTPVAATRTHKRSVSGLCNSSSALPLYNQQVGDCCIIRVSLDVDNGNMYKSILVTSQDKAPAVIRKAMDKHNLEEEEPEDYELLQILSDDRKLKIPENANVFYAMNSTANYDFVLKKRTFTKGVKVKHGASSTLPRMKQKGLKIAKGIF

SEQ ID NO: 5539 - protein, 97 aa, Homo sapiens
MSSGNAKIGHPAPNFKATADEGISFRGLFIIDDKGILRQITVNDLPVGRSVDETLRLVQAFQFTDKHGEVCPAGWKPGSDTIKPDVQKSKEYFSKQK

SEQ ID NO: 5540 - protein, 510 aa, Homo sapiens
MAADSDDGAVSAPAASDGGVSKSTTSGEELVVQVPVVDVQSNNFKEMWPSLLLAIKTANFVAVDTELSGLGDRKSLLNQCIEERYKAVCHAARTRSILSLGLACFKRQPDKGEHSYLAQVFNLTLLCMEEYVIEPKSVQFLIQHGFNFNQQYAQGIPYHKGNDKGDESQSQSVRTLFLELIRARRPLVLHNGLIDLVFLYQNFYAHLPESLGTFTADLCEMFPAGIYDTKYAAEFHARFVASYLEYAFRKCERENGKQRAAGSPHLTLEFCNYPSSMRDHIDYRCCLPPATHRPHPTSICDNFSAYGWCPLGPQCPQSHDIDLIIDTDEAAAEDKRRRRRRREKRKRALLNLPGTQTSGEAKDGPPKKQVCGDSIKPEETEQEVAADETRNLPHSKQGNKNDLEMGIKAARPEIADRATSEVPGSQASPNPVPGDGLHRAGFDAFMTGYVMAYVEVSQGPQPCSSGPWLPECHNKVYLSGKAVPLTVAKSQFSRSSKAHNQKMKLTWGSS

SEQ ID NO: 5541 - protein, 188 aa, Homo sapiens
MGISRDNWHKRRKTGGKRKPYHKKRKYELGRPAANTKIGPRRIHTVRVRGGCTRKTRIIDVVYNASNNELVRTKTLVKNCIVLIDSTPYRQWYESHYALPLGRKKGAKLTPEEEEILNKKRSKKIQKKYDERKKNAKISSLLEEQFQQGKLLACIASRPGQCGRADGYVLEGKELEFYLRKIKARKGK

SEQ ID NO: 5542 - protein, 671 aa, Homo sapiens
MIDFDDVAAINPELLQLLPLHPKDNLPLQENVTIQKQKRRSVNSKIPAPKESLRSRSTRMSTVSELRITAQENDMEVELPAAANSRKQFSVPPAPTRPSCPAVAEIPLRMVSEEMEEQVHSIRGSSSANPVNSVRRKSCLVKEVEKMKNKREEKKAQNSEMRMKRAQEYDSSFPNWEFARMIKEFRATLECHPLTMTDPIEEHRICVCVRKRPLNKQELAKKEIDVISIPSKCLLLVHEPKLKVDLTKYLENQAFCFDFAFDETASNEVVYRFTARPLVQTIFEGGKATCFAYGQTGSGKTHTMGGDLSGKAQNASKGIYAMASRDVFLLKNQPCYRKLGLEVYVTFFEIYNGKLFDLLNKKAKLRVLEDGKQQVQVVGLQEHLVNSADDVIKMIDMGSACRTSGQTFANSNSSRSHACFQIILRAKGRMHGKFSLVDLAGNERGADTSSADRQTRMEGAEINKSLLALKECIRALGQNKAHTPFRESKLTQVLRDSFIGENSRTCMIATISPGISSCEYTLNTLRYADRVKELSPHSGPSGEQLIQMETEEMEACSNGALIPGNLSKEEEELSSQMSSFNEAMTQIRELEEKAMEELKEIIQQGPDWLELSEMTEQPDYDLETFVNKAESALAQQAKHFSALRDVIKALRLAMQLEEQASRQISSKKRPQ

SEQ ID NO: 5543 - protein, 725 aa, Homo sapiens
MAMDSSLQARLFPGLAIKIQRSNGLIHSANVRTVNLEKSCVSVEWAEGGATKGKEIDFDDVAAINPELLQLLPLHPKDNLPLQENVTIQKQKRRSVNSKIPAPKESLRSRSTRMSTVSELRITAQENDMEVELPAAANSRKQFSVPPAPTRPSCPAVAEIPLRMVSEEMEEQVHSIRGSSSANPVNSVRRKSCLVKEVEKMKNKREEKKAQNSEMRMKRAQEYDSSFPNWEFARMIKEFRATLECHPLTMTDPIEEHRICVCVRKRPLNKQELAKKEIDVISIPSKCLLLVHEPKLKVDLTKYLENQAFCFDFAFDETASNEVVYRFTARPLVQTIFEGGKATCFAYGQTGSGKTHTMGGDLSGKAQNASKGIYAMASRDVFLLKNQPCYRKLGLEVYVTFFEIYNGKLFDLLNKKAKLRVLEDGKQQVQVVGLQEHLVNSADDVIKMIDMGSACRTSGQTFANSNSSRSHACFQIILRAKGRMHGKFSLVDLAGNERGADTSSADRQTRMEGAEINKSLLALKECIRALGQNKAHTPFRESKLTQVLRDSFIGENSRTCMIATISPGISSCEYTLNTLRYADRVKELSPHSGPSGEQLIQMETEEMEACSNGALIPGNLSKEEEELSSQMSSFNEAMTQIRELEEKAMEELKEIIQQGPDWLELSEMTEQPDYDLETFVNKAESALAQQAKHFSALRDVIKALRLAMQLEEQASRQISSKKRPQ

SEQ ID NO: 5544 - protein, 296 aa, Homo sapiens
MAASQAVEEMRSRVVLGEFGVRNVHTTDFPGNYSGYDDAWDQDRFEKNFRVDVVHMDENSLEFDMVGIDAAIANAFRRILLAEVPTMAVEKVLVYNNTSIVQDEILAHRLGLIPIHADPRLFEYRNQGDEEGTEIDTLQFRLQVRCTRNPHAAKDSSDPNELYVNHKVYTRHMTWIPLGNQADLFPEGTIRPVHDDILIAQLRPGQEIDLLMHCVKGIGKKVARVANPRLDTFSREIFRNEKLKKVVRLARVRDHYIFSVESTGVLPPDVLVSEAIKVLMGKCRRFLDELDAVQMD

SEQ ID NO: 5545 - protein, 130 aa, Homo sapiens
MNDTVTIRTRKFMTNRLLQRKQMVIDVLHPGKATVPKTEIREKLAKMYKTTPDVIFVFGFRTHFGGGKTTGFGMIYDSLDYAKKNEPKHRLARHGLYEKKKTSRKQRKERKNRMKKVRGTAKANVGAGKK

SEQ ID NO: 5546 - protein, 110 aa, Homo sapiens
MAFQPPYSSSLFRKRDNASGASVVAIDNKIEQAMDLVKNHLMYAVREEVEILKEQIRELVEKNSQLERENTLLKTLASPEQLEKFQSCLSPEEPAPESPQVPEAPGGSAV

SEQ ID NO: 5547 - protein, 77 aa, Homo sapiens
MDLVKNHLMYAVREEVEILKEQIRELVEKNSQLERENTLLKTLASPEQLEKFQSCLSPEEPAPESPQVPEAPGGSAV

SEQ ID NO: 5548 - protein, 134 aa, Homo sapiens
MNTEMYQTPMEVAVYQLHNFSISFFSSLLGGDVVSVKLDNSASGASVVAIDNKIEQAMDLVKNHLMYAVREEVEILKEQIRELVEKNSQLERENTLLKTLASPEQLEKFQSCLSPEEPAPESPQVPEAPGGSAV

SEQ ID NO: 5549 - protein, 405 aa, Homo sapiens
MLQITNASLGLRFRRQLLYWFFYDGGYINASAEGVSIRTGLELSRDPAGRMKVSNVSCQASVSRMHAAFGGTFKKVYDFLSTFITSGMRFLLNQQICPVLYHAGTVLLNSLLDTVPVRSSVDELVGIDYSLMKDPVASTSNLDMDFRGAFFPLTERNWSLPNRAVEPQLQEEERMVYVAFSEFFFDSAMESYFRAGALQLLLVGDKVPHDLDMLLRATYFGSIVLLSPAVIDSPLKLELRVLAPPRCTIKPSGTTISVTASVTIALVPPDQPEVQLSSMTMDARLSAKMALRGKALRTQLDLRRFRIYSNHSALESLALIPLQAPLKTMLQIGVMPMLNERTWRGVQIPLPEGINFVHEVVTNHAGFLTIGADLHFAKGLREVIEKNRPADVRASTAPTPSTAAV

SEQ ID NO: 5550 - protein, 404 aa, Homo sapiens
MECALDAQSLISISLRKIHSSRTQRGGIKLHKNLLVSYVLRNARQLYLSERYAELYRRQQQQQQQQPPHHQHQHLAYAAPGMPASAADFGPLQLGGGGDAEAREPAARHQLHQLHQLHQLHLQQQLHQHQHPAPRGCAAAAAAGAPAGGAGALSELPGCAALQPPHGAPHRGQPLEPLQPGPAPLPLPLPPPAPAALCPRDPRAPAACSAPPGAAPPAAAASPPASPAPASSPGFYRGAYPTPSDFGLHCSSQTTVLDLDTHVVTTVENGYLHQDCCASAHCPCCGQGAPGPGLASAAGCKRKYYPGQEEEEDDEEDAGGLGAEPPGGAPFAPCKRARFEDFCPDSSPDASNISNLISIFGSGFSGLVSRQPDSSEQPPPLNGQLCAKQALASLGAWTRAIVAF

SEQ ID NO: 5551 - protein, 324 aa, Homo sapiens
MSSEAETQQPPAAPPAAPALSAADTKPGTTGSGAGSGGPGGLTSAAPAGGDKKVIATKVLGTVKWFNVRNGYGFINRNDTKEDVFVHQTAIKKNNPRKYLRSVGDGETVEFDVVEGEKGAEAANVTGPGGVPVQGSKYAADRNHYRRYPRRRGPPRNYQQNYQNSESGEKNEGSESAPEGQAQQRRPYRRRRFPPYYMRRPYGRRPQYSNPPVQGEVMEGADNQGAGEQGRPVRQNMYRGYRPRFRRGPPRQRQPREDGNEEDKENQGDETQGQQPPQRRYRRNFNYRRRRPENPKPQDGKETKAADPPAENSSAPEAEQGGAE

SEQ ID NO: 5552 - protein, 140 aa, Homo sapiens
MTLMMSGDKGISAFPESDNLFKWVGTIHGAAGTVYEDLRYKLSLEFPSGYPYNAPTVKFLTPCYHPNVDTQGNICLDILKEKWSALYDVRTILLSIQSLLGEPNIDSPLNTHAAELWKNPTAFKKYLQETYSKQVTSQEP

SEQ ID NO: 5553 - protein, 2406 aa, Homo sapiens
MDPEQSVKGTKKAEGSPRKRLTKGEAIQTSVSSSVPYPGSGTAATQESPAQELLAPQPFPGPSSVLREGSQEKTGQQQKPPKRPPIEASVHISQLPQHPLTPAFMSPGKPEHLLEGSTWQLVDPMRPGPSGSFVAPGLHPQSQLLPSHASIIPPEDLPGVPKVFVPRPSQVSLKPTEEAHKKERKPQKPGKYICQYCSRPCAKPSVLQKHIRSHTGERPYPCGPCGFSFKTKSNLYKHRKSHAHRIKAGLASGMGGEMYPHGLEMERIPGEEFEEPTEGESTDSEEETSATSGHPAELSPRPKQPLLSSGLYSSGSHSSSHERCSLSQSSTAQSLEDPPPFVEPSSEHPLSHKPEDTHTIKQKLALRLSERKKVIDEQAFLSPGSKGSTESGYFSRSESAEQQVSPPNTNAKSYAEIIFGKCGRIGQRTAMLTATSTQPLLPLSTEDKPSLVPLSVPRTQVIEHITKLITINEAVVDTSEIDSVKPRRSSLSRRSSMESPKSSLYREPLSSHSEKTKPEQSLLSLQHPPSTAPPVPLLRSHSMPSAACTISTPHHPFRGSYSFDDHITDSEALSHSSHVFTSHPRMLKRQPAIELPLGGEYSSEEPGPSSKDTASKPSDEVEPKESELTKKTKKGLKTKGVIYECNICGARYKKRDNYEAHKKYYCSELQIAKPISAGTHTSPEAEKSQIEHEPWSQMMHYKLGTTLELTPLRKRRKEKSLGDEEEPPAFESTKSQFGSPGPSDAARNLPLESTKSPAEPSKSVPSLEGPTGFQPRTPKPGSGSESGKERRTTSKEISVIQHTSSFEKSDSLEQPSGLEGEDKPLAQFPSPPPAPHGRSAHSLQPKLVRQPNIQVPEILVTEEPDRPDTEPEPPPKEPEKTEEFQWPQRSQTLAQLPAEKLPPKKKRLRLAEMAQSSGESSFESSVPLSRSPSQESNVSLSGSSRSASFERDDHGKAEAPSPSSDMRPKPLGTHMLTVPSHHPHAREMRRSASEQSPNVSHSAHMTETRSKSFDYGSLSLTGPSAPAPVAPPARVAPPERRKCFLVRQASLSRPPESELEVAPKGRQESEEPQPSSSKPSAKSSLSQISSAATSHGGPPGGKGPGQDRPPLGPTVPYTEALQVFHHPVAQTPLHEKPYLPPPVSLFSFQHLVQHEPGQSPEFFSTQAMSSLLSSPYSMPPLPPSLFQAPPLPLQPTVLHPGQLHLPQLMPHPANIPFRQPPSFLPMPYPTSSALSSGFFLPLQSQFALQLPGDVESHLPQIKTSLAPLATGSAGLSPSTEYSSDIRLPPVAPPASSSAPTSAPPLALPACPDTMVSLVVPVRVQTNMPSYGSAMYTTLSQILVTQSQGSSATVALPKFEEPPSKGTTVCGADVHEVGPGPSGLSEEQSRAFPTPYLRVPVTLPERKGTSLSSESILSLEGSSSTAGGSKRVLSPAGSLELTMETQQQKRVKEEEASKADEKLELVKPCSVVLTSTEDGKRPEKSHLGNQGQGRRELEMLSSLSSDPSDTKEIPPLPHPALSHGTAPGSEALKEYPQPSGKPHRRGLTPLSVKKEDSKEQPDLPSLAPPSSLPLSETSSRPAKSQEGTDSKKVLQFPSLHTTTNVSWCYLNYIKPNHIQHADRRSSVYAGWCISLYNPNLPGVSTKAALSLLRSKQKVSKETYTMATAPHPEAGRLVPSSSRKPRMTEVHLPSLVSPEGQKDLARVEKEEERRGEPEEDAPASQRGEPARIKIFEGGYKSNEEYVYVRGRGRGKYVCEECGIRCKKPSMLKKHIRTHTDVRPYVCKHCHFAFKTKGNLTKHMKSKAHSKKCQETGVLEELEAEEGTSDDLFQDSEGREGSEAVEEHQFSDLEDSDSDSDLDEDEDEDEEESQDELSRPSSEAPPPGPPHALRADSSPILGPQPPDAPASGTEATRGSSVSEAERLTASSCSMSSQSMPGLPWLGPAPLGSVEKDTGSALSYKPVSPRRPWSPSKEAGSRPPLARKHSLTKNDSSPQRCSPAREPQASAPSPPGLHVDPGRGMGALPCGSPRLQLSPLTLCPLGRELAPRAHVLSKLEGTTDPGLPRYSPTRRWSPGQAESPPRSAPPGKWALAGPGSPSAGEHGPGLGLDPRVLFPPAPLPHKLLSRSPETCASPWQKAESRSPSCSPGPAHPLSSRPFSALHDFHGHILARTEENIFSHLPLHSQHLTRAPCPLIPIGGIQMVQARPGAHPTLLPGPTAAWVSGFSGGGSDLTGAREAQERGRWSPTESSSASVSPVAKVSKFTLSSELEGGDYPKERERTGGGPGRPPDWTPHGTGAPAEPTPTHSPCTPPDTLPRPPQGRRAAQSWSPRLESPRAPTNPEPSATPPLDRSSSVGCLAEASARFPARTRNLSGEPRTRQDSPKPSGSGEPRAHPHQPEDRVPPNA

SEQ ID NO: 5554 - protein, 2405 aa, Homo sapiens
MDPEQSVKGTKKAEGSPRKRLTKGEAIQTSVSSSVPYPGSGTAATQESPAQELLAPQPFPGPSSVLREGSQEKTGQQQKPPKRPPIEASVHISQLPQHPLTPAFMSPGKPEHLLEGSTWQLVDPMRPGPSGSFVAPGLHPQSQLLPSHASIIPPEDLPGVPKVFVPRPSQVSLKPTEEAHKKERKPQKPGKYICQYCSRPCAKPSVLQKHIRSHTGERPYPCGPCGFSFKTKSNLYKHRKSHAHRIKAGLASGMGGEMYPHGLEMERIPGEEFEEPTEGESTDSEEETSATSGHPAELSPRPKQPLLSSGLYSSGSHSSSHERCSLSQSSTAQSLEDPPPFVEPSSEHPLSHKPEDTHTIKQKLALRLSERKKVIDEQAFLSPGSKGSTESGYFSRSESAEQQVSPPNTNAKSYAEIIFGKCGRIGQRTAMLTATSTQPLLPLSTEDKPSLVPLSVPRTQVIEHITKLITINEAVVDTSEIDSVKPRRSSLSRRSSMESPKSSLYREPLSSHSEKTKPEQSLLSLQHPPSTAPPVPLLRSHSMPSAACTISTPHHPFRGSYSFDDHITDSEALSHSSHVFTSHPRMLKRQPAIELPLGGEYSSEEPGPSSKDTASKPSDEVEPKESELTKKTKKGLKTKGVIYECNICGARYKKRDNYEAHKKYYCSELQIAKPISAGTHTSPEAEKSQIEHEPWSQMMHYKLGTTLELTPLRKRRKEKSLGDEEEPPAFESTKSQFGSPGPSDAARNLPLESTKSPAEPSKSVPSLEGPTGFQPRTPKPGSGSESGKERRTTSKEISVIQHTSSFEKSDSLEQPSGLEGEDKPLAQFPSPPPAPHGRSAHSLQPKLVRQPNIQVPEILVTEEPDRPDTEPEPPPKEPEKTEEFQWPQRSQTLAQLPAEKLPPKKKRLRLAEMAQSSGESSFESSVPLSRSPSQESNVSLSGSSRSASFERDDHGKAEAPSPSSDMRPKPLGTHMLTVPSHHPHAREMRRSASEQSPNVSHSAHMTETRSKSFDYGSLSLTGPSAPAPVAPPARVAPPERRKCFLVRQASLSRPPESELEVAPKGRQESEEPQPSSSKPSAKSSLSQISSAATSHGGPPGGKGPGQDRPPLGPTVPYTEALQVFHHPVAQTPLHEKPYLPPPVSLFSFQHLVQHEPGQSPEFFSTQAMSSLLSSPYSMPPLPPSLFQAPPLPLQPTVLHPGQLHLPQLMPHPANIPFRQPPSFLPMPYPTSSALSSGFFLPLQSQFALQLPGDVESHLPQIKTSLAPLATGSAGLSPSTEYSSDIRLPPVAPPASSSAPTSAPPLALPACPDTMVSLVVPVRVQTNMPSYGSAMYTTLSQILVTQSQGSSATVALPKFEEPPSKGTTVCGADVHEVGPGPSGLSEEQSRAFPTPYLRVPVTLPERKGTSLSSESILSLEGSSSTAGGSKRVLSPAGSLELTMETQQQKRVKEEEASKADEKLELVKPCSVVLTSTEDGKRPEKSHLGNQGQGRRELEMLSSLSSDPSDTKEIPPLPHPALSHGTAPGSEALKEYPQPSGKPHRRGLTPLSVKKEDSKEQPDLPSLAPPSSLPLSETSSRPAKSQEGTDSKKVLQFPSLHTTTNVSWCYLNYIKPNHIQHADRRSSVYAGWCISLYNPNLPGVSTKAALSLLRSKQKVSKETYTMATAPHPEAGRLVPSSSRKPRMTEVHLPSLVSPEGQKDLARVEKEEERRGEPEEDAPASQRGEPARIKIFEGGYKSNEEYVYVRGRGRGKYVCEECGIRCKKPSMLKKHIRTHTDVRPYVCKHCHFAFKTKGNLTKHMKSKAHSKKCQETGVLEELEAEEGTSDDLFQDSEGREGSEAVEEHQFSDLEDSDSDSDLDEDEDEDEEESQDELSRPSSEAPPPGPPHALRADSSPILGPQPPDAPASGTEATRGSSVSEAERLTASSCSMSSQSMPGLPWLGPAPLGSVEKDTGSALSYKPVSPRRPWSPSKEAGSRPPLARKHSLTKNDSSPQRCSPAREPQASAPSPPGLHVDPGRGMGALPCGSPRLQLSPLTLCPLGRELAPRAHVLSKLEGTTDPGLPRYSPTRRWSPGQAESPPRSAPPGKWALAGPGSPSAGEHGPGLGLDPRVLFPPAPLPHKLLSRSPETCASPWKAESRSPSCSPGPAHPLSSRPFSALHDFHGHILARTEENIFSHLPLHSQHLTRAPCPLIPIGGIQMVQARPGAHPTLLPGPTAAWVSGFSGGGSDLTGAREAQERGRWSPTESSSASVSPVAKVSKFTLSSELEGGDYPKERERTGGGPGRPPDWTPHGTGAPAEPTPTHSPCTPPDTLPRPPQGRRAAQSWSPRLESPRAPTNPEPSATPPLDRSSSVGCLAEASARFPARTRNLSGEPRTRQDSPKPSGSGEPRAHPHQPEDRVPPNA

SEQ ID NO: 5555 - protein, 591 aa, Homo sapiens
MKYILVTGGVISGIGKGIIASSVGTILKSCGLHVTSIKIDPYINIDAGTFSPYEHGEVFVLDDGGEVDLDLGNYERFLDIRLTKDNNLTTGKIYQYVINKERKGDYLGKTVQVVPHITDAIQEWVMRQALIPVDEDGLEPQVCVIELGGTVGDIESMPFIEAFRQFQFKVKRENFCNIHVSLVPQPSSTGEQKTKPTQNSVRELRGLGLSPDLVVCRCSNPLDTSVKEKISMFCHVEPEQVICVHDVSSIYRVPLLLEEQGVVDYFLRRLDLPIERQPRKMLMKWKEMADRYDRLLETCSIALVGKYTKFSDSYASVIKALEHSALAINHKLEIKYIDSADLEPITSQEEPVRYHEAWQKLCSAHGVLVPGGFGVRGTEGKIQAIAWARNQKKPFLGVCLGMQLAVVEFSRNVLGWQDANSTEFDPTTSHPVVVDMPEHNPGQMGGTMRLGKRRTLFQTKNSVMRKLYGDADYLEERHRHRFEVNPVWKKCLEEQGLKFVGQDVEGERMEIVELEDHPFFVGVQYHPEFLSRPIKPSPPYFGLLLASVGRLSHYLQKGCRLSPRDTYSDRSGSSSPDSEITELKFPSINHD

SEQ ID NO: 5556 - protein, 184 aa, Homo sapiens
MADHLMLAEGYRLVQRPPSAAAAHGPHALRTLPPYAGPGLDSGLRPRGAPLGPPPPRQPGALAYGAFGPPSSFQPFPAVPPPAAGIAHLQPVATPYPGRAAAPPNAPGGPPGPQPAPSAAAPPPPAHALGGMDAELIDEEALTSLELELGLHRVRELPELFLGQSEFDCFSDLGSAPPAGSVSC

SEQ ID NO: 5557 - protein, 536 aa, Homo sapiens
MATRAQPGPLSQAGSAGVAALATVGVASGPGPGRPGPLQDETLGVASVPSQWRAVQGIRWETKSCQTASIATASASAQARNHVDAQVQTEAPVPVSVQPPSQYDIPRLAAFLRRVEAMVIRELNKNWQSHAFDGFEVNWTEQQQMVSCLYTLGYPPAQAQGLHVTSISWNSTGSVVACAYGRLDHGDWSTLKSFVCAWNLDRRDLRPQQPSAVVEVPSAVLCLAFHPTQPSHVAGGLYSGEVLVWDLSRLEDPLLWRTGLTDDTHTDPVSQVVWLPEPGHSHRFQVLSVATDGKVLLWQGIGVGQLQLTEGFALVMQQLPRSTKLKKHPRGETEVGATAVAFSSFDPRLFILGTEGGFPLKCSLAAGEAALTRMPSSVPLRAPAQFTFSPHGGPIYSVSCSPFHRNLFLSAGTDGHVHLYSMLQAPPLTSLQLSLKYLFAVRWSPVRPLVFAAASGKGDVQLFDLQKSSQKPTVLIKQTQDESPVYCLEFNSQQTQLLAAGDAQGTVKVWQLSTEFTEQGPREAEDLDCLAAEVAA

SEQ ID NO: 5558 - protein, 191 aa, Homo sapiens
MGKTNSKLAPEVLEDLVQNTEFSEQELKQWYKGFLKDCPSGILNLEEFQQLYIKFFPYGDASKFAQHAFRTFDKNGDGTIDFREFICALSVTSRGSFEQKLNWAFEMYDLDGDGRITRLEMLEIIEAIYKMVGTVIMMRMNQDGLTPQQRVDKIFKKMDQDKDDQITLEEFKEAAKSDPSIVLLLQCDMQK

SEQ ID NO: 5559 - protein, 63 aa, Homo sapiens
MAAPLSVEVEFGSSPGCLFLWSSFAEVVRSSCLTVLRNIESLCLDRRNPGTSGTCSSGSRRIC

SEQ ID NO: 5560 - protein, 631 aa, Homo sapiens
MNAAASSYPMASLYVGDLHSDVTEAMLYEKFSPAGPVLSIRVCRDMITRRSLGYAYVNFQQPADAERALDTMNFDVIKGKPIRIMWSQRDPSLRKSGVGNVFIKNLDKSIDNKALYDTFSAFGNILSCKVVCDENGSKGYAFVHFETQEAADKAIEKMNGMLLNDRKVFVGRFKSRKEREAELGAKAKEFTNVYIKNFGEEVDDESLKELFSQFGKTLSVKVMRDPNGKSKGFGFVSYEKHEDANKAVEEMNGKEISGKIIFVGRAQKKVERQAELKRKFEQLKQERISRYQGVNLYIKNLDDTIDDEKLRKEFSPFGSITSAKVMLEDGRSKGFGFVCFSSPEEATKAVTEMNGRIVGSKPLYVALAQRKEERKAHLTNQYMQRVAGMRALPANAILNQFQPAAGGYFVPAVPQAQGRPPYYTPNQLAQMRPNPRWQQGGRPQGFQGMPSAIRQSGPRPTLRHLAPTGNAPASRGLPTTTQRVGVPTAVQNLAPRAAVAAAAPRAVAPYKYASSVRSPHPAIQPLQAPQPAVHVQGQEPLTASMLAAAPPQEQKQMLGERLFPLIQTMHSNLAGKITGMLLEIDNSELLHMLESPESLRSKVDEAVAVLQAHHAKKEAAQKVGAVAAATS

SEQ ID NO: 5561 - protein, 644 aa, Homo sapiens
MNAAASSYPMASLYVGDLHSDVTEAMLYEKFSPAGPVLSIRVCRDMITRRSLGYAYVNFQQPADAERALDTMNFDVIKGKPIRIMWSQRDPSLRKSGVGNVFIKNLDKSIDNKALYDTFSAFGNILSCKVVCDENGSKGYAFVHFETQEAADKAIEKMNGMLLNDRKVFVGRFKSRKEREAELGAKAKEFTNVYIKNFGEEVDDESLKELFSQFGKTLSVKVMRDPNGKSKGFGFVSYEKHEDANKAVEEMNGKEISGKIIFVGRAQKKVERQAELKRKFEQLKQERISRYQGVNLYIKNLDDTIDDEKLRKEFSPFGSITSAKVMLEDGRSKGFGFVCFSSPEEATKAVTEMNGRIVGSKPLYVALAQRKEERKAHLTNQYMQRVAGMRALPANAILNQFQPAAGGYFVPAVPQAQGRPPYYTPNQLAQMRPNPRWQQGGRPQGFQGMPSAIRQSGPRPTLRHLAPTGSECPDRLAMDFGGAGAAQQGLTDSCQSGGVPTAVQNLAPRAAVAAAAPRAVAPYKYASSVRSPHPAIQPLQAPQPAVHVQGQEPLTASMLAAAPPQEQKQMLGERLFPLIQTMHSNLAGKITGMLLEIDNSELLHMLESPESLRSKVDEAVAVLQAHHAKKEAAQKVGAVAAATS

SEQ ID NO: 5562 - protein, 660 aa, Homo sapiens
MNAAASSYPMASLYVGDLHSDVTEAMLYEKFSPAGPVLSIRVCRDMITRRSLGYAYVNFQQPADAERALDTMNFDVIKGKPIRIMWSQRDPSLRKSGVGNVFIKNLDKSIDNKALYDTFSAFGNILSCKVVCDENGSKGYAFVHFETQEAADKAIEKMNGMLLNDRKVFVGRFKSRKEREAELGAKAKEFTNVYIKNFGEEVDDESLKELFSQFGKTLSVKVMRDPNGKSKGFGFVSYEKHEDANKAVEEMNGKEISGKIIFVGRAQKKVERQAELKRKFEQLKQERISRYQGVNLYIKNLDDTIDDEKLRKEFSPFGSITSAKVMLEDGRSKGFGFVCFSSPEEATKAVTEMNGRIVGSKPLYVALAQRKEERKAHLTNQYMQRVAGMRALPANAILNQFQPAAGGYFVPAVPQAQGRPPYYTPNQLAQMRPNPRWQQGGRPQGFQGMPSAIRQSGPRPTLRHLAPTGNAPASRGLPTTTQRVGSECPDRLAMDFGGAGAAQQGLTDSCQSGGVPTAVQNLAPRAAVAAAAPRAVAPYKYASSVRSPHPAIQPLQAPQPAVHVQGQEPLTASMLAAAPPQEQKQMLGERLFPLIQTMHSNLAGKITGMLLEIDNSELLHMLESPESLRSKVDEAVAVLQAHHAKKEAAQKVGAVAAATS

SEQ ID NO: 5563 - protein, 615 aa, Homo sapiens
MNAAASSYPMASLYVGDLHSDVTEAMLYEKFSPAGPVLSIRVCRDMITRRSLGYAYVNFQQPADAERALDTMNFDVIKGKPIRIMWSQRDPSLRKSGVGNVFIKNLDKSIDNKALYDTFSAFGNILSCKVVCDENGSKGYAFVHFETQEAADKAIEKMNGMLLNDRKVFVGRFKSRKEREAELGAKAKEFTNVYIKNFGEEVDDESLKELFSQFGKTLSVKVMRDPNGKSKGFGFVSYEKHEDANKAVEEMNGKEISGKIIFVGRAQKKVERQAELKRKFEQLKQERISRYQGVNLYIKNLDDTIDDEKLRKEFSPFGSITSAKVMLEDGRSKGFGFVCFSSPEEATKAVTEMNGRIVGSKPLYVALAQRKEERKAHLTNQYMQRVAGMRALPANAILNQFQPAAGGYFVPAVPQAQGRPPYYTPNQLAQMRPNPRWQQGGRPQGFQGMPSAIRQSGPRPTLRHLAPTGVPTAVQNLAPRAAVAAAAPRAVAPYKYASSVRSPHPAIQPLQAPQPAVHVQGQEPLTASMLAAAPPQEQKQMLGERLFPLIQTMHSNLAGKITGMLLEIDNSELLHMLESPESLRSKVDEAVAVLQAHHAKKEAAQKVGAVAAATS

SEQ ID NO: 5564 - protein, 363 aa, Homo sapiens
MAQTPAFDKPKVELHVHLDGSIKPETILYYGRRRGIALPANTAEGLLNVIGMDKPLTLPDFLAKFDYYMPAIAGCREAIKRIAYEFVEMKAKEGVVYVEVRYSPHLLANSKVEPIPWNQAEGDLTPDEVVALVGQGLQEGERDFGVKARSILCCMRHQPNWSPKVVELCKKYQQQTVVAIDLAGDETIPGSSLLPGHVQAYQEAVKSGIHRTVHAGEVGSAEVVKEAVDILKTERLGHGYHTLEDQALYNRLRQENMHFEICPWSSYLTGAWKPDTEHAVIRLKNDQANYSLNTDDPLIFKSTLDTDYQMTKRDMGFTEEEFKRLNINAAKSSFLPEDEKRELLDLLYKAYGMPPSASAGQNL

SEQ ID NO: 5565 - protein, 346 aa, Homo sapiens
MESVSCSAAAVRTGDMESQRDLSLVPERLQRREQERQLEVERRKQKRQNQEVEKENSHFFVATFVRERAAVEELLERAESVERLEEAASRLQGLQKLINDSVFFLAAYDLRQGQEALARLQAALAERRRGLQPKKRFAFKTRGKDAASSTKVDAAPGIPPAVESIQDSPLPKKAEGDLGPSWVCGFSNLESQVLEKRASELHQRDVLLTELSNCTVRLYGNPNTLRLTKAHSCKLLCGPVSTSVFLEDCSDCVLAVACQQLRIHSTKDTRIFLQVTSRAIVEDCSGIQFAPYTWSYPEIDKDFESSGLDRSKNNWNDVDDFNWLARDMASPNWSILPEEERNIQWD

SEQ ID NO: 5566 - protein, 483 aa, Homo sapiens
MAAVILESIFLKRSQQKKKTSPLNFKKRLFLLTVHKLSYYEYDFERGRRGSKKGSIDVEKITCVETVVPEKNPPPERQIPRRGEESSEMEQISIIERFPYPFQVVYDEGPLYVFSPTEELRKRWIHQLKNVIRYNSDLVQKYHPCFWIDGQYLCCSQTAKNAMGCQILENRNGSLKPGSSHRKTKKPLPPTPEEDQILKKPLPPEPAAAPVSTSELKKVVALYDYMPMNANDLQLRKGDEYFILEESNLPWWRARDKNGQEGYIPSNYVTEAEDSIEMYEWYSKHMTRSQAEQLLKQEGKEGGFIVRDSSKAGKYTVSVFAKSTGDPQGVIRHYVVCSTPQSQYYLAARNCLVNDQGVVKVSDFGLSRYVLDDEYTSSVGSKFPVRWSPPEVLMYSKFSSKSDIWAFGVLMWEIYSLGKMPYERFTNSETAEHIAQGLRLYRPHLASEKVYTIMYSCWHEKADERPTFKILLSNILDVMDEES

SEQ ID NO: 5567 - protein, 97 aa, Homo sapiens
MDSSSSSSAAGLGAVDPQLQHFIEVETQKQRFQQLVHQMTELCWEKCMDKPGPKLDSRAEACFVNCVERFIDTSQFILNRLEQTQKSKPVFSESLSD

SEQ ID NO: 5568 - protein, 7388 aa, Homo sapiens
MSSSDEETLSERSCRSERSCRSERSYRSERSGSLSPCPPGDTLPWNLPLHEQKKRKSQDSVLDPAERAVVRVADERDRVQKKTFTKWVNKHLMKVRKHINDLYEDLRDGHNLISLLEVLSGIKLPREKGRMRFHRLQNVQIALDFLKQRQVKLVNIRNDDITDGNPKLTLGLIWTIILHFQISDIYISGESGDMSAKEKLLLWTQKVTAGYTGIKCTNFSSCWSDGKMFNALIHRYRPDLVDMERVQIQSNRENLEQAFEVAERLGVTRLLDAEDVDVPSPDEKSVITYVSSIYDAFPKVPEGGEGISATEVDSRWQEYQSRVDSLIPWIKQHTILMSDKTFPQNPVELKALYNQYIHFKETEILAKEREKGRIEELYKLLEVWIEFGRIKLPQGYHPNDVEEEWGKLIIEMLEREKSLRPAVERLELLLQIANKIQNGALNCEEKLTLAKNTLQADAAHLESGQPVQCESDVIMYIQECEGLIRQLQVDLQILRDENYYQLEELAFRVMRLQDELVTLRLECTNLYRKGHFTSLELVPPSTLTTTHLKAEPLTKATHSSSTSWFRKPMTRAELVAISSSEDEGNLRFVYELLSWVEEMQMKLERAEWGNDLPSVELQLETQQHIHTSVEELGSSVKEARLYEGKMSQNFHTSYAETLGKLETQYCKLKETSSFRMRHLQSLHKFVSRATAELIWLNEKEEEELAYDWSDNNSNISAKRNYFSELTMELEEKQDVFRSLQDTAELLSLENHPAKQTVEAYSAAVQSQLQWMKQLCLCVEQHVKENTAYFQFFSDARELESFLRNLQDSIKRKYSCDHNTSLSRLEDLLQDSMDEKEQLIQSKSSVASLVGRSKTIVQLKPRSPDHVLKNTISVKAVCDYRQIEITICKNDECVLEDNSQRTKWKVISPTGNEAMVPSVCFLIPPPNKDAIEMASRVEQSYQKVMALWHQLHVNTKSLISWNYLRKDLDLVQTWNLEKLRSSAPGECHQIMKNLQAHYEDFLQDSRDSVLFSVADRLRLEEEVEACKARFQHLMKSMENEDKEETVAKMYISELKNIRLRLEEYEQRVVKRIQSLASSRTDRDAWQDNALRIAEQEHTQEDLQQLRSDLDAVSMKCDSFLHQSPSSSSVPTLRSELNLLVEKMDHVYGLSTVYLNKLKTVDVIVRSIQDAELLVKGYEIKLSQEEVVLADLSALEAHWSTLRHWLSDVKDKNSVFSVLDEEIAKAKVVAEQMSRLTPERNLDLERYQEKGSQLQERWHRVIAQLEIRQSELESIQEVLGDYRACHGTLIKWIEETTAQQEMMKPGQAEDSRVLSEQLSQQTALFAEIERNQTKLDQCQKFSQQYSTIVKDYELQLMTYKAFVESQQKSPGKRRRMLSSSDAITQEFMDLRTRYTALVTLTTQHVKYISDALRRLEEEEKVVEEEKQEHVEKVKELLGWVSTLARNTQGKATSSETKESTDIEKAILEQQVLSEELTTKKEQVSEAIKTSQIFLAKHGHKLSEKEKKQISEQLNALNKAYHDLCDGSANQLQQLQSQLAHQTEQKECRAVAGVIDLGTVEIFPIFKAMQKGLLDQDTGLVLLESQVIMSGLIAPETGENLSLEEGIARNLINPQMYQQLRELQDALALISRLTESRGPLSVVEAIEKRIISETVGLKILEAHLATGGFSLSPSENCINLEEAFHQGLISAWLHSVLESYLRTSKNLIDPNTAEKIGLLDLMQRCIVHQESGFKLLPVKQLAGGMVSLKSGRKVSIFRAVQEGLIDRQVTVRLLEAQLFAGGIVDPRTGHRLTVEEAVRHNLIDQDMACAILIRQLQTGGIIDTVTGQRLTIDEAVSNDLVAAKIALVILESLWSFMGLLWPESGEILPITDALEQGIVSTELAHKILSNRQHIKALFLPATTEILSWKKAIESGILDRDLANNLKSICIPDVMPHMQLADSAEQNINPGAAVLPCSKSHPKATASQSENLLFQLMTHSYINVQNGQRLLLLDKELMETLTSRDEYQTSPPKVVEIGHQRQKTPEGLQESANVKISGTFSSGWTVRLPEFQFSSQNKEYPDREDCTTEKGKKTTVETEDSSVENPEQDLFVEQKERNPNIDALKVINKVKLEVQRQLIGTQREDQTAVSVRENASRGHLLTIPPAEAEGVPLVVDKDVFSVETPKKEHQPLRNTSFTCQNEQAHTLETEYIHDETGGSHIKPQSKKLQVQVKKTLGIKLELKSETDGNVHPLDKKEMLKKTFLAKDDHKESQEAQNIAGGSMMMSEKTDEEDSGREIFLSCSHPLELLEEATLNVLSAQLLDGGIFHEQTGQKLLLNEAISRGIVPSHTAVKLMEKLNMFQGFFDSQTCESLTTEEVINEGLMDEKLLHNVLMADKAISGVLDPRTQTLCSVKDAVTVGLLDKETATRILERQVVTGGIIDLKRGKKVSVTLASTLGLVDVADQPELINLEKASKGRDAEKTVRERLISLQMETTGLIDPDSKAPLTVVQSIDRGLLEREEAVRLLTKQVVDGGIIHHISGMRLSVDNAFRHGLIGEDLAEKLKRVENLNIHQIFNPETKENISLPKAIKLDLITSDLKREIQEVQAFTGNFVDLISGQRLTLAEAKKEGLLTNEAVLSPGMMHGIVDPENCRIVPYSELVKKCKIDIESGQRYLEVIPFSDIKDGVSDKVLTLSQAIQLGKVDFASTLKVLEAQANTGGIIDTATGKRLTLASALEEKLVDENMVRIIASHQVLNGGIVDIFSDQRVTLVEAIEKRLISPELANMIQIDSSEFSDHRAQIEKQEGIEVCALQNEFLGKDMLIACNQTAEMSCNKVEESERLFQVENQSAQEKVKVRVSDGEQAKKSREISLKEFGCKDQRKPRMSSDAKEFISIINPHNLKGKSLGQVSLTHPYSECDFKLKEVARNNMGNDTNEEQEKAVTKIEIISHMKQSTSCLDSEEIRENQGEVILEVQETYCETSGKLPSEQVLQQPMNARVKSKREKREVIVEESIRTCKPAFLSEEKLYQETAIRDEHDSHIKSQPREMTSSEKGKEADTEMGFSITFKIEESSSQVVPQGISVKHLDALTLFSSKQANEGKVNNLSLCLTLKPEENLSREIACGAQSEPFPCMTPRPEGLHYQESDGKAQVTGPSQISKTDKSFQGTTRQETNYQDSWVTSKTKETKHQISSSNECKEKSYQEVSFDPARGLKLEEITVSRPDSKEVRYLEFSDRKDLHHQGSKSDDKLCGTLKSEIATQELTGEKFLEMANPNVAGLEAGSIEDIVTQRGSRVLGSFLPEKLFKGVSQKENTGQQNAIISPTVLETSEEKTVSLTVCSAVKTEKTPQEKLRESPGSEQTPFMTAPEGKGNGGVNPEPFRATQNVFTRQLCLEHDEKLVSYLSLLRNIEMRTKQIQPLELNLAELQDLLCQAKVLERELKDLTTLVSQELECVNQIIISQPQEVPAQLLKALEKDAKNLQKSLSSVSDTWNSRLLHFQNAVEIEKTKVLNQHTQLEGRLQDLRAWVGNKNLILNSKGSNSEIDVDSLNLCLQQYEDLKQPMAERKAQLDALAFDIQFFISEHAQDLSPQQNRQMLRLLNELQRSFQDILEQTAAQVDALQGHLQQMEQEALVKTLQKQQNTCHQQLEDLCSWVGQAERALAGHQGRTTQQDLSALQKNQSDLKDLQDDIQNRATSFATVVKDIEGFMEENQTKLSPRELTALREKLHQAKEQYEALQEETRVAQKELEEAVTSALQQETEKSKAAKELAENKKKIDALLDWVTSVGSSGGQLLTNLPGMEQLSGASLEKGALDTTDGYMGVNQAPEKLDKQCEMMKARHQELLSQQQNFILATQSAQAFLDQHGHNLTPEEQQMLQQKLGELKEQYSTSLAQSEAELKQVQTLQDELQKFLQDHKEFESWLERSEKELENMHKGGSSPETLPSLLKRQGSFSEDVISHKGDLRFVTISGQKVLDMENSFKEGKEPSEIGNLVKDKLKDATERYTALHSKCTRLGSHLNMLLGQYHQFQNSADSLQAWMQACEANVEKLLSDTVASDPGVLQEQLATTKQLQEELAEHQVPVEKLQKVARDIMEIEGEPAPDHRHVQETTDSILSHFQSLSYSLAERSSLLQKAIAQSQSVQESLESLLQSIGEVEQNLEGKQVSSLSSGVIQEALATNMKLKQDIARQKSSLEATREMVTRFMETADSTTAAVLQGKLAEVSQRFEQLCLQQQEKESSLKKLLPQAEMFEHLSGKLQQFMENKSRMLASGNQPDQDITHFFQQIQELNLEMEDQQENLDTLEHLVTELSSCGFALDLCQHQDRVQNLRKDFTELQKTVKEREKDASSCQEQLDEFRKLVRTFQKWLKETEGSIPPTETSMSAKELEKQIEHLKSLLDDWASKGTLVEEINCKGTSLENLIMEITAPDSQGKTGSILPSVGSSVGSVNGYHTCKDLTEIQCDMSDVNLKYEKLGGVLHERQESLQAILNRMEEVHKEANSVLQWLESKEEVLKSMDAMSSPTKTETVKAQAESNKAFLAELEQNSPKIQKVKEALAGLLVTYPNSQEAENWKKIQEELNSRWERATEVTVARQRQLEESASHLACFQAAESQLRPWLMEKELMMGVLGPLSIDPNMLNAQKQQVQFMLKEFEARRQQHEQLNEAAQGILTGPGDVSLSTSQVQKELQSINQKWVELTDKLNSRSSQIDQAIVKSTQYQELLQDLSEKVRAVGQRLSVQSAISTQPEAVKQQLEETSEIRSDLEQLDHEVKEAQTLCDELSVLIGEQYLKDELKKRLETVALPLQGLEDLAADRINRLQAALASTQQFQQMFDELRTWLDDKQSQQAKNCPISAKLERLQSQLQENEEFQKSLNQHSGSYEVIVAEGESLLLSVPPGEEKRTLQNQLVELKNHWEELSKKTADRQSRLKDCMQKAQKYQWHVEDLVPWIEDCKAKMSELRVTLDPVQLESSLLRSKAMLNEVEKRRSLLEILNSAADILINSSEADEDGIRDEKAGINQNMDAVTEELQAKTGSLEEMTQRLREFQESFKNIEKKVEGAKHQLEIFDALGSQACSNKNLEKLRAQQEVLQALEPQVDYLRNFTQGLVEDAPDGSDASQLLHQAEVAQQEFLEVKQRVNSGCVMMENKLEGIGQFHCRVREMFSQLADLDDELDGMGAIGRDTDSLQSQIEDVRLFLNKIHVLKLDIEASEAECRHMLEEEGTLDLLGLKRELEALNKQCGKLTERGKARQEQLELTLGRVEDFYRKLKGLNDATTAAEEAEALQWVVGTEVEIINQQLADFKMFQKEQVDPLQMKLQQVNGLGQGLIQSAGKDCDVQGLEHDMEEINARWNTLNKKVAQRIAQLQEALLHCGKFQDALEPLLSWLADTEELIANQKPPSAEYKVVKAQIQEQKLLQRLLDDRKATVDMLQAEGGRIAQSAELADREKITGQLESLESRWTELLSKAAARQKQLEDILVLAKQFHETAEPISDFLSVTEKKLANSEPVGTQTAKIQQQIIRHKALNEEIVNRKKNVDQAIKNGQALLKQTTGEEVLLIQEKLDGIKTRYADITVTSSKALRTLEQARQLATKFQSTYEELTGWLREVEEELATSGGQSPTGEQIPQFQQRQKELKKEVMEHRLVLDTVNEVSRALLELVPWRAREGLDKLVSDANEQYKLVSDTIGQRVDEIDAAIQRSQQYEQAADAELAWVAETKRKLMALGPIRLEQDQTTAQLQVQKAFSIDIIRHKDSMDELFSHRSEIFGTCGEEQKTVLQEKTESLIQQYEAISLLNSERYARLERAQVLVNQFWETYEELSPWIEETRALIAQLPSPAIDHEQLRQQQEEMRQLRESIAEHKPHIDKLLKIGPQLKELNPEEGEMVEEKYQKAENMYAQIKEEVRQRALALDEAVSQSTQITEFHDKIEPMLETLENLSSRLRMPPLIPAEVDKIRECISDNKSATVELEKLQPSFEALKRRGEELIGRSQGADKDLAAKEIQDKLDQMVFFWEDIKARAEEREIKFLDVLELAEKFWYDMAALLTTIKDTQDIVHDLESPGIDPSIIKQQVEAAETIKEETDGLHEELEFIRILGADLIFACGETEKPEVRKSIDEMNNAWENLNKTWKERLEKLEDAMQAAVQYQDTLQAMFDWLDNTVIKLCTMPPVGTDLNTVKDQLNEMKEFKVEVYQQQIEMEKLNHQGELMLKKATDETDRDIIREPLTELKHLWENLGEKIAHRQHKLEGALLALGQFQHALEELMSWLTHTEELLDAQRPISGDPKVIEVELAKHHVLKNDVLAHQATVETVNKAGNELLESSAGDDASSLRSRLEAMNQCWESVLQKTEEREQQLQSTLQQAQGFHSEIEDFLLELTRMESQLSASKPTGGLPETAREQLDTHMELYSQLKAKEETYNQLLDKGRLMLLSRDDSGSGSKTEQSVALLEQKWHVVSSKMEERKSKLEEALNLATEFQNSLQEFINWLTLAEQSLNIASPPSLILNTVLSQIEEHKVFANEVNAHRDQIIELDQTGNQLKFLSQKQDVVLIKNLLVSVQSRWEKVVQRSIERGRSLDDARKRAKQFHEAWKKLIDWLEDAESHLDSELEISNDPDKIKLQLSKHKEFQKTLGGKQPVYDTTIRTGRALKEKTLLPEDSQKLDNFLGEVRDKWDTVCGKSVERQHKLEEALLFSGQFMDALQALVDWLYKVEPQLAEDQPVHGDLDLVMNLMDAHKVFQKELGKRTGTVQVLKRSGRELIENSRDDTTWVKGQLQELSTRWDTVCKLSVSKQSRLEQALKQAEVFRDTVHMLLEWLSEAEQTLRFRGALPDDTEALQSLIDTHKEFMKKVEEKRVDVNSAVAMGEVILAVCHPDCITTIKHWITIIRARFEEVLTWAKQHQQRLETALSELVANAELLEELLAWIQWAETTLIQRDQEPIPQNIDRVKALIAEHQTFMEEMTRKQPDVDRVTKTYKRKNIEPTHAPFIEKSRSGGRKSLSQPTPPPMPILSQSEAKNPRINQLSARWQQVWLLALERQRKLNDALDRLEELKEFANFDFDVWRKKYMRWMNHKKSRVMDFFRRIDKDQDGKITRQEFIDGILASKFPTTKLEMTAVADIFDRDGDGYIDYYEFVAALHPNKDAYRPTTDADKIEDEVTRQVAQCKCAKRFQVEQIGENKYRFGDSQQLRLVRILRSTVMVRVGGGWMALDEFLVKNDPCRARGRTNIELREKFILPEGASQGMTPFRSRGRRSKPSSRAASPTRSSSSASQSNHSCTSMPSSPATPASGTKVIPSSGSKLKRPTPTFHSSRTSLAGDTSNSSSPASTGAKTNRADPKKSASRPGSRAGSRAGSRASSRRGSDASDFDLLETQSACSDTSESSAAGGQGNSRRGLNKPSKIPTMSKKTTTASPRTPGPKR

SEQ ID NO: 5569 - protein, 4433 aa, Homo sapiens
KNTISVKAVCDYRQIEITICKNDECVLEDNSQRTKWKVISPTGNEAMVPSVCFLIPPPNKDAIEMASRVEQSYQKVMALWHQLHVNTKSLISWNYLRKDLDLVQTWNLEKLRSSAPGECHQIMKNLQAHYEDFLQDSRDSVLFSVADRLRLEEEVEACKARFQHLMKSMENEDKEETVAKMYISELKNIRLRLEEYEQRVVKRIQSLASSRTDRDAWQDNALRIAEQEHTQEDLQQLRSDLDAVSMKCDSFLHQSPSSSSVPTLRSELNLLVEKMDHVYGLSTVYLNKLKTVDVIVRSIQDAELLVKGYEIKLSQEEVVLADLSALEAHWSTLRHWLSDVKDKNSVFSVLDEEIAKAKVVAEQMSRLTPERNLDLERYQEKGSQLQERWHRVIAQLEIRQSELESIQEVLGDYRACHGTLIKWIEETTAQQEMMKPGQAEDSRVLSEQLSQQTALFAEIERNQTKLDQCQKFSQQYSTIVKDYELQLMTYKAFVESQQKSPGKRRRMLSSSDAITQEFMDLRTRYTALVTLTTQHVKYISDALRRLEEEEKVVEEEKQEHVEKVKELLGWVSTLARNTQGKATSSETKESTDIEKAILEQQVLSEELTTKKEQVSEAIKTSQIFLAKHGHKLSEKEKKQISEQLNALNKAYHDLCDGSANQLQQLQSQLAHQTEQKTLQKQQNTCHQQLEDLCSWVGQAERALAGHQGRTTQQDLSALQKNQSDLKDLQDDIQNRATSFATVVKDIEGFMEENQTKLSPRELTALREKLHQAKEQYEALQEETRVAQKELEEAVTSALQQETEKSKAAKELAENKKKIDALLDWVTSVGSSGGQLLTNLPGMEQLSGASLEKGALDTTDGYMGVNQAPEKLDKQCEMMKARHQELLSQQQNFILATQSAQAFLDQHGHNLTPEEQQMLQQKLGELKEQYSTSLAQSEAELKQVQTLQDELQKFLQDHKEFESWLERSEKELENMHKGGSSPETLPSLLKRQGSFSEDVISHKGDLRFVTISGQKVLDMENSFKEGKEPSEIGNLVKDKLKDATERYTALHSKCTRLGSHLNMLLGQYHQFQNSADSLQAWMQACEANVEKLLSDTVASDPGVLQEQLATTKQLQEELAEHQVPVEKLQKVARDIMEIEGEPAPDHRHVQETTDSILSHFQSLSYSLAERSSLLQKAIAQSQSVQESLESLLQSIGEVEQNLEGKQVSSLSSGVIQEALATNMKLKQDIARQKSSLEATREMVTRFMETADSTTAAVLQGKLAEVSQRFEQLCLQQQEKESSLKKLLPQAEMFEHLSGKLQQFMENKSRMLASGNQPDQDITHFFQQIQELNLEMEDQQENLDTLEHLVTELSSCGFALDLCQHQDRVQNLRKDFTELQKTVKEREKDASSCQEQLDEFRKLVRTFQKWLKETEGSIPPTETSMSAKELEKQIEHLKSLLDDWASKGTLVEEINCKGTSLENLIMEITAPDSQGKTDLTEIQCDMSDVNLKYEKLGGVLHERQESLQAILNRMEEVHKEANSVLQWLESKEEVLKSMDAMSSPTKTETVKAQAESNKAFLAELEQNSPKIQKVKEALAGLLVTYPNSQEAENWKKIQEELNSRWERATEVTVARQRQLEESASHLACFQAAESQLRPWLMEKELMMGVLGPLSIDPNMLNAQKQQVQFMLKEFEARRQQHEQLNEAAQGILTGPGDVSLSTSQVQKELQSINQKWVELTDKLNSRSSQIDQAIVKSTQYQELLQDLSEKVRAVGQRLSVQSAISTQPEAVKQQLEETSEIRSDLEQLDHEVKEAQTLCDELSVLIGEQYLKDELKKRLETVALPLQGLEDLAADRINRLQAALASTQQFQQMFDELRTWLDDKQSQQAKNCPISAKLERLQSQLQENEEFQKSLNQHSGSYEVIVAEGESLLLSVPPGEEKRTLQNQLVELKNHWEELSKKTADRQSRLKDCMQKAQKYQWHVEDLVPWIEDCKAKMSELRVTLDPVQLESSLLRSKAMLNEVEKRRSLLEILNSAADILINSSEADEDGIRDEKAGINQNMDAVTEELQAKTGSLEEMTQRLREFQESFKNIEKKVEGAKHQLEIFDALGSQACSNKNLEKLRAQQEVLQALEPQVDYLRNFTQGLVEDAPDGSDASQLLHQAEVAQQEFLEVKQRVNSGCVMMENKLEGIGQFHCRVREMFSQLADLDDELDGMGAIGRDTDSLQSQIEDVRLFLNKIHVLKLDIEASEAECRHMLEEEGTLDLLGLKRELEALNKQCGKLTERGKARQEQLELTLGRVEDFYRKLKGLNDATTAAEEAEALQWVVGTEVEIINQQLADFKMFQKEQVDPLQMKLQQVNGLGQGLIQSAGKDCDVQGLEHDMEEINARWNTLNKKVAQRIAQLQEALLHCGKFQDALEPLLSWLADTEELIANQKPPSAEYKVVKAQIQEQKLLQRLLDDRKATVDMLQAEGGRIAQSAELADREKITGQLESLESRWTELLSKAAARQKQLEDILVLAKQFHETAEPISDFLSVTEKKLANSEPVGTQTAKIQQQIIRHKALNEEIVNRKKNVDQAIKNGQALLKQTTGEEVLLIQEKLDGIKTRYADITVTSSKALRTLEQARQLATKFQSTYEELTGWLREVEEELATSGGQSPTGEQIPQFQQRQKELKKEVMEHRLVLDTVNEVSRALLELVPWRAREGLDKLVSDANEQYKLVSDTIGQRVDEIDAAIQRSQQYEQAADAELAWVAETKRKLMALGPIRLEQDQTTAQLQVQKAFSIDIIRHKDSMDELFSHRSEIFGTCGEEQKTVLQEKTESLIQQYEAISLLNSERYARLERAQVLVNQFWETYEELSPWIEETRALIAQLPSPAIDHEQLRQQQEEMRQLRESIAEHKPHIDKLLKIGPQLKELNPEEGEMVEEKYQKAENMYAQIKEEVRQRALALDEAVSQSTQITEFHDKIEPMLETLENLSSRLRMPPLIPAEVDKIRECISDNKSATVELEKLQPSFEALKRRGEELIGRSQGADKDLAAKEIQDKLDQMVFFWEDIKARAEEREIKFLDVLELAEKFWYDMAALLTTIKDTQDIVHDLESPGIDPSIIKQQVEAAETIKEETDGLHEELEFIRILGADLIFACGETEKPEVRKSIDEMNNAWENLNKTWKERLEKLEDAMQAAVQYQDTLQAMFDWLDNTVIKLCTMPPVGTDLNTVKDQLNEMKEFKVEVYQQQIEMEKLNHQGELMLKKATDETDRDIIREPLTELKHLWENLGEKIAHRQHKLEGALLALGQFQHALEELMSWLTHTEELLDAQRPISGDPKVIEVELAKHHVLKNDVLAHQATVETVNKAGNELLESSAGDDASSLRSRLEAMNQCWESVLQKTEEREQQLQSTLQQAQGFHSEIEDFLLELTRMESQLSASKPTGGLPETAREQLDTHMELYSQLKAKEETYNQLLDKGRLMLLSRDDSGSGSKTEQSVALLEQKWHVVSSKMEERKSKLEEALNLATEFQNSLQEFINWLTLAEQSLNIASPPSLILNTVLSQIEEHKVFANEVNAHRDQIIELDQTGNQLKFLSQKQDVVLIKNLLVSVQSRWEKVVQRSIERGRSLDDARKRAKQFHEAWKKLIDWLEDAESHLDSELEISNDPDKIKLQLSKHKEFQKTLGGKQPVYDTTIRTGRALKEKTLLPEDSQKLDNFLGEVRDKWDTVCGKSVERQHKLEEALLFSGQFMDALQALVDWLYKVEPQLAEDQPVHGDLDLVMNLMDAHKVFQKELGKRTGTVQVLKRSGRELIENSRDDTTWVKGQLQELSTRWDTVCKLSVSKQSRLEQALKQAEVFRDTVHMLLEWLSEAEQTLRFRGALPDDTEALQSLIDTHKEFMKKVEEKRVDVNSAVAMGEVILAVCHPDCITTIKHWITIIRARFEEVLTWAKQHQQRLETALSELVANAELLEELLAWIQWAETTLIQRDQEPIPQNIDRVKALIAEHQTFMEEMTRKQPDVDRVTKTYKRKNIEPTHAPFIEKSRSGGRKSLSQPTPPPMPILSQSEAKNPRINQLSARWQQVWLLALERQRKLNDALDRLEELKEFANFDFDVWRKKYMRWMNHKKSRVMDFFRRIDKDQDGKITRQEFIDGILASKFPTTKLEMTAVADIFDRDGDGYIDYYEFVAALHPNKDAYRPTTDADKIEDEVTRQVAQCKCAKRFQVEQIGENKYRFGDSQQLRLVRILRSTVMVRVGGGWMALDEFLVKNDPCRARGRTNIELREKFILPEGASQGMTPFRSRGRRSKPSSRAASPTRSSSSASQSNHSCTSMPSSPATPASGTKVIPSSGSKLKRPTPTFHSSRTSLAGDTSNSSSPASTGAKTNRADPKKSASRPGSRAGSRAGSRASSRRGSDASDFDLLETQSACSDTSESSAAGGQGNSRRGLNKPSKIPTMSKKTTTASPRTPGPKR

SEQ ID NO: 5570 - protein, 522 aa, Homo sapiens
MSPQKRVKNVQAQNRTSQGSSSFQTTLSAWKVKQDPSNSKNISKHGQNNPVGDYEHADDQAEEDALQMAVGYFEKGPIKASQNKDKTLEKHLKTVENVAWKNGLASEEIDILLNIALSGKFGNAVNTRILKCMIPATVISEDSVVKAVSWLCVGKCSGSTKVLFYRWLVAMFDFIDRKEQINLLYGFFFASLQDDALCPYVCHLLYLLTKKENVKPFRVRKLLDLQAKMGMQPHLQALLSLYKFFAPALISVSLPVRKKIYFKNSENLWKTALLAVKQRNRGPSPEPLKLMLGPANVRPLKRKWNSLSVIPVLNSSSYTKECGKKEMSLSDCLNRSGSFPLEQLQSFPQLLQNIHCLELPSQMGSVLNNSLLLHYINCVRDEPVLLRFYYWLSQTLQEECIWYKVNNYEHGKEFTNFLDTIIRAECFLQEGFYSCEAFLYKSLPLWDGLCCRSQFLQLVSWIPFSSFSEVKPLLFDHLAQLFFTSTIYFKCSVLQSLKELLQNWLLWLSMDIHMKPVTNSPL

SEQ ID NO: 5571 - protein, 756 aa, Homo sapiens
MSPQKRVKNVQAQNRTSQGSSSFQTTLSAWKVKQDPSNSKNISKHGQNNPVGDYEHADDQAEEDALQMAVGYFEKGPIKASQNKDKTLEKHLKTVENVAWKNGLASEEIDILLNIALSGKFGNAVNTRILKCMIPATVISEDSVVKAVSWLCVGKCSGSTKVLFYRWLVAMFDFIDRKEQINLLYGFFFASLQDDALCPYVCHLLYLLTKKENVKPFRVRKLLDLQAKMGMQPHLQALLSLYKFFAPALISVSLPVRKKIYFKNSENLWKTALLAVKQRNRGPSPEPLKLMLGPANVRPLKRKWNSLSVIPVLNSSSYTKECGKKEMSLSDCLNRSGSFPLEQLQSFPQLLQNIHCLELPSQMGSVLNNSLLLHYINCVRDEPVLLRFYYWLSQTLQEECIWYKVNNYEHGKEFTNFLDTIIRAECFLQEGFYSCEAFLYKSLPLWDGLCCRSQFLQLVSWIPFSSFSEVKPLLFDHLAQLFFTSTIYFKCSVLQSLKELLQNWLLWLSMDIHMKPVTNSPLETTLGGSMNSVSKLIHYVGWLSTTAMRLESNNTFLLHFILDFYEKVCDIYINYNLPLVVLFPPGIFYSALLSLDTSILNQLCFIMHRYRKNLTAAKKNELVQKTKSEFNFSSKTYQEFNHYLTSMVGCLWTSKPFGKGIYIDPEILEKTGVAEYKNSLNVVHHPSFLSYAVSFLLQESPEERTVNVSSIRGKKWSWYLDYLFSQGLQGLKLFIRSSVHHSSIPRAEGINCNNQY

SEQ ID NO: 5572 - protein, 182 aa, Homo sapiens
AATMTAAGHHAEVVVDPEDERAIEMFMNKNPPARRTLADIIMEKLTEKQTEVETVMSEVSGFPMPQLDPRVLEVYRGVREVLSKYRSGKLPKAFKIIPALSNWEQILYVTEPEAWTAAAMYQATRIFASNLKERMAQRFYNLVLLPRVRDDVAEYKRLNFHLYMALKKALFKPGAWFKVAAL

SEQ ID NO: 5573 - protein, 464 aa, Homo sapiens
MSDGNPELLSTSQTYNGQSENNEDYEIPPITPPNLPEPSLLHLGDHEASYHSLCHGLTPNGLLPAYSYQAMDLPAIMVSNMLAQDSHLLSGQLPTIQEMVHSEVAAYDSGRPGPLLGRPAMLASHMSALSQSQLISQMGIRSSIAHSSPSPPGSKSATPSPSSSTQEEESEVHFKISGEKRPSADPGKKAKNPKKKKKKDPNEPQKPVSAYALFFRDTQAAIKGQNPSATFGDVSKIVASMWDSLGEEQKQAYKRKTEAAKKEYLKALAAYRASLVSKSSPDQGETKSTQANPPAKMLPPKQPMYAMPGLASFLTPSDLQAFRSGASPASLARTLGSKSLLPGLSASPPPPPSFPLSPTLHQQLSLPPHAQGALLSPPVSMSPAPQPPVLPTPMALQVQLAMSPSPPGPQDFPHISEFPSSSGSCSPGPSNPTSSGDWDSSYPSGECGISTCSLLPRDKSLYLT

SEQ ID NO: 5574 - protein, 279 aa, Homo sapiens
MSPARRCRGMRAAVAASVGLSEGPAGSRSGRLFRPPSPAPAAPGARLLRLPGSGAVQAASPERAGWTEALRAAVAELRAGAVVAVPTDTLYGLACAASCSAALRAVYRLKGRSEAKPLAVCLGRVADVYRYCRVRVPEGLLKDLLPGPVTLVMERSEELNKDLNPFTPLVGIRIPDHAFMQDLAQMFEGPLALTSANLSSQASSLNVEEFQDLWPQLSLVIDGGQIGDGQSPECRLGSTVVDLSVPGKFGIIRPGCALESTTAILQQKYGLLPSHASYL

SEQ ID NO: 5575 - protein, 506 aa, Homo sapiens
MAEADFKMVSEPVAHGVAEEEMASSTSDSGEESDSSSSSSSTSDSSSSSSTSGSSSGSGSSSSSSGSTSSRSRLYRKKRVPEPSRRARRAPLGTNFVDRLPQAVRNRVQALRNIQDECDKVDTLFLKAIHDLERKYAELNKPLYDRRFQIINAEYEPTEEECEWNSEDEEFSSDEEVQDNTPSEMPPLEGEEEENPKENPEVKAEEKEVPKEIPEVKDEEKEVPKEIPEVKAEEKADSKDCMEATPEVKEDPKEVPQVKADDKEQPKATEAKARAAVRETHKRVPEERLQDSVDLKRARKGKPKREDPKGIPDYWLIVLKNVDKLGPMIQKYDEPILKFLSDVSLKFSKPGQPVSYTFEFHFLPNPYFRNEVLVKTYIIKAKPDHNDPFFSWGWEIEDCKGCKIDWRRGKDVTVTTTQSRTTATGEIEIQPRVVPNASFFNFFSPPEIPMIGKLEPREDAILDEDFEIGQILHDNVILKSIYYYTGEVNGTYYQFGKHYGNKKYRK

SEQ ID NO: 5576 - protein, 1275 aa, Homo sapiens
MTGEVGSEVHLEINDPNVISQEEADSPSDSGQGSYETIGPLSEGDSDEEIFVSKKLKNRKVLQDSDSETEDTNASPEKTTYDSAEEENKENLYAGKNTKIKRIYKTVADSDESYMEKSLYQENLEAQVKPCLELSLQSGNSTDFTTDRKSSKKHIHDKEGTAGKAKVKSKRRLEKEERKMEKIRQLKKKETKNQEDDVEQPFNDSGCLLVDKDLFETGLEDENNSPLEDEESLESIRAAVKNKVKKHKKKEPSLESGVHSFEEGSELSKGTTRKERKAARLSKEALKQLHSETQRLIRESALNLPYHMPENKTIHDFFKRKPRPTCHGNAMALLKSSKYQSSHHKEIIDTANTTEMNSDHHSKGSEQTTGAENEVETNALPVVSKETQIITGSDESCRKDLVKNEELEIQEKQKQSDIRPSPGDSSVLQQESNFLGNNHSEECQVGGLVAFEPHALEGEGPQNPEETDEKVEEPEQQNKSSAVGPPEKVRRFTLDRLKQLGVDVSIKPRLGADEDSFVILEPETNRGEKLQVLKAKLQEAMKLRRFEERQKRQALFKLDNEDGFEEEEEEEEEMTDESEEDGEEKVEKEEKEEELEEEEEKEEEEEEEGNQETAEFLLSSEEIETKDEKEMDKENNDGSSEIGKAVGFLSVPKSLSSDSTLLLFKDSSSKMGYFPTEEKSETDENSGKQPSKLDEDDSCSLLTKESSHNSSFELIGSTIPSYQPCNRQTGRGTSFFPTAGGFRSPSPGLFRASLVSSASKSSGKLSEPSLPIEDSQDLYNASPEPKTLFLGAGDFQFCLEDDTQSQLLDADGFLNVRNHRNQYQALKPRLPLASMDENAMDANMDELLDLCTGKFTSQAEKHLPRKSDKKENMEELLNLCSGKFTSQDASTPASSELNKQEKESSMGDPMEEALALCSGSFPTDKEEEDEEEEFGDFRLVSNDNEFDSDEDEHSDSGNDLALEDHEDDDEEELLKRSEKLKRQMRLRKYLEDEAEVSGSDVGSEDEYDGEEIDEYEEDVIDEVLPSDEELQSQIKKIHMKTMLDDDKRQLRLYQERYLADGDLHSDGPGRMRKFRWKNIDDASQMDLFHRDSDDDQTEEQLDESEARWRKERIEREQWLRDMAQQGKITAEEEEEIGEDSQFMILAKKVTAKALQKNASRPMVIQESKSLLRNPFEAIRPGSAQQVKTGSLLNQPKAVLQKLAALSDHNPSAPRNSRNFVFHTLSPVKAEAAKESSKSQVKKRGPSFMTSPSPKHLKTDDSTSGLTRSIFKYLES

SEQ ID NO: 5577 - protein, 289 aa, Homo sapiens
MSGFSTEERAAPFSLEYRVFLKNEKGQYISPFHDIPIYADKDVFHMVVEVPRWSNAKMEIATKDPLNPIKQDVKKGKLRYVANLFPYKGYIWNYGAIPQTWEDPGHNDKHTGCCGDNDPIDVCEIGSKVCARGEIIGVKVLGILAMIDEGETDWKVIAINVDDPDAANYNDINDVKRLKPGYLEATVDWFRRYKVPDGKPENEFAFNAEFKDKDFAIDIIKSTHDHWKALVTKKTNGKGISCMNTTLSESPFKCDPDAARAIVDALPPPCESACTVPTDVDKWFHHQKN

SEQ ID NO: 5578 - protein, 873 aa, Homo sapiens
MTDSDEDALKVDQGPSRDIPKPWVIPAPKGILQHIFGTSHVFQSICDVKPKVTGLTVPLKVREYYSRGQQCLEQADWETAVLLFSRALHLDPQLVDFYALRAEAYLQLCDFSSAAQNLRRAYSLQQDNCKHLERLTFVLYLQGQCLFEQCAFLDALNVFSHAAELQPEKPCFRYRCMACLLALKQHQACLTLITNELKQDTTNADVYIFRARLYNFLQKPHLCYRDLHSALLLNPKHPQARMLLQKMVAQAQQARQDAGILAVQGKLQHALQRINRAIENNPLDPSLFLFRGTMYRRLQEFDGAVEDFLKVLDMVTEDQEDMVRQAQRQLLLTYNDFAVHCYRQGAYQEGVLLLNKALRDEQQEKGLYINRGDCFFQLGNLAFAEADYQQALALSPQDEGANTRMGLLQEKMGFCEQRRKQFQKAENHFSTAIRHNPQKAQYYLYRAKSRQLLQNIFGARQDVATVLLLNPKQPKLSLLMTNLFPGMSVEEVLSTQIAHLARLQLEQMVEGSLQAGSPQGIVGMLKRHELERQKALALQHSWKQGEPLIATSEELKATPEIPQVKPGSSEGEAEAPEEEEEKEKEKKEEKKSELIPSKVASLSDSYLDQTSSASSMSFRTTGTSETEMSAICQEYRSTSATAVTFSDSSLLKTQSSDSGNNREALSHGPRKIKATQGQRQSLSKTEPTQSQRRNSSKTKATIHKRNSSKTKATQSQRRNSSKTRATQGQGQSSSKTEATQGQRQSSSEIEATQGPRQEPSKTKTTRSPRQRPRKVKAARGRSWRPSKVDATQGRSRGLLRSSTKTEAFYDSNWSLSKTEYAQGQGQRSSKAEGAQGKSQGMSSTSSKAESTWGPSPSLSKTEVDQDLTYYEAV

SEQ ID NO: 5579 - protein, 594 aa, Homo sapiens
MAPIGLKAVVGEKIMHDVIKKVKKKGEWKVLVVDQLSMRMLSSCCKMTDIMTEGITIVEDINKRREPLPSLEAVYLITPSEKSVHSLISDFKDPPTAKYRAAHVFFTDSCPDALFNELVKSRAAKVIKTLTEINIAFLPYESQVYSLDSADSFQSFYSPHKAQMKNPILERLAEQIATLCATLKEYPAVRYRGEYKDNALLAQLIQDKLDAYKADDPTMGEGPDKARSQLLILDRGFDPSSPVLHELTFQAMSYDLLPIENDVYKYETSGIGEARVKEVLLDEDDDLWIALRHKHIAEVSQEVTRSLKDFSSSKRMNTGEKTTMRDLSQMLKKMPQYQKELSKYSTHLHLAEDCMKHYQGTVDKLCRVEQDLAMGTDAEGEKIKDPMRAIVPILLDANVSTYDKIRIILLYIFLKNGITEENLNKLIQHAQIPPEDSEIITNMAHLGVPIVTDSTLRRRSKPERKERISEQTYQLSRWTPIIKDIMEDTIEDKLDTKHYPYISTRSSASFSTTAVSARYGHWHKNKAPGEYRSGPRLIIFILGGVSLNEMRCAYEVTQANGKWEVLIGSTHILTPQKLLDTLKKLNKTDEEISS

SEQ ID NO: 5580 - protein, 603 aa, Homo sapiens [sequence omitted]

SEQ ID NO: 5581 - protein, 746 aa, Homo sapiens
MGDVLSTHLDDARRQHIAEKTGKILTEFLQFYEDQYGVALFNSMRHEIEGTGLPQAQLLWRKVPLDERIVFSGNLFQHQEDSKKWRNRFSLVPHNYGLVLYENKAAYERQVPPRAVINSAGYKILTSVDQYLELIGNSLPGTTAKSGSAPILKCPTQFPLILWHPYARHYYFCMMTEAEQDKWQAVLQDCIRHCNNGIPEDSKVEGPAFTDAIRMYRQSKELYGTWEMLCGNEVQILSNLVMEELGPELKAELGPRLKGKPQERQRQWIQISDAVYHMVYEQAKARFEEVLSKVQQVQPAMQAVIRTDMDQIITSKEHLASKIRAFILPKAEVCVRNHVQPYIPSILEALMVPTSQGFTEVRDVFFKEVTDMNLNVINEGGIDKLGEYMEKLSRLAYHPLKMQSCYEKMESLRLDGLQQRFDVSSTSVFKQRAQIHMREQMDNAVYTFETLLHQELGKGPTKEELCKSIQRVLERVLKKYDYDSSSVRKRFFREALLQISIPFLLKKLAPTCKSELPRFQELIFEDFARFILVENTYEEVVLQTVMKDILQAVKEAAVQRKHNLYRDSMVMHNSDPNLHLLAEGAPIDWGEEYSNSGGGGSPSPSTPESATLSEKRRRAKQVVSVVQDEEVGLPFEASPESPPPASPDGVTEIRGLLAQGLRPESPPPAGPLLNGAPAGESPQPKAAPEASSPPASPLQHLLPGKAVDLGPPKPSDQETGEQVSSPSSHPALHTTTEDSAGVQTEF

SEQ ID NO: 5582 - protein, 733 aa, Homo sapiens
MGWMGEKTGKILTEFLQFYEDQYGVALFNSMRHEIEGTGLPQAQLLWRKVPLDERIVFSGNLFQHQEDSKKWRNRFSLVPHNYGLVLYENKAAYERQVPPRAVINSAGYKILTSVDQYLELIGNSLPGTTAKSGSAPILKCPTQFPLILWHPYARHYYFCMMTEAEQDKWQAVLQDCIRHCNNGIPEDSKVEGPAFTDAIRMYRQSKELYGTWEMLCGNEVQILSNLVMEELGPELKAELGPRLKGKPQERQRQWIQISDAVYHMVYEQAKARFEEVLSKVQQVQPAMQAVIRTDMDQIITSKEHLASKIRAFILPKAEVCVRNHVQPYIPSILEALMVPTSQGFTEVRDVFFKEVTDMNLNVINEGGIDKLGEYMEKLSRLAYHPLKMQSCYEKMESLRLDGLQQRFDVSSTSVFKQRAQIHMREQMDNAVYTFETLLHQELGKGPTKEELCKSIQRVLERVLKKYDYDSSSVRKRFFREALLQISIPFLLKKLAPTCKSELPRFQELIFEDFARFILVENTYEEVVLQTVMKDILQAVKEAAVQRKHNLYRDSMVMHNSDPNLHLLAEGAPIDWGEEYSNSGGGGSPSPSTPESATLSEKRRRAKQVVSVVQDEEVGLPFEASPESPPPASPDGVTEIRGLLAQGLRPESPPPAGPLLNGAPAGESPQPKAAPEASSPPASPLQHLLPGKAVDLGPPKPSDQETGEQVSSPSSHPALHTTTEDSAGVQTEF

SEQ ID NO: 5583 - protein, 420 aa, Homo sapiens
MSRSSPSGKGHSRMAEPRFNNPYFWPPPPTMPSQLDNLVLINKIKEQLMAEKIRPPHLPPTSASSQQPLLVPPAPAESSQAVMSLPKLQQVPGLHPQAVPQPDVALHARPATSTVTGLGLSTRTPSVSTSESSAGAGTGTGTSTPSTPTTTSQSRLIASSPTLISGITSPPLLDSIKTIQGHGLLGPPKSERGRKKIKAENPGGPPVLVVPYPILASGETAKEGKTYRCKVCPLTFFTKSEMQIHSKSHTEAKPHKCPHCSKSFANASYLAQHLRIHLGVKPYHCSYCDKSFRQLSHLQQHTRIHTGDRPYKCPHPGCEKAFTQLSNLQSHQRQHNKDKPYKCPNCYRAYSDSASLQIHLSAHAIKHAKAYCCSMCGRAYTSETYLMKHMSKHTVVEHLVSHHSPQRTESPGIPVRISLI

SEQ ID NO: 5584 - protein, 202 aa, Homo sapiens
MAGYLSESDFVMVEEGFSTRDLLKELTLGASQATTDEVAAFFVADLGAIVRKHFCFLKCLPRVRPFYAVKCNSSPGVLKVLAQLGLGFSCANKIASVINSALDLYFPEGCGVDIFAELGRYYVTSAFTVAVSIIAKKEVLLDQPGREEENGSTSKTIVYHLDEGVYGIFNSVLFDNICPTPILQKVSLPHVGLFSVVCVYFN

SEQ ID NO: 5585 - protein, 480 aa, Homo sapiens
MAGYLSESDFVMVEEGFSTRDLLKELTLGASQATTDEVAAFFVADLGAIVRKHFCFLKCLPRVRPFYAVKCNSSPGVLKVLAQLGLGFSCANKAEMELVQHIGIPASKIICANPCKQIAQIKYAAKHGIQLLSFDNEMELAKVVKSHPSAKMVLCIATDDSHSLSCLSLKFGVSLKSCRHLLENAKKHHVEVVGVSFHIGSGCPDPQAYAQSIADARLVFEMGTELGHKMHVLDLGGGFPGTEGAKVRFEEIASVINSALDLYFPEGCGVDIFAELGRYYVTSAFTVAVSIIAKKEVLLDQPGREAPLPPPHIATCAASEPSPPAEENGSTSKTIVYHLDEGVYGIFNSVLFDNICPTPILQKKPSTEQPLYSSSLWGPAVDGCDCVAEGLWLPQLHVGDWLVFDNMGAYTVGMGSPFWGTQACHITYAMSRVAWEALRRQLMAAEQEDDVEGVCKPLSCGWEITDTLCVGPVFTPASIM

SEQ ID NO: 5586 - protein, 1240 aa, Homo sapiens
MRSRSNSGVRLDGYARLVQQTILCHQNPVTGLLPASYDQKDAWVRDNVYSILAVWGLGLAYRKNADRDEDKAKAYELEQSVVKLMRGLLHCMIRQVDKVESFKYSQSTKDSLHAKYNTKTCATVVGDDQWGHLQLDATSVYLLFLAQMTASGLHIIHSLDEVNFIQNLVFYIEAAYKTADFGIWERGDKTNQGISELNASSVGMAKAALEALDELDLFGVKGGPQSVIHVLADEVQHCQSILNSLLPRASTSKEVDASLLSVVSFPAFAVEDSQLVELTKQEIITKLQGRYGCCRFLRDGYKTPKEDPNRLYYEPAELKLFENIECEWPLFWTYFILDGVFSGNAEQVQEYKEALEAVLIKGKNGVPLLPELYSVPPDRVDEEYQNPHTVDRVPMGKLPHMWGQSLYILGSLMAEGFLAPGEIDPLNRRFSTVPKPDVVVQVSILAETEEIKTILKDKGIYVETIAEVYPIRVQPARILSHIYSSLGCNNRMKLSGRPYRHMGVLGTSKLYDIRKTIFTFTPQFIDQQQFYLALDNKMIVEMLRTDLSYLCSRWRMTGQPTITFPISHSMLDEDGTSLNSSILAALRKMQDGYFGGARVQTGKLSEFLTTSCCTHLSFMDPGPEGKLYSEDYDDNYDYLESGNWMNDYDSTSHARCGDEVARYLDHLLAHTAPHPKLAPTSQKGGLDRFQAAVQTTCDLMSLVTKAKELHVQNVHMYLPTKLFQASRPSFNLLDSPHPRQENQVPSVRVEIHLPRDQSGEVDFKALVLQLKETSSLQEQADILYMLYTMKGPDWNTELYNERSATVRELLTELYGKVGEIRHWGLIRYISGILRKKVEALDEACTDLLSHQKHLTVGLPPEPREKTISAPLPYEALTQLIDEASEGDMSISILTQEIMVYLAMYMRTQPGLFAEMFRLRIGLIIQVMATELAHSLRCSAEEATEGLMNLSPSAMKNLLHHILSGKEFGVERSVRPTDSNVSPAISIHEIGAVGATKTERTGIMQLKSEIKQVEFRRLSISAESQSNGGHPLGIDLMSPSFMSPGTSMTPSSGSFPSAYDQQSSKDSRQGQWQRRRRLDGALNRVPVGFYQKVWKVLQKCHGLSVEGFVLPSSTTREMTPGEIKFSVHVESVLNRVPQPEYRQLLVEAILVLTMLADIEIHSIGSIIAVEKIVHIANDLFLQEQKTLGADDTMLAKDPASGICTLLYDSAPSGRFGTMTYLSKAAATYVQEFLPHSICAMQ

SEQ ID NO: 5587 - protein, 1223 aa, Homo sapiens
MRSRSNSGVRLDGYARLVQQTILCHQNPVTGLLPASYDQKDAWVRDNVYSILAVWGLGLAYRKNADRDEDKAKAYELEQSVVKLMRGLLHCMIRQVDKVESFKYSQSTKDSLHAKYNTKTCATVVGDDQWGHLQLDATSVYLLFLAQMTASGLHIIHSLDEVNFIQNLVFYIEAAYKTADFGIWERGDKTNQGISELNASSVGMAKAALEALDELDLFGVKGGPQSVIHVLADEVQHCQSILNSLLPRASTSKEVDASLLSVVSFPAFAVEDSQLVELTKQEIITKLQGRYGCCRFLRDGYKTPKEDPNRLYYEPAELKLFENIECEWPLFWTYFILDGVFSGNAEQVQEYKEALEAVLIKGKNGVPLLPELYSVPPDRVDEEYQNPHTVDRVPMGKLPHMWGQSLYILGSLMAEGFLAPGEIDPLNRRFSTVPKPDVVVQVSILAETEEIKTILKDKGIYVETIAEVYPIRVQPARILSHIYSSLGCNNRMKLSGRPYRHMGVLGTSKLYDIRKTIFTFTPQFIDQQQFYLALDNKMIVEMLRTDLSYLCSRWRMTGQPTITFPISHSMLDEDGTSLNSSILAALRKMQDGYFGGARVQTGKLSEFLTTSCCTHLSFMDPGPEGKLYSEDYDDNYDYLESGNWMNDYDSTSHARCGDEVARYLDHLLAHTAPHPKLAPTSQKGGLDRFQAAVQTTCDLMSLVTKAKELHVQNVHMYLPTKLFQASRPSFNLLDSPHPRQENQVPSVRVEIHLPRDQSGEVDFKALVLQLKETSSLQEQADILYMLYTMKGPDWNTELYNERSATVRELLTELYGKVGEIRHWGLIRYISGILRKKVEALDEACTDLLSHQKHLTVGLPPEPREKTISAPLPYEALTQLIDEASEGDMSISILTQEIMVYLAMYMRTQPGLFAEMFRLRIGLIIQVMATELAHSLRCSAEEATEGLMNLSPSAMKNLLHHILSGKEFGVERSVRPTDSNVSPAISIHEIGAVGATKTERTGIMQLKSEIKQVEFRRLSISAESQSPGTSMTPSSGSFPSAYDQQSSKDSRQGQWQRRRRLDGALNRVPVGFYQKVWKVLQKCHGLSVEGFVLPSSTTREMTPGEIKFSVHVESVLNRVPQPEYRQLLVEAILVLTMLADIEIHSIGSIIAVEKIVHIANDLFLQEQKTLGADDTMLAKDPASGICTLLYDSAPSGRFGTMTYLSKAAATYVQEFLPHSICAMQ

SEQ ID NO: 5588 - protein, 1181 aa, Homo sapiens
MRSRSNSGVRLDGYARLVQQTILCHQNPVTGLLPASYDQKDAWVRDNVYSILAVWGLGLAYRKNADRDEDKAKAYELEQSVVKLMRGLLHCMIRQVDKVESFKYSQSTKDSLHAKYNTKTCATVVGDDQWGHLQLDATSVYLLFLAQMTASGLHIIHSLDEVNFIQNLVFYIEAAYKTADFGIWERGDKTNQGISELNASSVGMAKAALEALDELDLFGVKGGPQSVIHVLADEVQHCQSILNSLLPRASTSKEVDASLLSVVSFPAFAVEDSQLVELTKQEIITKLQGRYGCCRFLRDGYKTPKEDPNRLYYEPAELKLFENIECEWPLFWTYFILDGVFSGNAEQVQEYKEALEAVLIKGKNGVPLLPELYSVPPDRVDEEYQNPHTVDRVPMGKLPHMWGQSLYILGSLMAEGFLAPGEIDPLNRRFSTVPKPDVVVQVSILAETEEIKTILKDKGIYVETIAEVYPIRVQPARILSHIYSSLGCNNRMKLSGRPYRHMGVLGTSKLYDIRKTIFTFTPQFIDQQQFYLALDNKMIVEMLRTDLSYLCSRWRMTGQPTITFPISHSMLDEDGTSLNSSILAALRKMQDGYFGGARVQTGKLSEFLTTSCCTHLSFMDPGPEGKLYSEDYDDNYDYLESGNWMNDYDSTSHDVHMYLPTKLFQASRPSFNLLDSPHPRQENQVPSVRVEIHLPRDQSGEVDFKALVLQLKETSSLQEQADILYMLYTMKGPDWNTELYNERSATVRELLTELYGKVGEIRHWGLIRYISGILRKKVEALDEACTDLLSHQKHLTVGLPPEPREKTISAPLPYEALTQLIDEASEGDMSISILTQEIMVYLAMYMRTQPGLFAEMFRLRIGLIIQVMATELAHSLRCSAEEATEGLMNLSPSAMKNLLHHILSGKEFGVERSVRPTDSNVSPAISIHEIGAVGATKTERTGIMQLKSEIKQVEFRRLSISAESQSNGGHPLGIDLMSPSFMSPGTSMTPSSGSFPSAYDQQSSKDSRQGQWQRRRRLDGALNRVPVGFYQKVWKVLQKCHGLSVEGFVLPSSTTREMTPGEIKFSVHVESVLNRVPQPEYRQLLVEAILVLTMLADIEIHSIGSIIAVEKIVHIANDLFLQEQKTLGADDTMLAKDPASGICTLLYDSAPSGRFGTMTYLSKAAATYVQEFLPHSICAMQ

SEQ ID NO: 5589 - protein, 96 aa, Homo sapiens
MAKIKARDLRGKKKEELLKQLDDLKVELSQLRVAKVTGGAASKLSKIRVVRKSIARVLTVINQTQKENLRKFYKAAAGGPCIQMDRVLPQPPACSC

SEQ ID NO: 5590 - protein, 325 aa, Homo sapiens
MKPILLQGHERSITQIKYNREGDLLFTVAKDPIVNVWYSVNGERLGTYMGHTGAVWCVDADWDTKHVLTGSADNSCRLWDCETGKQLALLKTNSAVRTCGFDFGGNIIMFSTDKQMGYQCFVSFFDLRDPSQIDNNEPYMKIPCNDSKITSAVWGPLGECIIAGHESGELNQYSAKSGEVLVNVKEHSRQINDIQLSRDMTMFVTASKDNTAKLFDSTTLEHQKTFRTERPVNSAALSPNYDHVVLGGGQEAMDVTTTSTRIGKFEARFFHLAFEEEFGRVKGHFGPINSVAFHPDGKSYSSGGEDGYVRIHYFDPQYFEFEFEA

SEQ ID NO: 5591 - protein, 207 aa, Homo sapiens
MAGQPGHMPHGGSSNNLCHTLGPVHPPDPQRHPNTLSFRCSLADFQIEKKIGRGQFSEVYKATCLLDRKTVALKKVQIFEMMDAKARQDCVKEIGLLKQLNHPNIIKYLDSFIEDNELNIVLELADAGDLSQMIKYFKKQKRLIPERTVWKYFVQLCSAVEHMHSRRVMHRDIKPANVFITATGVVKLGDLGLGRFFSSETTAAHSL

SEQ ID NO: 5592 - protein, 200 aa, Homo sapiens
MDDKKKKRSPKPCLAQPAQAPGTLRRVPVPTSHSGSLALGLPHLPSPKQRAKFKRVGKEKCRPVLAGGGSGSAGTPLQHSFLTEVTDVYEMEGGLLNLLNDFHSGRLQAFGKECSFEQLEHVREMQEKLARLHFSLDVCGEEEDDEEEEDGVTEGLPEEQKKTMADRNLDQLLSNLEDLSNSIQKLHLAENAEPEEQSAA

SEQ ID NO: 5593 - protein, 263 aa, Homo sapiens [sequence omitted]

SEQ ID NO: 5594 - protein, 2136 aa, Homo sapiens
MSRSRHARPSRLVRKEDVNKKKKNSQLRKTTKGANKNVASVKTLSPGKLKQLIQERDVKKKTEPKPPVPVRSLLTRAGAARMNLDRTEVLFQNPESLTCNGFTMALRSTSLSRRLSQPPLVVAKSKKVPLSKGLEKQHDCDYKILPALGVKHSENDSVPMQDTQVLPDIETLIGVQNPSLLKGKSQETTQFWSQRVEDSKINIPTHSGPAAEILPGPLEGTRCGEGLFSEETLNDTSGSPKMFAQDTVCAPFPQRATPKVTSQGNPSIQLEELGSRVESLKLSDSYLDPIKSEHDCYPTSSLNKVIPDLNLRNCLALGGSTSPTSVIKFLLAGSKQATLGAKPDHQEAFEATANQQEVSDTTSFLGQAFGAIPHQWELPGADPVHGEALGETPDLPEIPGAIPVQGEVFGTILDQQETLGMSGSVVPDLPVFLPVPPNPIATFNAPSKWPEPQSTVSYGLAVQGAIQILPLGSGHTPQSSSNSEKNSLPPVMAISNVENEKQVHISFLPANTQGFPLAPERGLFHASLGIAQLSQAGPSKSDRGSSQVSVTSTVHVVNTTVVTMPVPMVSTSSSSYTTLLPTLEKKKRKRCGVCEPCQQKTNCGECTYCKNRKNSHQICKKRKCEELKKKPSVVVPLEVIKENKRPQREKKPKVLKADFDNKPVNGPKSESMDYSRCGHGEEQKLELNPHTVENVTKNEDSMTGIEVEKWTQNKKSQLTDHVKGDFSANVPEAEKSKNSEVDKKRTKSPKLFVQTVRNGIKHVHCLPAETNVSFKKFNIEEFGKTLENNSYKFLKDTANHKNAMSSVATDMSCDHLKGRSNVLVFQQPGFNCSSIPHSSHSIINHHASIHNEGDQPKTPENIPSKEPKDGSPVQPSLLSLMKDRRLTLEQVVAIEALTQLSEAPSENSSPSKSEKDEESEQRTASLLNSCKAILYTVRKDLQDPNLQGEPPKLNHCPSLEKQSSCNTVVFNGQTTTLSNSHINSATNQASTKSHEYSKVTNSLSLFIPKSNSSKIDTNKSIAQGIITLDNCSNDLHQLPPRNNEVEYCNQLLDSSKKLDSDDLSCQDATHTQIEEDVATQLTQLASIIKINYIKPEDKKVESTPTSLVTCNVQQKYNQEKGTIQQKPPSSVHNNHGSSLTKQKNPTQKKTKSTPSRDRRKKKPTVVSYQENDRQKWEKLSYMYGTICDIWIASKFQNFGQFCPHDFPTVFGKISSSTKIWKPLAQTRSIMQPKTVFPPLTQIKLQRYPESAEEKVKVEPLDSLSLFHLKTESNGKAFTDKAYNSQVQLTVNANQKAHPLTQPSSPPNQCANVMAGDDQIRFQQVVKEQLMHQRLPTLPGISHETPLPESALTLRNVNVVCSGGITVVSTKSEEEVCSSSFGTSEFSTVDSAQKNFNDYAMNFFTNPTKNLVSITKDSELPTCSCLDRVIQKDKGPYYTHLGAGPSVAAVREIMENRYGQKGNAIRIEIVVYTGKEGKSSHGCPIAKWVLRRSSDEEKVLCLVRQRTGHHCPTAVMVVLIMVWDGIPLPMADRLYTELTENLKSYNGHPTDRRCTLNENRTCTCQGIDPETCGASFSFGCSWSMYFNGCKFGRSPSPRRFRIDPSSPLHEKNLEDNLQSLATRLAPIYKQYAPVAYQNQVEYENVARECRLGSKEGRPFSGVTACLDFCAHPHRDIHNMNNGSTVVCTLTREDNRSLGVIPQDEQLHVLPLYKLSDTDEFGSKEGMEAKIKSGAIEVLAPRRKKRTCFTQPVPRSGKKRAAMMTEVLAHKIRAVEKKPIPRIKRKNNSTTTNNSKPSSLPTLGSNTETVQPEVKSETEPHFILKSSDNTKTYSLMPSAPHPVKEASPGFSWSPKTASATPAPLKNDATASCGFSERSSTPHCTMPSGRLSGANAAAADGPGISQLGEVAPLPTLSAPVMEPLINSEPSTGVTEPLTPHQPNHQPSFLTSPQDLASSPMEEDEQHSEADEPPSDEPLSDDPLSPAEEKLPHIDEYWSDSEHIFLDANIGGVAIAPAHGSVLIECARRELHATTPVEHPNRNHPTRLSLVFYQHKNLNKPQHGFELNKIKFEAKEAKNKKMKASEQKDQAANEGPEQSSEVNELNQIPSHKALTLTHDNVVTVSPYALTHVAGPYNHWV

SEQ ID NO: 5595 - protein, 1127 aa, Homo sapiens
MGLGKTVQIIAFLSGMFDASLVNHVLLIMPTNLINTWVKEFIKWTPGMRVKTFHGPSKDERTRNLNRIQQRNGVIITTYQMLINNWQQLSSFRGQEFVWDYVILDEAHKIKTSSTKSAICARAIPASNRLLLTGTPIQNNLQELWSLFDFACQGSLLGTLKTFKMEYENPITRAREKDATPGEKALGFKISENLMAIIKPYFLRRTKEDVQKKKSSNPEARLNEKNPDVDAICEMPSLSRKNDLIIWIRLVPLQEEIYRKFVSLDHIKELLMETRSPLAELGVLKKLCDHPRLLSARACCLLNLGTFSAQDGNEGEDSPDVDHIDQVTDDTLMEESGKMIFLMDLLKRLRDEGHQTLVFSQSRQILNIIERLLKNRHFKTLRIDGTVTHLLEREKRINLFQQNKDYSVFLLTTQVGGVGLTLTAATRVVIFDPSWNPATDAQAVDRVYRIGQKENVVVYRLITCGTVEEKIYRRQVFKDSLIRQTTGEKKNPFRYFSKQELRELFTIEDLQNSVTQLQLQSLHAAQRKSDIKLDEHIAYLQSLGIAGISDHDLMYTCDLSVKEELDVVEESHYIQQRVQKAQFLVEFESQNKEFLMEQQRTRNEGAWLREPVFPSSTKKKCPKLNKPQPQPSPLLSTHHTQEEDISSKMASVVIDDLPKEGEKQDLSSIKVNVTTLQDGKGTGSADSIATLPKGFGSVEELCTNSSLGMEKSFATKNEAVQKETLQEGPKQEALQEDPLESFNYVLSKSTKADIGPNLDQLKDDEILRHCNPWPIISITNESQNAESNVSIIEIADDLSASHSALQDAQASEAKLEEEPSASSPQYACDFNLFLEDSADNRQNFSSQSLEHVEKENSLCGSAPNSRAGFVHSKTCLSWEFSEKDDEPEEVVVKAKIRSKARRIVSDGEDEDDSFKDTSSINPFNTSLFQFSSVKQFDASTPKNDISPPGRFFSSQIPSSVNKSMNSRRSLASRRSLINMVLDHVEDMEERLDDSSEAKGPEDYPEEGVEESSGEASKYTEEDPSGETLSSENKSSWLMTSKPSALAQETSLGAPEPLSGEQLVGSPQDKAAEATNDYETLVKRGKELKECGKIQEALNCLVKALDIKSADPEVMLLTLSLYKQLNNN

SEQ ID NO: 5596 - protein, 218 aa, Homo sapiens
MAYSAVPVRHFATKKAKAKGKGQSQTRVNINAALVEDIINLEEVNEEMKSVIEALKDNFNKTLNIRTSPGSLDKIAVVTADGKLALNQISQISMKSPQLILVNMASFPECTAAAIKAIRESGMNLNPEVEGTLIRVPIPQVTREHREMLVKLAKQNTNKAKDSLRKVRTNSMNKLKKSKDTVSEDTIRLIEKQISQMADDTVAELDRHLAVKTKELLG

SEQ ID NO: 5597 - protein, 264 aa, Homo sapiens
MQEGELAISPISPVAAMPPLGTHVQARCEAQINLLGEGGICKLPGRLRIQPALWSREDVLHWLRWAEQEYSLPCTAEHGFEMNGRALCILTKDDFRHRAPSSGDVLYELLQYIKTQRRALVCGPFFGGIFRLKTPTQHSPVPPEDCRLLWDYVYQLLLDTRYEPYIKWEDKDAKIFRVVDPNGLARLWGNHKNRVNMTYEKMSRALRHYYKLNIIKKEPGQKLLFRFLKTPGKMVQDKHSHLEPLESQEQDRIEFKDKRPEISP

SEQ ID NO: 5598 - protein, 286 aa, Homo sapiens
MQEGELAISPISPVAAMPPLGTHVQARCEAQINLLGEGGICKLPGRLRDVLYELLQYIKTQRRALVCGPFFGGIFRLKTPTQHSPVPPEEVTGPSQMDTRRGHLLQPPDPGLTSNFGHLDDPGLARWTPGKEESLNLCHCAELGCRTQGVCSFPAMPQAPIDGRIADCRLLWDYVYQLLLDTRYEPYIKWEDKDAKIFRVVDPNGLARLWGNHKNRVNMTYEKMSRALRHYYKLNIIKKEPGQKLLFRFLKTPGKMVQDKHSHLEPLESQEQDRIEFKDKRPEISP

SEQ ID NO: 5599 - protein, 270 aa, Homo sapiens
MPRDNMASLIQRIARQACLTFRGSGGGRGASDRDAASGPEAPMQPGFPENLSKLKSLLTQLRAEDLNIAPRKATLQPLPPNLPPVTYMHIYETDGFSLGVFLLKSGTSIPLHDHPGMHGMLKVLYGTVRISCMDKLDAGGGQRPRALPPEQQFEPPLQPREREAVRPGVLRSRAEYTEASGPCILTPHRDNLHQIDAVEGPAAFLDILAPPYDPDDGRDCHYYRVLEPVRPKEASSSACDLPREVWLLETPQADDFWCEGEPYPGPKVFP

SEQ ID NO: 5600 - protein, 459 aa, Homo sapiens
PKTTKGLPQTAVCNLNITLPAHKKETESDQDDEIEKTDRRQSFASLALRKRYSYLTEPGMSPQSPCERTDIRMAIVADHLGLSWTELARELNFSVDEINQIRVENPNSLISQSFMLLKKWVTRDGKNATTDALTSVLTKINRIDIVTLLEGPIFDYGNISGTRSFADENNVFHDPVDGYPSLQVELETPTGLHYTPPTPFQQDDYFSDISSIESPLRTPSRLSDGLVPSQGNIEHSADGPPVVTAEDASLEDSKLEDSVPLTEMPEAVDVDESQLENVCLSWQNETSSGNLESCAQARRVTGGLLDRLDDSPDQCRDSITSYLKGEAGKFEANGSHTEITPEAKTKSYFPESQNDVGKQSTKETLKPKIHGSGHVEEPASPLAAYQKSLEETSKLIIEETKPCVPVSMKKMSRTSPADGKPRLSLHEEEGSSGSEQKQGEGFKVKTKKEIRHVEKKSHS

SEQ ID NO: 5601 - protein, 452 aa, Homo sapiens
MSPKRIAKRRSPPADAIPKSKKVKDTRAAASRRVPGARSCQGACGPSPPDQKTRPVSHRSHSTEPGLVLTLGQGDVGQLGLGENVMERKKPALVSIPEDVVQAEAGGMHTVCLSKSGQVYSFGCNDEGALGRDTSVEGSEMVPGKVELQEKVVQVSAGDSHTAALTDDGRVFLWGSFRDNNGVIGLLEPMKKSMVPVQVQLDVPVVKVASGNDHLVMLTADGDLYTLGCGEQGQLGRVPELFANRGGRQGLERLLVPKCVMLKSRGSRGHVRFQDAFCGAYFTFAISHEGHVYGFGLSNYHQLGTPGTESCFIPQNLTSFKNSTKSWVGFSGGQHHTVCMDSEGKAYSLGRAEYGRLGLGEGAEEKSIPTLISRLPAVSSVACGASVGYAVTKDGRVFAWGMGTNYQLGTGQDEDAWSPVEMMGKQLENRVVLSVSSGGQHTVLLVKDKEQS

SEQ ID NO: 5602 - protein, 421 aa, Homo sapiens
MSPKRIAKRRSPPADAIPKSKKVKVSHRSHSTEPGLVLTLGQGDVGQLGLGENVMERKKPALVSIPEDVVQAEAGGMHTVCLSKSGQVYSFGCNDEGALGRDTSVEGSEMVPGKVELQEKVVQVSAGDSHTAALTDDGRVFLWGSFRDNNGVIGLLEPMKKSMVPVQVQLDVPVVKVASGNDHLVMLTADGDLYTLGCGEQGQLGRVPELFANRGGRQGLERLLVPKCVMLKSRGSRGHVRFQDAFCGAYFTFAISHEGHVYGFGLSNYHQLGTPGTESCFIPQNLTSFKNSTKSWVGFSGGQHHTVCMDSEGKAYSLGRAEYGRLGLGEGAEEKSIPTLISRLPAVSSVACGASVGYAVTKDGRVFAWGMGTNYQLGTGQDEDAWSPVEMMGKQLENRVVLSVSSGGQHTVLLVKDKEQS

SEQ ID NO: 5603 - protein, 416 aa, Homo sapiens
MASSSGSSPRPAPDENEFPFGCPPTVCQDPKEPRALCCAGCLSENPRNGEDQICPKCRGEDLQSISPGSRLRTQEKAHPEVAEAGIGCPFAGVGCSFKGSPQSVQEHEVTSQTSHLNLLLGFMKQWKARLGCGLESGPMALEQNLSDLQLQAAVEVAGDLEVDCYRAPCSESQEELALQHFMKEKLLAELEGKLRVFENIVAVLNKEVEASHLALATSIHQSQLDRERILSLEQRVVELQQTLAQKDQALGKLEQSLRLMEEASFDGTFLWKITNVTRRCHESACGRTVSLFSPAFYTAKYGYKLCLRLYLNGDGTGKRTHLSLFIVIMRGEYDALLPWPFRNKVTFMLLDQNNREHAIDAFRPDLSSASFQRPQSETNVASGCPLFFPLSKLQSPKHAYVKDDTMFLKCIVETST

SEQ ID NO: 5604 - protein, 298 aa, Homo sapiens
MRASLLLSVLRPAGPVAVGISLGFTLSLLSVTWVEEPCGPGPPQPGDSELPPRGNTNAARRPNSVQPGAEREKPGAGEGAGENWEPRVLPYHPAQPGQAAKKAVRTRYISTELGIRQRLLVAVLTSQTTLPTLGVAVNRTLGHRLERVVFLTGARGRRAPPGMAVVTLGEERPIGHLHLALRHLLEQHGDDFDWFFLVPDTTYTEAHGLARLTGHLSLASAAHLYLGRPQDFIGGEPTPGRYCHGGFGVLLSRMLLQQLRPHLEGCRNDIVSARPDEWLGRCILDATGVGCTGDHEVG

SEQ ID NO: 5605 - protein, 217 aa, Homo sapiens
MSSKVSRDTLYEAVREVLHGNQRKRRKFLETVELQISLKNYDPQKDKRFSGTVRLKSTPRPKFSVCVLGDQQHCDEAKAVDIPHMDIEALKKLNKNKKLVKKLAKKYDAFLASESLIKQIPRILGPGLNKAGKFPSLLTHNENMVAKVDEVKSTIKFQMKKVLCLAVAVGHVKMTDDELVYNIHLAVNFLVSLLKKNWQNVRALYIKSTMGKPQRLY

SEQ ID NO: 5606 - protein, 643 aa, Homo sapiens
MEPVPLQDFVRALDPASLPRVLRVCSGVYFEGSIYEISGNECCLSTGDLIKVTQVRLQKVVCENPKTSQTMELAPNFQGYFTPLNTPQSYETLEELVSATTQSSKQLPTCFMSTHRIVTEGRVVTEDQLLMLEAVVMHLGIRSARCVLGMEGQQVILHLPLSQKGPFWTWEPSAPRTLLQVLQDPALKDLVLTCPTLPWHSLILRPQYEIQAIMHMRRTIVKIPSTLEVDVEDVTASSRHVHFIKPLLLSEVLAWEGPFPLSMEILEVPEGRPIFLSPWVGSLQKGQRLCVYGLASPPWRVLASSKGRKVPRHFLVSGGYQGKLRRRPREFPTAYDLLGAFQPGRPLRVVATKDCEGEREENPEFTSLAVGDRLEVLGPGQAHGAQGSDVDVLVCQRLSDQAGEDEEEECKEEAESPERVLLPFHFPGSFVEEMSDSRRYSLADLTAQFSLPCEVKVVAKDTSHPTDPLTSFLGLRLEEKITEPFLVVSLDSEPGMCFEIPPRWLDLTVVKAKGQPDLPEGSLPIATVEELTDTFYYRLRKLPACEIQAPPPRPPKNQGLSKQRRHSSEGGVKSSQVLGLQQHARLPKPKAKTLPEFIKDGSSTYSKIPAHRKGHRPAKPQRQDLDDDEHDYEEILEQFQKTI

SEQ ID NO: 5607 - protein, 260 aa, Homo sapiens
MEPVPLQDFVRALDPASLPRVLRVCSGVYFEGSIYEISGNECCLSTGDLIKVTQVRLQKVVCENPKTSQTMELAPNFQGYFTPLNTPQSYETLEELVSATTQSSKQLPTCFMSTHRIVTEGRVVTEDQLLMLEAVVMHLGIRSARCVLGMEGQQVILHLPLSQKGPFWTWEPSAPRTLLQVLQDPALKDLVLTCPTLPWHSLILRPQYEIQAIMHIFSSLRIAATRSAAQTQGEDLARVHQGWLQYVQQDSCPQEGPQAR

SEQ ID NO: 5608 - protein, 123 aa, Homo sapiens
MEPVPLQDFVRALDPASLPRVLRVCSGVYFEGSIYEISGNECCLSTGDLIKVTQVRLQKVVCENPKTSQTMELAPNFQVFSSLRIAATRSAAQTQGEDLARVHQGWLQYVQQDSCPQEGPQAR

SEQ ID NO: 5609 - protein, 277 aa, Homo sapiens
MEAAETEAEAAALEVLAEVAGILEPVGLQEEAELPAKILVEFVVDSQKKDKLLCSQLQVADFLQNILAQEDTAKGLDPLASEDTSRQKAIAAKEQWKELKATYREHVEAIKIGLTKALTQMEEAQRKRTQLREAFEQLQAKKQMAMEKRRAVQNQWQLQQEKHLQHLAEVSAEVRERKTGTQQELDRVFQKLGNLKQQAEQERDKLQRYQTFLQLLYTLQGKLLFPEAEAEAENLPDDKPQQPTRPQEQSTGDTMGRDPGVSFKAVGLQPAGDVNLP

SEQ ID NO: 5610 - protein, 529 aa, Homo sapiens
MGCVFCKKLEPVATAKEDAGLEGDFRSYGAADHYGPDPTKARPASSFAHIPNYSNFSSQAINPGFLDSGTIRGVSGIGVTLFIALYDYEARTEDDLTFTKGEKFHILNNTEGDWWEARSLSSGKTGCIPSNYVAPVDSIQAEEWYFGKIGRKDAERQLLSPGNPQGAFLIRESETTKGAYSLSIRDWDQTRGDHVKHYKIRKLDMGGYYITTRVQFNSVQELVQHYMEVNDGLCNLLIAPCTIMKPQTLGLAKDAWEISRSSITLERRLGTGCFGDVWLGTWNGSTKVAVKTLKPGTMSPKAFLEEAQVMKLLRHDKLVQLYAVVSEEPIYIVTEFMCHGSLLDFLKNPEGQDLRLPQLVDMAAQVAEGMAYMERMNYIHRDLRAANILVGERLACKIADFGLARLIKDDEYNPCQGSKFPIKWTAPEAALFGRFTIKSDVWSFGILLTELITKGRIPYPGMNKREVLEQVEQGYHMPCPPGCPASLYEAMEQTWRLDPEERPTFEYLQSFLEDYFTSAEPQYQPGDQT

SEQ ID NO: 5611 - protein, 630 aa, Homo sapiens
MSVSSGVQILTKPETVDRRRSAETTKEAGRPLEMAVSEPEASAAEWKQLDPAQSNLYNDVMLENYCNQASMGCQAPKPDMISKLEKGEAPWLGKGKRPSQGCPSKIARPKQKETDGKVQKDDDQLENIQKSQNKLLREVAVKKKTQAKKNGSDCGSLGKKNNLHKKHVPSKKRLLKFESCGKILKQNLDLPDHSRNCVKRKSDAAKEHKKSFNHSLSDTRKGKKQTGKKHEKLSSHSSSDKCNKTGKKHDKLCCHSSSHIKQDKIQTGEKHEKSPSLSSSTKHEKPQACVKPYECNQCGKVLSHKQGLIDHQRVHTGEKPYECNECGIAFSQKSHLVVHQRTHTGEKPYECIQCGKAHGHKHALTDHLRIHTGEKPYECAECGKTFRHSSNLIQHVRSHTGEKPYECKECGKSFRYNSSLTEHVRTHTGEIPYECNECGKAFKYSSSLTKHMRIHTGEKPFECNECGKAFSKKSHLIIHQRTHTKEKPYKCNECGKAFGHSSSLTYHMRTHTGESPFECNQCGKGFKQIEGLTQHQRVHTGEKPYECNECGKAFSQKSHLIVHQRTHTGEKPYECNECEKAFNAKSQLVIHQRSHTGEKPYECNECGKTFKQNASLTKHVKTHSEDKSHE

SEQ ID NO: 5612 - protein, 437 aa, Homo sapiens
MAGGPPKALPSTGPHSLRDMPHPLAGSSSEEAVGGDSTPSPDLLMARSFGDKDLILPNGGTPAGTSSPASSSSLLNRLQLDDDIDGETRDLFVIVDDPKKHVCTMETYITYRITTKSTRVEFDLPEYSVRRRYQDFDWLRSKLEESQPTHLIPPLPEKFVVKGVVDRFSEEFVETRRKALDKFLKRITDHPVLSFNEHFNIFLTAKDLNAYKKQGIALLTRMGESVKHVTGGYKLRTRPLEFAAIGDYLDTFALKLGTIDRIAQRIIKEEIEYLVELREYGPVYSTWSALEGELAEPLEGVSACIGNCSTALEELTDDMTEDFLPVLREYILYSDSMKSVLKKRDQVQAEYEAKLEAVALRKEDRPKVPADVEKCQDRMECFNADLKADMERWQNNKRQDFRQLLMGMADKNIQYYEKCLMAWESIIPLLQEKQEAK

SEQ ID NO: 5613 - protein, 134 aa, Homo sapiens
MGRSRRTGAHRAHSLARQMKAKRRRPDLDEIHRELRPQGSARPQPDPNAEFDPDLPGGGLHRCLACARYFIDSTNLKTHFRSKDHKKRLKQLSVEPYSQEEAERAAGMGSYVPPRRLAVPTEVSTEVPEMDTST

SEQ ID NO: 5614 - protein, 357 aa, Homo sapiens
MRRTGPEEEACGVWLDAAALKRRKVQTHLIKPGTKMLTLLPGERKANIYFTQRRAPSTGIHQRSIASFFTLQPGKTNGSDQKSVSSHTESQINKESKKNATQLDHLIPGLAHDCMASPLATSTTADIQEAGLSPQSLQTSGHHRMKTPFSTELSLLQPDTPDCAGDSHTPLAFSFTEDLESSCLLDRKEEKGDSARKWEWLHESKKNYQSMEKHTKLPGDKCCQPLGKTKLERKVSAKENRQAPVLLQTYRESWNGENIESVKQSRSPVSVFSWDNEKNDKDSWSQLFTEDSQGQRVIAHNTRAPFQDVTNNWNWDLGPFPNSPWAQCQEDGPTQNLKPDLLFTQDSEGNQVIRHQF

SEQ ID NO: 5615 - protein, 401 aa, Homo sapiens
MELKEEFQEAKAWVGESFHLNVSGEASLFEVNIRYIGGLLSAFYLTGEEVFRIKAIRLGEKLLPAFNTPTGIPKGVVSFKSGNWGWATAGSSSILAEFGSLHLEFLHLTELSGNQVFAEKVRNIRKVLRKIEKPFGLYPNFLSPVSGNWVQHHVSVGGLGDSFYEYLIKSWLMSGKTDMEAKNMYYEALEAIETYLLNVSPGGLTYIAEWRGGILDHKMGHLACFSGGMIALGAEDAKEEKRAHYRELAAQITKTCHESYARSDTKLGPEAFWFNSGREAVATQLSESYYILRPEVVESYMYLWRQTHNPIYREWGWEVVLALEKYCRTEAGFSGIQDVYSSTPNHDNKQQSFFLAETLKYLYLLFSEDDLLSLEDWVFNTEAHPLPVNHSDSSGRAWGRH

SEQ ID NO: 5616 - protein, 630 aa, Homo sapiens
MLMRKVPGFVPASPWGLRLPQKFLFLLFLSGLVTLCFGALFLLPHSSRLKRLFLAPRTQQPGLEVVAEIAGHAPAREQEPPPNPAPAAPAPGEDDPSSWASPRRRKGGLRRTRPTGPREEATAARGNSIPASRPGDEGVPFRFDFNAFRSRLRHPVLGTRADESQEPQSQVRAQREKIKEMMQFAWQSYKRYAMGKNELRPLTKDGYEGNMFGGLSGATVIDSLDTLYLMELKEEFQEAKAWVGESFHLNVSGEASLFEVNIRYIGGLLSAFYLTGEEVFRIKAIRLGEKLLPAFNTPTGIPKGVVSFKSGNWGWATAGSSSILAEFGSLHLEFLHLTELSGNQVFAEKVRNIRKVLRKIEKPFGLYPNFLSPVSGNWVQHHVSVGGLGDSFYEYLIKSWLMSGKTDMEAKNMYYEALEAIETYLLNVSPGGLTYIAEWRGGILDHKMGHLACFSGGMIALGAEDAKEEKRAHYRELAAQITKTCHESYARSDTKLGPEAFWFNSGREAVATQLSESYYILRPEVVESYMYLWRQTHNPIYREWGWEVVLALEKYCRTEAGFSGIQDVYSSTPNHDNKQQSFFLAETLKYLYLLFSEDDLLSLEDWVFNTEAHPLPVNHSDSSGRAWGRH

SEQ ID NO: 5617 - protein, 308 aa, Homo sapiens
MDALKSAGRALIRSPSLAKQSWGGGGRHRKLPENWTDTRETLLEGMLFSLKYLGMTLVEQPKGEELSAAAIKRIVATAKASGKKLQKVTLKVSPRGIILTDNLTNQLIENVSIYRISYCTADKMHDKVFAYIAQSQHNQSLECHAFLCTKRKMAQAVTLTVAQAFKVAFEFWQVSKEEKEKRDKASQEGGDVLGARQDCTPSLKSLVATGNLLDLEETAKAPLSTVSANTTNMDEVPRPQALSGSSVVWELDDGLDEAFSRLAQSRTNPQVLDTGLTAQDMHYAQCLSPVDWDKPDSSGTEQDDLFSF

SEQ ID NO: 5618 - protein, 178 aa, Homo sapiens
MQAVVPLNKMTAISPEPQTLASTEQNEVPRVVTSGEQEAILRGNAADAESFRQRFRWFCYSEVAGPRKALSQLWELCNQWLRPDIHTKEQILELLVFEQFLTILPGEIRIWVKSQHPESSEEVVTLIEDLTQMLEEKGEIYRWREEAGDIASKSESKFLKRRQFTAKEESEVRSWDWV

SEQ ID NO: 5619 - protein, 1232 aa, Homo sapiens
MKEEVKGIPVRVALRCRPLVPKEISEGCQMCLSFVPGEPQVVVGTDKSFTYDFVFDPSTEQEEVFNTAVAPLIKGVFKGYNATVLAYGQTGSGKTYSMGGAYTAEQENEPTVGVIPRVIQLLFKEIDKKSDFEFTLKVSYLEIYNEEILDLLCPSREKAQINIREDPKEGIKIVGLTEKTVLVALDTVSCLEQGNNSRTVASTAMNSQSSRSHAIFTISLEQRKKSDKNSSFRSKLHLVDLAGSERQKKTKAEGDRLKEGININRGLLCLGNVISALGDDKKGGFVPYRDSKLTRLLQDSLGGNSHTLMIACVSPADSNLEETLNTLRYADRARKIKNKPIVNIDPQTAELNHLKQQVQQLQVLLLQAHGGTLPGSITVEPSENLQSLMEKNQSLVEENEKLSRGLSEAAGQTAQMLERIILTEQANEKMNAKLEELRQHAACKLDLQKLVETLEDQELKENVEIICNLQQLITQLSDETVACMAAAIDTAVEQEAQVETSPETSRSSDAFTTQHALRQAQMSKELVELNKALALKEALARKMTQNDSQLQPIQYQYQDNIKELELEVINLQKEKEELVLELQTAKKDANQAKLSERRRKRLQELEGQIADLKKKLNEQSKLLKLKESTERTVSKLNQEIRMMKNQRVQLMRQMKEDAEKFRQWKQKKDKEVIQLKERDRKRQYELLKLERNFQKQSNVLRRKTEEAAAANKRLKDALQKQREVADKRKETQSRGMEGTAARVKNWLGNEIEVMVSTEEAKRHLNDLLEDRKILAQDVAQLKEKKESGENPPPKLRRRTFSLTEVRGQVSESEDSITKQIESLETEMEFRSAQIADLQQKLLDAESEDRPKQRWENIATILEAKCALKYLIGELVSSKIQVSKLESSLKQSKTSCADMQKMLFEERNHFAEIETELQAELVRMEQQHQEKVLYLLSQLQQSQMAEKQLEESVSEKEQQLLSTLKCQDEELEKMREVCEQNQQLLRENEIIKQKLTLLQVASRQKHLPKDTLLSPDSSFEYVPPKPKPSRVKEKFLEQSMDIEDLKYCSEHSVNEHEDGDGDDDEGDDEEWKPTKLVKVSRKNIQGCSCKGWCGNKQCGCRKQKSDCGVDCCCDPTKCRNRQQGKDSLGTVERTQDSEGSFKLEDPTEVTPGLSFFNPVCATPNSKILKEMCDVEQVLSKKTPPAPSPFDLPELKHVATEYQENKAPGKKKKRALASNTSFFSGCSPIEEEAH

SEQ ID NO: 5620 - protein, 245 aa, Homo sapiens
MAVRASFENNCEIGCFAKLTNTYCLVAIGGSENFYSVFEGELSDTIPVVHASIAGCRIIGRMCVGNRHGLLVPNNTTDQELQHIRNSLPDTVQIRRVEERLSALGNVTTCNDYVALVHPDLDRETEEILADVLKVEVFRQTVADQVLVGSYCVFSNQGGLVHPKTSIEDQDELSSLLQVPLVAGTVNRGSEVIAAGMVVNDWCAFCGLDTTSTELSVVESVFKLNEAQPSTIATSMRDSLIDSLT

SEQ ID NO: 5621 - protein, 226 aa, Homo sapiens
MAVRASFENNCEIGCFAKLTNTYCLVAIGGSENFYRCGGSPGAYGGGEACAGVKSSGSGRVPAPLPRHHRVHVPTVCSRASSPIPSPWCTRLSPAAASSGACVWETEEILADVLKVEVFRQTVADQVLVGSYCVFSNQGGLVHPKTSIEDQDELSSLLQVPLVAGTVNRGSEVIAAGMVVNDWCAFCGLDTTSTELSVVESVFKLNEAQPSTIATSMRDSLIDSLT

SEQ ID NO: 5622 - protein, 348 aa, Homo sapiens
MAEKVLVTGGAGYIGSHTVLELLEAGYLPVVIDNFHNAFRGGGSLPESLRRVQELTGRSVEFEEMDILDQGALQRLFKKYSFMAVIHFAGLKAVGESVQKPLDYYRVNLTGTIQLLEIMKAHGVKNLVFSSSATVYGNPQYLPLDEAHPTGGCTNPYGKSKFFIEEMIRDLCQADKTWNAVLLRYFNPTGAHASGCIGEDPQGIPNNLMPYVSQVAIGRREALNVFGNDYDTEDGTGVRDYIHVVDLAKGHIAALRKLKEQCGCRIYNLGTGTGYSVLQMVQAMEKASGKKIPYKVVARREGDVAACYANPSLAQEELGWTAALGLDRMCEDLWRWQKQNPSGFGTQA

SEQ ID NO: 5623 - protein, 85 aa, Homo sapiens
MVKQIESKTAFQEALDAAGDKLVVVDFSATWCGPCKMIKPFFHDVASECEVKCMPTFQFFKKGQKVGEFSGANKEKLEATINELV

SEQ ID NO: 5624 - protein, 105 aa, Homo sapiens
MVKQIESKTAFQEALDAAGDKLVVVDFSATWCGPCKMIKPFFHSLSEKYSNVIFLEVDVDDCQDVASECEVKCMPTFQFFKKGQKVGEFSGANKEKLEATINELV

SEQ ID NO: 5625 - protein, 948 aa, Homo sapiens
MRWPQPGAAARLPPESPGPPESPGPPEREAAAARRWTGAEPQDCAPGSGRPEKPPQLSEDDIWLKSEGDNYSATLLEPAASSLSPDHKNMEIEVSVAECKSVPGITSTPHPMDHPSAFYSPPHNGLLTDHHESLDNDVAREIRYLDEVLEANCCDSAVDGTYNGTSSPEPGAVVLVGGLSPPVHEATQPEPTERTASRQAPPHIELSNSSPDPMAEAERTNGHSPSQPRDALGDSLQVPVSPSSTTSSRCSSRDGEFTLTTLKKEAKFELRAFHEDKKPSKLFEDDEHEKEQYCIRKVRPSEEMLELEKERRELIRSQAVKKNPGIAAKWWNPPQEKTIEEQLDEEHLESHKKYKERKERRAQQEQLLLQKQLQQQQQQPPSQLCTAPASSHERASMIDKAKEDIVTEQIDFSAARKQFQLMENSRQAVAKGQSTPRLFSIKPFYRPLGSVNSDKPLTNPRPPSVGGPPEDSGASAAKGQKSPGALETPSAAGSQGNTASQGKEGPYSEPSKRGPLSKLWAEDGEFTSARAVLTVVKDDDHGILDQFSRSVNVSLTQEELDSGLDELSVRSQDTTVLETLSNDFSMDNISDSGASNETTNALQENSLADFSLPQTPQTDNPSEGRGEGVSKSFSDHGFYSPSSTLGDSPLVDDPLEYQAGLLVQNAIQQAIAEQVDKAVSKTSRDGAEQQGPEATVEEAEAAAFGSEKPQSMFEPPQVSSPVQEKRDVLPKILPAEDRALRERGPPQPLPAVQPSGPINMEETRPEGSYFSKYSEAAELRSTASLLATQESDVMVGPFKLRSRKQRTLSMIEEEIRAAQEREEELKRQRQVLQSTQSPRTKNAPSLPSRTCYKTAPGKIEKVKPPPSPTTEGPSLQPDLAPEEAAGTQRPKNLMQTLMEDYETHKSKRRERMDDSSVLEATRVNRRKSALALRWEAGIYANQEEEDNE

SEQ ID NO: 5626 - protein, 1103 aa, Homo sapiens
MAEAELHKERLQAIAEKRKRQTEIEGKRQQLDEQILLLQHSKSKVLREKWLLQGIPAGTAEEEEARRRQSEEDEFRVKQLEDNIQRLEQEIQTLESEESQISAKEQIILEKLKETEKSFKDFQKGFSSTDGDAVNYISSQLPDLPILCSRTAEPSPGQDGTSRAAGVGWENVLLKEGESASNATETSGPDMTIKKPPQLSEDDIWLKSEGDNYSATLLEPAASSLSPDHKNMEIEVSVAECKSVPGITSTPHPMDHPSAFYSPPHNGLLTDHHESLDNDVAREIRYLDEVLEANCCDSAVDGTYNGTSSPEPGAVVLVGGLSPPVHEATQPEPTERTASRQAPPHIELSNSSPDPMAEAERTNGHSPSQPRDALGDSLQVPVSPSSTTSSRCSSRDGEFTLTTLKKEAKFELRAFHEDKKPSKLFEDDEHEKEQYCIRKVRPSEEMLELEKERRELIRSQAVKKNPGIAAKWWNPPQEKTIEEQLDEEHLESHKKYKERKERRAQQEQLLLQKQLQQQQQQPPSQLCTAPASSHERASMIDKAKEDIVTEQIDFSAARKQFQLMENSRQAVAKGQSTPRLFSIKPFYRPLGSVNSDKPLTNPRPPSVGGPPEDSGASAAKGQKSPGALETPSAAGSQGNTASQGKEGPYSEPSKRGPLSKLWAEDGEFTSARAVLTVVKDDDHGILDQFSRSVNVSLTQEELDSGLDELSVRSQDTTVLETLSNDFSMDNISDSGASNETTNALQENSLADFSLPQTPQTDNPSEGRGEGVSKSFSDHGFYSPSSTLGDSPLVDDPLEYQAGLLVQNAIQQAIAEQVDKAVSKTSRDGAEQQGPEATVEEAEAAAFGSEKPQSMFEPPQVSSPVQEKRDVLPKILPAEDRALRERGPPQPLPAVQPSGPINMEETRPEGSYFSKYSEAAELRSTASLLATQESDVMVGPFKLRSRKQRTLSMIEEEIRAAQEREEELKRQRQVLQSTQSPRTKNAPSLPSRTCYKTAPGKIEKVKPPPSPTTEGPSLQPDLAPEEAAGTQRPKNLMQTLMEDYETHKSKRRERMDDSSYTSKLLSCKVTSEVLEATRVNRRKSALALRWEAGIYANQEEEDNE

SEQ ID NO: 5627 - protein, 177 aa, Homo sapiens
MADQGEKENPMRELRIRKLCLNICVGESGDRLTRAAKVLEQLTGQTPVFSKARYTVRSFGIRRNEKIAVHCTVRGAKAEEILEKGLKVREYELRKNNFSDTGNFGFGIQEHIDLGIKYDPSIGIYGLDFYVVLGRPGFSIADKKRRTGCIGAKHRISKEEAMRWFQQKYDGIILPGK

SEQ ID NO: 5628 - protein, 183 aa, Homo sapiens
MAASPGPAGVGGAGAVYGSGSSGFALDSGLEIKTRSVEQTLLPLVSQITTLINHKDNTKKSDKTLQAIQRVGQAVNLAVGRFVKVGEAIANENWDLKEEINIACIEAKQAGETIAALTDITNLNHLESDGQITIFTDKTGVIKAARLLLSSVTKVLLLADRVVIKQIITSRNKRLTIYNLRHS

SEQ ID NO: 5629 - protein, 135 aa, Homo sapiens
MSSMAYSLYLFTRGEGPLKTSQDLIHQLEVFAAEGLKLTSSVQAFSKQLKDDDKLMLLLEINKLIPLCHQLQTVTKTSLQNKVFLKVDKCITKTRSMMALLVQLLSLCYKLLKKLQMENNGWVSVTNKDTMDSKT

SEQ ID NO: 5630 - protein, 718 aa, Homo sapiens
MAASPGPAGVGGAGAVYGSGSSGFALDSGLEIKTRSVEQTLLPLVSQITTLINHKDNTKKSDKTLQAIQRVGQAVNLAVGRFVKVGEAIANENWDLKEEINIACIEAKQAGETIAALTDITNLNHLESDGQITIFTDKTGVIKAARLLLSSVTKVLLLADRVVIKQIITSRNKVLATMERLEKVNSFQEFVQIFSQFGNEMVEFAHLSGDRQNDLKDEKKKAKMAAARAVLEKCTMMLLTASKTCLRHPNCESAHKNKEGVFDRMKVALDKVIEIVTDCKPNGETDISSISIFTGIKEFKMNIEALRENLYFQSKENLSVTLEVILERMEDFTDSAYTSHEHRERILELSTQARMELQQLISVWIQAQSKKTKSIAEELELSILKISHSLNELKKELHSTATQLAADLLKYHADHVVLKALKLTGVEGNLEALAEYACKLSEQKEQLVETCRLLRHISGTEPLEITCIHAEETFQVTGQQIISAAETLTLHPSSKIAKENLDVFCEAWESQISDMSTLLREINDVFEGRRGEKYGYLSLPKPMKNNANLKSLKPDKPDSEEQAKIAKLGLKLGLLTSDADCEIEKWEDQENEIVQYGRNMSSMAYSLYLFTRGEGPLKTSQDLIHQLEVFAAEGLKLTSSVQAFSKQLKDDDKLMLLLEINKLIPLCHQLQTVTKTSLQNKVFLKVDKCITKTRSMMALLVQLLSLCYKLLKKSETRY

SEQ ID NO: 5631 - protein, 262 aa, Homo sapiens
MKCEHCTRKECSKKTKTDDQENVSADAPSPAQENGEKGEFHKLADAKIFLSDCLACDSCMTAEEGVQLSQQNAKDFFRVLNLNKKCDTSKHKVLVVSVCPQSLPYFAAKFNLSVTDASRRLCGFLKSLGVHYVFDTTIAADFSILESQKEFVRRYRQHSEEERTLPMLTSACPGWVRYAERVLGRPITAHLCTAKSPQQVMGSLVKDYFARQQNLSPEKIFHVIVAPCYDKKLEALQESLPPALHGSRGADCVLTSGESQAW

SEQ ID NO: 5632 - protein, 137 aa, Homo sapiens
MGAPTLPPAWQPFLKDHRISTFKNWPFLEGCACTPERMAEAGFIHCPTENEPDLAQCFFCFKELEGWEPDDDPMQRKPTIRRKNLRKLRRKCAVPSSSWLPWIEASGRSCLVPEWLHHFQGLFPGATSLPVGPLAMS

SEQ ID NO: 5633 - protein, 143 aa, Homo sapiens
MSGRGKTGGKARAKAKSRSSRAGLQFPVGRVHRLLRKGHYAERVGAGAPVYLAAVLEYLTAEILELAGNAARDNKKTRIIPRHLQLAIRNDEELNKLLGGVTIAQGGVLPNIQAVLLPKKTSATVGPKAPSGGKKATQASQEY

SEQ ID NO: 5634 - protein, 239 aa, Homo sapiens
MPKSKRDKKVSLTKTAKKGLELKQNLIEELRKCVDTYKYLFIFSVANMRNSKLKDIRNAWKHSRMFFGKNKVMMVALGRSPSDEYKDNLHQVSKRLRGEVGLLFTNRTKEEVNEWFTKYTEMDYARAGNKAAFTVSLDPGPLEQFPHSMEPQLRQLGLPTALKRGVVTLLSDYEVCKEGDVLTPEQARVLKLFGYEMAEFKVTIKYMWDSQSGRFQQMGDDLPESASESTEESDSEDDD

SEQ ID NO: 5635 - protein, 459 aa, Homo sapiens
MKRKSERRSSWAAAPPCSRRCSSTSPGVKKIRSSTQQDPRRRDPQDDVYLDITDRLCFAILYSRPKSASNVHYFSIDNELEYENFYADFGPLNLAMVYRYCCKINKKLKSITMLRKKIVHFTGSDQRKQANAAFLVGCYMVIYLGRTPEEAYRILIFGETSYIPFRDAAYGSCNFYITLLDCFHAVKKAMQYGFLNFNSFNLDEYEHYEKAENGDLNWIIPDRFIAFCGPHSRARLESGYHQHSPETYIQYFKNHNVTTIIRLNKRMYDAKRFTDAGFDHHDLFFADGSTPTDAIVKEFLDICENAEGAIAVHCKAGLGRTGTLIACYIMKHYRMTAAETIAWVRICRPGSVIGPQQQFLVMKQTNLWLEGDYFRQKLKGQENGQHRAAFSKLLSGVDDISINGVENQDQQEPEPYSDDDEINGVTQGDRLRALKSRRQSKTNAIPLTLSISRTKTVLR

SEQ ID NO: 5636 - protein, 498 aa, Homo sapiens
MKRKSERRSSWAAAPPCSRRCSSTSPGVKKIRSSTQQDPRRRDPQDDVYLDITDRLCFAILYSRPKSASNVHYFSIDNELEYENFYADFGPLNLAMVYRYCCKINKKLKSITMLRKKIVHFTGSDQRKQANAAFLVGCYMVIYLGRTPEEAYRILIFGETSYIPFRDAAYGSCNFYITLLDCFHAVKKAMQYGFLNFNSFNLDEYEHYEKAENGDLNWIIPDRFIAFCGPHSRARLESGYHQHSPETYIQYFKNHNVTTIIRLNKRMYDAKRFTDAGFDHHDLFFADGSTPTDAIVKEFLDICENAEGAIAVHCKAGLGRTGTLIACYIMKHYRMTAAETIAWVRICRPGSVIGPQQQFLVMKQTNLWLEGDYFRQKLKGQENGQHRAAFSKLLSGVDDISINGVENQDQQEPEPYSDDDEINGVTQGDRLRALKSRRQSKTNAIPLTVILQSSVQSCKTSEPNISGSAGITKRTTRSASRKSSVKSLSISRTKTVLR

SEQ ID NO: 5637 - protein, 461 aa, Homo sapiens
MSREGAGAALVAEVIKDRLCFAILYSRPKSASNVHYFSIDNELEYENFYADFGPLNLAMVYRYCCKINKKLKSITMLRKKIVHFTGSDQRKQANAAFLVGCYMVIYLGRTPEEAYRILIFGETSYIPFRDAAYGSCNFYITLLDCFHAVKKAMQYGFLNFNSFNLDEYEHYEKAENGDLNWIIPDRFIAFCGPHSRARLESGYHQHSPETYIQYFKNHNVTTIIRLNKRMYDAKRFTDAGFDHHDLFFADGSTPTDAIVKEFLDICENAEGAIAVHCKAGLGRTGTLIACYIMKHYRMTAAETIAWVRICRPGSVIGPQQQFLVMKQTNLWLEGDYFRQKLKGQENGQHRAAFSKLLSGVDDISINGVENQDQQEPEPYSDDDEINGVTQGDRLRALKSRRQSKTNAIPLTVILQSSVQSCKTSEPNISGSAGITKRTTRSASRKSSVKSLSISRTKTVLR

SEQ ID NO: 5638 - protein, 350 aa, Homo sapiens
MIRGFEAPMAENPPPPPPPVIFCHDSPKRVLVSVIRTTPIKPTCGGGGEPEPPPPLIPTSPGFSDFMVYPWRWGENAHNVTLSPGAAGAAASAALPAAAAAEHSGLRGRGAPPPAASASAAASGGEDEEEASSPDSGHLKDGIRRGRPRADTVRDLINEGEHSSSRIRCNICNRVFPREKSLQAHKRTHTGERPYLCDYPDCGKAFVQSGQLKTHQRLHTGEKPFVCSENGCLSRFTHANRHCPKHPYARLKREEPTDTLSKHQAADNKAAAEWLARYWEMREQRTPTLKGKLVQKADQEQQDPLEYLQSDEEDDEKRGAQRRLQEQRERLHGALALIELANLTGAPLRQ

SEQ ID NO: 5639 - protein, 338 aa, Homo sapiens [sequence omitted]

SEQ ID NO: 5640 - protein, 288 aa, Homo sapiens
MDAELAEVRALQAEIAALRRACEDPPAPWEEKSRVQKSFQAIHQFNLEGWKSSKDLKNQLGHLESELSFLSTLTGINIRNHSKQTEDLTSTEMTEKSIRKVLQRHRLSGNCHMVTFQLEFQILEIQNKERLSSAVTDLNIIMEPTECSELSEFVSRAEERKDLFMFFRSLHFFVEWFEYRKRTFKHLKEKYPDAVYLSEGPSSCSMGIRSASRPGFELVIVWRIQIDEDGKVFPKLDLLTKVPQRALELDKNRAIETAPLSFRTLVGLLGIEAALESLIKSLCAEENN

SEQ ID NO: 5641 - protein, 1137 aa, Homo sapiens
MFDCWRFILCKRPGSNSYSSPQRPNEAKKEETDHQIDVSDVIRLVQDTPEATAMATDEIMHQDIVPLCAADIQDQLKKRFAYLSGGRGQDGSPVITFPDYPAFSEIPDKEFQNVMTYLTSIPSLQDAGIGFILVIDRRRDKWTSVKASVLRIAASFPANLQLVLVLRPTGFFQRTLSDIAFKFNRDDFKMKVPVIMLSSVPDLHGYIDKSQLTEDLGGTLDYCHSRWLCQRTAIESFALMVKQTAQMLQSFGTELAETELPNDVQSTSSVLCAHTEKKDKAKEDLRLALKEGHSVLESLRELQAEGSEPSVNQDQLDNQATVQRLLAQLNETEAAFDEFWAKHQQKLEQCLQLRHFEQGFREVKAILDAASQKIATFTDIGNSLAHVEHLLRDLASFEEKSGVAVERARALSLDGEQLIGNKHYAVDSIRPKCQELRHLCDQFSAEIARRRGLLSKSLELHRRLETSMKWCDEGIYLLASQPVDKCQSQDGAEAALQEIEKFLETGAENKIQELNAIYKEYESILNQDLMEHVRKVFQKQASMEEVFHRRQASLKKLAARQTRPVQPVAPRPEALAKSPCPSPGIRRGSENSSSEGGALRRGPYRRAKSEMSESRQGRGSAGEEEESLAILRRHVMSELLDTERAYVEELLCVLEGYAAEMDNPLMAHLLSTGLHNKKDVLFGNMEEIYHFHNRIFLRELENYTDCPELVGRCFLERMEDFQIYEKYCQNKPRSESLWRQCSDCPFFQECQRKLDHKLSLDSYLLKPVQRITKYQLLLKEMLKYSRNCEGAEDLQEALSSILGILKAVNDSMHLIAITGYDGNLGDLGKLLMQGSFSVWTDHKRGHTKVKELARFKPMQRHLFLHEKAVLFCKKREENGEGYEKAPSYSYKQSLNMAAVGITENVKGDAKKFEIWYNAREEVYIVQAPTPEIKAAWVNEIRKVLTSQLQACREASQHRALEQSQSLPLPAPTSTSPSRGNSRNIKKLEERKTDPLSLEGYVSSAPLTKPPEKGKGWSKTSHSLEAPEDDGGWSSAEEQINSSDAEEDGGLGPKKLVPGKYTVVADHEKGGPDALRVRSGDVVELVQEGDEGLWYVRDPTTGKEGWVPASSLSVRLGPSGSAQCLSSSGKAHVPRAHP

SEQ ID NO: 5642 - protein, 641 aa, Homo sapiens
MAKAAAIGIDLGTTYSCVGVFQHGKVEIIANDQGNRTTPSYVAFTDTERLIGDAAKNQVALNPQNTVFDAKRLIGRKFGDPVVQSDMKHWPFQVINDGDKPKVQVSYKGETKAFYPEEISSMVLTKMKEIAEAYLGYPVTNAVITVPAYFNDSQRQATKDAGVIAGLNVLRIINEPTAAAIAYGLDRTGKGERNVLIFDLGGGTFDVSILTIDDGIFEVKATAGDTHLGGEDFDNRLVNHFVEEFKRKHKKDISQNKRAVRRLRTACERAKRTLSSSTQASLEIDSLFEGIDFYTSITRARFEELCSDLFRSTLEPVEKALRDAKLDKAQIHDLVLVGGSTRIPKVQKLLQDFFNGRDLNKSINPDEAVAYGAAVQAAILMGDKSENVQDLLLLDVAPLSLGLETAGGVMTALIKRNSTIPTKQTQIFTTYSDNQPGVLIQVYEGERAMTKDNNLLGRFELSGIPPAPRGVPQIEVTFDIDANGILNVTATDKSTGKANKITITNDKGRLSKEEIERMVQEAEKYKAEDEVQRERVSAKNALESYAFNMKSAVEDEGLKGKISEADKKKVLDKCQEVISWLDANTLAEKDEFEHKRKELEQVCNPIISGLYQGAGGPGPGGFGAQGPKGGSGSGPTIEEVD

SEQ ID NO: 5643 - protein, 155 aa, Homo sapiens
MHVESSAEPGKAPKHAGQKKTYRAIAETYAFLPREAVTRFLMSCTECQKRMHFNSNGLEPKENEPPSPLVSGIIDYNMPLTSTYLKQMKLRVMNSQEQDETSVSSEDFDMSDSTWMSADPHLASSLSPSQDERMRSPQNLHSQEDGGVCLQGPTA

SEQ ID NO: 5644 - protein, 79 aa, Homo sapiens
MAHKQIYYSDKYFDEHYEYRHVMLPRELSKQVPKTHLMSEEEWRRLGVQQSLGWVHYMIHEPEPHILLFRRPLPKDQQK

SEQ ID NO: 5645 - protein, 1338 aa, Homo sapiens
MASPPRHGPPGPASGDGPNLNNNNNNNNHSVRKCGYLRKQKHGHKRFFVLRGPGAGGDEATAGGGSAPQPPRLEYYESEKKWRSKAGAPKRVIALDCCLNINKRADAKHKYLIALYTKDEYFAVAAENEQEQEGWYRALTDLVSEGRAAAGDAPPAAAPAASCSASLPGALGGSAGAAGAEDSYGLVAPATAAYREVWQVNLKPKGLGQSKNLTGVYRLCLSARTIGFVKLNCEQPSVTLQLMNIRRCGHSDSFFFIEVGRSAVTGPGELWMQADDSVVAQNIHETILEAMKALKELFEFRPRSKSQSSGSSATHPISVPGARRHHHLVNLPPSQTGLVRRSRTDSLAATPPAAKCSSCRVRTASEGDGGAAAGAAAAGARPVSVAGSPLSPGPVRAPLSRSHTLSGGCGGRGSKVALLPAGGALQHSRSMSMPVAHSPPAATSPGSLSSSSGHGSGSYPPPPGPHPPLPHPLHHGPGQRPSSGSASASGSPSDPGFMSLDEYGSSPGDLRAFCSHRSNTPESIAETPPARDGGGGGEFYGYMTMDRPLSHCGRSYRRVSGDAAQDLDRGLRKRTYSLTTPARQRPVPQPSSASLDEYTLMRATFSGSAGRLCPSCPASSPKVAYHPYPEDYGDIEIGSHRSSSSNLGADDGYMPMTPGAALAGSGSGSCRSDDYMPMSPASVSAPKQILQPRAAAAAAAAVPSAGPAGPAPTSAAGRTFPASGGGYKASSPAESSPEDSGYMRMWCGSKLSMEHADGKLLPNGDYLNVSPSDAVTTGTPPDFFSAALHPGGEPLRGVPGCCYSSLPRSYKAPYTCGGDSDQYVLMSSPVGRILEEERLEPQATPGPSQAASAFGAGPTQPPHPVVPSPVRPSGGRPEGFLGQRGRAVRPTRLSLEGLPSLPSMHEYPLPPEPKSPGEYINIDFGEPGARLSPPAPPLLASAASSSSLLSASSPASSLGSGTPGTSSDSRQRSPLSDYMNLDFSSPKSPKPGAPSGHPVGSLDGLLSPEASSPYPPLPPRPSASPSSSLQPPPPPPAPGELYRLPPASAVATAQGPGAASSLSSDTGDNGDYTEMAFGVAATPPQPIAAPPKPEAARVASPTSGVKRLSLMEQVSGVEAFLQASQPPDPHRGAKVIRADPQGGRRRHSSETFSSTTTVTPVSPSFAHNPKRHNSASVENVSLRKSSEGGVGVGPGGGDEPPTSPRQLQPAPPLAPQGRPWTPGQPGGLVGCPGSGGSPMRRETSAGFQNGLNYIAIDVREEPGLPPQPQPPPPPLPQPGDKSSWGRTRSLGGLISAVGVGSTGGGCGGPGPGALPPANTYASIDFLSHHLKEATIVKE

SEQ ID NO: 5646 - protein, 879 aa, Homo sapiens
MDPTAGSKKEPGGGAATEEGVNRIAVPKPPSIEEFSIVKPISRGAFGKVYLGQKGGKLYAVKVVKKADMINKNMTHQVQAERDALALSKSPFIVHLYYSLQSANNVYLVMEYLIGGDVKSLLHIYGYFDEEMAVKYISEVALALDYLHRHGIIHRDLKPDNMLISNEGHIKLTDFGLSKVTLNRDINMMDILTTPSMAKPRQDYSRTPGQVLSLISSLGFNTPIAEKNQDPANILSACLSETSQLSQGLVCPMSVDQKDTTPYSSKLLKSCLETVASNPGMPVKCLTSNLLQSRKRLATSSASSQSHTFISSVESECHSSPKWEKDCQESDEALGPTMMSWNAVEKLCAKSANAIETKGFNKKDLELALSPIHNSSALPTTGRSCVNLAKKCFSGEVSWEAVELDVNNINMDTDTSQLGFHQSNQWAVDSGGISEEHLGKRSLKRNFELVDSSPCKKIIQNKKTCVEYKHNEMTNCYTNQNTGLTVEVQDLKLSVHKSQQNDCANKENIVNSFTDKQQTPEKLPIPMIAKNLMCELDEDCEKNSKRDYLSSSFLCSDDDRASKNISMNSDSSFPGISIMESPLESQPLDSDRSIKESSFEESNIEDPLIVTPDCQEKTSPKGVENPAVQESNQKMLGPPLEVLKTLASKRNAVAFRSFNSHINASNNSEPSRMNMTSLDAMDISCAYSGSYPMAITPTQKRRSCMPHQQTPNQIKSGTPYRTPKSVRRGVAPVDDGRILGTPDYLAPELLLGRAHGPAVDWWALGVCLFEFLTGIPPFNDETPQQVFQNILKRDIPWPEGEEKLSDNAQSAVEILLTIDDTKRAGMKELKRHPLFSDVDWENLQHQTMPFIPQPDDETDTSYFEARNTAQHLTVSGFSL

SEQ ID NO: 5647 - protein, 878 aa, Homo sapiens
MDPTAGSKKEPGGGAATEEGVNRIAVPKPPSIEEFSIVKPISRGAFGKVYLGQKGGKLYAVKVVKKADMINKNMTHQVQAERDALALSKSPFIVHLYYSLQSANNVYLVMEYLIGGDVKSLLHIYGYFDEEMAVKYISEVALALDYLHRHGIIHRDLKPDNMLISNEGHIKLTDFGLSKVTLNRDINMMDILTTPSMAKPRQDYSRTPGQVLSLISSLGFNTPIAEKNQDPANILSACLSETSQLSQGLVCPMSVDQKDTTPYSSKLLKSCLETVASNPGMPVKCLTSNLLQSRKRLATSSASSQSHTFISSVESECHSSPKWEKDCQESDEALGPTMMSWNAVEKLCAKSANAIETKGFNKKDLELALSPIHNSSALPTTGRSCVNLAKKCFSGEVSWEAVELDVNNINMDTDTSQLGFHQSNQWAVDSGGISEEHLGKRSLKRNFELVDSSPCKKIIQNKKTCVEYKHNEMTNCYTNQNTGLTVEVQDLKLSVHKSQQNDCANKENIVNSFTDKQQTPEKLPIPMIAKNLMCELDEDCEKNSKRDYLSSSFLCSDDDRASKNISMNSDSSFPGISIMESPLESQPLDSDRSIKESSFEESNIEDPLIVTPDCQEKTSPKGVENPAVQESNQKMLGPPLEVLKTLASKRNAVAFRSFNSHINASNNSEPSRMNMTSLDAMDISCAYSGSYPMAITPTQKRRSCMPHQTPNQIKSGTPYRTPKSVRRGVAPVDDGRILGTPDYLAPELLLGRAHGPAVDWWALGVCLFEFLTGIPPFNDETPQQVFQNILKRDIPWPEGEEKLSDNAQSAVEILLTIDDTKRAGMKELKRHPLFSDVDWENLQHQTMPFIPQPDDETDTSYFEARNTAQHLTVSGFSL

SEQ ID NO: 5648 - protein, 72 aa, Homo sapiens
MNLPHLMSLASHLASHGFFCLRFTCKGLNIVHRIKAYKSVLNYLKTSGEYKLAGVFLGELVGESGTENASSP

SEQ ID NO: 5649 - protein, 113 aa, Homo sapiens
MSHTEVKLKIPFGNKLLDAVCLVPNKSLTYGIILTHGASGDMNLPHLMSLASHLASHGFFCLRFTCKGLNIVHRIKAYKSVLNYLKTSGEYKLAGVFLGELVGESGTENASSP

SEQ ID NO: 5650 - protein, 441 aa, Homo sapiens
MSPISGASPSWRAAPKASDLLGARGPGGTFQGRDLRGGAHASSSSLNPMPPSQLQLSTVDAHARTPVLQVHPLESPAMISLTPPTTATGVFSLKARPGLPPGINVASLEWVSREPALLCTFPNPSAPRKDSTLSAVPQSSYPLLANGVCKWPGCEKVFEEPEDFLKHCQADHLLDEKGRAQCLLQREMVQSLEQQLVLEKEKLSAMQAHLAGKMALTKASSVASSDKGSCCIVAAGSQGPVVPAWSGPREAPDSLFAVRRHLWGSHGNSTFPEFLHNMDYFKFHNMRPPFTYATLIRWAILEAPEKQRTLNEIYHWFTRMFAFFRNHPATWKVSSSEVAVTGMASSAIAAQSGQAWVWAHRHIGEERDVGCWWWLLASEVDAHLLPVPGLPQNAIRHNLSLHKCFVRVESEKGAVWTVDELEFRKKRSQRPSRCSNPTPGP

SEQ ID NO: 5651 - protein, 396 aa, Homo sapiens
MPNPRPGKPSAPSLALGPSPGASPSWRAAPKASDLLGARGPGGTFQGRDLRGGAHASSSSLNPMPPSQLQLSTVDAHARTPVLQVHPLESPAMISLTPPTTATGVFSLKARPGLPPGINVASLEWVSREPALLCTFPNPSAPRKDSTLSAVPQSSYPLLANGVCKWPGCEKVFEEPEDFLKHCQADHLLDEKGRAQCLLQREMVQSLEQQLVLEKEKLSAMQAHLAGKMALTKASSVASSDKGSCCIVAAGSQGPVVPAWSGPREAPDSLFAVRRHLWGSHGNSTFPEFLHNMDYFKFHNMRPPFTYATLIRWAILEAPEKQRTLNEIYHWFTRMFAFFRNHPATWKNAIRHNLSLHKCFVRVESEKGAVWTVDELEFRKKRSQRPSRCSNPTPGP

SEQ ID NO: 5652 - protein, 431 aa, Homo sapiens
MPNPRPGKPSAPSLALGPSPGASPSWRAAPKASDLLGARGPGGTFQGRDLRGGAHASSSSLNPMPPSQLQLPTLPLVMVAPSGARLGPLPHLQALLQDRPHFMHQLSTVDAHARTPVLQVHPLESPAMISLTPPTTATGVFSLKARPGLPPGINVASLEWVSREPALLCTFPNPSAPRKDSTLSAVPQSSYPLLANGVCKWPGCEKVFEEPEDFLKHCQADHLLDEKGRAQCLLQREMVQSLEQQLVLEKEKLSAMQAHLAGKMALTKASSVASSDKGSCCIVAAGSQGPVVPAWSGPREAPDSLFAVRRHLWGSHGNSTFPEFLHNMDYFKFHNMRPPFTYATLIRWAILEAPEKQRTLNEIYHWFTRMFAFFRNHPATWKNAIRHNLSLHKCFVRVESEKGAVWTVDELEFRKKRSQRPSRCSNPTPGP

SEQ ID NO: 5653 - protein, 415 aa, Homo sapiens
MASRWWRWRRGCSWKPAARSPGPGSPGRAGPLGPSAAAEVRAQVHRRKGLDLSQIPYINLVKHLTSACPNVCRISRFHHTTPDSKTHSGEKYTDPFKLGWRDLKGLYEDIRKELLISTSELKEMSEYYFDGKGKAFRPIIVALMARACNIHHNNSRHVQASQRAIALIAEMIHTASLVHDDVIDDASSRRGKHTVNKIWGEKKAVLAGDLILSAASIALARIGNTTVISILTQVIEDLVRGEFLQLGSKENENERFAHYLEKTFKKTASLIANSCKAVSVLGCPDPVVHEIAYQYGKNVGIAFQLIDDVLDFTSCSDQMGKPTSADLKLGLATGPVLFACQQFPEMNAMIMRRFSLPGDVDRARQYVLQSDGVQQTTYLAQQYCHEAIREISKLRPSPERDALIQLSEIVLTRDK

SEQ ID NO: 5654 - protein, 345 aa, Homo sapiens
MLPCFQLLRIGGGRGGDLYTFHPPAGAGCTYRLGHRADLCDVALRPQQEPGLISGIHAELHAEPRGDDWRVSLEDHSSQGTLVNNVRLPRGHRLELSDGDLLTFGPEGPPGTSPSEFYFMFQQVRVKPQDFAAITIPRSRGEARVGAGFRPMLPSQGAPQRPLSTFSPAPKATLILNSIGSLSKLRPQPLTFSPSWGGPKSLPVPAPPGEMGTTPSAPPQRNRRKSVHRVLAELDDESEPPENPPPVLMEPRKKLRVDKAPLTPTGNRRGRPRKYPVSAPMAPPAVGGGEPCAAPCCCLPQEETVAWVQCDGCDVWFHVACVGCSIQAAREADFRCPGCRAGIQT

SEQ ID NO: 5655 - protein, 138 aa, Homo sapiens
MCHSRSCHPTMTILQAPTPAPSTIPGPRRGSGPEIFTFDPLPEPAAAPAGRPSASRGHRKRSRRVLYPRVVSIAEVGIRGVRCPGVTGERPDSRGLDLTCLLFCLPLGPAPAASRGTEPSQKASLSAAHHRLLPDPDG

SEQ ID NO: 5656 - protein, 427 aa, Homo sapiens
MFFTCGPNEAMVVSGFCRSPPVMVAGGRVFVLPCIQQIQRISLNTLTLNVKSEKVYTRHGVPISVTGIAQVKIQGQNKEMLAAACQMFLGKTEAEIAHIALETLEGHQRAIMAHMTVEEIYKDRQKFSEQVFKVASSDLVNMGISVVSYTLKDIHDDQDYLHSLGKARTAQVQKDARIGEAEAKRDAGIREAKAKQEKVSAQYLSEIEMAKAQRDYELKKAAYDIEVNTRRAQADLAYQLQVAKTKQQIEEQRVQVQVVERAQQVAVQEQEIARREKELEARVRKPAEAERYKLERLAEAEKSQLIMQAEAEAASVRMRGEAEAFAIGARARAEAEQMAKKAEAFQLYQEAAQLDMLLEKLPQVAEEISGPLTSANKITLVSSGSGTMGAAKVTGEVLDILTRLPESVERLTGVSISQVNHKPLRTA

SEQ ID NO: 5657 - protein, 197 aa, Homo sapiens
MANCERTFIAIKPDGVQRGLVGEIIKRFEQKGFRLVGLKFMQASEDLLKEHYVDLKDRPFFAGLVKYMHSGPVVAMVWEGLNVVKTGRVMLGETNPADSKPGTIRGDFCIQVGRTMANLERTFIAIKPDGVQRGLVGEIIKRFEQKGFRLVAMKFLRASEEHLKQHYIDLKDRPFFPGLVKYMNSGPVVAMEHHSWQ

SEQ ID NO: 5658 - protein, 372 aa, Homo sapiens
MDSVRSGPFGQIFRPDNFVFGQSGAGNNWAKGHYTEGAELVDSVLDVVRKEAESCDCLQGFQLTHSLGGGTGSGMGTLLISKIREEYPDRIMNTFSVVPSPKVSDTVVEPYNATLSVHQLVENTDETYCIDNEALYDICFRTLKLTTPTYGDLNHLVSATMSGVTTCLRFPGQLNADLRKLAVNMVPFPRLHFFMPGFAPLTSRGSQQYRALTVPELTQQVFDAKNMMAACDPRHGRYLTVAAVFRGRMSMKEVDEQMLNVQNKNSSYFVEWIPNNVKTAVCDIPPRGLKMAVTFIGNSTAIQELFKRISEQFTAMFRRKAFLHWYTGEGMDEMEFTEAESNMNDLVSEYQQYQDATAEEEEDFGEEAEEEA

SEQ ID NO: 5659 - protein, 167 aa, Homo sapiens
MPKRKKQNHHQPPTQQQPPLPEREETGDEEDGSPIALHRGPPGSRGPLIPPLLSLPPPPWGRGPIRRGLGPRSSPYGRGWWGVNAEPPFPGPGHGGPTRGSFHKEQRNPRRLKSWSLIKNTCPPKDDPQVMEDKSDRPVCRHFAKKGHCRYEDLCAFYHPGVNGPPL

SEQ ID NO: 5660 - protein, 188 aa, Homo sapiens
MPKRKKQNHHQPPTQQQPPLPEREETGDEEDGSPIGPPSLLGPPPMANGKPGDPKSALHRGPPGSRGPLIPPLLSLPPPPWGRGPIRRGLGPRSSPYGRGWWGVNAEPPFPGPGHGGPTRGSFHKEQRNPRRLKSWSLIKNTCPPKDDPQVMEDKSDRPVCRHFAKKGHCRYEDLCAFYHPGVNGPPL

SEQ ID NO: 5661 - protein, 634 aa, Homo sapiens
MWKASAGHAVSIAQDDAGADDWETDPDFVNDVSEKEQRWGAKTVQGSGHQEHINIHKLRENVFQEHQTLKEKELETGPKASHGYGGKFGVEQDRMDKSAVGHEYQSKLSKHCSQVDSVRGFGGKFGVQMDRVDQSAVGFEYQGKTEKHASQKDYSSGFGGKYGVQADRVDKSAVGFDYQGKTEKHESQRDYSKGFGGKYGIDKDKVDKSAVGFEYQGKTEKHESQKDYVKGFGGKFGVQTDRQDKCALGWDHQEKLQLHESQKDYSKGFGGKYGVQKDRMDKNASTFEDVTQVSSAYQKTVPVEAVTSKTSNIRANFENLAKEKEQEDRRKAEAERAQRMAKERQEQEEARRKLEEQARAKTQTPPVSPAPQPTEERLPSSPVYEDAASFKAELSYRGPVSGTEPEPVYSMEAADYREASSQQGLAYATEAVYESAEAPGHYPAEDSTYDEYENDLGITAVALYDYQAAGDDEISFDPDDIITNIEMIDDGWWRGVCKGRFRELAFSCVRVALVPIKCSRDLPGQARGLRSALWRVGRKDCPRRGASSRVSLLGRRGLGLMEVNPELSHPEHRSCHVRWEICLCHTVTARRIRKLISFLRSREAGPVPSCSQVGGVSFQKVTWKCLGTWVPECP

SEQ ID NO: 5662 - protein, 370 aa, Homo sapiens
MDAPRQVVNFGPGPAKLPHSVLLEIQKELLDYKGVGISVLEMSHRSSDFAKIINNTENLVRELLAVPDNYKVIFLQGGGCGQFSAVPLNLIGLKAGRCADYVVTGAWSAKAAEEAKKFGTINIVHPKLGSYTKIPDPSTWNLNPDASYVYYCANETVHGVEFDFIPDVKGAVLVCDMSSNFLSKPVDVSKFGVIFAGAQKNVGSAGVTVVIVRDDLLGFALRECPSVLEYKVQAGNSSLYNTPPCFSIYVMGLVLEWIKNNGGAAAMEKLSSIKSQTIYEIIDNSQGFYVCPVEPQNRSKMNIPFRIGNAKGDDALEKRFLDKALELNMLSLKGHRSVGGIRASLYNAVTIEDVQKLAAFMKKFLEMHQL

SEQ ID NO: 5663 - protein, 159 aa, Homo sapiens
MELPAVNLKCASSSVPRNHPHVILLGHWLLTTCFWRHFSAKPRLETIELTCALCKLRSAAHRATAGLHCILRLLCLGQLHHPGLGRVGCGSAGLHRRHKHVSGWLAGHHLPGHRAHQHLLPAGQPHGHGPLWRGHGHPQLAAQAALLLLRLPHVPGARG

SEQ ID NO: 5664 - protein, 111 aa, Homo sapiens
MELPAVNLKGLHCILRLLCLGQLHHPGLGRVGCGSAGLHRRHKHVSGWLAGHHLPGHRAHQHLLPAGQPHGHGPLWRGHGHPQLAAQAALLLLRLPHVPGARGFPWVFSGP

SEQ ID NO: 5665 - protein, 236 aa, Homo sapiens
MLPDCLSAEGELRCRRLLAGATARLRARPASAAVLVPLCSVRGVPALLYTLRSSRLTGRHKGDVSFPGGKCDPADQDVVHTALRETREELGLAVPEEHVWGLLRPVYDPQKATVVPVLAGVGPLDPQSLRPNSEEVDEVFALPLAHLLQTQNQGYTHFCRGGHFRYTLPVFLHGPHRVWGLTAVITEFALQLLAPGTYQPRLAGLTCSGAEGLARPKQPLASPCQASSTPGLNKGL

SEQ ID NO: 5666 - protein, 74 aa, Homo sapiens
MGRRSSKCCCIYEKPRAFGESSTESDEEEEEGCGHTHCVRGHRKGRRRATLGPTPTTPPQPPDPSQPPPGPMQH

SEQ ID NO: 5667 - protein, 273 aa, Homo sapiens
MTEQMTLRGTLKGHNGWVTQIATTPQFPDMILSASRGSWDGTLRLWDLTTGTTTRRFVGHTKDVLSVAFSSDNRQIVSGSRDKTIKLWNTLGVCKYTVQDESHSEWVSCVRFSPNSSNPIIVSCGWDKLVKVWNLANCKLKTNHIGHTGYLNTVTVSPDGSLCASGGKDGQAMLWDLNEGKHLYTLDGGDIINALCFSPNRYWLCAATGPSIKIWDLEGKIIVDELKQEVISTSSKAEPPQCTSLAWSADGQTLFAGYTDNLVRVWQVTIGTR

SEQ ID NO: 5668 - protein, 194 aa, Homo sapiens
MAKRRAAEPVTFHVPWKRLLLCDFAEQPPPPPLWIRPPGVAHAGQLLGVPEQHRKRKIDAGTMAEPSASPSKRRDSGDNSAPSGQEREDHGLETGDPPLPPPPVLPGPGEELPGARLPGGGGDDGAGRAGPPRGDWGVASRQHNEEFWQYNTFQYWRNPLPPIDLADIEDLSEDTLTEATLQGRNEGAEVDMES

SEQ ID NO: 5669 - protein, 302 aa, Homo sapiens
MEPGPDGPAASGPAAIREGWFRETCSLWPGQALSLQVEQLLHHRRSRYQDILVFRSKTYGNVLVLDGVIQCTERDEFSYQEMIANLPLCSHPNPRKVLIIGGGDGGVLREVVKHPSVESVVQCEIDEDVIQVSKKFLPGMAIGYSSSKLTLHVGDGFEFMKQNQDAFDVIITDSSDPMGPAESLFKESYYQLMKTALKEDGVLCCQGECQWLHLDLIKEMRQFCQSLFPVVAYAYCTIPTYPSGQIGFMLCSKNPSTNFQEPVQPLTQQQVAQMQLKYYNSDVHRAAFVLPEFARKALNDVS

SEQ ID NO: 5670 - protein, 143 aa, Homo sapiens
MTKMYKGFQALGDAADIRFVYTPAMESVCGYFHRSHNRSEEFLIAGKLQDGLLHITTCSFVAPWNSLSLAQRRGFTKTYTVGCEECTVFPCLSIPCKLQSGTHCLWTDQLLQGSEKGFQSRHLACLPREPGLCTWQSLRSQIA

SEQ ID NO: 5671 - protein, 165 aa, Homo sapiens
MAPNASCLCVHVRSEEWDLMTFDANPYDSVKKIKEHVRSKTKVPVQDQVLLLGSKILKPRRSLSSYGIDKEKTIHLTLKVVKPSDEELPLFLVESGDEAKRHLLQVRRSSSVAQVKAMIETKTGIIPETQIVTCNGKRLEDGKMMADYGIRKGNLLFLACYCIGG

SEQ ID NO: 5672 - protein, 1190 aa, Homo sapiens
MPVRGDRGFPPRRELSGWLRAPGMEELIWEQYTVTLQKDSKRGFGIAVSGGRDNPHFENGETSIVISDVLPGGPADGLLQENDRVVMVNGTPMEDVLHSFAVQQLRKSGKVAAIVVKRPRKVQVAALQASPPLDQDDRAFEVMDEFDGRSFRSGYSERSRLNSHGGRSRSWEDSPERGRPHERARSRERDLSRDRSRGRSLERGLDQDHARTRDRSRGRSLERGLDHDFGPSRDRDRDRSRGRSIDQDYERAYHRAYDPDYERAYSPEYRRGARHDARSRGPRSRSREHPHSRSPSPEPRGRPGPIGVLLMKSRANEEYGLRLGSQIFVKEMTRTGLATKDGNLHEGDIILKINGTVTENMSLTDARKLIEKSRGKLQLVVLRDSQQTLINIPSLNDSDSEIEDISEIESNRSFSPEERRHQYSDYDYHSSSEKLKERPSSREDTPSRLSRMGATPTPFKSTGDIAGTVVPETNKEPRYQEDPPAPQPKAAPRTFLRPSPEDEAIYGPNTKMVRFKKGDSVGLRLAGGNDVGIFVAGIQEGTSAEQEGLQEGDQILKVNTQDFRGLVREDAVLYLLEIPKGEMVTILAQSRADVYRDILACGRGDSFFIRSHFECEKETPQSLAFTRGEVFRVVDTLYDGKLGNWLAVRIGNELEKGLIPNKSRAEQMASVQNAQRDNAGDRADFWRMRGQRSGVKKNLRKSREDLTAVVSVSTKFPAYERVLLREAGFKRPVVLFGPIADIAMEKLANELPDWFQTAKTEPKDAGSEKSTGVVRLNTVRQIIEQDKHALLDVTPKAVDLLNYTQWFPIVIFFNPDSRQGVKTMRQRLNPTSNKSSRKLFDQANKLKKTCAHLFTATINLNSANDSWFGSLKDTIQHQQGEAVWVSEGKMEGMDDDPEDRMSYLTAMGADYLSCDSRLISDFEDTDGEGGAYTDNELDEPAEEPLVSSITRSSEPVQHEESIRKPSPEPRAQMRRAASSDQLRDNSPPPAFKPEPPKAKTQNKEESYDFSKSYEYKSNPSAVAGNETPGASTKGYPPPVAAKPTFGRSILKPSTPIPPQEGEEVGESSEEQDNAPKSVLGKVKIFEKMDHKARLQRMQELQEAQNARIEIAQKHPDIYAVPIKTHKPDPGTPQHTSSRPPEPQKAPSRPYQDTRGSYGSDAEEEEYRQQLSEHSKRGYYGQSARYRDTEL

SEQ ID NO: 5673 - protein, 81 aa, Homo sapiens
MNREGAPGKSPEEMYIQQKVRVLLMLRKMGSNLTASEEEFLRTYAGVVNSQLSQLPPHSIDQGAEDVVMAFSRSETEDRRQ

SEQ ID NO: 5674 - protein, 255 aa, Homo sapiens
MPREDRATWKSNYFLKIIQLLDDYPKCFIVGADNVGSKQMQQIRMSLRGKAVVLMGKNTMMRKAIRGHLENNPALEKLLPHIRGNVGFVFTKEDLTEIRDMLLANKVPAAARAGAIAPCEVTVPAQNTGLGPEKTSFFQALGITTKISRGTIEILGVRNVASVCLQIGYPTVASVPHSIINGYKRVLALSVETDYTFPLAEKVKAFLADPSAFVAAAPVAAATTAAPAAAAAPAKVEAKEESEESDEDMGFGLFD

SEQ ID NO: 5675 - protein, 175 aa, Homo sapiens
MSSQIRQNYSTDVEAAVNSLVNLYLQASYTYLSLGFYFDRDDVALEGVSHFFRELAEEKREGYERLLKMQNQRGGRALFQDIKKPAEDEWGKTPDAMKAAMALEKKLNQALLDLHALGSARTDPHLCDFLETHFLDEEVKLIKKMGDHLTNLHRLGGPEAGLGEYLFERLTLKHD

SEQ ID NO: 5676 - protein, 126 aa, Homo sapiens
MPELAKSAPAPKKGSKKAVTKAQKKDGKKRKRSRKESYSVYVYKVLKQVHPDTGISSKAMGIMNSFVNDIFERIASEASRLAHYNKRSTITSREIQTAVRLLLPGELAKHAVSEGTKAVTKYTSSK

SEQ ID NO: 5677 - protein, 128 aa, Homo sapiens
MSGRGKQGGKARAKAKTRSSRAGLQFPVGRVHRLLRKGNYAERVGAGAPVYLAAVLEYLTAEILELAGNAARDNKKTRIIPRHLQLAIRNDEELNKLLGKVTIAQGGVLPNIQAVLLPKKTESHHKAK

SEQ ID NO: 5678 - protein, 97 aa, Homo sapiens
MAGTLDLDKGCTVEELLRGCIEAFDDSGKVRDPQLVRMFLMMHPWYIPSSQLAAKLLHIYQQSRKDNSNSLQVKTCHLVRYWISAFPAEFDLNPELA

SEQ ID NO: 5679 - protein, 148 aa, Homo sapiens
MAGTLDLDKGCTVEELLRGCIEAFDDSGKVRDPQLVRMFLMMHPWYIPSSQLAAKLLHIYQQSRKDNSNSLQVKTCHLVRYWISAFPAEFDLNPELAEQIKELKALLDQEGNRRHSSLIDIDSVCVGGAQRAGGALSILYHLCLINVC

SEQ ID NO: 5680 - protein, 610 aa, Homo sapiens
MAGTLDLDKGCTVEELLRGCIEAFDDSGKVRDPQLVRMFLMMHPWYIPSSQLAAKLLHIYQQSRKDNSNSLQVKTCHLVRYWISAFPAEFDLNPELAEQIKELKALLDQEGNRRHSSLIDIDSVPTYKWKRQVTQRNPVGQKKRKMSLLFDHLEPMELAEHLTYLEYRSFCKILFQDYHSFVTHGCTVDNPVLERFISLFNSVSQWVQLMILSKPTAPQRALVITHFVHVAEKLLQLQNFNTLMAVVGGLSHSSISRLKETHSHVSPETIKLWEGLTELVTATGNYGNYRRRLAACVGFRFPILGVHLKDLVALQLALPDWLDPARTRLNGAKMKQLFSILEELAMVTSLRPPVQANPDLLSLLTVSLDQYQTEDELYQLSLQREPRSKSSPTSPTSCTPPPRPPVLEEWTSAAKPKLDQALVVEHIEKMVESVFRNFDVDGDGHISQEEFQIIRGNFPYLSAFGDLDQNQDGCISREEMVSYFLRSSSVLGGRMGFVHNFQESNSLRPVACRHCKALILGIYKQGLKCRACGVNCHKQCKDRLSVECRRRAQSVSLEGSAPSPSPMHSHHHRAFSFSLPRPGRRGSRPPAEIREEEVQTVEDGVFDIHL

SEQ ID NO: 5681 - protein, 103 aa, Homo sapiens [sequence omitted]

SEQ ID NO: 5682 - protein, 126 aa, Homo sapiens; identical to SEQ ID NO: 4956

SEQ ID NO: 5683 - protein, 103 aa, Homo sapiens [sequence omitted]

SEQ ID NO: 5684 - protein, 136 aa, Homo sapiens; identical to SEQ ID NO: 5304

SEQ ID NO: 5685 - protein, 103 aa, Homo sapiens [sequence omitted]

SEQ ID NO: 5686 - protein, 329 aa, Homo sapiens
MAFQLSRIMRPDDANVAGNVHGGTILKMIEEAGAIISTRHCNSQNGERCVAALARVERTDFLSPMCIGEVAHVSAEITYTSKHSVEVQVNVMSENILTGAKKLTNKATLWYVPLSLKNVDKVLEVPPVVYSRQEQEEEGRKRYEAQKLERMETKWRNGDIVQPVLNPEPNTVSYSQSSLIHLVGPSDCTLHGFVHGGVTMKLMDEVAGIVAARHCKTNIVTASVDAINFHDKIRKGCVITISGRMTFTSNKSMEIEVLVDADPVVDSSQKRYRAASAFFTYVSLSQEGRSLPVPQLVPETEDEKKRFEEGKGRYLQMKAKRQGHAEPQP

SEQ ID NO: 5687 - protein, 350 aa, Homo sapiens
MLLLRRSLSLNVLRKEVDRACFGEKAKQIMRPDDANVAGNVHGGTILKMIEEAGAIISTRHCNSQNGERCVAALARVERTDFLSPMCIGEVAHVSAEITYTSKHSVEVQVNVMSENILTGAKKLTNKATLWYVPLSLKNVDKVLEVPPVVYSRQEQEEEGRKRYEAQKLERMETKWRNGDIVQPVLNPEPNTVSYSQSSLIHLVGPSDCTLHGFVHGGVTMKLMDEVAGIVAARHCKTNIVTASVDAINFHDKIRKGCVITISGRMTFTSNKSMEIEVLVDADPVVDSSQKRYRAASAFFTYVSLSQEGRSLPVPQLVPETEDEKKRFEEGKGRYLQMKAKRQGHAEPQP

SEQ ID NO: 5688 - protein, 380 aa, Homo sapiens
MKLLARALRLCEFGRQASSRRLVAGQGCVGPRRGCCAPVQVVGPRADLPPCGACITGRIMRPDDANVAGNVHGGTILKMIEEAGAIISTRHCNSQNGERCVAALARVERTDFLSPMCIGEVAHVSAEITYTSKHSVEVQVNVMSENILTGAKKLTNKATLWYVPLSLKNVDKVLEVPPVVYSRQEQEEEGRKRYEAQKLERMETKWRNGDIVQPVLNPEPNTVSYSQSSLIHLVGPSDCTLHGFVHGGVTMKLMDEVAGIVAARHCKTNIVTASVDAINFHDKIRKGCVITISGRMTFTSNKSMEIEVLVDADPVVDSSQKRYRAASAFFTYVSLSQEGRSLPVPQLVPETEDEKKRFEEGKGRYLQMKAKRQGHAEPQP

SEQ ID NO: 5689 - protein, 283 aa, Homo sapiens
MSGPDVETPSAIQICRIMRPDDANVAGNVHGGTILKMIEEAGAIISTRHCNSQNGERCVAALARVERTDFLSPMCIGEVAHVSAEITYTSKHSVEVQVNVMSENILTGAKKLTNKATLWYVPLSLKNVDKVLEVPPVVYSRQEQEEEGRKRYEAQKLERMETKWRNGDIVQPVLNPEPNTVSYSQSSLIHLVGPSDCTLHGFVHGGVTMKLMDEVAGIVAARHCKTNIVTASVDAINFHDKIRKAHVMPAGADHTAPSSSPSTGTKCSLLRHHHLGTHDLHEQ

SEQ ID NO: 5690 - protein, 1182 aa, Homo sapiens
MERHQPRLHHPAQGSAAGTPYPSSASLRGCRESKMPRRKGPQHPPPPSGPEEPGEKRPKFLDKFASIRIPGSKKERPPLPNLKTAFASSDCSAAPLEMMENFPKPLSENELLELFEKMMEDMNLNEDKKAPLREKDFSIKKEMVMQYINTASKTGSLKRSRQISPQEFIHELKMGSADERLVTCLESLRVSLTSNPVSWVESFGHEGLGLLLDILEKLISGKIQEKVVKKNQHKVIQCLKALMNTQYGLERIMSEERSLSLLAKAVDPRHPNMMTDVVKLLSAVCIVGEESILEEVLEALTSAGEEKKIDRFFCIVEGLRHNSVQLQVACMQLINALVTSPDDLDFRLHIRNEFMRCGLKEILPNLKCIKNDGLDIQLKVFDEHKEEDLFELSHRLEDIRAELDEAYDVYNMVWSTVKETRAEGYFISILQHLLLIRNDYFIRQQYFKLIDECVSQIVLHRDGMDPDFTYRKRLDLDLTQFVDICIDQAKLEEFEEKASELYKKFEKEFTDHQETQAELQKKEAKINELQAELQAFKSQFGALPADCNIPLPPSKEGGTGHSALPPPPPLPSGGGVPPPPPPPPPPPLPGMRMPFSGPVPPPPPLGFLGGQNSPPLPILPFGLKPKKEFKPEISMRRLNWLKIRPHEMTENCFWIKVNENKYENVDLLCKLENTFCCQQKERREEEDIEEKKSIKKKIKELKFLDSKIAQNLSIFLSSFRVPYEEIRMMILEVDETRLAESMIQNLIKHLPDQEQLNSLSQFKSEYSNLCEPEQFVVVMSNVKRLRPRLSAILFKLQFEEQVNNIKPDIMAVSTACEEIKKSKSFSKLLELVLLMGNYMNAGSRNAQTFGFNLSSLCKLKDTKSADQKTTLLHFLVEICEEKYPDILNFVDDLEPLDKASKVSVETLEKNLRQMGRQLQQLEKELETFPPPEDLHDKFVTKMSRFVISAKEQYETLSKLHENMEKLYQSIIGYYAIDVKKVSVEDFLTDLNNFRTTFMQAIKENIKKREAEEKEKRVRIAKELAERERLERQQKKKRLLEMKTEGDETGVMDNLLEALQSGAAFRDRRKRTPMPKDVRQSLSPMSQRPVLKVCNHENQKVQLTEGSRSHYNINCNSTRTPVAKELNYNLDTHTSTGRIKAAEKKEACNVESNRKKETELLGSFSKNESVPEVEALLARLRAL

SEQ ID NO: 5691 - protein, 366 aa, Homo sapiens
MEDIQTNAELKSTQEQSVPAESAAVLNDYSLTKSHEMENVDSGEGPANEDEDIGVEKPYKCEFCGRSYKQRSSLEEHKERCRTFLQSTDPGDTASAEARHIKAEMGSERALVLDRLASNVAKRKSSMPQKFIGEKRHCFDVNYNSSYMYEKESELIQTRMMDQAINNAISYLGAEALRPLVQTPPAPTSEMVPVISSMYPIALTRAEMSNGAPQELEKKSIHLPEKSVPSERGLSPNNSGHDSTDTDSNHEERQNHIYQQNHMVLSRARNGMPLLKEVPRSYELLKPPPICPRDSVKVINKEGEVMDVYRCDHCRVLFLDYVMFTIHMGCHGFRDPFECNMCGYRSHDRYEFSSHIARGEHRALLK

SEQ ID NO: 5692 - protein, 375 aa, Homo sapiens
MEDIQTNAELKSTQEQSVPAESAAVLNDYSLTKSHEMENVDSGEGPANEDEDIGDDSMKVKDEYSERDENVLKSEPMGNAEEPEIPYSYSREYNEYENIKLERHVVSFDSSRPTSGKMNCDVCGLSCISFNVLMVHKRSHTGEKRHCFDVNYNSSYMYEKESELIQTRMMDQAINNAISYLGAEALRPLVQTPPAPTSEMVPVISSMYPIALTRAEMSNGAPQELEKKSIHLPEKSVPSERGLSPNNSGHDSTDTDSNHEERQNHIYQQNHMVLSRARNGMPLLKEVPRSYELLKPPPICPRDSVKVINKEGEVMDVYRCDHCRVLFLDYVMFTIHMGCHGFRDPFECNMCGYRSHDRYEFSSHIARGEHRALLK

SEQ ID NO: 5693 - protein, 288 aa, Homo sapiens
MEDIQTNAELKSTQEQSVPAESAAVLNDYSLTKSHEMENVDSGEGPANEDEDIGGEKRHCFDVNYNSSYMYEKESELIQTRMMDQAINNAISYLGAEALRPLVQTPPAPTSEMVPVISSMYPIALTRAEMSNGAPQELEKKSIHLPEKSVPSERGLSPNNSGHDSTDTDSNHEERQNHIYQQNHMVLSRARNGMPLLKEVPRSYELLKPPPICPRDSVKVINKEGEVMDVYRCDHCRVLFLDYVMFTIHMGCHGFRDPFECNMCGYRSHDRYEFSSHIARGEHRALLK

SEQ ID NO: 5694 - protein, 422 aa, Homo sapiens
MEDIQTNAELKSTQEQSVPAESAAVLNDYSLTKSHEMENVDSGEGPANEDEDIGGERPFQCNQCGASFTQKGNLLRHIKLHTGEKPFKCHLCNYACQRRDALTGHLRTHSVEKPYKCEFCGRSYKQRSSLEEHKERCRTFLQSTDPGDTASAEARHIKAEMGSERALVLDRLASNVAKRKSSMPQKFIGEKRHCFDVNYNSSYMYEKESELIQTRMMDQAINNAISYLGAEALRPLVQTPPAPTSEMVPVISSMYPIALTRAEMSNGAPQELEKKSIHLPEKSVPSERGLSPNNSGHDSTDTDSNHEERQNHIYQQNHMVLSRARNGMPLLKEVPRSYELLKPPPICPRDSVKVINKEGEVMDVYRCDHCRVLFLDYVMFTIHMGCHGFRDPFECNMCGYRSHDRYEFSSHIARGEHRALLK

SEQ ID NO: 5695 - protein, 439 aa, Homo sapiens
MPLNVSFTNRNYDLDYDSVQPYFYCDEEENFYQQQQQSELQPPAPSEDIWKKFELLPTPPLSPSRRSGLCSPSYVAVTPFSLRGDNDGGGGSFSTADQLEMVTELLGGDMVNQSFICDPDDETFIKNIIIQDCMWSGFSAAAKLVSEKLASYQAARKDSGSPNPARGHSVCSTSSLYLQDLSAAASECIDPSVVFPYPLNDSSSPKSCASQDSSAFSPSSDSLLSSTESSPQGSPEPLVLHEETPPTTSSDSEEEQEDEEEIDVVSVEKRQAPGKRSESGSPSAGGHSKPPHSPLVLKRCHVSTHQHNYAAPPSTRKDYPAAKRVKLDSVRVLRQISNNRKCTSPRSSDTEENVKRRTHNVLERQRRNELKRSFFALRDQIPELENNEKAPKVVILKKATAYILSVQAEEQKLISEEDLLRKRREQLKHKLEQLRNSCA

SEQ ID NO: 5696 - protein, 730 aa, Homo sapiens
MEAVIEKECSALGGLFQTIISDMKGSYPVWEDFINKAGKLQSQLRTTVVAAAAFLDAFQKVADMATNTRGGTREIGSALTRMCMRHRSIEAKLRQFSSALIDCLINPLQEQMEEWKKVANQLDKDHAKEYKKARQEIKKKSSDTLKLQKKAKKGRGDIQPQLDSALQDVNDKYLLLEETEKQAVRKALIEERGRFCTFISMLRPVIEEEISMLGEITHLQTISEDLKSLTMDPHKLPSSSEQVILDLKGSDYSWSYQTPPSSPSTTMSRKSSVCSSLNSVNSSDSRSSGSHSHSPSSHYRYRSSNLAQQAPVRLSSVSSHDSGFISQDAFQSKSPSPMPPEAPNQNSSSSASSEASETCQSVSECSSPTSVSSGSTMGAWVSTEKDWAKPGPYDQPLVNTLQRRKEKREPDPNGGGPTTASGPPAAAEEAQRPRSMTVSAATRPGEEMEACEELALALSRGLQLDTQRSSRDSLQCSSGYSTQTTTPCCSEDTIPSQVSDYDYFSVSGDQEADQQEFDKSSTIPRNSDISQSYRRMFQAKRPASTAGLPTTLGPAMVTPGVATIRRTPSTKPSVRRGTIGAGPIPIKTPVIPVKTPTVPDLPGVLPAPPDGPEERGEHSPESPSVGEGPQGVTSMPSSMWSGQASVNPPLPGPKPSIPEEHRQAIPESEAEDQEREPPSATVSPGQIPESDPADLSPRDTPQGEDMLNAIRRGVKLKKTTTNDRSAPRFS

SEQ ID NO: 5697 - protein, 5890 aa, Homo sapiens
MEKEETTRELLLPNWQGSGSHGLTIAQRDDGVFVQEVTQNSPAARTGVVKEGDQIVGATIYFDNLQSGEVTQLLNTMGHHTVGLKLHRKGDRSPEPGQTWTREVFSSCSSEVVLSGDDEEYQRIYTTKIKPRLKSEDGVEGDLGETQSRTITVTRRVTAYTVDVTGREGAKDIDISSPEFKIKIPRHELTEISNVDVETQSGKTVIRLPSGSGAASPTGSAVDIRAGAISASGPELQGAGHSKLQVTMPGIKVGGSGVNVNAKGLDLGGRGGVQVPAVDISSSLGGRAVEVQGPSLESGDHGKIKFPTMKVPKFGVSTGREGQTPKAGLRVSAPEVSVGHKGGKPGLTIQAPQLEVSVPSANIEGLEGKLKGPQITGPSLEGDLGLKGAKPQGHIGVDASAPQIGGSITGPSVEVQAPDIDVQGPGSKLNVPKMKVPKFSVSGAKGEETGIDVTLPTGEVTVPGVSGDVSLPEIATGGLEGKMKGTKVKTPEMIIQKPKISMQDVDLSLGSPKLKGDIKVSAPGVQGDVKGPQVALKGSRVDIETPNLEGTLTGPRLGSPSGKTGTCRISMSEVDLNVAAPKVKGGVDVTLPRVEGKVKVPEVDVRGPKVDVSAPDVEAHGPEWNLKMPKMKMPTFSTPGAKGEGPDVHMTLPKGDISISGPKVNVEAPDVNLEGLGGKLKGPDVKLPDMSVKTPKISMPDVDLHVKGTKVKGEYDVTVPKLEGELKGPKVDIDAPDVDVHGPDWHLKMPKMKMPKFSVPGFKAEGPEVDVNLPKADVDISGPKIDVTAPDVSIEEPEGKLKGPKFKMPEMNIKVPKISMPDVDLHLKGPNVKGEYDVTMPKVESEIKVPDVELKSAKMDIDVPDVEVQGPDWHLKMPKMKMPKFSMPGFKAEGPEVDVNLPKADVDISGPKVGVEVPDVNIEGPEGKLKGPKFKMPEMNIKAPKISMPDVDLHMKGPKVKGEYDMTVPKLEGDLKGPKVDVSAPDVEMQGPDWNLKMPKIKMPKFSMPSLKGEGPEFDVNLSKANVDISAPKVDTNAPDLSLEGPEGKLKGPKFKMPEMHFRAPKMSLPDVDLDLKGPKMKGNVDISAPKIEGEMQVPDVDIRGPKVDIKAPDVEGQGLDWSLKIPKMKMPKFSMPSLKGEGPEVDVNLPKADVVVSGPKVDIEAPDVSLEGPEGKLKGPKFKMPEMHFKTPKISMPDVDLHLKGPKVKGDVDVSVPKVEGEMKVPDVEIKGPKMDIDAPDVEVQGPDWHLKMPKMKMPKFSMPGFKGEGREVDVNLPKADIDVSGPKVDVEVPDVSLEGPEGKLKGPKFKMPEMHFKAPKISMPDVDLNLKGPKLKGDVDVSLPEVEGEMKVPDVDIKGPKVDISAPDVDVHGPDWHLKMPKVKMPKFSMPGFKGEGPEVDVKLPKADVDVSGPKMDAEVPDVNIEGPDAKLKGPKFKMPEMSIKPQKISIPDVGLHLKGPKMKGDYDVTVPKVEGEIKAPDVDIKGPKVDINAPDVEVHGPDWHLKMPKVKMPKFSMPGFKGEGPEVDMNLPKADLGVSGPKVDIDVPDVNLEAPEGKLKGPKFKMPSMNIQTHKISMPDVGLNLKAPKLKTDVDVSLPKVEGDLKGPEIDVKAPKMDVNVGDIDIEGPEGKLKGPKFKMPEMHFKAPKISMPDVDLHLKGPKVKGDMDVSVPKVEGEMKVPDVDIKGPKVDIDAPDVEVHDPDWHLKMPKMKMPKFSMPGFKAEGPEVDVNLPKADIDVSGPSVDTDAPDLDIEGPEGKLKGSKFKMPKLNIKAPKVSMPDVDLNLKGPKLKGEIDASVPELEGDLRGPQVDVKGPFVEAEVPDVDLECPDAKLKGPKFKMPEMHFKAPKISMPDVDLHLKGPKVKGDADVSVPKLEGDLTGPSVGVEVPDVELECPDAKLKGPKFKMPDMHFKAPKISMPDVDLHLKGPKVKGDVDVSVPKLEGDLTGPSVGVEVPDVELECPDAKLKGPKFKMPEMHFKTPKISMPDVDLHLKGPKVKGDMDVSVPKVEGEMKVPDVDIKGPKMDIDAPDVDVHGPDWHLKMPKMKMPKFSMPGFKAEGPEVDVNLPKADVVVSGPKVDVEVPDVSLEGPEGKLKGPKLKMPEMHFKAPKISMPDVDLHLKGPKVKGDVDVSLPKLEGDLTGPSVDVEVPDVELECPDAKLKGPKFKMPEMHFKTPKISMPDVNLNLKGPKVKGDMDVSVPKVEGEMKVPDVDIRGPKVDIDAPDVDVHGPDWHLKMPKMKMPKFSMPGFKGEGPEVDVNLPKADVDVSGPKVDVEVPDVSLEGPEGKLKGPKFKMPEMHFKTPKISMPDVDFNLKGPKIKGDVDVSAPKLEGELKGPELDVKGPKLDADMPEVAVEGPNGKWKTPKFKMPDMHFKAPKISMPDLDLHLKSPKAKGEVDVDVPKLEGDLKGPHVDVSGPDIDIEGPEGKLKGPKFKMPDMHFKAPNISMPDVDLNLKGPKIKGDVDVSVPEVEGKLEVPDMNIRGPKVDVNAPDVQAPDWHLKMPKMKMPKFSMPGFKAEGPEVDVNLPKADVDISGPKVDIEGPDVNIEGPEGKLKGPKLKMPEMNIKAPKISMPDFDLHLKGPKVKGDVDVSLPKVEGDLKGPEVDIKGPKVDINAPDVGVQGPDWHLKMPKVKMPKFSMPGFKGEGPDGDVKLPKADIDVSGPKVDIEGPDVNIEGPEGKLKGPKFKMPEMNIKAPKISMPDIDLNLKGPKVKGDVDVSLPKVEGDLKGPEVDIKGPKVDIDAPDVDVHGPDWHLKMPKIKMPKISMPGFKGEGPDVDVNLPKADIDVSGPKVDVECPDVNIEGPEGKWKSPKFKMPEMHFKTPKISMPDIDLNLTGPKIKGDVDVTGPKVEGDLKGPEVDLKGPKVDIDVPDVNVQGPDWHLKMPKMKMPKFSMPGFKAEGPEVDVNLPKADVDVSGPKVDVEGPDVNIEGPEGKLKGPKFKMPEMNIKAPKIPMPDFDLHLKGPKVKGDVDISLPKVEGDLKGPEVDIRGPQVDIDVPDVGVQGPDWHLKMPKVKMPKFSMPGFKGEGPDVDVNLPKADLDVSGPKVDIDVPDVNIEGPEGKLKGPKFKMPEMNIKAPKISMPDIDLNLKGPKVKGDMDVSLPKVEGDMKVPDVDIKGPKVDINAPDVDVQGPDWHLKMPKIKMPKISMPGFKGEGPEVDVNLPKADLDVSGPKVDVDVPDVNIEGPDAKLKGPKFKMPEMNIKAPKISMPDLDLNLKGPKMKGEVDVSLANVEGDLKGPALDIKGPKIDVDAPDIDIHGPDAKLKGPKLKMPDMHVNMPKISMPEIDLNLKGSKLKGDVDVSGPKLEGDIKAPSLDIKGPEVDVSGPKLNIEGKSKKSRFKLPKFNFSGSKVQTPEVDVKGKKPDIDITGPKVDINAPDVEVQGKVKGSKFKMPFLSISSPKVSMPDVELNLKSPKVKGDLDIAGPNLEGDFKGPKVDIKAPEVNLNAPDVDVHGPDWNLKMPKMKMPKFSVSGLKAEGPDVAVDLPKGDINIEGPSMNIEGPDLNVEGPEGGLKGPKFKMPDMNIKAPKISMPDIDLNLKGPKVKGDVDISLPKLEGDLKGPEVDIKGPKVDINAPDVDVHGPDWHLKMPKVKMPKFSMPGFKGEGPEVDVTLPKADIDISGPNVDVDVPDVNIEGPDAKLKGPKFKMPEMNIKAPKISMPDFDLNLKGPKMKGDVVVSLPKVEGDLKGPEVDIKGPKVDIDTPDINIEGSEGKFKGPKFKIPEMHLKAPKISMPDIDLNLKGPKVKGDVDVSLPKMEGDLKGPEVDIKGPKVDINAPDVDVQGPDWHLKMPKVKMPKFSMPGFKGEGPDVDVNLPKADLDVSGPKVDIDVPDVNIEGPEGKLKGPKFKMPEMNIKAPKISMPDIDLNLKGPKVKGDMDVSLPKVEGDMQVPDLDIKGPKVDINAPDVDVRGPDWHLKMPKIKMPKISMPGFKGEGPEVDVNLPKADLDVSGPKVDVDVPDVNIEGPDAKLKGPKFKMPEMNIKAPKISMPDFDLHLKGPKVKGDVDVSLPKMEGDLKAPEVDIKGPKVDIDAPDVDVHGPDWHLKMPKVKMPKFSMPGFKGEGPEVDVNLPKADIDVSGPKVDIDTPDIDIHGPEGKLKGPKFKMPDLHLKAPKISMPEVDLNLKGPKMKGDVDVSLPKVEGDLKGPEVDIKGPKVDIDVPDVDVQGPDWHLKMPKVKMPKFSMPGFKGEGPDVDVNLPKADLDVSGPKVDIDVPDVNIEGPDAKLKGPKFKMPEMNIKAPKISMPDFDLHLKGPKVKGDVDVSLPKVEGDLKGPEVDIKGPKVDIDAPDVDVHGPDWHLKMPKVKMPKFSMPGFKGEGPDVDVTLPKADIEISGPKVDIDAPDVSIEGPDAKLKGPKFKMPEMNIKAPKISMPDIDFNLKGPKVKGDVDVSLPKVEGDLKGPEIDIKGPSLDIDTPDVNIEGPEGKLKGPKFKMPEMNIKAPKISMPDFDLHLKGPKVKGDVDVSLPKVESDLKGPEVDIEGPEGKLKGPKFKMPDVHFKSPQISMSDIDLNLKGPKIKGDMDISVPKLEGDLKGPKVDVKGPKVGIDTPDIDIHGPEGKLKGPKFKMPDLHLKAPKISMPEVDLNLKGPKVKGDMDISLPKVEGDLKGPEVDIRDPKVDIDVPDVDVQGPDWHLKMPKVKMPKFSMPGFKGEGPDVDVNLPKADIDVSGPKVDVDVPDVNIEGPDAKLKGPKFKMPEMSIKAPKISMPDIDLNLKGPKVKGDVDVTLPKVEGDLKGPEADIKGPKVDINTPDVDVHGPDWHLKMPKVKMPKFSMPGFKGEGPDVDVSLPKADIDVSGPKVDVDIPDVNIEGPDAKLKGPKFKMPEINIKAPKISIPDVDLDLKGPKVKGDFDVSVPKVEGTLKGPEVDLKGPRLDFEGPDAKLSGPSLKMPSLEISAPKVTAPDVDLHLKAPKIGFSGPKLEGGEVDLKGPKVEAPSLDVHMDSPDINIEGPDVKIPKFKKPKFGFGAKSPKADIKSPSLDVTVPEAELNLETPEISVGGKGKKSKFKMPKIHMSGPKIKAKKQGFDLNVPGGEIDASLKAPDVDVNIAGPDAALKVDVKSPKTKKTMFGKMYFPDVEFDIKSPKFKAEAPLPSPKLEGELQAPDLELSLPAIHVEGLDIKAKAPKVKMPDVDISVPKIEGDLKGPKVQANLGAPDINIEGLDAKVKTPSFGISAPQVSIPDVNVNLKGPKIKGDVPSVGLEGPDVDLQGPEAKIKFPKFSMPKIGIPGVKMEGGGAEVHAQLPSLEGDLRGPDVKLEGPDVSLKGPGVDLPSVNLSMPKVSGPDLDLNLKGPSLKGDLDASVPSMKVHAPGLNLSGVGGKMQVGGDGVKVPGIDATTKLNVGAPDVTLRGPSLQGDLAVSGDIKCPKVSVGAPDLSLEASEGSIKLPKMKLPQFGISTPGSDLHVNAKGPQVSGELKGPGVDVNLKGPRISAPNVDFNLEGPKVKGSLGATGEIKGPTVGGGLPGIGVQGLEGNLQMPGIKSSGCDVNLPGVNVKLPTGQISGPEIKGGLKGSEVGFHGAAPDISVKGPAFNMASPESDFGINLKGPKIKGGADVSGGVSAPDISLGEGHLSVKGSGGEWKGPQVSSALNLDTSKFAGGLHFSGPKVEGGVKGGQIGLQAPGLSVSGPQGHLESGSGKVTFPKMKIPKFTFSGRELVGREMGVDVHFPKAEASIQAGAGDGEWEESEVKLKKSKIKMPKFNFSKPKGKGGVTGSPEASISGSKGDLKSSKASLGSLEGEAEAEASSPKGKFSLFKSKKPRHRSNSFSDEREFSGPSTPTGTLEFEGGEVSLEGGKVKGKHGKLKFGTFGGLGSKSKGHYEVTGSDDETGKLQGSGVSLASKKSRLSSSSSNDSGNKVGIQLPEVELSVSTKKE

SEQ ID NO: 5698 - protein, 494 aa, Homo sapiens
MSTPAVPQDLQLPPSQRAQSAFKEQRRQKLKEHLLRRKTLFAYKQENEMLSSRDQRVVTSEDQVQEGTKVLKLKTKMADKENMKRPAESKNNTVVGKHCIPLKPSNELTNSTVVIDTHKPKDSNQTPHLLLTEDDPQSQHMTLSQAFHLKNNSKKKQMTTEKQKQDANMPKKPVLGSYRGQIVQSKINSFRKPLQVKDESSAATKKLSATIPKATKPQPVNTSSVTVKSNRSSNMTATTKFVSTTSQNTQLVRPPIRSHHSNTRDTVKQGISRTSANVTIRKGPHEKELLQSKTALSSVKTSSSQGIIRNKTLSRSIASEVIARPASLSNDKLMEKSEPVDQRRHTAGKAIVDSRSAQPKETSEERKARLSEWKAGKGRVLKRPPNSVVTQHEPAGQNEKPVGSFWTTMAEEDEQRLFTEKVNNTFSECLNLINEGCPKEDILVTLNDLIKNIPDAKKLVKYWICLALIEPITSPIENIIAIYEKAILAGAQVR

SEQ ID NO: 5699 - protein, 683 aa, Homo sapiens
MSTPAVPQDLQLPPSQRAQSAFKEQRRQKLKEHLLRRKTLFAYKQENEMLSSSRDQRVVTSEDQVQEGTKVLKLKTKMADKENMKRPAESKNNTVVGKHCIPLKPSNELTNSTVVIDTHKPKDSNQTPHLLLTEDDPQSQHMTLSQAFHLKNNSKKKQMTTEKQKQDANMPKKPVLGSYRGQIVQSKINSFRKPLQVKDESSAATKKLSATIPKATKPQPVNTSSVTVKSNRSSNMTATTKFVSTTSQNTQLVRPPIRSHHSNTRDTVKQGISRTSANVTIRKGPHEKELLQSKTALSSVKTSSSQGIIRNKTLSRSIASEVIARPASLSNDKLMEKSEPVDQRRHTAGKAIVDSRSAQPKETSEERKARLSEWKAGKGRVLKRPPNSVVTQHEPAGQNEKPVGSFWTTMAEEDEQRLFTEKVNNTFSECLNLINEGCPKEDILVTLNDLIKNIPDAKKLVKYWICLALIEPITSPIENIIAIYEKAILAGAQPIEEMRHTIVDILTMKSQEKANLGENMEKSCASKEEVKEVSIEDTGVDVDPEKLEMESKLHRNLLFQDCEKEQDNKTKDPTHDVKTPNTETRTSCLIKYNVSTTPYLQSVKKKVQFDGTNSAFKELKFLTPVRRSRRLQEKTSKLPDMLKDHYPCVSSLEQLTELGRETDAFVCRPNAALCRVYYEADTT

SEQ ID NO: 5700 - protein, 179 aa, Homo sapiens
MNPSMKQKQEEIKENIKNSSVPRRTLKMIQPSASGSLVGRENELSAGLSKRKHRNDHLTSTTSSPGVIVPESSENKNLGGVTQESFDLMIKENPSSQYWKEVAEKRRKALYEALKENEKLHKEIEQKDNEIARLKKENKELAEVAEHVQYMAELIERLNGEPLDNFESLDNQEFDSEEE

SEQ ID NO: 5701 - protein, 102 aa, Homo sapiens
MNPSMKQKQEEIKENIKNSSVPRRTLKMIQPSASGSLVGRENELSAGLSKRKHRNDHLTSTTSSPGVIVPESSENKNLGGVTQESFDLMIKENPSSQYWKEV

SEQ ID NO: 5702 - protein, 91 aa, Homo sapiens
MAGSRRECRRGGSSGAKFRISLGLPVGAVINCADNTGAKNLYIISVKGIKGRLNRLPAAGVGDMVMATVKKGKPELRKKVHPAVVIRQRKS

SEQ ID NO: 5703 - protein, 360 aa, Homo sapiens
MSTVICMKQREEEFLLTIRPFANRMQKSPCYIPIVSSATLWDRSTPSAKHIPCYERTSVPCSRFINHMKNFSESPKFRSLHFLNFPVFPERTQNSMACKRLLHTCQYIVPRCSVSTVSFDEESYEEFRSSPAPSSETDEAPLIFTARGETEERARGAPKQAWNSSFLEQLVKKPNWAHSVNPVHLEAQGIHISRHTRPKGQPLSSPKKNSGSAARPSTAIGLCRRSQTPGALQSTGPSNTELEPEERMAVPAGAQAHPDDIQSRLLGASGNPVGKGAVAMAPEMLPKHPHTPRDRRPQADTSLHGNLAGAPLPLLAGASTHFPSKRLIKVCSSAPPRPTRRFHTVCSQALSRPVVNAHLH

SEQ ID NO: 5704 - protein, 230 aa, Homo sapiens
MAAVGAEARGAWCVPCLVSLDTLQELCRKEKLTCKSIGITKRNLNNYEVEYLCDYKVVKDMEYYLVKWKGWPDSTNTWEPLQNLKCPLLLQQFSNDKHNYLSQVITSEEAERRGQFYDNKGITYLFDLDYESDEFTVDAARYGNVSHFVNHSCDPNLQVFNVFIDNLDTRLPRIALFSTRTINAGEELTFDYQMKGSGDISSDSIDHSPAKKRVRTVCKCGAVTCRGYLN

SEQ ID NO: 5705 - protein, 335 aa, Homo sapiens
MELSCPGSRCPVQEQRARWERKRACTARELLETERRYQEQLGLVATYFLGILKAKGTLRPPERQALFGSWELIYGASQELLPYLEGGCWGQGLEGFCRHLELYNQFAANSERSQTTLQEQLKKNKGFRRFVRLQEGRPEFGGLQLQDLLPLPLQRLQQYENLVVALAENTGPNSPDHQQLTRAARLISETAQRVHTIGQKQKNDQHLRRVQALLSGRQAKGLTSGRWFLRQGWLLVVPPHGEPRPRMFFLFTDVLLMAKPRPPLHLLRSGTFACKALYPMAQCHLSRVFGHSGGPCGGLLSLSFPHEKLLLMSTDQEELSRWYHSLTWAISSQKN

SEQ ID NO: 5706 - protein, 131 aa, Homo sapiens
MAEPDYIEDDNPELIRPQKLINPVKTSRNHQDLHRELLMNQKRGLAPQNKPELQKVMEKRKRDQVIKQKEEEAQKKKSDLEIELLKRQQKLEQLELEKQKLQEEQENAPEFVKVKGNLRRTGQEVAQAQES

SEQ ID NO: 5707 - protein, 152 aa, Homo sapiens
MPSKGPLQSVQVFGRKKTATAVAHCKRGNGLIKVNGRPLEMIEPRTLQYKLLEPVLLLGKERFAGVDIRVRVKGGGHVAQIYGESQELGAWRRWLWEGGLHSAPVPFNCVSFSQLSVSPSPKPWWPITRNMWMRLPRRRSKTSSSSMTGPCW

SEQ ID NO: 5708 - protein, 268 aa, Homo sapiens
MYKETVYSAFNLLMHYPPPSGAGQHPQPQPPLHKANQPPHGVPQLSLYEHFNSPHPTPAPADISQKQVHRPLQTPDLSGFYSLTSGSMGQLPHTVSWFTHPSLMLGSGVPGHPAAIPHPAIVPPSGKQELQPFDRNLKTQAESKAEKEAKKPTIKKPLNAFMLYMKEMRAKVIAECTLKESAAINQILGRRWHALSREEQAKYYELARKERQLHMQLYPGWSARDNYGKKKRRSREKHQESTTDPGSPKKCRARFGLNQQTDWCGPCR

SEQ ID NO: 5709 - protein, 116 aa, Homo sapiens
MEEYHRHCDEVGFNAEEAHNIVKECVDGVLGGEDYNHNNINQWTASIVEQSLTHLVKLGKAYKYIVTCAVVQKSAYGFHTASSCFWDTTSDGTCTVRWENRTMNCIVNVFAIAIVL

SEQ ID NO: 5710 - protein, 238 aa, Homo sapiens
MAPKKRPETQKTSEIVLRPRNKRSRSPLELEPEAKKLCAKGSGPSRRCDSDCLWVGLAGPQILPPCRSIVRTLHQHKLGRASWPSVQQGLQQSFLHTLDSYRILQKAAPFDRRATSLAWHPTHPSTVAVGSKGGDIMLWNFGIKDKPTFIKGAAWHPRYNLIVVGRYPDPNFKSCTPYELRTIDVFDGNSGKMMCQLYDPESSGISSLNEFNPMGDTLASAMGYHILIWSQEEARTRK

SEQ ID NO: 5711 - protein, 244 aa, Homo sapiens
MAPKKRPETQKTSEIVLRPRNKRSRSPLELEPEAKKLCAKGSGPSRRCDSDCLWVGLAGPQILPPCRSIVRTLHQHKLGRASWPSVQQGLQQSFLHTLDSYRILQKAAPFDRRATSLAWHPTHPSTVAVGSKGGDIMLWNFGIKDKPTFIKGIGAGGSITGLKFNPLNTNQFYASSMEGTTRLQDFKGNILRVFASSDTINIWFCSLDVSASSRMVVTGDNVGNVILLNMDGKELVSVPMEPGS

SEQ ID NO: 5712 - protein, 172 aa, Homo sapiens
MGGDAGDREPGPAARSLGEGQAGFATADHSSQERETEKAMDRLARGTQSIPNDSPARGEGTHSEEEGFAMDEEDSDGELNTWELSEGTNCPPKEQPGDLFNEDWDSELKADQGNPYDADDIQESISQELKPWVCCAPQGDMIYDPSWHHPPPLIPYYSKMVFETGQFDDAED

SEQ ID NO: 5713 - protein, 855 aa, Homo sapiens
MDEEEDNLSLLTALLEENESALDCNSEENNFLTRENGEPDAFDELFDADGDGESYTEEADDGETGETRDEKENLATLFGDMEDLTDEEEVPASQSTENRVLPAPAPRREKTNEELQEELRNLQEQMKALQEQLKVTTIKQTASPARLQKSPEKSPRPPLKERRVQRIQESTCFSAELDVPALPRTKRVARTPKASPPDPKSSSSRMTSAPSQPLQTISRNKPSGITRGQIVGTPGSSGETTQPICVEAFSGLRLRRPRVSSTEMNKKMTGRKLIRLSQIKEKMAREKLEEIDWVTFGVILKKVTPQSVNSGKTFSIWKLNDLRDLTQCVSLFLFGEVHKALWKTEQGTVVGILNANPMKPKDGSEEVCLSIDHPQKVLIMGEALDLGTCKAKKKNGEPCTQTVNLRDCEYCQYHVQAQYKKLSAKRADLQSTFSGGRIPKKFARRGTSLKERLCQDGFYYGGVSSASYAASIAAAVAPKKKIQTTLSNLVVKGTNLIIQETRQKLGIPQKSLSCSEEFKELMDLPTCGARNLKQHLAKATASGIMGSPKPAIKSISASALLKQQKQRMLEMRRRKSEEIQKRFLQSSSEVESPAVPSSSRQPPAQPPRTGSEFPRLEGAPATMTPKLGRGVLEGDDVLFYDESPPPRPKLSALAEAKKLAAITKLRAKGQVLTKTNPNSIKKKQKDPQDILEVKERVEKNTMFSSQAEDELEPARKKRREQLAYLESEEFQKILKAKSKHTGILKEAEAEMQERYFEPLVKKEQMEEKMRNIREVKCRVVTCKTCAYTHFKLLETCVSEQHEYHWHDGVKRFFKCPCGNRSISLDRLPNKHCSNCGLYKWERDGMLKVCHLRTNF

SEQ ID NO: 5714 - protein, 874 aa, Homo sapiens
MDEEEDNLSLLTALLEENESALDCNSEENNFLTRENGEPDAFDELFDADGDGESYTEEADDGETGETRDEKENLATLFGDMEDLTDEEEVPASQSTENRVLPAPAPRREKTNEELQEELRNLQEQMKALQEQLKVTTIKQTASPARLQKSPEKSPRPPLKERRVQRIQESTCFSAELDVPALPRTKRVARTPKASPPDPKSSSSRMTSAPSQPLQTISRNKPSGITRGQIVGTPGSSGETTQPICVEAFSGLRLRRPRVSSTEMNKKMTGRKLIRLSQIKEKMAREKLEEIDWVTFGVILKKVTPQSVNSGKTFSIWKLNDLRDLTQCVSLFLFGEVHKALWKTEQGTVVGILNANPMKPKDGSEEVCLSIDHPQKVLIMGEALDLGTCKAKKKNGEPCTQTVNLRDCEYCQYHVQAQYKKLSAKRADLQSTFSGGRIPKKFARRGTSLKERLCQDGFYYGGVSSASYAASIAAAVAPKKKIQTTLSNLVVKGTNLIIQETRQKLGIPQKSLSCSEEFKELMDLPTCGARNLKQHLAKATASGIMGSPKPAIKSISASALLKQQKQRMLEMRRRKSEEIQKRFLQSSSEVESPAVPSSSRQPPAQPPRTGSEFPRLEGAPATMTPKLGRGVLEGDDVLFYDESPPPRPKLSALAEAKKLAAITKLRAKGQVLTKTNPNSIKKKQKDPQDILEVKERVEKNTMFSSQAEDELEPARKKRREQLAYLESEEFQKILKAKSKHTGILKEAEAEMQERYFEPLVKKEQMEEKMRNIREVKCRVVTCKTCAYTHFKLLETCVSEQHEYHWHDGVKRFFKCPCGNRSISLDRLPNKHCSNCGLYKWERDGMLKEKTGPKIGGETLLPRGEEHAKFLNSLK

SEQ ID NO: 5715 - protein, 634 aa, Homo sapiens
MSWLFGINKGPKGEGAGPPPPLPPAQPGAEGGGDRGLGDRPAPKDKWSNFDPTGLERAAKAARELEHSRYAKDALNLAQMQEQTLQLEQQSKLKMRLEALSLLHTLVWAWSLCRAGAVQTQERLSGSASPEQVPAGECCALQEYEAAVEQLKSEQIRAQAEERRKTLSEETRQHQARAQYQDKLARQRYEDQLKQQQLLNEENLRKQEESVQKQEAMRRATVEREMELRHKNEMLRVEAEARARAKAERENADIIREQIRLKAAEHRQTVLESIRTAGTLFGEGFRAFVTDWDKVTATVAGLTLLAVGVYSAKNATLVAGRFIEARLGKPSLVRETSRITVLEALRHPIQVSRRLLSRPQDALEGVVLSPSLEARVRDIAIATRNTKKNRSLYRNILMYGPPGTGKTLFAKKLALHSGMDYAIMTGGDVAPMGREGVTAMHKLFDWANTSRRGLLLFVDEADAFLRKRATEKISEDLRATLNAFLYRTGQHSNKFMLVLASNQPEQFDWAINDRINEMVHFDLPGQEERERLVRMYFDKYVLKPATEGKQRLKLAQFDYGRKCSEVARLTEGMSGREIAQLAVSWQATAYASEDGVLTEAMMDTRVQDAVQQHQQKMCWLKAEGPGRGDEPSPS

SEQ ID NO: 5716 - protein, 586 aa, Homo sapiens
MSWLFGINKGPKGEGAGPPPPLPPAQPGAEGGGDRGLGDRPAPKDKWSNFDPTGLERAAKAARELEHSRYAKDALNLAQMQEQTLQLEQQSKLKEYEAAVEQLKSEQIRAQAEERRKTLSEETRQHQARAQYQDKLARQRYEDQLKQQQLLNEENLRKQEESVQKQEAMRRATVEREMELRHKNEMLRVEAEARARAKAERENADIIREQIRLKAAEHRQTVLESIRTAGTLFGEGFRAFVTDWDKVTATVAGLTLLAVGVYSAKNATLVAGRFIEARLGKPSLVRETSRITVLEALRHPIQVSRRLLSRPQDALEGVVLSPSLEARVRDIAIATRNTKKNRSLYRNILMYGPPGTGKTLFAKKLALHSGMDYAIMTGGDVAPMGREGVTAMHKLFDWANTSRRGLLLFVDEADAFLRKRATEKISEDLRATLNAFLYRTGQHSNKFMLVLASNQPEQFDWAINDRINEMVHFDLPGQEERERLVRMYFDKYVLKPATEGKQRLKLAQFDYGRKCSEVARLTEGMSGREIAQLAVSWQATAYASEDGVLTEAMMDTRVQDAVQQHQQKMCWLKAEGPGRGDEPSPS

SEQ ID NO: 5717 - protein, 357 aa, Homo sapiens
MARENGESSSSWKKQAEDIKKIFEFKETLGTGAFSEVVLAEEKATGKLFAVKCIPKKALKGKESSIENEIAVLRKIKHENIVALEDIYESPNHLYLVMQLVSGGELFDRIVEKGFYTEKDASTLIRQVLDAVYYLHRMGIVHRDLKPENLLYYSQDEESKIMISDFGLSKMEGKGDVMSTACGTPGYVAPEVLAQKPYSKAVDCWSIGVIAYILLCGYPPFYDENDSKLFEQILKAEYEFDSPYWDDISDSAKDFIRNLMEKDPNKRYTCEQAARHPWIAGDTALNKNIHESVSAQIRKNFAKSKWRQAFNATAVVRHMRKLHLGSSLDSSNASVSSSLSLASQKDCAYVAKPESLS

SEQ ID NO: 5718 - protein, 368 aa, Homo sapiens
MTRGFAPILPVEFHKMGSFRRPRPRFMSSPVLSDLPRFQAARQALQLSSSSAWNSVQTAVINVFKGGGLQSNELYALNENIRRLLKSELGSFITDYFQNQLLAKGLFFVEEKIKLCEGENRIEVLAEVWDHFFTETLPTLQAIFYPVQGQELTIRQISLLGFRDLVLLKVKLGDLLLLAQSKLPSSIVQMLLILQSVHEPTGPSESYLQLEELVKQVVSPFLGISGDRSFSGPTYTLARRHSRVRPKVTVLNYASPITAVSRPLNEMVLTPLTEQEGEAYLEKCGSVRRHTVANAHSDIQLLAMATMMHSGLGEEASSENKCLLLPPSFPPPHRQCSSEPNITDNPDGLEEGARGSQEGSELNCASLS

SEQ ID NO: 5719 - protein, 1123 aa, Homo sapiens
MLVPLLLQYLETLSGLVDSNLNCGPVLTWMELDNHGRRLLLSEEASLNIPAVAAAHVIKRYTAQAPDELSFEVGDIVSVIDMPPTEDRSWWRGKRGFQVGFFPSECVELFTERPGPGLKADADGPPCGIPAPQGISSLTSAVPRPRGKLAGLLRTFMRSRPSRQRLRQRGILRQRVFGCDLGEHLSNSGQDVPQVLRCCSEFIEAHGVVDGIYRLSGVSSNIQRLRHEFDSERIPELSGPAFLQDIHSVSSLCKLYFRELPNPLLTYQLYGKFSEAMSVPGEEERLVRVHDVIQQLPPPHYRTLEYLLRHLARMARHSANTSMHARNLAIVWAPNLLRSMELESVGMGGAAAFREVRVQSVVVEFLLTHVDVLFSDTFTSAGLDPAGRCLLPRPKSLAGSCPSTRLLTLEEAQARTQGRLGTPTEPTTPKAPASPAERRKGERGEKQRKPGGSSWKTFFALGRGPSVPRKKPLPWLGGTRAPPQPSGSRPDTVTLRSAKSEESLSSQASGAGLQRLHRLRRPHSSSDAFPVGPAPAGSCESLSSSSSSESSSSESSSSSSESSAAGLGALSGSPSHRTSAWLDDGDELDFSPPRCLEGLRGLDFDPLTFRCSSPTPGDPAPPASPAPPAPASAFPPRVTPQAISPRGPTSPASPAALDISEPLAVSVPPAVLELLGAGGAPASATPTPALSPGRSLRPHLIPLLLRGAEAPLTDACQQEMCSKLRGAQGPLGPDMESPLPPPPLSLLRPGGAPPPPPKNPARLMALALAERAQQVAEQQSQQECGGTPPASQSPFHRSLSLEVGGEPLGTSGSGPPPNSLAHPGAWVPGPPPYLPRQQSDGSLLRSQRPMGTSRRGLRGPAQVPTPGFFSPAPRECLPPFLGVPKPGLYPLGPPSFQPSSPAPVWRSSLGPPAPLDRGENLYYEIGASEGSPYSGPTRSWSPFRSMPPDRLNASYGMLGQSPPLHRSPDFLLSYPPAPSCFPPDHLGYSAPQHPARRPTPPEPLYVNLALGPRGPSPASSSSSSPPAHPRSRSDPGPPVPRLPQKQRAPWGPRTPHRVPGPWGPPEPLLLYRAAPPAYGRGGELHRGSLYRNGGQRGEGAGPPPPYPTPSWSLHSEGQTRSYC

SEQ ID NO: 5720 - protein, 236 aa, Homo sapiens
MVGRRALIVLAHSERTSFNYAMKEAAAAALKKKGWEVVESDLYAMNFNPIISRKDITGKLKDPANFQYPAESVLAYKEGHLSPDIVAEQKKLEAADLVIFQSKKAVLSITTGGSGSMYSLQGIHGDMNVILWPIQSGILHFCGFQVLEPQLTYSIGHTPADARIQILEGWKKRLENIWDETPLYFAPSSLFDLNFQAGFLMKKEVQDEEKNKKFGLSVGHHLGKSIPTDNQIKARK

SEQ ID NO: 5721 - protein, 240 aa, Homo sapiens
MVGRRALIVLAHSERTSFNYAMKEAAAAALKKKGWEVVESDLYAMNFNPIISRKDITGKLKDPANFQYPAESVLAYKEGHLSPDIVAEQKKLEAADLVIFQFPLQWFGVPAILKGWFERVFIGEFAYTYAAMYDKGPFRSGILHFCGFQVLEPQLTYSIGHTPADARIQILEGWKKRLENIWDETPLYFAPSSLFDLNFQAGFLMKKEVQDEEKNKKFGLSVGHHLGKSIPTDNQIKARK

SEQ ID NO: 5722 - protein, 138 aa, Homo sapiens
MVSRTEGNIDDSLIGGNASAEGPEGEGTESTVITGVDIVMNHHLQETSFTKEAYKKYIKDYMKSIKGKLEEQRPERVKPFMTGAAEQIKHILANFKNYQFFIGENMNPDGMVALLDYREDGVTPYMIFFKDGLEMEKC

SEQ ID NO: 5723 - protein, 160 aa, Homo sapiens
MFSDIYKIREIADGLCLEVEGKMVSRTEGNIDDSLIGGNASAEGPEGEGTESTVITGVDIVMNHHLQETSFTKEAYKKYIKDYMKSIKGKLEEQRPERVKPFMTGAAEQIKHILANFKNYQFFIGENMNPDGMVALLDYREDGVTPYMIFFKDGLEMEKC

SEQ ID NO: 5724 - protein, 1234 aa, Homo sapiens
MASWLYECLCEAELAQYYSHFTALGLQKIDELAKITMKDYSKLGVHDMNDRKRLFQLIKIIKIMQEEDKAVSIPERHLQTSSLRIKSQELRSGPRRQLNFDSPADNKDRNASNDGFEMCSLSDFSANEQKSTYLKVLEHMLPDDSQYHTKTGILNATAGDSYVQTEISTSLFSPNYLSAILGDCDIPIIQRISHVSGYNYGIPHSCIRQNTSEKQNPWTEMEKIRVCVRKRPLGMREVRRGEINIITVEDKETLLVHEKKEAVDLTQYILQVILKGSKERSTGATGVNADSSRSHAVIQIQIKDSAKRTFGRISFIDLAGSERAADARDSDRQTKMEGAEINQSLLALKECIRALDQEHTHTPFRQSKLTQVLKDSFIGNAKTCMIANISPSHVATEHTLNTLRYADRVKELKKGIKCCTSVTSRNRTSGNSSPKRIQSSPGALSEDKCSPKKVKLGFQQSLTVAAPGSTRGKVHPLTSHPPNIPFTSAPKVSGKRGGSRGSPSQEWVIHASPVKGTVRSGHVAKKKPEESAPLCSEKNRMGNKTVLGWESRASGPGEGLVRGKLSTKCKKVQTVQPVQKQLVSRVELSFGNAHHRAEYSQDSQRGTPARPASEAWTNIPPHQKEREEHLRFYHQQFQQPPLLQQKLKYQPLKRSLRQYRPPEGQLTNETPPLFHSYSENHDGAQVEELDDSDFSEDSFSHISSQRATKQRNTLENSEDSFFLHQTWGQGPEKQVAERQQSLFSSPRTGDKKDLTKSWVDSRDPINHRRAALDHSCSPSKGPVDWSRENSTSSGPSPRDSLAEKPYCSQVDFIYRQERGGGSSFDLRKDASQSEVSGENEGNLPSPEEDGFTISLSHVAVPGSPDQRDTVTTPLREVSADGPIQVTSTVKNGHAVPGEDPRGQLGTHAEYASGLMSPLTMSLLENPDNEGSPPSEQLVQDGATHSLVAESTGGPVVSHTVPSGDQEAALPVSSATRHLWLSSSPPDNKPGGDLPALSPSPIRQHPADKLPSREADLGEACQSRETVLFSHEHMGSEQYDADAEETGLDGSWGFPGKPFTTIHMGVPHSGPTLTPRTGSSDVADQLWAQERKHPTRLGWQEFGLSTDPIKLPCNSENVTWLKPRPISRCLARPSSPLVPSCSPKTAGTLRQPTLEQAQQVVIRAHQEQLDEMAELGFKEETLMSQLASNDFEDFVTQLDEIMVLKSKCIQSLRSQLQLYLTCHGPTAAPEGTVPS

SEQ ID NO: 5725 - protein, 113 aa, Homo sapiens
MADPEELQVSSPPPPPPSSPSSSDASAASSPGGPVSLGWPVPSRSSGPTVDQLEEVELQIGDAAFSLTKLLEATSAVSAQVEELAFKCTENARFLKTWRDLLKEGYDSLKPDD

SEQ ID NO: 5726 - protein, 150 aa, Homo sapiens
MAKFVIRPATAADCSDILRLIKELAKYEYMEEQVILTEKGNSTVAGRGTSVRCLSPSPRPLPPLLPLLADLLEDGFGEHPFYHCLVAEVPKEHWTPEGNPSPFPEARETKCYVRSSVGCVEPLTTQAEVTENLDRKNSQQVFKLLRKKKN

SEQ ID NO: 5727 - protein, 120 aa, Homo sapiens
MAKFVIRPATAADCSDILRLIKELAKYEYMEEQVILTEKDLLEDGFGEHPFYHCLVAEVPKEHWTPEGNPSPFPEARETKCYVRSSVGCVEPLTTQAEVTENLDRKNSQQVFKLLRKKKN

SEQ ID NO: 5728 - protein, 143 aa, Homo sapiens
MAKFVIRPATAADCSDILRLIKELAKYEYMEEQVILTEKGHSIVGFAMYYFTYDPWIGKLLYLEDFFVMSDYRGFGIGSEILKNLSQVAMRCRCSSMHFLVAEWNEPSINFYKRRGASDLSSEEGWRLFKIDKEYLLKMATEE

SEQ ID NO: 5729 - protein, 171 aa, Homo sapiens
MAKFVIRPATAADCSDILRLIKELAKYEYMEEQVILTEKDLLEDGFGEHPFYHCLVAEVPKEHWTPEGHSIVGFAMYYFTYDPWIGKLLYLEDFFVMSDYRGFGIGSEILKNLSQVAMRCRCSSMHFLVAEWNEPSINFYKRRGASDLSSEEGWRLFKIDKEYLLKMATEE

SEQ ID NO: 5730 - protein, 287 aa, Homo sapiens
MTSAAHYYPKLMSIMGNVLRFLPAFVRMKQLIEEGYVGEPLVCEVQVHGGSLLGKKYNWSCDDLMGGGGLHSVGTYIIDLLTFLTGQKAVKVHGLLKTFVKQTDHIKGIRQITSDDFCTFQMVLEGGVCCTVTLNFNVPGEFKQDVTVVGSAGRLLAVGTDLYGQRNSAPEQELLVQDATPVSNSLLPEKAFSDIPSPYLRGTIKMMQAVRQAFQDQDDRRTWDGRPLTMAATFDDCLYALCVVDTIKRSSQTGEWQNIAIMTEEPELSPAYLISEAMRRSRMSLYC

SEQ ID NO: 5731 - protein, 390 aa, Homo sapiens
MLPGVGVFGTSLTARVIIPLLKDEGFAVKALWGRTQEEAEELAKEMSVPFYTSRIDEVLLHQDVDLVCINLPPPLTRQIAVKTLGIGKNVICDRTATPLDAFRMTSAAHYYPKLMSIMGNVLRFLPAFVRMKQLIEEGYVGEPLVCEVQVHGGSLLGKKYNWSCDDLMGGGGLHSVGTYIIDLLTFLTGQKAVKVHGLLKTFVKQTDHIKGIRQITSDDFCTFQMVLEGGVCCTVTLNFNVPGEFKQDVTVVGSAGRLLAVGTDLYGQRNSAPEQELLVQDATPVSNSLLPEKAFSDIPSPYLRGTIKMMQAVRQAFQDQDDRRTWDGRPLTMAATFDDCLYALCVVDTIKRSSQTGEWQNIAIMTEEPELSPAYLISEAMRRSRMSLYC

SEQ ID NO: 5732 - protein, 40 aa, Homo sapiens
MADEELEALRRQRLAELQAKHGDPGDAAQQEAKHSSTEEK

SEQ ID NO: 5733 - protein, 313 aa, Homo sapiens
MAAARHSTLDFMLGAKADGETILKGLQSIFQEQGMAESVHTWQDHGYLATYTNKNGRLPPIVRGGAIDRYWPTADGRLVEYDIDEVVYDEDSPYQNIKILHSKQFGNILILSGDVNLAESDLAYTRAIMGSGKEDYTGKDVLILGGGDGGILCEIVKLKPKMVTMVEIDQMVIDGCKKYMRKTCGDVLDNLKGDCYQVLIEDCIPVLKRYAKEGREFDYVINDLTAVPISTSPEEDSTWEFLRLILDLSMKVLKQDGKYFTQGNCVNLTEALSLYEEQLGRLYCPVEFSKEIVCVPSYLELWVFYTVWKKAKP

SEQ ID NO: 5734 - protein, 332 aa, Homo sapiens
MATLKDQLIYNLLKEEQTPQNKITVVGVGAVGMACAISILMKDLADELALVDVIEDKLKGEMMDLQHGSLFLRTPKIVSGKDYNVTANSKLVIITAGARQQEGESRLNLVQRNVNIFKFIIPNVVKYSPNCKLLIVSNPVDILTYVAWKISGFPKNRVIGSGCNLDSARFRYLMGERLGVHPLSCHGWVLGEHGDSSVPVWSGMNVAGVSLKTLHPDLGTDKDKEQWKEVHKQVVESAYEVIKLKGYTSWAIGLSVADLAESIMKNLRRVHPVSTMIKGLYGIKDDVFLSVPCILGQNGISDLVKVTLTSEEEARLKKSADTLWGIQKELQF

SEQ ID NO: 5735 - protein, 1008 aa, Homo sapiens
MGPAPAGEQLRGATGEPEVMEPALEGTGKEGKKASSRKRTLAEPPAKGLLQPVKLSRAELYKEPTNEELNRLRETEILFHSSLLRLQVEELLKEVRLSEKKKDRIDAFLREVNQRVVRVPSVPETELTDQAWLPAGVRVPLHQVPYAVKGCFRFLPPAQVTVVGSYLLGTCIRPDINVDVALTMPREILQDKDGLNQRYFRKRALYLAHLAHHLAQDPLFGSVCFSYTNGCHLKPSLLLRPRGKDERLVTVRLHPCPPPDFFRPCRLLPTKNNVRSAWYRGQSPAGDGSPEPPTPRYNTWVLQDTVLESHLQLLSTILSSAQGLKDGVALLKVWLRQRELDKGQGGFTGFLVSMLVVFLVSTRKIHTTMSGYQVLRSVLQFLATTDLTVNGISLCLSSDPSLPALADFHQAFSVVFLDSSGHLNLCADVTASTYHQVQHEARLSMMLLDSRADDGFHLLLMTPKPMIRAFDHVLHLRPLSRLQAACHRLKLWPELQDNGGDYVSAALGPLTTLLEQGLGARLNLLAHSRPPVPEWDISQDPPKHKDSGTLTLGLLLRPEGLTSVLELGPEADQPEAAKFRQFWGSRSELRRFQDGAIREAVVWEAASMSQKRLIPHQVVTHLLALHADIPETCVHYVGGPLDALIQGLKETSSTGEEALVAAVRCYDDLSRLLWGLEGLPLTVSAVQGAHPVLRYTEVFPPTPVRPAFSFYETLRERSSLLPRLDKPCPAYVEPMTVVCHLEGSGQWPQDAEAVQRVRAAFQLRLAELLTQQHGLQCRATATHTDVLKDGFVFRIRVAYQREPQILKEVQSPEGMISLRDTAASLRLERDTRQLPLLTSALHGLQQQHPAFSGVARLAKRWVRAQLLGEGFADESLDLVAAALFLHPEPFTPPSSPQVGFLRFLFLVSTFDWKNNPLFVNLNNELTVEEQVEIRSGFLAARAQLPVMVIVTPQDRKNSVWTQDGPSAQILQQLVVLAAEALPMLEKQLMDPRGPGDIRMGPSENVALL

SEQ ID NO: 5736 - protein, 655 aa, Homo sapiens
MAEAPQVVEIDPDFEPLPRPRSCTWPLPRPEFSQSNSATSSPAPSGSAAANPDAAAGLPSASAAAVSADFMSNLSLLEESEDFPQAPGSVAAAVAAAAAAAATGGLCGDFQGPEAGCLHPAPPQPPPPGPLSQHPPVPPAAAGPLAGQPRKSSSSRRNAWGNLSYADLITKAIESSAEKRLTLSQIYEWMVKSVPYFKDKGDSNSSAGWKNSIRHNLSLHSKFIRVQNEGTGKSSWWMLNPEGGKSGKSPRRRAASMDNNSKFAKSRSRAAKKKASLQSGQEGAGDSPGSQFSKWPASPGSHSNDDFDNWSTFRPRTSSNASTISGRLSPIMTEQDDLGEGDVHSMVYPPSAAKMASTLPSLSEISNPENMENLLDNLNLLSSPTSLTVSTQSSPGTMMQQTPCYSFAPPNTSLNSPSPNYQKYTYGQSSMSPLPQMPIQTLQDNKSSYGGMSQYNCAPGLLKELLTSDSPPHNDIMTPVDPGVAQPNSRVLGQNVMMGPNSVMSTYGSQASHNKMMNPSSHTHPGHAQQTSAVNGRPLPHTVSTMPHTSGMNRLTQVKTPVQVPLPHPMQMSALGGYSSVSSCNGYGRMGLLHQEKLPSDLDGMFIERLDCDMESIIRNDLMDGDTLDFNFDNVLPNQSFPHSVKTTTHSWVSG

SEQ ID NO: 5737 - protein, 489 aa, Homo sapiens
MHSETPKSQVGTLLFRSRSRLTHLSLSRRASESSLSSESSESSDAGLCMDSPSPMDPHMAEQTFEQAIQAASRIIRNEQFAIRRFQSMPVRLLGHSPVLRNITNSQAPDGRRKSEAGSGAASSSGEDKENDGFVFKMPWKPTHPSSTHALAEWASRREAFAQRPSSAPDLMCLSPDRKMEVEELSPLALGRFSLTPAEGDTEEDDGFVDILESDLKDLVMYSKCQRLFRSPSMPCSVIRPILKRLERPQDRDTPVQNKRRRSVTPPEEQQEAEEPKARVLRSKSLCHDEIENLLDSDHRELIGDYSKAFLLQTVDGKHQDLKYISPETMVALLTGKFSNIVDKFVIVDCRYPYEYEGGHIKTAVNLPLERDAESFLLKSPIAPCSLDKRVILIFHCEFSSERGPRMCRFIRERDRAVNDYPSLYYPEMYILKGGYKEFFPQHPNFCEPQDYRPMNHEAFKDELKTFRLKTRSWAGERSRRELCSRLQDQ

SEQ ID NO: 5738 - protein, 678 aa, Homo sapiens
MHVFAYRVHTHHLGKVVSGYRVRNGQWTLIGRQSPQLPQAFYPVGHPVDVSFGDLLAARCVFTGEGRTEATHIGGTSSDEMCNLYIMYYMEAKHAVSFMTCTQNVAPDMFRTIPPEANIPIPVKSDMVMMHEHHKETEYKDKIPLLQQPKREEEEVLDQGDFYSLLSKLLGEREDVVHVHKYNPTEKAESESDLVAEIANVVQKKDLGRSDAREGAEHERGNAILVRDRIHKFHRLVSTLRPPESRVFSLQQPPPGEGTWEPEHTGDFHMEEALDWPGVYLLPGQVSGVALDPKNNLVIFHRGDHVWDGNSFDSKFVYQQIGLGPIEEDTILVIDPNNAAVLQSSGKNLFYLPHGLSIDKDGNYWVTDVALHQVFKLDPNNKEGPVLILGRSMQPGSDQNHFCQPTDVAVDPGTGAIYVSDGYCNSRIVQFSPSGKFITQWGEESSGSSPLPGQFTVPHSLALVPLLGQLCVADRENGRIQCFKTDTKEFVREIKHSSFGRNVFAISYIPGLLFAVNGKPHFGDQEPVQGFVMNFSNGEIIDIFKPVRKHFDMPHDIVASEDGTVYIGDAHTNTVWKFTLTEKLEHRSVKKAGIEVQEIKADSEHKLETSSGRVLGRFRGKGSGGLNLGNFFASRKGYSRKGFDRLSTEGSDQEKEDDGSESEEEYSAPLPALAPSSS

SEQ ID NO: 5739 - protein, 397 aa, Homo sapiens
MVKETTYYDVLGVKPNATQEELKKAYRKLALKYHPDKNPNEGEKFKQISQAYEVLSDAKKRELYDKGGEQAIKEGGAGGGFGSPMDIFDMFFGGGGRMQRERRGKNVVHQLSVTLEDLYNGATRKLALQKNVICDKCEGRGGKKGAVECCPNCRGTGMQIRIHQIGPGMVQQIQSVCMECQGHGERISPKDRCKSCNGRKIVREKKILEVHIDKGMKDGQKITFHGEGDQEPGLEPGDIIIVLDQKDHAVFTRRGEDLFMCMDIQLVEALCGFQKPISTLDNRTIVITSHPGQIVKHGDIKCVLNEGMPIYRRPYEKGRLIIEFKVNFPENGFLSPDKLSLLEKLLPERKEVEETDEMDQVELVDFDPNQERRRHYNGEAYEDDEHHPRGGVQCQTS

SEQ ID NO: 5740 - protein, 62 aa, Homo sapiens
MDPNCSCAAAGVSCTCASSCKCKECKCTSCKKSCCSCCPVGCAKCAQGCICKGASEKCSCCA

SEQ ID NO: 5741 - protein, 1985 aa, Homo sapiens
MAQRTGLEDPERYLFVDRAVIYNPATQADWTAKKLVWIPSERHGFEAASIKEERGDEVMVELAENGKKAMVNKDDIQKMNPPKFSKVEDMAELTCLNEASVLHNLKDRYYSGLIYTYSGLFCVVINPYKNLPIYSENIIEMYRGKKRHEMPPHIYAISESAYRCMLQDREDQSILCTGESGAGKTENTKKVIQYLAHVASSHKGRKDHNIPESPKPVKHQGELERQLLQANPILESFGNAKTVKNDNSSRFGKFIRINFDVTGYIVGANIETYLLEKSRAVRQAKDERTFHIFYQLLSGAGEHLKSDLLLEGFNNYRFLSNGYIPIPGQQDKDNFQETMEAMHIMGFSHEEILSMLKVVSSVLQFGNISFKKERNTDQASMPENTVAQKLCHLLGMNVMEFTRAILTPRIKVGRDYVQKAQTKEQADFAVEALAKATYERLFRWLVHRINKALDRTKRQGASFIGILDIAGFEIFELNSFEQLCINYTNEKLQQLFNHTMFILEQEEYQREGIEWNFIDFGLDLQPCIDLIERPANPPGVLALLDEECWFPKATDKTFVEKLVQEQGSHSKFQKPRQLKDKADFCIIHYAGKVDYKADEWLMKNMDPLNDNVATLLHQSSDRFVAELWKDVDRIVGLDQVTGMTETAFGSAYKTKKGMFRTVGQLYKESLTKLMATLRNTNPNFVRCIIPNHEKRAGKLDPHLVLDQLRCNGVLEGIRICRQGFPNRIVFQEFRQRYEILTPNAIPKGFMDGKQACERMIRALELDPNLYRIGQSKIFFRAGVLAHLEEERDLKITDIIIFFQAVCRGYLARKAFAKKQQQLSALKVLQRNCAAYLKLRHWQWWRVFTKVKPLLQVTRQEEELQAKDEELLKVKEKQTKVEGELEEMERKHQQLLEEKNILAEQLQAETELFAEAEEMRARLAAKKQELEEILHDLESRVEEEEERNQILQNEKKKMQAHIQDLEEQLDEEEGARQKLQLEKVTAEAKIKKMEEEILLLEDQNSKFIKEKKLMEDRIAECSSQLAEEEEKAKNLAKIRNKQEVMISDLEERLKKEEKTRQELEKAKRKLDGETTDLQDQIAELQAQIDELKLQLAKKEEELQGALARGDDETLHKNNALKVVRELQAQIAELQEDFESEKASRNKAEKQKRDLSEELEALKTELEDTLDTTAAQQELRTKREQEVAELKKALEEETKNHEAQIQDMRQRHATALEELSEQLEQAKRFKANLEKNKQGLETDNKELACEVKVLQQVKAESEHKRKKLDAQVQELHAKVSEGDRLRVELAEKASKLQNELDNVSTLLEEAEKKGIKFAKDAASLESQLQDTQELLQEETRQKLNLSSRIRQLEEEKNSLQEQQEEEEEARKNLEKQVLALQSQLADTKKKVDDDLGTIESLEEAKKKLLKDAEALSQRLEEKALAYDKLEKTKNRLQQELDDLTVDLDHQRQVASNLEKKQKKFDQLLAEEKSISARYAEERDRAEAEAREKETKALSLARALEEALEAKEEFERQNKQLRADMEDLMSSKDDVGKNVHELEKSKRALEQQVEEMRTQLEELEDELQATEDAKLRLEVNMQAMKAQFERDLQTRDEQNEEKKRLLIKQVRELEAELEDERKQRALAVASKKKMEIDLKDLEAQIEAANKARDEVIKQLRKLQAQMKDYQRELEEARASRDEIFAQSKESEKKLKSLEAEILQLQEELASSERARRHAEQERDELADEITNSASGKSALLDEKRRLEARIAQLEEELEEEQSNMELLNDRFRKTTLQVDTLNAELAAERSAAQKSDNARQQLERQNKELKAKLQELEGAVKSKFKATISALEAKIGQLEEQLEQEAKERAAANKLVRRTEKKLKEIFMQVEDERRHADQYKEQMEKANARMKQLKRQLEEAEEEATRANASRRKLQRELDDATEANEGLSREVSTLKNRLRRGGPISFSSSRSGRRQLHLEGASLELSDDDTESKTSDVNETQPPQSE

SEQ ID NO: 5742 - protein, 222 aa, Homo sapiens
MSTLCPPPSPAVAKTEIALSGKSPLLAATFAYWDNILGPRVRHIWAPKTEQVLLSDGEITFLANHTLNGEILRNAESGAIDVKFFVLSEKGVIIVSLIFDGNWNGDRSTYGLSIILPQTELSFYLPLHRVCVDRLTHIIRKGRIWMHKERQENVQKIILEGTERMEDQGQSIIPMLTGEVIPVMELLSSMKSHSVPEEIDIADTVLNDDDIGDSCHEGFLLK

SEQ ID NO: 5743 - protein, 481 aa, Homo sapiens
MSTLCPPPSPAVAKTEIALSGKSPLLAATFAYWDNILGPRVRHIWAPKTEQVLLSDGEITFLANHTLNGEILRNAESGAIDVKFFVLSEKGVIIVSLIFDGNWNGDRSTYGLSIILPQTELSFYLPLHRVCVDRLTHIIRKGRIWMHKERQENVQKIILEGTERMEDQGQSIIPMLTGEVIPVMELLSSMKSHSVPEEIDIADTVLNDDDIGDSCHEGFLLNAISSHLQTCGCSVVVGSSAEKVNKIVRTLCLFLTPAERKCSRLCEAESSFKYESGLFVQGLLKDSTGSFVLPFRQVMYAPYPTTHIDVDVNTVKQMPPCHEHIYNQRRYMRSELTAFWRATSEEDMAQDTIIYTDESFTPDLNIFQDVLHRDTLVKAFLDQVFQLKPGLSLRSTFLAQFLLVLHRKALTLIKYIEDDTQKGKKPFKSLRNLKIDLDLTAEGDLNIIMALAEKIKPGLHSFIFGRPFYTSVQERDVLMTF

SEQ ID NO: 5744 - protein, 505 aa, Homo sapiens
MTCGSGFGGRAFSCISACGPRPGRCCITAAPYRGISCYRGLTGGFGSHSVCGGFRAGSCGRSFGYRSGGVCGPSPPCITTVSVNESLLTPLNLEIDPNAQCVKQEEKEQIKSLNSRFAAFIDKVRFLEQQNKLLETKLQFYQNRECCQSNLEPLFEGYIETLRREAECVEADSGRLASELNHVQEVLEGYKKKYEEEVSLRATAENEFVALKKDVDCAYLRKSDLEANVEALIQEIDFLRRLYEEEILILQSHISDTSVVVKLDNSRDLNMDCIIAEIKAQYDDIVTRSRAEAESWYRSKCEEMKATVIRHGETLRRTKEEINELNRMIQRLTAEVENAKCQNSKLEAAVAQSEQQGEAALSDARCKLAELEGALQKAKQDMACLIREYQEVMNSKLGLDIEIATYRRLLEGEEQRLCEGIGAVNVCVSSSRGGVVCGDLCVSGSRPVTGSVCSAPCNGNVAVSTGLCAPCGQLNTTCGGGSCGVGSCGISSLGVGSCGSSCRKC

SEQ ID NO: 5745 - protein, 2580 aa, Homo sapiens
MAEEGAVAVCVRVRPLNSREESLGETAQVYWKTDNNVIYQVDGSKSFNFDRVFHGNETTKNVYEEIAAPIIDSAIQGYNGTIFAYGQTASGKTYTMMGSEDHLGVIPRAIHDIFQKIKKFPDREFLLRVSYMEIYNETITDLLCGTQKMKPLIIREDVNRNVYVADLTEEVVYTSEMALKWITKGEKSRHYGETKMNQRSSRSHTIFRMILESREKGEPSNCEGSVKVSHLNLVDLAGSERAAQTGAAGVRLKEGCNINRSLFILGQVIKKLSDGQVGGFINYRDSKLTRILQNSLGGNAKTRIICTITPVSFDETLTALQFASTAKYMKNTPYVNEVSTDEALLKRYRKEIMDLKKQLEEVSLETRAQAMEKDQLAQLLEEKDLLQKVQNEKIENLTRMLVTSSSLTLQQELKAKRKRRVTWCLGKINKMKNSNYADQFNIPTNITTKTHKLSINLLREIDESVCSESDVFSNTLDTLSEIEWNPATKLLNQENIESELNSLRADYDNLVLDYEQLRTEKEEMELKLKEKNDLDEFEALERKTKKDQENELSSKVELLREKEDQIKKLQEYIDSQKLENIKMDLSYSLESIEDPKQMKQTLFDAETVALDAKRESAFLRSENLELKEKMKELATTYKQMENDIQLYQSQLEAKKKMQVDLEKELQSAFNEITKLTSLIDGKVPKDLLCNLELEGKITDLQKELNKEVEENEALREEVILLSELKSLPSEVERLRKEIQDKSEELHIITSEKDKLFSEVVHKESRVQGLLEEIGKTKDDLATTQSNYKSTDQEFQNFKTLHMDFEQKYKMVLEENERMNQEIVNLSKEAQKFDSSLGALKTELSYKTQELQEKTREVQERLNEMEQLKEQLENRDSTLQTVEREKTLITEKLQQTLEEVKTLTQEKDDLKQLQESLQIERDQLKSDIHDTVNMNIDTQEQLRNALESLKQHQETINTLKSKISEEVSRNLHMEENTGETKDEFQQKMVGIDKKQDLEAKNTQTLTADVKDNEIIEQQRKIFSLIQEKNELQQMLESVIAEKEQLKTDLKENIEMTIENQEELRLLGDELKKQQEIVAQEKNHAIKKEGELSRTCDRLAEVEEKLKEKSQQLQEKQQQLLNVQEEMSEMQKKINEIENLKNELKNKELTLEHMETERLELAQKLNENYEEVKSITKERKVLKELQKSFETERDHLRGYIREIEATGLQTKEELKIAHIHLKEHQETIDELRRSVSEKTAQIINTQDLEKSHTKLQEEIPVLHEEQELLPNVKEVSETQETMNELELLTEQSTTKDSTTLARIEMERLRLNEKFQESQEEIKSLTKERDNLKTIKEALEVKHDQLKEHIRETLAKIQESQSKQEQSLNMKEKDNETTKIVSEMEQFKPKDSALLRIEIEMLGLSKRLQESHDEMKSVAKEKDDLQRLQEVLQSESDQLKENIKEIVAKHLETEEELKVAHCCLKEQEETINELRVNLSEKETEISTIQKQLEAINDKLQNKIQEIYEKEEQFNIKQISEVQEKVNELKQFKEHRKAKDSALQSIESKMLELTNRLQESQEEIQIMIKEKEEMKRVQEALQIERDQLKENTKEIVAKMKESQEKEYQFLKMTAVNETQEKMCEIEHLKEQFETQKLNLENIETENIRLTQILHENLEEMRSVTKERDDLRSVEETLKVERDQLKENLRETITRDLEKQEELKIVHMHLKEHQETIDKLRGIVSEKTNEISNMQKDLEHSNDALKAQDLKIQEELRIAHMHLKEQQETIDKLRGIVSEKTDKLSNMQKDLENSNAKLQEKIQELKANEHQLITLKKDVNETQKKVSEMEQLKKQIKDQSLTLSKLEIENLNLAQKLHENLEEMKSVMKERDNLRRVEETLKLERDQLKESLQETKARDLEIQQELKTARMLSKEHKETVDKLREKISEKTIQISDIQKDLDKSKDELQKKQDRQNHQVKPEKRLLSDGQQHLTESLREKCSRIKELLKRYSEMDDHYECLNRLSLDLEKEIEFQKELSMRVKANLSLPYLQTKHIEKLFTANQRCSMEFHRIMKKLKYVLSYVTKIKEEQHESINKFEMDFIDEVEKQKELLIKIQHLQQDCDVPSRELRDLKLNQNMDLHIEEILKDFSESEFPSIKTEFQQVLSNRKEMTQFLEEWLNTRFDIEKLKNGIQKENDRICQVNNFFNNRIIAIMNESTEFEERSATISKEWEQDLKSLKEKNEKLFKNYQTLKTSLASGAQVNPTTQDNKNPHVTSRATQLTTEKIRELENSLHEAKESAMHKESKIIKMQKELEVTNDIIAKLQAKVHESNKCLEKTKETIQVLQDKVALGAKPYKEEIEDLKMKLVKIDLEKMKNAKEFEKEISATKATVEYQKEVIRLLRENLRRSQQAQDTSVISEHTDPQPSNKPLTCGGGSGIVQNTKALILKSEHIRLEKEISKLKQQNEQLIKQKNELLSNNQHLSNEVKTWKERTLKREAHKQVTCENSPKSPKVTGTASKKKQITPSQCKERNLQDPVPKESPKSCFFDSRSKSLPSPHPVRYFDNSSLGLCPEVQNAGAESVDSQPGPWHASSGKDVPECKTQ

SEQ ID NO: 5746 - protein, 1630 aa, Homo sapiens
MPFAKRIVEPQWLCRQRRPAPGPAVDASGGSAEPPPPLQPPGRRDLDEVEAPGPEEPARAVPAPSGLPPPPPPLPAPADQTQPPHGEASVAGEESTAGIPEAAPAAGEASSAAAAAAVLLMLDLCAVSNAALARVLRQLSDVARHACSLFQELESDIQLTHRRVWALQGKLGGVQRVLSTLDPKQEAVPVSNLDIESKLSVYYRAPWHQQRNIFLPATRPPCVEELHRHARQSLQALRREHRSRSDRREQRAAAPLSIAAPPLPAYPPAHSQRRREFKDRHFLTSHPPEDEDTDVMLGQRPKNPIHNIPSTLDKQTNWSKALPLPTPEEKMKQDAQVISSCIIPINVTGVGFDREASIRCSLVHSQSVLQRRRKLRRRKTISGIPRRVQQEIDSDESPVARERNVIVHTNPDPSNTVNRISGTRDSECQTEDILIAAPSRRRIRAQRGQSIAASLSHSAGNISALADKGDTMFTPAVSSRTRSRSLPREGNRGGDAEPKVGAKPSAYEEGESFVGDHERTPNDFSEAPSSPSAQDHQPTLGLACSQHLHSPQHKLSERGRSRLSRMAADSGSCDISSNSDTFGSPIHCISTAGVLLSSHMDQKDDHQSSSGNWSGSSSTCPSQTSETIPPAASPPLTGSSHCDSELSLNTAPHANEDASVFVTEQYNDHLDKVRGHRANSFTSTVADLLDDPNNSNTSDSEWNYLHHHHDASCRQDFSPERPKADSLGCPSFTSMATYDSFLEKSPSDKADTSSHFSVDTEGYYTSMHFDCGLKGNKSYVCHYAALGPENGQGVGASPGLPDCAWQDYLDHKRQGRPSISFRKPKAKPTPPKRSSSLRKSDGNADISEKKEPKISSGQHLPHSSREMKLPLDFANTPSRMENANLPTKQEPSWINQSEQGIKEPQLDASDIPPFKDEVAESTHYADLWLLNDLKTNDPYRSLSNSSTATGTTVIECIKSPESSESQTSQSESRATTPSLPSVDNEFKLASPEKLAGLASPSSGYSSQSETPTSSFPTAFFSGPLSPGGSKRKPKVPERKSSLQQPSLKDGTISLSKDLELPIIPPTHLDLSALHNVLNKPFHHRHPLHVFTHNKQNTVGETLRSNPPPSLAITPTILKSVNLRSINKSEEVKQKEENNTDLPYLEESTLTTAALSPSKIRPHTANKSVSRQYSTEDTILSFLDSSAVEMGPDKLHLEKNSTFDVKNRCDPETITSAGSSLLDSNVTKDQVRTETEPIPENTPTKNCAFPTEGFQRVSAARPNDLDGKIIQYGPGPDETLEQVQKAPSAGLEEVAQPESVDVITSQSDSPTRATDVSNQFKHQFVMSRHHDKVPGTISYESEITSVNSFPEKCSKQENIASGISAKSASDNSKAEETQGNVDEASLKESSPSDDSIISPLSEDSQAEAEGVFVSPNKPRTTEDLFAVIHRSKRKVLGRKDSGDMSVRSKSRAPLSSSSSSASSITSPSSNVTTPNSQRSPGLIYRNAKKSNTSNEEFKLLLLKKGSRSDSSYRMSATEILKSPILPKPPGELTAESPQSTDDAHQGSQGAEALSPLSPCSPRVNAEGFSSKSFATSASARVGRSRAPPAASSSRYSVRCRLYNTPMQAISEGETENSDGSPHDDRSSQSST

SEQ ID NO: 5747 - protein, 516 aa, Homo sapiens
MCGSERILQAGNILEIRVGQAGARRVATMTSPVLVDIREEVTCPICLELLTEPLSIDCGHSFCQACITPNGRESVIGQEGERSCPVCQTSYQPGNLRPNRHLANIVRRLREVVLGPGKQLKAVLCADHGEKLQLFCQEDGKVICWLCERSQEHRGHHTFLVEEVAQEYQEKFQESLKKLKNEEQEAEKLTAFIREKKTSWKNQMEPERCRIQTEFNQLRNILDRVEQRELKKLEQEEKKGLRIIEEAENDLVHQTQSLRELISDLERRCQGSTMELLQDVSDVTERSEFWTLRKPEALPTKLRSMFRAPDLKRMLRVCRELTDVQSYWVDVTLNPHTANLNLVLAKNRRQVRFVGAKVSGPSCLEKHYDCSVLGSQHFSSGKHYWEVDVAKKTAWILGVCSNSLGPTFSFNHFAQNHSAYSRYQPQSGYWVIGLQHNHEYRAYEDSSPSLLLSMTVPPRRVGVFLDYEAGTVSFYNVTNHGFPIYTFSKYYFPTTLCPYFNPCNCVIPMTLRRPSS

SEQ ID NO: 5748 - protein, 462 aa, Homo sapiens
MTSPVLVDIREEVTCPICLELLTEPLSIDCGHSFCQACITPNGRESVIGQEGERSCPVCQTSYQPGNLRPNRHLANIVRRLREEDGKVICWLCERSQEHRGHHTFLVEEVAQEYQEKFQESLKKLKNEEQEAEKLTAFIREKKTSWKNQMEPERCRIQTEFNQLRNILDRVEQRELKKLEQEEKKGLRIIEEAENDLVHQTQSLRELISDLERRCQGSTMELLQDVSDVTERSEFWTLRKPEALPTKLRSMFRAPDLKRMLRVCRELTDVQSYWVDVTLNPHTANLNLVLAKNRRQVRFVGAKVSGPSCLEKHYDCSVLGSQHFSSGKHYWEVDVAKKTAWILGVCSNSLGPTFSFNHFAQNHSAYSRYQPQSGYWVIGLQHNHEYRAYEDSSPSLLLSMTVPPRRVGVFLDYEAGTVSFYNVTNHGFPIYTFSKYYFPTTLCPYFNPCNCVIPMTLRRPSS

SEQ ID NO: 5749 - protein, 173 aa, Homo sapiens
MEDSFLQSFGRLSLQPQQQQQRQRPPRPPPRGTPPRRHSFRKHLYLLRGLPGSGKTTLARQLQHDFPRALIFSTDDFFFREDGAYEFNPDFLEEAHEWNQKRARKAMRNGISPIIIDNTNLHAWEMKPYAVMVFQTEQKNLFRLEMDMVVFRPEMKKHSWCLKRKNPPNERTV

SEQ ID NO: 5750 - protein, 65 aa, Homo sapiens
MVRTKADSVPGTYRKVVAARAPRKVLGSSTSATNSTSVSSRKEHVLCNLITQMMKKNRTFSFIFE

SEQ ID NO: 5751 - protein, 986 aa, Homo sapiens
MYFCWGADSRELQRRRTAGSPGAELLQAASGERHSLLLLTNHRVLSCGDNSRGQLGRRGAQRGELPEPIQALETLIVDLVSCGKEHSLAVCHKGRVFAWGAGSEGQLGIGEFKEISFTPKKIMTLNDIKIIQVSCGHYHSLALSKDSQVFSWGKNSHGQLGLGKEFPSQASPQRVRSLEGIPLAQVAAGGAHSFALSLCGTSFGWGSNSAGQLALSGRNVPVQSNKPLSVGALKNLGVVYISCGDAHTAVLTQDGKVFTFGDNRSGQLGYSPTPEKRGPQLVERIDGLVSQIDCGSYHTLAYVHTTGQVVSFGHGPSDTSKPTHPEALTENFDISCLISAEDFVDVQVKHIFAGTYANFVTTHQDTSSTRAPGKTLPEISRISQSMAEKWIAVKRRSTEHEMAKSEIRMIFSSPACLTASFLKKRGTGETTSIDVDLEMARDTFKKLTKKEWISSMITTCLEDDLLRALPCHSPHQEALSVFLLLPECPVMHDSKNWKNLVVPFAKAVCEMSKQSLQVLKKCWAFLQESSLNPLIQMLKAAIISQLLHQTKTEQDHCNVKALLGMMKELHKVNKANCRLPENTFNINELSNLLNFYIDRGRQLFRDNHLMSEKKAYMLMHETILQKKDEFPPSPRFILRVRRSRLVKDALRQLSQAEATDFCKVLVVEFINEICPESGGVSSEFFHCMFEEMTKPEYGMFMYPEMGSCMWFPAKPKPEKKRYFLFGMLCGLSLFNLNVANLPFPLALYKKLLDQKPSLEDLKELSPRLGKSLQEVLDDAADDIGDALCIRFSIHWDQNDVDLIPNGISIPVDQTNKRDYVSKYIDYIFNVSVKAVYEEFQRGFYRVCEKEILRHFYPEELMTAIIGNTDYDWKQFEQNSKYEQGYQKSHPTIQLFWKAFHKLTLDEKKKFLFFLTGRDRLHARGIQKMEIVFRCPETFSERDHPTSITCHNILSLPKYSTMERMEEALQVAINNNRGFVSPMLTQS

SEQ ID NO: 5752 - protein, 144 aa, Homo sapiens
MTTRQATKDPLLRGVSPTPSKIPVRSQKRTPFPTVTSCAVDQENQDPRRWVQKPPLNIQRPLVDSAGPRPKARHQAETSQRLVGISQPRNPLEELRPSPRGQNVGPGPPAQTVLVPAPGKLFALRRSPFPPAKCHLARCHGLYL

SEQ ID NO: 5753 - protein, 542 aa, Homo sapiens
MVAHDETGGLLPIKRTIRVLDVNNQSFREQEEPSNKRVRPLARVTSLANLISPVRNGAVRRFGQTIQSFTLRGDHRSPASAQKFSSRSTVPTPAKRRSSALWSEMLDITMKESLTTREIRRQEAIYEMSRGEQDLIEDLKLARKAYHDPMLKLSIMSEEELTHIFGDLDSYIPLHEDLLTRIGEATKPDGTVEQIGHILVSWLPRLNAYRGYCSNQLAAKALLDQKKQDPRVQDFLQRCLESPFSRKLDLWSFLDIPRSRLVKYPLLLKEILKHTPKEHPDVQLLEDAILIIQGVLSDINLKKGESECQYYIDKLEYLDEKQRDPRIEASKVLLCHGELRSKSGHKLYIFLFQDILVLTRPVTRNERHSYQVYRQPIPVQELVLEDLQDGDVRMGGSFRGAFSNSEKAKNIFRIRFHDPSPAQSHTLQANDVFHKQQWFNCIRAAIAPFQSAGSPPELQGLPELHEECEGNHPSARKLTAQRRASTVSSVTQVEVDENAYRCGSGMQMAEDSKSLKTHQTQPGIRRARDKALSGGKRKETLV

SEQ ID NO: 5754 - protein, 91 aa, Homo sapiens
MKLNISFPATGCQKLIEVDDERKLRTFYEKRMATEVAADALGEEWKVKVDKLLQVFKSETVNAIGNWYLEWGSDSGFWLLTFGKLLPNATL

SEQ ID NO: 5755 - protein, 218 aa, Homo sapiens
MATEVAADALGEEWKGYVVRISGGNDKQGFPMKQGVLTHGRVRLLLSKGHSCYRPRRTGERKRKSVRGCIVDANLSVLNLVIVKKGEKDIPGLTDTTVPRRLGPKRASRIRKLFNLSKEDDVRQYVVRKPLNKEGKKPRTKAPKIQRLVTPRVLQHKRRRIALKKQRTKKNKEEAAEYAKLLAKRMKEAKEKRQEQIAKRRRLSSLRASTSKSESSQK

SEQ ID NO: 5756 - protein, 249 aa, Homo sapiens
MKLNISFPATGCQKLIEVDDERKLRTFYEKRMATEVAADALGEEWKGYVVRISGGNDKQGFPMKQGVLTHGRVRLLLSKGHSCYRPRRTGERKRKSVRGCIVDANLSVLNLVIVKKGEKDIPGLTDTTVPRRLGPKRASRIRKLFNLSKEDDVRQYVVRKPLNKEGKKPRTKAPKIQRLVTPRVLQHKRRRIALKKQRTKKNKEEAAEYAKLLAKRMKEAKEKRQEQIAKRRRLSSLRASTSKSESSQK

SEQ ID NO: 5757 - protein, 814 aa, Homo sapiens
MSVVGLDVGSQSCYIAVARAGGIETIANEFSDRCTPSVISFGSKNRTIGVAAKNQQITHANNTVSNFKRFHGRAFNDPFIQKEKENLSYDLVPLKNGGVGIKVMYMGEEHLFSVEQITAMLLTKLKETAENSLKKPVTDCVISVPSFFTDAERRSVLDAAQIVGLNCLRLMNDMTAVALNYGIYKQDLPSLDEKPRIVVFVDMGHSAFQVSACAFNKGKLKVLGTAFDPFLGGKNFDEKLVEHFCAEFKTKYKLDAKSKIRALLRLYQECEKLKKLMSSNSTDLPLNIECFMNDKDVSGKMNRSQFEELCAELLQKIEVPLYSLLEQTHLKVEDVSAVEIVGGATRIPAVKERIAKFFGKDISTTLNADEAVARGCALQCAILSPAFKVREFSVTDAVPFPISLIWNHDSEDTEGVHEVFSRNHAAPFSKVLTFLRRGPFELEAFYSDPQGVPYPEAKIGRFVVQNVSAQKDGEKSRVKVKVRVNTHGIFTISTASMVEKVPTEENEMSSEADMECLNQRPPENPDTDANEKKVDQPPEAKKPKIKVVNVELPIEANLVWQLGKDLLNMYIETEGKMIMQDKLEKERNDAKNAVEEYVYEFRDKLCGPYEKFICEQDHQNFLRLLTETEDWLYEEGEDQAKQAYVDKLEELMKIGTPVKVRFQEAEERPKMFEELGQRLQHYAKIAADFRNKDEKYNHIDESEMKKVEKSVNEVMEWMNNVMNAQAKKSLDQDPVVRAQEIKTKIKELNNTCEPVVTQPKPKIESPKLERTPNGPNIDKKEEDLEDKNNFGAEPPHQNGECYPNEKNSVNMDLD

SEQ ID NO: 5758 - protein, 290 aa, Homo sapiens
MGSSKKVTLSVLSREQSEGVGARVRRSIGRPELKNLDPFLLFDEFKGGRPGGFPDHPHRGFETVSYLLEGGSMAHEDFCGHTGKMNPGDLQWMTAGRGILHAEMPCSEEPAHGLQLWVNLRSSEKMVEPQYQELKSEEIPKPSKDGVTVAVISGEALGIKSKVYTRTPTLYLDFKLDPGAKHSQPIPKGWTSFIYTISGDVYIGPDDAQQKIEPHHTAVLGEGDSVQVENKDPKRSHFVLIAGEPLREPVIQHGPFVMNTNEEISQAILDFRNAKNGFERAKTWKSKIGN

SEQ ID NO: 5759 - protein, 139 aa, Homo sapiens
MAGKKVLIVYAHQEPKSFNGSLKNVAVDELSRQGCTVTVSDLYAMNLEPRATDKDITGTLSNPEVFNYGVETHEAYKQRSLASDITDEQKKVREADLVIFQFPLYWFSVPAILKGWMDRVLCQGFAFDIPGFYDSGLLQ

SEQ ID NO: 5760 - protein, 252 aa, Homo sapiens
MDGKQGGMDGSKPAGPRDFPGIRLLSNPLMGDAVSDWSPMHEAAIHGHQLSLRNLISQGWAVNIITADHVSPLHEACLGGHLSCVKILLKHGAQVNGVTADWHTPLFNACVSGSWDCVNLLLQHGASVQPESDLASPIHEAARRAYGGNIDHKISHLGTPLYLACENQQRACVKKLLESGADVNQGKGQDSPLHAVARTASEELACLLMDFGADTQAKNAEGKRPVELVPPESPLAQLFLEREGASLPKPKP

SEQ ID NO: 5761 - protein, 262 aa, Homo sapiens
MDGKQGGMDGSKPAGPRDFPGIRLLSNPLMGDAVSDWSPMHEAAIHGHQLSLRNLISQGWAVNIITADHVSPLHEACLGGHLSCVKILLKHGAQVNGVTADWHTPLFNACVSGSWDCVNLLLQHGASVQPESDLASPIHEAARRGHVECVNSLIAYGGNIDHKISHLGTPLYLACENQQRACVKKLLESGADVNQGKGQDSPLHAVARTASEELACLLMDFGADTQAKNAEGKRPVELVPPESPLAQLFLEREGASLPKPKP

SEQ ID NO: 5762 - protein, 294 aa, Homo sapiens
MDGKQGGMDGSKPAGPRDFPGIRLLSNPLMGDAVSDWSPMHEAAIHGHQLSLRNLISQGWAVNIITADHVSPLHEACLGGHLSCVKILLKHGAQVNGVTADWHTPLFNACVSGSWDCVNLLLQHGASVQPESDLASPIHEAARRGHVECVNSLIAYGGNIDHKISHLGTPLYLACENQQRACVKKLLESGADVNQGKGQDSPLHAVARTASEELACLLMDFGADTQAKNAEGKRPVELVPPESPLAQLFLEREGPPSLMQLCRLRIRKCFGIQQHHKITKLVLPEDLKQFLLHL

SEQ ID NO: 5763 - protein, 158 aa, Homo sapiens
MGKGDPKKPRGKMSSYAFFVQTCREEHKKKHPDASVNFSEFSKKCSERWKTMSAKEKGKFEDMAKADKARYEREMKTYIPPKGETKKKFKDPNAPKRPPSAFFLFCSEYRPKIKGEHPGLSIGDVAKKLGEMWNNTAADDKQPYEKKAAKLKEKYEKF

SEQ ID NO: 5764 - protein, 490 aa, Homo sapiens
MNLAEICDNAKKGREYALLGNYDSSMVYYQGVMQQIQRHCQSVRDPAIKGKWQQVRQELLEEYEQVKSIVSTLESFKIDKPPDFPVSCQDEPFRDPAVWPPPVPAEHRAPPQIRRPNREVRPLRKEMAGVGARGPVGRAHPISKSEKPSTSRDKDYRARGRDDKGRKNMQDGASDGEMPKFDGAGYDKDLVEALERDIVSRNPSIHWDDIADLEEAKKLLREAVVLPMWMPDFFKGIRRPWKGVLMVGPPGTGKTMLAKAVATECGTTFFNVSSSTLTSKYRGESEKLVRLLFEMARFYAPTTIFIDEIDSICSRRGTSDEHEASRRVKSELLIQMDGVGGALENDDPSKMVMVLAATNFPWDIDEALRRRLEKRIYIPLPTAKGRAELLKINLREVELDPDIQLEDIAEKIEGYSGADITNVCRDASLMAMRRRINGLSPEEIRALSKEELQMPVTKGDFELALKKIAKSVSAADLEKYEKWMVEFGSA

SEQ ID NO: 5765 - protein, 147 aa, Homo sapiens
MPNIVLFSGSSHQDLSQRVADRLGLELGKVVTKKFSNQETSVEIGESVRGEDVYIIQSGCGEINDNLMELLIMINACKIASSSRVTAVIPCFPYARQDKKDKSRAPISAKLVANMLSVAGADHIITMDLHASQIQGKHCRVEELYHC

SEQ ID NO: 5766 - protein, 1008 aa, Homo sapiens
MSSVSGNASFILGTGKIVTPQKHAELPPNPCTPDTFKSPLNFSTVTVEQLGITPESFVRNSAGKSSSYLKKCRRRSAVGARGSPETNHLIRFIARQQNIKNARKSPLAQDSPSQGSPALYRNVNTLRERISAFQSAFHSIKENEKMTGCLEFSEAGKESEMTDLTRKEGLSACQQSGFPAVLSSKRRRISYQRDSDENLTDAEGKVIGLQIFNIDTDRACAVETSVDLSEISSKLGSTQSGFLVEESLPLSELTETSNALKVADCVVGKGSSDAVSPDTFTAEVSSDAVPDVRSPATPACRRDLPTPKTFVLRSVLKKPSVKMCLESLQEHCNNLYDDDGTHPSLISNLPNCCKEKEAEDEENFEAPAFLNMRKRKRVTFGEDLSPEVFDESLPANTPLRKGGTPVCKKDFSGLSSLLLEQSPVPEPLPQPDFDDKGENLENIEPLQVSFAVLSSPNKSSISETLSGTDTFSSSNNHEKISSPKVGRITRTSNRRNQLVSVVEESVCNLLNTEVQPCKEKKINRRKSQETKCTKRALPKKSQVLKSCRKKKGKGKKSVQKSLYGERDIASKKPLLSPIPELPEVPEMTPSIPSIRRLGSGYFSSNGKLEEVKTPKNPVKRKDLLRHDPDLHMHQGYDKYDVSEFCSYIKSSSSLGNATSDEDPNTNIMNINENKNIPKAKNKSESENEPKAGTDSPVSCASVTEERVASDSPKPALTLQQGQEFSAGGQNAENLCQFFKISPDLNIKCERKDDFLGAAEGKLQCNRLMPNSQKDCHCLGDVLIENTKESKSQSEDLGRKPMESSSVVSCRDRKDRRRSMCYSDGRSLHLEKNGNHTPSSSVGSSVEISLENSELFKDLSDAIEQTFQRRNSETKVRRSTRLQKDLENEGLVWISLPLPSTSQKAKRRTICTFDSSGFESMSPIKETVSSRQKPQMAPPVSDPENSQGPAAGSSDEPGKRRKSFCISTLANTKATSQFKGYRRRSSLNGKGESSLTALERIEHNGERKQ

SEQ ID NO: 5767 - protein, 117 aa, Homo sapiens
MSSNVPADMINLRLILVSGKTKEFLFSPNDSASDIAKHVYDNWPMDWEEEQVSSPNILRLIYQGRFLHGNVTLGALKLPFGKTTVMHLVARETLPEPNSQGQRNREKTGESNCCVIL

SEQ ID NO: 5768 - protein, 169 aa, Homo sapiens
MCHRKPGTPGVGKTTLGKELASKSGLKYINVGDLAREEQLYDGYDEEYDCPILDEDRVVDELDNQMREGGVIVDYHGCDFFPERWFHIVFVLRTDTNVLYERLETRGYNEKKLTDNIQCEIFQVLYEEATASYKEEIVHQLPSNKPEELENNVDQILKWIEQWIKDHNS

SEQ ID NO: 5769 - protein, 172 aa, Homo sapiens
MLLPNILLTGTPGVGKTTLGKELASKSGLKYINVGDLAREEQLYDGYDEEYDCPILDEDRVVDELDNQMREGGVIVDYHGCDFFPERWFHIVFVLRTDTNVLYERLETRGYNEKKLTDNIQCEIFQVLYEEATASYKEEIVHQLPSNKPEELENNVDQILKWIEQWIKDHNS

SEQ ID NO: 5770 - protein, 451 aa, Homo sapiens
MNLEGGGRGGEFGMSAVSCGNGKLRQWLIDQIDSGKYPGLVWENEEKSIFRIPWKHAGKQDYNREEDAALFKAWALFKGKFREGIDKPDPPTWKTRLRCALNKSNDFEELVERSQLDISDPYKVYRIVPEGAKKGAKQLTLEDPQMSMSHPYTMTTPYPSLPAQQVHNYMMPPLDRSWRDYVPDQPHPEIPYQCPMTFGPRGHHWQGPACENGCQVTGTFYACAPPESQAPGVPTEPSIRSAEALAFSDCRLHICLYYREILVKELTTSSPEGCRISHGHTYDASNLDQVLFPYPEDNGQRKNIEKLLSHLERGVVLWMAPDGLYAKRLCQSRIYWDGPLALCNDRPNKLERDQTCKLFDTQQFLSELQAFAHHGRSLPRFQVTLCFGEEFPDPQRQRKLITAHVEPLLARQLYYFAQQNSGHFLRGYDLPEHISNPEDYHRSIRHSSIQE

SEQ ID NO: 5771 - protein, 704 aa, Homo sapiens
MIARCLLAVRSLRRVGGSRILLRMTLGREVMSPLQAMSSYTVAGRNVLRWDLSPEQIKTRTEELIVQTKQVYDAVGMLGIEEVTYENCLQALADVEVKYIVERTMLDFPQHVSSDKEVRAASTEADKRLSRFDIEMSMRGDIFERIVHLQETCDLGKIKPEARRYLEKSIKMGKRNGLHLPEQVQNEIKSMKKRMSELCIDFNKNLNEDDTFLVFSKAELGALPDDFIDSLEKTDDDKYKITLKYPHYFPVMKKCCIPETRRRMEMAFNTRCKEENTIILQQLLPLRTKVAKLLGYSTHADFVLEMNTAKSTSRVTAFLDDLSQKLKPLGEAEREFILNLKKKECKDRGFEYDGKINAWDLYYYMTQTEELKYSIDQEFLKEYFPIEVVTEGLLNTYQELLGLSFEQMTDAHVWNKSVTLYTVKDKATGEVLGQFYLDLYPREGKYNHAACFGLQPGCLLPDGSRMMAVAALVVNFSQPVAGRPSLLRHDEVRTYFHEFGHVMHQICAQTDFARFSGTNVETDFVEVPSQMLENWVWDVDSLRRLSKHYKDGSPIADDLLEKLVASRLVNTGLLTLRQIVLSKVDQSLHTNTSLDAASEYAKYCSEILGVAATPGTNMPATFGHLAGGYDGQYYGYLWSEVFSMDMFYSCFKKEGIMNPEVGMKYRNLILKPGGSLDGMDMLHNFLKREPNQKAFLMSRGLHAP

SEQ ID NO: 5772 - protein, 674 aa, Homo sapiens
MNWNEKPKSATLPPLYPKSQPPFLHQSLINQITTTSQSSFSYPGSNQEACMYPGNSNPISQPLLNIQNYPQQISVSDMHNGTVVASHTSVERITYANVNGPKQLTHNLQMSSGVTQNVWLNSPMRNPVHSHIGATVSHQTDFGANVPNMPALQSQLITSDTYSMQMQMIPSNSTRLPVAYQGNQGLNQSFSEQQVDWTQQCISKGLTYPDYRPPPKLYRYSPQSFLPDSTIQKQNFIPHTSLQVKNSQLLNSVLTLPSRQTSAVPSQQYATQTDKRPPPPPYNCRYGSQPLQSTQHITKHLSMEVPQSREMLSSEIRTSFQQQWQNPNENVSTIGNFTNLKVNTNSKQPFNSPIRSSVDGVQTLAQTNEEKIMDSCNPTSNQVLDTSVAKEKLVRDIKTLVEIKQKFSELARKIKINKDLLMAAGCIKMTNTSYSEPAQNSKLSLKQTAKIQSGPQITPVMPENAERQTPTVVESAETNKTQCMLNSDIQEVNCRRFNQVDSVLPNPVYSEKRPMPDSSHDVKVLTSKTSAVEMTQAVLNTQLSSENVTKVEQNSPAVCETISVPKSMSTEEYKSKIQNENMLLLALLSQARKTQKTVLKDANQTIQDSKPDSCEMNPNTQMTGNQLNLKNMETPSTSNVSGRVLDNSFCSGQESSTKGMPAKSDSSCSMEVLA

SEQ ID NO: 5773 - protein, 194 aa, Homo sapiens
MQRARPLQALLDGRGLCVNASAVSRLRAYLLPAPPAPGNASESEEDRSAGSVESPSVSSTHRVSDPKFHPLHSKIIIIKKGHAKDSQRYKVDYESQSTDTQNFSSESKRETEYGPCRREMEDTLNHLKFLNVLSPRGVHIPNCDKKGFYKKKQCRPSKGRKRGFCWCVDKYGQPLPGYTTKGKEDVHCYSMQSK

SEQ ID NO: 5774 - protein, 66 aa, Homo sapiens
MAGGKAGKDSGKAKAKAVSRSQRAGLQFPVGRIHRHLKTRTTSHGRVGATAAVYSAAILEYLTAEV

SEQ ID NO: 5775 - protein, 132 aa, Homo sapiens
MGRTWCGMWRRRRPGRRSAVPRWPHLSSQSGVEPPDRWTGTPGWPSRDQEAPGSMMPPAAAQPSAHGALVPPATAHEPVDHPALHWLACCCCLSLPGQLPLAIRLGWDLDLEAGPSSGKLCPRARRWQPLPS

SEQ ID NO: 5776 - protein, 21 aa, Homo sapiens
QKKKLCFKENERASMCVFLSV

SEQ ID NO: 5777 - protein, 94 aa, Homo sapiens
MSAETASGPTEDQVEILEYNFNKVDKHPDSTTLCLIAAEAGLSEEETQGSDLISRSKIWHPESSPQREGYPHDSLPCLAFDYFSLLPPQCKEMV

SEQ ID NO: 5778 - protein, 323 aa, Homo sapiens
MGNLLKVLTREIENYPHFFLDFENAQPTEGEREIWNQISAVLQDSESILADLQAYKGAGPEIRDAIQNPNDIQLQEKAWNAVCPLVVRLKRFYEFSIRLEKALQSLLESLTCPPYTPTQHLEREQALAKEFAEILHFTLRFDELKMRNPAIQNDFSYYRRTISRNRINNMHLDIENEVNNEMANRMSLFYAEATPMLKTLSNATMHFVSENKTLPIENTTDCLSTMTSVCKVMLETPEYRSRFTSEETLMFCMRVMVGVIILYDHVHPVGAFCKTSKIDMKGCIKVLKEQAPDSVEGLLNALRFTTKHLNDESTSKQIRAMLQ

SEQ ID NO: 5779 - protein, 284 aa, Homo sapiens
MWRGLALARAIGCAARGRGQWAVRAADCAQSGRHPGPAVVCGRRLISVLEQIRHFVMMPEINTNHLDKQQVQLLAEMCILIDENDNKIGAETKKNCHLNENIEKGLLHRAFSVFLFNTENKLLLQQRSDAKITFPGCFTNTCCSHPLSNPAELEESDALGVRRAAQRRLKAELGIPLEEVPPEEINYLTRIHYKAQSDGIWGEHEIDYILLVRKNVTLNPDPNEIKSYCYVSKEELKELLKKAASGEIKITPWFKIIAATFLFKWWDNLNHLNQFVDHEKIYRM

SEQ ID NO: 5780 - protein, 298 aa, Homo sapiens
MTEQAISFAKDFLAGGIAAAISKTAVAPIERVKLLLQVQHASKQIAADKQYKGIVDCIVRIPKEQGVLSFWRGNLANVIRYFPTQALNFAFKDKYKQIFLGGVDKHTQFWRYFAGNLASGGAAGATSLCFVYPLDFARTRLAADVGKSGTEREFRGLGDCLVKITKSDGIRGLYQGFSVSVQGIIIYRAAYFGVYDTAKGMLPDPKNTHIVVSWMIAQTVTAVAGVVSYPFDTVRRRMMMQSGRKGADIMYTGTVDCWRKIFRDEGGKAFFKGAWSNVLRGMGGAFVLVLYDELKKVI

SEQ ID NO: 5781 - protein, 207 aa, Homo sapiens
MHSFVRTCKKLREEEAARLFYQIASAVAHCHDGGLVLRDLKLRKFIFKDEERTRVKLESLEDAYILRGDDDSLSDKHGCPAYVSPEILNTSGSYSGKAADVWSLGVMLYTMLVGRYPFHDIEPSSLFSKIRRGQFNIPETLSPKAKCLIRSILRREPSERLTSQEILDHPWFSTDFSVSNSAYGAKEVSDQLVPDVNMEENLDPFFN

SEQ ID NO: 5782 - protein, 383 aa, Homo sapiens
MERLQKQPLTSPGSVSPSRDSSVPGSPSSIVAKMDNQVLGYKDLAAIPKDKAILDIERPDLMIYEPHFTYSLLEHVELPRSRERSLSPKSTSPPPSPEVWADSRSPGIISQASAPRTTGTPRTSLPHFHHPETSRPDSNIYKKPPIYKQRESVGGSPQTKHLIEDLIIESSKFPAAQPPDPNQPAKIETDYWPCPPSLAVVETEWRKRKASRRGAEEEEEEEDDDSGEEMKALRERQREELSKVTSNLGKMILKEEMEKSLPIRRKTRSLPDRTPFHTSLHQGTSKSSSLPAYGRTTLSRLQSTEFSPSGSETGSPGLQIYPYEMLVVTNKGRTKLPPGVDRMRLERHLSAEDFSRVFAMSPEEFGKLALWKRNELKKKASLF

SEQ ID NO: 5783 - protein, 445 aa, Homo sapiens
MWPGNAWRAALFWVPRGRRAQSALAQLRGILEGELEGIRGAGTWKSERVITSRQGPHIRVDGVSGGPGTVIFPGLPLPHLSCCIHLLSFTSGILNFCANNYLGLSSHPEVIQAGLQALEEFGAGLSSVRFICGTQSIHKNLEAKIARFHQREDAILYPSCYDANAGLFEALLTPEDAVLSDELNHASIIDGIRLCKAHKYRYRHLDMADLEAKLQEAQKHRLRLVATDGAFSMDGDIAPLQEICCLASRYGALVFMDECHATGFLGPTGRGTDELLGVMDQVTIINSTLGKALGGASGGYTTGPGPLVSLLRQRARPYLFSNSLPPAVVGCASKALDLLMGSNTIVQSMAAKTQRFRSKMEAAGFTISGASHPICPVMLGDARLASRMADDMLKRGIFVIGFSYPVVPKGKARIRVQISAVHSEEDIDRCVEAFVEVGRLHGALP

SEQ ID NO: 5784 - protein, 587 aa, Homo sapiens
MSTGFSFGSGTLGSTTVAAGGTSTGGVFSFGTGASSNPSVGLNFGNLGSTSTPATTSAPSSGFGTGLFGSKPATGFTLGGTNTGTPATTSAATTGFSLGFNKPAASATPFALPITSTSASGLTLSSALTSTPAASTGFTLNNLGGTTATTTTASTGLSLGGALAGLGGSLFQSTNTGTSGLGQNALGLTLGTTAATSTAGNEGLGGIDFSSSSDKKSDKTGTRPEDSKALKDENLPPVICQDVENLQKFVKEQKQVQEEISRMSSKAMLKVQEDIKALKQLLSLAANGIQRNTLNIDKLKIETAQELKNAEIALRTQKTPPGLQHEYAAPADYFRILVQQFEVQLQQYRQQIEELENHLATQANNSHITPQDLSMAMQKIYQTFVALAAQLQSIHENVKVLKEQYLGYRKMFLGDAVDVFETRRAEAKKWQNTPRVTTGPTPFSTMPNAAAVAMAATLTQQQQPATGPQPSLGVSFGTPFGSGIGTGLQSSGLGSSNLGGFGTSSGFGCSTTGASTFGFGTTNKPSGSLSAGFGSSSTSGFNFSNPGITASAGLTFGVSNPASAGFGTGGQLLQLKKPPAGNKRGKR

SEQ ID NO: 5785 - protein, 108 aa, Homo sapiens
MGVQVETISPGDGRTFPKRGQTCVVHYTGMLEDGKKFDSSRDRNKPFKFMLGKQEVIRGWEEGVAQMSVGQRAKLTISPDYAYGATGHPGIIPPHATLVFDVELLKLE

SEQ ID NO: 5786 - protein, 467 aa, Homo sapiens
MAPIWSPPGRVSGCHLSSGPAPGSAVGPWLGTPHPSLPLPLAPHKPPPPGLPGSAGQTSLPAQRECVFPGDAAVHQELCGLGFEECLGSIPQAHQCYLTNGPKRRKCSPRRRGRAPAWLCGGSPPCHQGLGHEHPSSGPSTNCSPRPTAQWSVEDEEEAVHEQCQHERDRQLQAQDEEGGGHVPERPKQEMLLSLKPSEAPELDEDEGFGDWSQRPEQRQQHEGAQGALDSGEPPQCRSPEGEQEDRPGLHAYEKEDSDEVHLEELSLSKEGPGPEDTVQDNLGAAGAEEEQEEHQKCQQPRTPSPLVLEGTIEQSSPPLSPTTKLIDRTESLNRSIEKSNSVKKSQPDLPISKIDQWLEQYTQAIETAGRTPKLARQASIELPSMAVASTKSRWETGEVQAQSAAKTPSCKDIVAGDMSKKSLWEQKGGSKTSSTIKSTPSGKRYKFVATGHGKYEKVLVEGGPAP

SEQ ID NO: 5787 - protein, 524 aa, Homo sapiens
MTAEDSTAAMSSDSAAGSSAKVPEGVAGAPNEAALLALMERTGYSMVQENGQRKYGGPPPGWEGPHPQRGCEVFVGKIPRDVYEDELVPVFEAVGRIYELRLMMDFDGKNRGYAFVMYCHKHEAKRAVRELNNYEIRPGRLLGVCCSVDNCRLFIGGIPKMKKREEILEEIAKVTEGVLDVIVYASAADKMKNRGFAFVEYESHRAAAMARRKLMPGRIQLWGHQIAVDWAEPEIDVDEDVMETVKILYVRNLMIETTEDTIKKSFGQFNPGCVERVKKIRDYAFVHFTSREDAVHAMNNLNGTELEGSCLEVTLAKPVDKEQYSRYQKAARGGGAAEAAQQPSYVYSCDPYTLAYYGYPYNALIGPNRDYFVKVAIPAIGAQYSMFPAAPAPKMIEDGKIHTVEHMISPIAVQPDPASAAAAAAAAAAAAAAVIPTVSTPPPFQGRPITPVYTVAPNVQRIPTAGIYGASYVPFAAPATATIATLQKNAAAAAAMYGGYAGYIPQAFPAAAIQVPIPDVYQTY

SEQ ID NO: 5788 - protein, 546 aa, Homo sapiens
MRCLAPRPAGSYLSEPQGSSQCATMELGPLEGGYLELLNSDADPLCLYHFYDQMDLAGEEEIELYSEPDTDTINCDQFSRLLCDMEGDEETREAYANIAELDQYVFQDSQLEGLSKDIFKHIGPDEVIGESMEMPAEVGQKSQKRPFPEELPADLKHWKPVPFSSSSLSCLNLPEGPIQFVPTISTLPHGLWQISEAGTGVSSIFIYHGEVPQASQVPPPSGFTVHGLPTSPDRPGSTSPFAPSATDLPSMPEPALTSRANMTEHKTSPTQCPAAGEVSNKLPKWPGLAWSPCLGLRPSLHRAALSDTVALWESLQQHGETKLLQAAEEKFTIEPFKAKSLKDVEDLGKLVQTQRTRSSSEDTAGELPAVRDLKKLEFALGPVSGPQAFPKLVRILTAFSSLQHLDLDALSENKIGDEGVSQLSATFPQLKSLETLNLSQNNITDLGAYKLAEALPSLAASLLRLSLYNNCICDVGAESLARVLPDMVSLRVMDVQYNKFTAAGAQQLAASLRRCPHVETLAMWTPTIPFSVQEHLQQQDSRISLR

SEQ ID NO: 5789 - protein, 137 aa, Homo sapiens
MGLRAGGTLGRAGAGRGAPEGPGPSGGAQGGSIHSGRIAAVHNVPLSVLIRPLPSVLDPAKVQSLVDTIREDPDSVPPIDVLWIKGAQGGDYFYSFGGCHRYAAYQQLQRETIPAKLVQSTLSDLRVYLGASTPDLQ

SEQ ID NO: 5790 - protein, 361 aa, Homo sapiens
MWVLTPAAFAGKLLSVFRQPLSSLWRSLVPLFCWLRATFWLLATKRRKQQLVLRGPDETKEEEEDPPLPTTPTSVNYHFTRQCNYKCGFCFHTAKTSFVLPLEEAKRGLLLLKEAGMEKINFSGGEPFLQDRGEYLGKLVRFCKVELRLPSVSIVSNGSLIRERWFQNYGEYLDILAISCDSFDEEVNVLIGRGQGKKNHVENLQKLRRWCRDYRVAFKINSVINRFNVEEDMTEQIKALNPVRWKVFQCLLIEGENCGEDALREAERFVIGDEEFERFLERHKEVSCLVPESNQKMKDSYLILDEYMRFLNCRKGRKDPSKSILDVGVEEAIKFSGFDEKMFLKRGGKYIWSKADLKLDW

SEQ ID NO: 5791 - protein, 208 aa, Homo sapiens
MAPLGEVGNYFGVQDAVPFGNVPVLPVDSPVLLSDHLGQSEAGGLPRGPAVTDLDHLKGILRRRQLYCRTGFHLEIFPNGTIQGTRKDHSRFGILEFISIAVGLVSIRGVDSGLYLGMNEKGELYGSEKLTQECVFREQFEENWYNTYSSNLYKHVDTGRRYYVALNKDGTPREGTRTKRHQKFTHFLPRPVDPDKVPELYKDILSQS

SEQ ID NO: 5792 - protein, 493 aa, Homo sapiens
MTANGTAEAVQIQFGLINCGNKYLTAEAFGFKVNASASSLKKKQIWTLEQPPDEAGSAAVCLRSHLGRYLAADKDGNVTCEREVPGPDCRFLIVAHDDGRWSLQSEAHRRYFGGTEDRLSCFAQTVSPAEKWSVHIAMHPQVNIYSVTRKRYAHLSARPADEIAVDRDVPWGVDSLITLAFQDQRYSVQTADHRFLRHDGRLVARPEPATGYTLEFRSGKVAFRDCEGRYLAPSGPSGTLKAGKATKVGKDELFALEQSCAQVVLQAANERNVSTRQGMDLSANQDEETDQETFQLEIDRDTKKCAFRTHTGKYWTLTATGGVQSTASSKNASCYFDIEWRDRRITLRASNGKFVTSKKNGQLAASVETAGDSELFLMKLINRPIIVFRGEHGFIGCRKVTGTLDANRSSYDVFQLEFNDGAYNIKDSTGKYWTVGSDSAVTSSGDTPVDFFFEFCDYNKVAIKVGGRYLKGDHAGVLKASAETVDPASLWEY

SEQ ID NO: 5793 - protein, 1004 aa, Homo sapiens
MRDFGFGVLQTAPLRSSSPGPLFCGEAYGPYAVGSVNPLPSATPFGPLSPPPLPVTGFLEAASPFSVPLGGGAGSPAAAASSSSPFLAHQQTMQDELLLGLTQQPARPLSGAAATEKLPDHHPGGGTIAGVTHLLPSQDFKPSLHHPSSSSASSCCCCRTSSPQDFSKRQQQQLSSQKRKEFSPPHLPHPPDSKPPPPPPPLHCPGRFSPPPPPAGPLLQPAQLAQRQQQQPPQQFSLLHQQHLSPQDFAPRQRPADLPPLPQLPPSPPAAPRRRHGGAGSPRKTPAAGEGSAAESPNAGLASSTPVNPAPGSMESPNHPLLNSPSNLLPGGALGAGAFSSLQSPDLPHPGGGGGGGGGGPPGGGGGGGSASPPPLPGFGTPWSVQTASPPPQPQQPPPTQPQQQPPPPQQPPQPQPQPPGSSATTPGGGSGGSLSAMPPPSPDSENGFYPGLPSSMNPAFFPSFSPVSPHGCTGLSVPTSGGGGGGFGGPFSATAVPPPPPPAMNIPQQQPPPPAAPQQPQSRRSPVSPQLQQQHQAAAAAFLQQRNSYNHHQPLLKQSPWSNHQSSGWGTGSMSWGAMHGRDHRRTGNMGIPGTMNQISPLKKPFSGNVIAPPKFTRSTPSLTPKSWIEDNVFRTDNNSNTLLPLQDRSRMYDSLNMHSLENSLIDIMRAEHDPLKGRLSYPHPGTDNLLMLNARSYGRRRGRSSLFPIDDGLLDDGHSDQVGVLNSPTCYSAHQNGERIERFSRKVFVGGLPPDIDEDEITASFRRFGPLVVDWPHKAESKSYFPPKGYAFLLFQEESSVQALIDACIEEDGKLYLCVSSPTIKDKPVQIRPWNLSDSDFVMDGSQPLDPRKTIFVGGVPRPLRAVELAMIMDRLYGGVCYAGIDTDPELKYPKGAGRVAFSNQQSYIAAISARFVQLQHGDIDKRVEVKPYVLDDQMCDECQGARCGGKFAPFFCANVTCLQYYCEFCWANIHSRAGREFHKPLVKEGADRPRQIHFRWN

SEQ ID NO: 5794 - protein, 999 aa, Homo sapiens
MRDFGFGVLQTAPLRSSSPGPLFCGEAYGPYAVGSVNPLPSATPFGPLSPPPLPVTGFLEAASPFSVPLGGGAGSPAAAASSSSPFLAHQQTMQDELLLGLTQQPARPLSGAAATEKLPDHHPGGGTIAGVTHLLPSQDFKPSLHHPSSSSASSCCCCRTSSPQDFSKRQQQQLSSQKRKEFSPPHLPHPPDSKPPPPPPPLHCPGRFSPPPPPAGPLLQPAQLAQRQQQQPPQQFSLLHQQHLSPQDFAPRQRPADLPPLPQLPPSPPAAPRRRHGGAGSPRKTPAAGEGSAAESPNAGLASSTPVNPAPGSMESPNHPLLNSPSNLLPGGALGAGAFSSLQSPDLPHPGGGGGGGGGGPPGGGGGGGSASPPPLPGFGTPWSVQTASPPPQPQQPPPTQPQQQPPPPQQPPQPQPQPPGSSATTPGGGSGGSLSAMPPPSPDSENGFYPGLPSSMNPAFFPSFSPVSPHGCTGLSVPTSGGGGGGFGGPFSATAVPPPPPPAMNIPQQQPPPPAAPQQPQSRRSPVSPQLQQQHQAAAAAFLQQRNSYNHHQPLLKQSPWSNHQSSGWGTGSMSWGAMHGRDHRRTGNMGIPGTMNQISPLKKPFSGNVIAPPKFTRSTPSLTPKSWIEDNVFRTDNNSNTLLPLQVRMDRSRMYDSLNMHSLENSLIDIMRAEHDPLKGRLSYPHPGTDNLLMLNGRSSLFPIDDGLLDDGHSDQVGVLNSPTCYSAHQNGERIERFSRKVFVGGLPPDIDEDEITASFRRFGPLVVDWPHKAESKSYFPPKGYAFLLFQEESSVQALIDACIEEDGKLYLCVSSPTIKDKPVQIRPWNLSDSDFVMDGSQPLDPRKTIFVGGVPRPLRAVELAMIMDRLYGGVCYAGIDTDPELKYPKGAGRVAFSNQQSYIAAISARFVQLQHGDIDKRVEVKPYVLDDQMCDECQGARCGGKFAPFFCANVTCLQYYCEFCWANIHSRAGREFHKPLVKEGADRPRQIHFRWN

SEQ ID NO: 5795 - protein, 845 aa, Homo sapiens
MGRKLDPTKEKRGPGRKARKQKGAETELVRFLPAVSDENSKRLSSRARKRAAKRRLGSVEAPKTNKSPEAKPLPGKLPKGISAGAVQTAGKKGPQSLFNAPRGKKRPAPGSDEEEEEEDSEEDGMVNHGDLWGSEDDADTVDDYGADSNSEDEEEGEAAGVQWLGLGSLQPPPPGFKQFSCLSFPSSWDLQLLPIERAARKQKAREAAAGIQWSEEETEDEEEEKEVTPESGPPKVEEADGGLQINVDEEPFVLPPAGEMEQDAQAPDLQRVHKRIQDIVGILRDFGAQREEGRSRSEYLNRLKKDLAIYYSYGDFLLGKLMDLFPLSELVEFLEANEVPRPVTLRTNTLKTRRRDLAQALINRGVNLDPLGKWSKTGLVVYDSSVPIGATPEYLAGHYMLQGASSMLPVMALAPQEHERILDMCCAPGGKTSYMAQLMKNTGVILANDANAERLKSVVGNLHRLGVTNTIISHYDGRQFPKVVGGFDRVLLDAPCSGTGVISKDPAVKTNKDEKDILRCAHLQKELLLSAIDSVNATSKTGGYLVYCTCSITVEENEWVVDYALKKRNVRLVPTGLDFGQEGFTRFRERRFHPSLRSTRRFYPHTHNMDGFFIAKFKKFSNSIPQSQTGNSETATPTNVDLPQVIPKSENSSQPAKKAKGAAKTKQQLQKQQHPKKASFQKLNGISKGADSELSTVPSVTKTQASSSFQDSSQPAGKAEGIREPKVTGKLKQRSPKLQSSKKVAFLRQNAPPKGTDTQTPAVLSPSKTQATLKPKDHHQPLGRAKGVEKQQLPEQPFEKAAFQKQNDTPKGPQPPTVSPIRSSRPPPAKRKKSQSRGNSQLLLS

SEQ ID NO: 5796 - protein, 919 aa, Homo sapiens
MAPQMYEFHLPLSPEELLKSGGVNQYVVQEVLSIKHLPPQLRAFQAAFRAQGPLAMLQHFDTIYSILHLVTGCCYRLLENPTINHQKNRPTREAITHLLGVALTRYNHMLSATVKIIQMLQHFEHLAPVLVAAVSLWATDYGMKSIVGEIVREIGQKCPQELSRDPSGTKGFAAFLTELAERVPAILMSSMCILLDHLDGENYMMRNAVLAAMAEMVLQVLSGDQLEAAARDTRDQFLDTLQAHGHDVNSFVRSRVLQLFTRIVQQKALPLTRFQAVVALAVGRLADKSVLVCKNAIQLLASFLANNPFSCKLSDADLAGPLQKETQKLQEMRAQRRTAAASAVLDPEEEWEAMLPELKSTLQQLLQLPQGEEEIPEQIANTETTEDVKGRIYQLLAKASYKKAIILTREATGHFQESEPFSHIDPEESEETRLLNILGLIFKGPAASTQEKNPRESTGNMVTGQTVCKNKPNMSDPEESRGNDELVKQEMLVQYLQDAYSFSRKITEAIGIISKMMYENTTTVVQEVIEFFVMVFQFGVPQALFGVRRMLPLIWSKEPGVREAVLNAYRQLYLNPKGDSARAKAQALIQNLSLLLVDASVGTIQCLEEILCEFVQKDELKPAVTQLLWERATEKVACCPLERCSSVMLLGMMARGKPEIVGSNLDTLVSIGLDEKFPQDYRLAQQVCHAIANISDRRKPSLGKRHPPFRLPQEHRLFERLRETVTKGFVHPDPLWIPFKEVAVTLIYQLAEGPEVICAQILQGCAKQALEKLEEKRTSQEDPKESPAMLPTFLLMNLLSLAGDVALQQLVHLEQAVSGELCRRRVLREEQEHKTKDPKEKNTSSETTMEEELGLVGATADDTEAELIRGICEMELLDGKQTLAAFVPLLLKVCNNPGLYSNPDLSAAASLALGKFCMI

SEQ ID NO: 5797 - protein, 207 aa, Homo sapiens
MSRESDVEAQQSHGSSACSQPHGSVTQSQGSSSQSQGISSSSTSTMPNSSQSSHSSSGTLSSLETVSTQELYSIPEDQEPEDQEPEEPTPAPWARLWALQDGFANLECVNDNYWFGRDKSCEYCFDEPLLKRTDKYRTYSKKHFRIFREVGPKNSYIAYIEDHSGNGTFVNTELVGKGKRRPLNNNSEIALSLSRNKEKILKIYSLS

SEQ ID NO: 5798 - protein, 340 aa, Homo sapiens
MAMQMQLEANADTSVEEESFGPQPISRLEQCGINANDVKKLEEAGFHTVEAVAYAPKKELINIKGISEAKADKILTESRSVARLECNSVILVYCTLRLSGSSDSPASASRVVGTTGGIETGSITEMFGEFRTGKTQICHTLAVTCQLPIDRGGGEGKAMYIDTEGTFRPERLLAVAERYGLSGSDVLDNVAYARAFNTDHQTQLLYQASAMMVESRYALLIVDSATALYRTDYSGRGELSARQMHLARFLRMLLRLADEFGVAVVITNQVVAQVDGAAMFAADPKKPIGGNIIAHASTTRLYLRKGRGETRICKIYDSPCLPEAEAMFAINADGVGDAKD

SEQ ID NO: 5799 - protein, 1376 aa, Homo sapiens
MFRAGEASKRPLPGPSPPRVRSVEVARGRAGYGFTLSGQAPCVLSCVMRGSPADFVGLRAGDQILAVNEINVKKASHEDVVKLIGKCSGVLHMVIAEGVGRFESCSSDEEGGLYEGKGWLKPKLDSKALGINRAERVVEEMQSGGIFNMIFENPSLCASNSEPLKLKQRSLSESAATRFDVGHESINNPNPNMLSKEEISKVIHDDSVFSIGLESHDDFALDASILNVAMIVGYLGSIELPSTSSNLESDSLQAIRGCMRRLRAEQKIHSLVTMKIMHDCVQLSTDKAGVVAEYPAEKLAFSAVCPDDRRFFGLVTMQTNDDGSLAQEEEGALRTSCHVFMVDPDLFNHKIHQGIARRFGFECTADPDTNGCLEFPASSLPVLQFISVLYRDMGELIEGMRARAFLDGDADAHQNNSTSSNSDSGIGNFHQEEKSNRVLVVDLGGSSSRHGPGGSAWDGVGGRGAQPWGAPWTGPFCPDPEGSPPFEAAHQTDRFWDLNKHLGPASPVEVPPASLRSSVPPSKRGTVGAGCGFNQRWLPVHVLREWQCGHTSDQDSYTDSTDGWSSINCGTLPPPMSKIPADRYRVEGSFAQPPLNAPKREWSRKAFGMQSIFGPHRNVRKTKEDKKGSKFGRGTGLTQPSQRTSARRSFGRSKRFSITRSLDDLESATVSDGELTGADLKDCVSNNSLSSNASLPSVQSCRRLRERRVASWAVSFERLLQDPVGVRYFSDFLRKEFSEENILFWQACEYFNHVPAHDKKELSYRAREIFSKFLCSKATTPVNIDSQAQLADDVLRAPHPDMFKEQQLQIFNLMKFDSYTRFLKSPLYQECILAEVEGRALPDSQQVPSSPASKHSLGSDHSSVSTPKKLSGKSKSGRSLNEELGDEDSEKKRKGAFFSWSRTRSTGRSQKKREHGDHADDALHANGGLCRRESQGSVSSAGSLDLSEACRTLAPEKDKATKHCCIHLPDGTSCVVAVKAGFSIKDILSGLCERHGINGAAADLFLVGGDKPLVLHQDSSILESRDLRLEKRTLFRLDLVPINRSVGLKAKPTKPVTEVLRPVVARYGLDLSGLLVRLSGEKEPLDLGAPISSLDGQRVVLEEKDPSRGKASADKQKGVPVKQNTAVNSSSRNHSATGEERTLGKSNSIKIKGENGKNARDPRLSKREESIAKIGKKKYQKINLDEAEEFFELISKAQSNRADDQRGLLRKEDLVLPEFLRLPPGSTELTLPTPAAVAKGFSKRSATGNGRESASQPGEQWEPVQESSDSPSTSPGSASSPPGPPGTTPPGQKSPSGPFCTPQSPVSLAQEGTAQIWKRQSQEVEAGGIQTVEDEHVAELTLMGEGDISSPNSTLLPPPSTPQEVPGPSRPGTSRF

SEQ ID NO: 5800 - protein, 207 aa, Homo sapiens
MKSCAVSLTTAAVAFGDEAKKMAEGKASRESEEESVSLTVEEREALGGMDSRLFGFVRLHEDGARTKTLLGKAVRCYESLILKAEGKVESDFFCQLGHFNLLLEDYSKALSAYQRYYSLQADYWKNAAFLYGLGLVYFYYNAFHWAIKAFQDVLYVDPSFCRAKEIHLRLGLMFKVNTDYKSSLKHFQLALIDCNPCTLSNAESKYF

SEQ ID NO: 5801 - protein, 434 aa, Homo sapiens
MASPRELTQNPLKKIWMPYSNGRPALHACQRGVCMTNCPTLIVMVGLPARGKTYISKKLTRYLNWIGVPTREFNVGQYRRDVVKTYKSFEFFLPDNEEGLKIRKQCALAALRDVRRFLSEEGGHVAVFDATNTTRERRATIFNFGEQNGYKTFFVESICVDPEVIAANIVQVKLGSPDYVNRDSDEATEDFMRRIECYENSYESLDEDLDRDLSYIKIMDVGQSYVVNRVADHIQSRIVYYLMNIHVTPRSIYLCRHGESELNLKGRIGGDPGLSPRGREFAKSLAQFISDQNIKDLKVWTSQMKRTIQTAEALGVPYEQWKVLNEIDASYEDLVQRLEPVIMELERQENVLVICHQAVMRCLLAYFLDKAAEQLPYLKCPLHTVLKLTPVAYGCKVESIFLNVAAVNTHRDRPQNVDISRPPEEALVTVPAHQ

SEQ ID NO: 5802 - protein, 408 aa, Homo sapiens
MEVNAGGVIAYISSSSSASSPASCHSEGSENSFQSSSSSVPSSPNSSNSDTNGNPKNGDLANIEGILKNDRIDCSMKTSKSSAPGMTKSHSGVTKFSGMVLLCKVCGDVASGFHYGVHACEGCKGFFRRSIQQNIQYKKCLKNENCSIMRMNRNRCQQCRFKKCLSVGMSRDAVRFGRIPKREKQRMLIEMQSAMKTMMNSQFSGHLQNDTLVEHHEQTALPAQEQLRPKPQLEQENIKSSSPPSSDFAKEEVIGMVTRAHKDTFMYNQEQQENSAESMQPQRGERIPKNMEQYNLNHDHCGNGLSSHFPCSESQQHLNGQFKGRNIMHYPNGHAICIANGHCMNFSNAYTQRVCDRVPIDGFSQNENKNSYLCNTGGRMHLYSVHIQPKFHQKQQYHTISSLNHEVL

SEQ ID NO: 5803 - protein, 1099 aa, Homo sapiens
MSSQTKFKKDKEIIAEYEAQIKEIRTQLVEQFKCLEQQSESRLQLLQDLQEFFRRKAEIELEYSRSLEKLAERFSSKIRSSREHQFKKDQYLLSPVNCWYLVLHQTRRESRDHATLNDIFMNNVIVRLSQISEDVIRLFKKSKEIGLQMHEELLKVTNELYTVMKTYHMYHAESISAESKLKEAEKQEEKQFNKSGDLSMNLLRHEDRPQRRSSVKKIEKMKEKRQAKYSENKLKCTKARNDYLLNLAATNAAISKYYIHDVSDLIDCCDLGFHASLARTFRTYLSAEYNLETSRHEGLDVIENAVDNLDSRSDKHTVMDMCNQVFCPPLKFEFQPHMGDEVCQVSAQQPVQTELLMRYHQLQSRLATLKIENEEVRKTLDATMQTLQDMLTVEDFDVSDAFQHSRSTESVKSAASETYMSKINIAKRRANQQETEMFYFTKFKEYVNGSNLITKLQAKHDLLKQTLGEGERAECGTTRPPCLPPKPQKMRRPRPLSVYSHKLFNGSMEAFIKDSGQAIPLVVESCIRYINLYGLQQQGIFRVPGSQVEVNDIKNSFERGEDPLVDDQNERDINSVAGVLKLYFRGLENPLFPKERFQDLISTIKLENPAERVHQIQQILVTLPRVVIVVMRYLFAFLNHLSQYSDENMMDPYNLAICFGPTLMHIPDGQDPVSCQAHINEVIKTIIIHHEAIFPSPRELEGPVYEKCMAGGEEYCDSPHSEPGAIDEVDHDNGTEPHTSDEEVEQIEAIAKFDYMGRSPRELSFKKGASLLLYHRASEDWWEGRHNGVDGLIPHQYIVVQDMDDAFSDSLSQKADSEASSGPLLDDKASSKNDLQSPTEHISDYGFGGVMGRVRLRSDGAAIPRRRSGGDTHSPPRGLGPSIDTPPRAAACPSSPHKIPLTRGRIESPEKRRMATFGSAGSINYPDKKALSEGHSMRSTCGSTRHSSLGDHKSLEAEALAEDIEKTMSTALHELRELERQNTVKQAPDVVLDTLEPLKNPPGPVSSEPASPLHTIVIRDPDAAMRRSSSSSTEMMTTFKPALSARLAGAQLRPPPMRPVRPVVQHRSSSSSSSGVGSPAVTPTEKMFPNSSADKSGTM

SEQ ID NO: 5804 - protein, 457 aa, Homo sapiens
MSKPHSEAGTAFIQTQQLHAAMADTFLEHMCRLDIDSPPITARNTGIICTIGPASRSVELKKGATLKITLDNAYMEKCDENILWLDYKNICKVVEVGSKIYVDDGLISLQVKQKGADFLVTEVENGGSLGSKKGVNLPGAAVDLPAVSEKDIQDLKFGVEQDVDMVFASFIRKASDVHEVRKVLGEKGKNIKIISKIENHEGVRRFDEILEASDGIMVARGDLGIEIPAEKVFLAQKMMIGRCNRAGKPVICATQMLESMIKKPRPTRAEGSDVANAVLDGADCIMLSGETAKGDYPLEAVRMQHLIAREAEAAIYHLQLFEELRRLAPITSDPTEATAVGAVEASFKCCSGAIIVLTKSGRSAHQVARYRPRAPIIAVTRNPQTARQAHLYRGIFPVLCKDPVQEAWAEDVDLRVNFAMNVGKARGFFKKGDVVIVLTGWRPGSGFTNTMRVVPVP

SEQ ID NO: 5805 - protein, 297 aa, Homo sapiens
MSDSWVPNSASGQDPGGRRRAWAELLAGRVKREKYNPERAQKLKESAVRLLRSHQDLNALLLEVEGPLCKKLSLSKVIDCDSSEAYANHSSSFIGSALQDQASRLGVPVGILSAGMVASSVGQICTAPAETSHPVLLTVEQRKKLSSLLEFAQYLLAHSMFSRLSFCQELWKIQSSLLLEAVWHLHVQGIVSLQELLESHPDMHAVGSWLFRNLCCLCEQMEASCQHADVARAMLSDFVQMFVLRGFQKNSDLRRTVEPEKMPQVTVDVLQRMLIFALDALAAGVQEESSTHKIVRC

SEQ ID NO: 5806 - protein, 631 aa, Homo sapiens
MAAAAGDGTVKPLQSAMKLANGAIELDTGNRPREAYTEYLRSIHYISQVLLEEVETTKEAGETVPPDTSKMLKLAQQCLERAQSTAAKLGKTRLKPTMPAAAPIPQPAGRHRRVYSDEGGKLSPFLPPEIFQKLQGAESQSCKKELTPLEEASLQNQKLKAAYEARMARLDPSQAMQKTSLTLSLQRQMMENLVIAKAREETLQRKMEERRLRLQEAANRRFCSQVALTPEEREQRALYAAILEYEQDHDWPKHWKAKLKRNPGDLSLVTSLVSHLLSLPDHPIAQLLRRLQCSVYSALYPAVSRAAAPAPGCCPPTPNPGSRRLRPSQSLHCMLSPPEPSAAPRPQDSPPTPPLQPGPVGSPSPLGDTASGLPDKDSSFEDLEQFLGTSERQGRGRGVQPEPQLQQLKTAVEEIHNAVDRLLSLTLLAFEGLNTAASKDRCLACIEEPFFSPLWPLLLALYRSVHRAREAALSRSMELYRNAPPTAIGIPTKLLPQNPEAKGATGYPYCAAAQELGLLVLESCPQKKLECIVRTLRIICVCAEDYCPTPEATPQAGPPPIAAAAIGADDLLPILSFVVLRSGLPQLVSECAALEEFIHEGYLIGEEGYCLTSLQSALSYVELLPRGGLAK

SEQ ID NO: 5807 - protein, 4158 aa, Homo sapiens
MTFRATDSEFDLTNIEEYAENSALSRLNNIKAKQRVSYVTSTENESDTQILTFRHITKAQEKTRKRQQPIKLEPLPVLKVYQDHKQPEYIHEQNRFQLMTAGIIKRPVSIAKKSFATSSTQFLEHQDAVKKMQIHRPYVEVFSPSPPKLPHTGIGKRGLFGTRSSAYPKYTFHDREEVVKANIRDPLQIIKIIRENEHLGFLYMIPAVPRSSIEYDTYNLKVVSYENINKNDYYTISQRAVTHIYNEDIEFIEIDRWEQEYLYHRELTKIPIFSLFRKWKAFSVWRKNVRSKKITGCQKSLQKNLFIVNPHLRPALLKINELCYHLSFMGLCYIEKCHTYTLQEFKAAQVIRLAEVTERLGEFRNEAKYVVRRACRFALRAAGFVPDDCAFGPFEDYHKVQSSGSFINTPHELPTYGDSEKMTYTEQASKRHYCMRLTCFIRLNDYLIENTMHILTVNAVNSLLNHLTDKLKRTPSADVIQKWITEEKPEVPDKKGTLMVEKQEEDESLIPMFLTELMLTVQSLLFEPSLEDFLDGILGAVNHCQNTVLSVPNLVPDSYFDAFTSPYINNKLEGKTCGTGPSLAAVFEDDKNFHTIISQIKETIQAAFESARIYAATFEKFQIFFKENESLDLQALKLQEPDINFFSEQLEKYHKQHKDAVALRPTRNVGLLLIDTRLLREKLIPSPLRCLEVLNFMLPRQSKKKVDAIIFEAQDAEYKLEFVPTTTTEYVHSLLFLDEIQERIESLEDEGNIVTQMYKLMEQYQVPTPPEDFAVFATMKPSIVAVRNAIDKSVGDRESSIKQFCVHLGSDLEELNNEVNEVKLQAQDPQILDISADQDKIRLILNNLQSVLADLQKRAFQYKSYQKNFKVEVSKFEALEEVSAELKLKQLLWDSFSEWDKLQQEWLKSKFDCLDPEVLNGQVSKYAKFVTQLEKGLPPNSVVPQLKYKVEKMKEKLPVIIDLRNPTLKARHWAAIEQTVDATLVDAEIPLTLERLSQLHVFDFGQEIQDISGQASGEAALEAILKKVEDSWKTTEFVILPHRDSKDVFILGGTDDIQVLLDDSTINVATLASSRYLGPLKTRVDEWQKQLALFNQTLEEWLTCQRNWLYLESIFNAPDIQRQLPAEAKMFLQVDKSWKEIMRKVNRLPNALRAATQPGLLETFQNNNALLDQIQKCLEAYLESKRVIFPRFYFLSNDELLEILAQTRNPQAVQPHLRKCFDSISKLEFALMPPAEGKIPGIDGEPEKVYTNDILAMLSPEGERVSLGKGLKARGNVEEWLGKVEEAMFTSLRRLCKAAIADYQGKLRTDWVVAGHPSQVILTVSQIMWCRDLTECLETEHSNHIQALKNFEKVNFERLNALAAIVQGSLPKLHRNILTALITIDVHARDIVTELVQSKVETVESFDWQRQLRYYWDIDLDNCVARMALSQYTYGYEYLGACPRLVITPLTDRCYLCLMGALQLDLGGAPAGPAGTGKTETTKDLAKALAIQCVVFNCSDGLDYKMMGRFFSGLAQSGAWCCFDEFNRIDIEVLSVIAQQLITIRNAKAAKLSRFMFEGREIKLVMTCAAFITMNPGYAGRTELPDNLKALFRPFAMMVPNYALIAEVILYSEGFESSKILARKMTQMYKLCSEQLSQQDHYDFGMRAVKSVLVMAGSLKRENPDLNEDVVLIRALQDSNLPKFLTDDALLFSGIISDLFPGVQIPEHDYGILQSTIVDVMNRQNLQPEMCMVRKVIQFYETMLVRHGVMLVGPTGGGKTTVYRILAETLGNLQKLGIENSFYQAVKTYVLNPKSITMGELYGEVNNLTLEWKDGLMALSVRAAVNDTSEDHKWIISDGPVDALWIENMNTVLDDNKMLCLANSERIKLTPQIHMLFEVQDLRVASPATVSRCGMVFVDPEELKWMPYVKTWMKGISKKLTEETQEYILNLFQRYVDEGLHFINKKCSQAIPQVDISKVTTLCCLLESLILGKDGVNLAMEQTKLNTILCQTFVFCYLWSLGGNLTENYYDSFDTFIRTQFDDNPDARLPNSGDLWSIHMDFDTKRLDPWERIIPTFKYNRDVPFFEMLVPTTDTVRYGYLMEKLLAVKHSVLFTGITGVGKSVIAKGLLNKIQESAGYVPVYLNFSAQTSSARTQEIIESKLERKRKNILGAPGNKRIVIFVDDLNMPRLDRYGSQPPIELLRQYQDFGGFYDRNKLFWKEIQDVTIISACAPPGGGRNPVTPRFIRHFSMLCLPMPSEHSLKQIFQAILNGFLSDFPPAVKQTASSIVEASVEIYNKMSVDLLPTPAKSHYVFNLRDLSKCVQGILQCDPGTIREEIQIFRLFCHECQRVFHDRLINNEDKHYFHVILTEMANKHFGIAIDLEYFLNKPIIFGDFIKFGADKADRIYDDMPDIEKTANVLQDYLDDYNLTNPKEVKLVFFQDAIEHVSRIARMIRQERGNALLVGVGGTGKQSLTRLAAHICGYKCLQIELSRGYNYDSFHEDLRKLYKMAGVEDKNMVFLFTDTQIVVEEFLEDINNILNSGEVPNLFEKDELEQVLAATRPRAKEVGISEGNRDEVFQYFISKVRQKLHIVLCMSPVGEAFRSRCRMFPSLVNCCTIDWFVQWPREALLSVSKTFFSQVDAGNEELKEKLPLMCVNVHLSVSSMAERYYNELRRRYYTTPTSYLELINLYLSMLSEKRKQIISARDRVKNGLTKLLETNILVDKMKLDLSALEPVLLAKSEDVEALMEKLAVDQESADQVRNTVQEDEATAKVKAEETQAIADDAQRDLDEALPALDAANKALDSLDKADISEIRVFTKPPDLVMTVMEAISILLNAKPDWPSAKQLLGDSNFLKRLLEYDKENIKPQILAKLQKYINNPDFVPEKVEKVSKACKSMCMWVRAMDLYSRVVKVVEPKRQKLRAAQAELDITMATLREKQALLRQVEDQIQALQDEYDKGVNEKESLAKTMALTKARLVRAGKLTAALEDEQVRWEESIQKFEEEISNITGNVFIAAACVAYYGAFTAQYRQSLIECWIQDCQSLEIPIDPSFSLINILGDPYEIRQWNTDGLPRDLISTENGILVTQGRRWPLMIDPQDQANRWIRNKESKSGLKIIKLTDSNFLRILENSIRLGLPVLLEELKETLDPALEPILLKQIFISGGRLLIRLGDSDIDYDKNFRFYMTTKMPNPHYLPEVCIKVTIINFTVTKSGLEDQLLSDVVRLEKPRLEEQRIKLIVRINTDKNQLKTIEEKILRMLFTSEGNILDNEELIDTLQDSKITSGAIKTRLEEAESTEQMINVAREKYRPVATQGSVMYFVIASLSEIDPMYQYSLKYFKQLFNTTIETSVKTENLQQRLDVLLEQTLLTAYVNVSRGLFEQHKLIYSFMLCVEMMRQQGTLSDAEWNFFLRGSAGLEKERPPKPEAPWLPTATWFACCDLEESFPVFHGLTQNILSHPISIRLGSFETYINPQKWEGYSKMKHEDKHMRQEKEAAHQDPWSAGLSSFHKLILIKCCKEEKVVFALTDFVIENLGKQFIETPPVDLPTLYQDMSCNTPLVFILSTGSDPMGAFQRFARESGYSERVQSISLGQGQGPIAEKMVKDAMKSGNWVFLQNCHLAVSWMLAMEELIKTFTDPDSAIKDTFRLFLSSMPSNTFPVTVLQNSVKVTNEPPKGLRANIRRAFTEMTPSFFEENILGKKWRQIIFGICFFHAIIQERKKFGPLGWNICYEFNDSDRECALLNLKLYCKEGKIPWDALIYITGEITYGGRVTDSWDQRCLRTILKRFFSPETLEEDYKYSESGIYFAPMADSLQEFKDYIENLPLIDDPEIFGMHENANLVFQYKETSTLINTILEVQPRSSTGGEGKSNDEIVQELVASVQTRVPEKLEMEGASESLFVKDLQGRLNSLTTVLGQEVDRFNNLLKLIHTSLETLNKAIAGFVVMSEEMEKVYNSFLNNQVPALWSNTAYPSLKPLGSWVKDLILRTSFVDLWLKRGQPKSYWISGFFFPQGFLTGTLQNHARKYNLPIDELSFKYSVIPTYRDQAAVIEAAKTVQFGQELPMDMELPSPEDGVLVHGMFMDASRWDDKEMVIEDALPGQMNPVLPVVHFEPQQNYKPSPTLYHCPLYKTGARAGTLSTTGHSTNFVVTVLLPSKRSKDYWIAKGSALLCQLSE

SEQ ID NO: 5808 - protein, 289 aa, Homo sapiens
MSFVAYEELIKEGDTAILSLGHGAMVAVRVQRGAQTQTRHGVLRHSVDLIGRPFGSKVTCGRGGWVYVLHPTPELWTLNLPHRTQILYSTDIALITMMLELRPGSVVCESGTGSGSVSHAIIRTIAPTGHLHTVEFHQQRAEKAREEFQEHRVGRWVTVRTQDVCRSGFGVSHVADAVFLDIPSPWEAVGHAWDALKVEGGRFCSFSPCIEQVQRTCQALAARGFSELSTLEVLPQVYNVRTVSLPPPDLGTGTDGPAGSDTSPFRSGTPMKEAVGHTGYLTFATKTPG

SEQ ID NO: 5809 - protein, 3801 aa, Homo sapiens
MSTDSNSLAREFLTDVNRLCNAVVQRVEAREEEEEETHMATLGQYLVHGRGFLLLTKLNSIIDQALTCREELLTLLLSLLPLVWKIPVQEEKATDFNLPLSADIILTKEKNSSSQRSTQEKLHLEGSALSSQVSAKVNVFRKSRRQRKITHRYSVRDARKTQLSTSDSEANSDEKGIAMNKHRRPHLLHHFLTSFPKQDHPKAKLDRLATKEQTPPDAMALENSREIIPRQGSNTDILSEPAALSVISNMNNSPFDLCHVLLSLLEKVCKFDVTLNHNSPLAASVVPTLTEFLAGFGDCCSLSDNLESRVVSAGWTEEPVALIQRMLFRTVLHLLSVDVSTAEMMPENLRKNLTELLRAALKIRICLEKQPDPFAPRQKKTLQEVQEDFVFSKYRHRALLLPELLEGVLQILICCLQSAASNPFYFSQAMDLVQEFIQHHGFNLFETAVLQMEWLVLRDGVPPEASEHLKALINSVMKIMSTVKKVKSEQLHHSMCTRKRHRRCEYSHFMHHHRDLSGLLVSAFKNQVSKNPFEETADGDVYYPERCCCIAVCAHQCLRLLQQASLSSTCVQILSGVHNIGICCCMDPKSVIIPLLHAFKLPALKNFQQHILNILNKLILDQLGGAEISPKIKKAACNICTVDSDQLAQLEETLQGNLCDAELSSSLSSPSYRFQGILPSSGSEDLLWKWDALKAYQNFVFEEDRLHSIQIANHICNLIQKGNIVVQWKLYNYIFNPVLQRGVELAHHCQHLSVTSAQSHVCSHHNQCLPQDVLQIYVKTLPILLKSRVIRDLFLSCNGVSQIIELNCLNGIRSHSLKAFETLIISLGEQQKDASVPDIDGIDIEQKELSSVHVGTSFHHQQAYSDSPQSLSKFYAGLKEAYPKRRKTVNQDVHINTINLFLCVAFLCVSKEAESDRESANDSEDTSGYDSTASEPLSHMLPCISLESLVLPSPEHMHQAADIWSMCRWIYMLSSVFQKQFYRLGGFRVCHKLIFMIIQKLFRSHKEEQGKKEGDTSVNENQDLNRISQPKRTMKEDLLSLAIKSDPIPSELGSLKKSADSLGKLELQHISSINVEEVSATEAAPEEAKLFTSQESETSLQSIRLLEALLAICLHGARTSQQKMELELPNQNLSVESILFEMRDHLSQSKVIETQLAKPLFDALLRVALGNYSADFEHNDAMTEKSHQSAEELSSQPGDFSEEAEDSQCCSFKLLVEEEGYEADSESNPEDGETQDDGVDLKSETEGFSASSSPNDLLENLTQGEIIYPEICMLELNLLSASKAKLDVLAHVFESFLKIIRQKEKNVFLLMQQGTVKNLLGGFLSILTQDDSDFQACQRVLVDLLVSLMSSRTCSEELTLLLRIFLEKSPCTKILLLGILKIIESDTTMSPSQYLTFPLLHAPNLSNGVSSQKYPGILNSKAMGLLRRARVSRSKKEADRESFPHRLLSSWHIAPVHLPLLGQNCWPHLSEGFSVSLWFNVECIHEAESTTEKGKKIKKRNKSLILPDSSFDGTESDRPEGAEYINPGERLIEEGCIHIISLGSKALMIQVWADPHNATLIFRVCMDSNDDMKAVLLAQVESQENIFLPSKWQHLVLTYLQQPQGKRRIHGKISIWVSGQRKPDVTLDFMLPRKTSLSSDSNKTFCMIGHCLSSQEEFLQLAGKWDLGNLLLFNGAKVGSQEAFYLYACGPNHTSVMPCKYGKPVNDYSKYINKEILRCEQIRELFMTKKDVDIGLLIESLSVVYTTYCPAQYTIYEPVIRLKGQMKTQLSQRPFSSKEVQSILLEPHHLKNLQPTEYKTIQGILHEIGGTGIFVFLFARVVELSSCEETQALALRVILSLIKYNQQRVHELENCNGLSMIHQVLIKQKCIVGFYILKTLLEGCCGEDIIYMNENGEFKLDVDSNAIIQDVKLLEELLLDWKIWSKAEQGVWETLLAALEVLIRADHHQQMFNIKQLLKAQVVHHFLLTCQVLQEYKEGQLTPMPREVCRSFVKIIAEVLGSPPDLELLTIIFNFLLAVHPPTNTYVCHNPTNFYFSLHIDGKIFQEKVRSIMYLRHSSSGGRSLMSPGFMVISPSGFTASPYEGENSSNIIPQQMAAHMLRSRSLPAFPTSSLLTQSQKLTGSLGCSIDRLQNIADTYVATQSKKQNSLGSSDTLKKGKEDAFISSCESAKTVCEMEAVLSAQVSVSDVPKGVLGFPVVKADHKQLGAEPRSEDDSPGDESCPRRPDYLKGLASFQRSHSTIASLGLAFPSQNGSAAVGRWPSLVDRNTDDWENFAYSLGYEPNYNRTASAHSVTEDCLVPICCGLYELLSGVLLILPDVLLEDVMDKLIQADTLLVLVNHPSPAIQQGVIKLLDAYFARASKEQKDKFLKNRGFSLLANQLYLHRGTQELLECFIEMFFGRHIGLDEEFDLEDVRNMGLFQKWSVIPILGLIETSLYDNILLHNALLLLLQILNSCSKVADMLLDNGLLYVLCNTVAALNGLEKNIPMSEYKLLACDIQQLFIAVTIHACSSSGSQYFRVIEDLIVMLGYLQNSKNKRTQNMAVALQLRVLQAAMEFIRTTANHDSENLTDSLQSPSAPHHAVVQKRKSIAGPRKFPLAQTESLLMKMRSVANDELHVMMQRRMSQENPSQATETELAQRLQRLTVLAVNRIIYQEFNSDIIDILRTPENVTQSKTSVFQTEISEENIHHEQSSVFNPFQKEIFTYLVEGFKVSIGSSKASGSKQQWTKILWSCKETFRMQLGRLLVHILSPAHAAQERKQIFEIVHEPNHQEILRDCLSPSLQHGAKLVLYLSELIHNHQGELTEEELGTAELLMNALKLCGHKCIPPSASTKADLIKMIKEEQKKYETEEGVNKAAWQKTVNNNQQSLFQRLDSKSKDISKIAADITQAVSLSQGNERKKVIQHIRGMYKVDLSASRHWQELIQQLTHDRAVWYDPIYYPTSWQLDPTEGPNRERRRLQRCYLTIPNKYLLRDRQKSEDVVKPPLSYLFEDKTHSSFSSTVKDKAASESIRVNRRCISVAPSRETAGELLLGKCGMYFVEDNASDTVESSSLQGELEPASFSWTYEEIKEVHKRWWQLRDNAVEIFLTNGRTLLLAFDNTKVRDDVYHNILTNNLPNLLEYGNITALTNLWYTGQITNFEYLTHLNKHAGRSFNDLMQYPVFPFILADYVSETLDLNDLLIYRNLSKPIAVQYKEKEDRYVDTYKYLEEEYRKGAREDDPMPPVQPYHYGSHYSNSGTVLHFLVRMPPFTKMFLAYQDQSFDIPDRTFHSTNTTWRLSSFESMTDVKELIPEFFYLPEFLVNREGFDFGVRQNGERVNHVNLPPWARNDPRLFILIHRQALESDYVSQNICQWIDLVFGYKQKGKASVQAINVFHPATYFGMDVSAVEDPVQRRALETMIKTYGQTPRQLFHMAHVSRPGAKLNIEGELPAAVGLLVQFAFRETREQVKEITYPSPLSWIKGLKWGEYVGSPSAPVPVVCFSQPHGERFGSLQALPTRAICGLSRNFCLLMTYSKEQGVRSMNSTDIQWSAILSWGYADNILRLKSKQSEPPVNFIQSSQQYQVTSCAWVPDSCQLFTGSKCGVITAYTNRFTSSTPSEIEMETQIHLYGHTEEITSLFVCKPYSILISVSRDGTCIIWDLNRLCYVQSLAGHKSPVTAVSASETSGDIATVCDSAGGGSDLRLWTVNGDLVGHVHCREIICSVAFSNQPEGVSINVIAGGLENGIVRLWSTWDLKPVREITFPKSNKPIISLTFSCDGHHLYTANSDGTVIAWCRKDQQRLKQPMFYSFLSSYAAG

SEQ ID NO: 5810 - protein, 1382 aa, Homo sapiens
MSTDSNSLAREFLTDVNRLCNAVVQRVEAREEEEEETHMATLGQYLVHGRGFLLLTKLNSIIDQALTCREELLTLLLSLLPLVWKIPVQEEKATDFNLPLSADIILTKEKNSSSQRSTQEKLHLEGSALSSQVSAKVNVFRKSRRQRKITHRYSVRDARKTQLSTSDSEANSDEKGIAMNKHRRPHLLHHFLTSFPKQDHPKAKLDRLATKEQTPPDAMALENSREIIPRQGSNTDILSEPAALSVISNMNNSPFDLCHVLLSLLEKVCKFDVTLNHNSPLAASVVPTLTEFLAGFGDCCSLSDNLESRVVSAGWTEEPVALIQRMLFRTVLHLLSVDVSTAEMMPENLRKNLTELLRAALKIRICLEKQPDPFAPRQKKTLQEVQEDFVFSKYRHRALLLPELLEGVLQILICCLQSAASNPFYFSQAMDLVQEFIQHHGFNLFETAVLQMEWLVLRDGVPPEASEHLKALINSVMKIMSTVKKVKSEQLHHSMCTRKRHRRCEYSHFMHHHRDLSGLLVSAFKNQVSKNPFEETADGDVYYPERCCCIAVCAHQCLRLLQQASLSSTCVQILSGVHNIGICCCMDPKSVIIPLLHAFKLPALKNFQQHILNILNKLILDQLGGAEISPKIKKAACNICTVDSDQLAQLEETLQGNLCDAELSSSLSSPSYRFQGILPSSGSEDLLWKWDALKAYQNFVFEEDRLHSIQIANHICNLIQKGNIVVQWKLYNYIFNPVLQRGVELAHHCQHLSVTSAQSHVCSHHNQCLPQDVLQIYVKTLPILLKSRVIRDLFLSCNGVSQIIELNCLNGIRSHSLKAFETLIISLGEQQKDASVPDIDGIDIEQKELSSVHVGTSFHHQQAYSDSPQSLSKFYAGLKEAYPKRRKTVNQDVHINTINLFLCVAFLCVSKEAESDRESANDSEDTSGYDSTASEPLSHMLPCISLESLVLPSPEHMHQAADIWSMCRWIYMLSSVFQKQFYRLGGFRVCHKLIFMIIQKLFRSHKEEQGKKEGDTSVNENQDLNRISQPKRTMKEDLLSLAIKSDPIPSELGSLKKSADSLGKLELQHISSINVEEVSATEAAPEEAKLFTSQESETSLQSIRLLEALLAICLHGARTSQQKMELELPNQNLSVESILFEMRDHLSQSKVIETQLAKPLFDALLRVALGNYSADFEHNDAMTEKSHQSAEELSSQPGDFSEEAEDSQCCSFKLLVEEEGYEADSESNPEDGETQDDGVDLKSETEGFSASSSPNDLLENLTQGEIIYPEICMLELNLLSASKAKLDVLAHVFESFLKIIRQKEKNVFLLMQQGTVKNLLGGFLSILTQDDSDFQACQRVLVDLLVSLMSSRTCSEELTLLLRIFLEKSPCTRATDQKVQST

SEQ ID NO: 5811 - protein, 547 aa, Homo sapiens
MRALTVQRVKFAMDLPLLKRAGQDLAEKTKNFVSRSLVIGEVLSMADMATGVKCGIIYWLFGGAIRNLGSPEHVTKWFQPLQEQKYTGMFAMTERGHGSNARGIQTEATFDLSAQEFVIDTPCENAEKMYIGNAMYGNYAAVFAQLIIDGRSQGPHCFIVPVRDENGSLYPGVTAIDMMYKEGLHGVDNGILIFDKVRIPRENLLDKFGSVAPDGQYHSPIRNKSARFNAMLAALTPSRLAVAFQAMGAMKLGLTIAIRYSHSRRQFGPKTKEEVKIIEHQTQTLRLMPHLATALALTFVSRYAGALLDEDVFQGKELVNSRSLQALVAGLKAYSTWENIRCLQDCRECTGGMGYMMENRISGLKCDTDVFATFEGDDVVMLQVVGRELLAQYTKQYEEKPLFGLLQNWAESVGDKLRTSFLAFNMDTVDDLAFLLKAVKFRERVLQRGLVARIYYKVKTKKEDFFHAWNSCLHHVASLSLAHTHRVTLEQFSLAVKSCPDQEDQTLLMKFCLLYGTKLVFQERAWYLEHKYLTPMASTRIRNQERC

SEQ ID NO: 5812 - protein, 2028 aa, Homo sapiens
MDVTVSELLELFLQSPLVTWVKTFGPFGSGSQDNLTMYMDLVDGIFLNQIMLQIDPRPTNQRINKHVNNDVNLRIQNLTILVRNIKTYYQEVLQQLIVMNLPNVLMIGRDPLSGKSMEEIKKVLLLVLGCAVQCERKEEFIERIKQLDIETQAGIVAHIQEVTHNQENVFDLQWLELPDVAPEELEALSRSMVLHLRRLIDQRDECTELIVDLTQERDYLQAQHPPSPIKSSSADSTPSPTSSLSSEDKQHLAVELADTKARLRRVRQELEDKTEQLVDTRHEVDQLVLELQKVKQENIQLAADARSARAYRDELDSLREKANRVERLELELTRCKEKLHDVDFYKARMEELREDNIILIETKAMLEEQLTAARARGDKVHELEKENLQLKSKLHDLELDRDTDKKRIEELLEENMVLEIAQKQSMNESAHLGWELEQLSKNADLSDASRKSFVFELNECASSRILKLEKENQSLQSTIQGLRDASLVLEESGLKCGELEKENHQLSKKIEKLQTQLEREKQSNQDLETLSEELIREKEQLQSDMETLKADKARQIKDLEQEKDHLNRAMWSLRERSQVSSEARMKDVEKENKALHQTVTEANGKLSQLEFEKRQLHRDLEQAKEKGERAEKLERELQRLQEENGRLARKVTSLETATEKVEALEHESQGLQLENRTLRKSLDTLQNVSLQLEGLERDNKQLDAENLELRRLVETMRFTSTKLAQMERENQQLEREKEELRKNVDLLKALGKKSERLELSYQSVSAENLRLQQSLESSSHKTQTLESELGELEAERQALRRDLEALRLANAQLEGAEKDRKALEQEVAQLEKDKKLLEKEAKRLWQQVELKDAVLDDSTAKLSAVEKESRALDKELARCRDAAGKLKELEKDNRDLTKQVTVHARTLTTLREDLVLEKLKSQQLSSELDKLSQELEKVGLNRELLLQEDDSGSDTKYKILEGRNESALKTTLAMKEEKIVLLEAQMEEKASLNRQLESELQMLKKECETLRQNQGEGQHLQNSFKHPAGKTAASHQGKEAWGPGHKEATMELLRVKDRAIELERNNAALQAEKQLLKEQLQHLETQNVTFSSQILTLQKQSAFLQEHNTTLQTQTAKLQVENSTLSSQSAALTAQYTLLQNHHTAKETENESLQRQQEQLTAAYEALLQDHEHLGTLHERQSAEYEALIRQHSCLKTLHRNLELEHKELGERHGDMLKRKAELEEREKVLTTEREALQQEQRTNALAMGENQRLRGELDRVNFLHHQLKGEYEELHAHTKELKTSLNNAQLELNRWQARFDELKEQHQTMDISLTKLDNHCELLSRLKGNLEEENHHLLSQIQLLSQQNQMLLEQNMENKEQYHEEQKQYIDKLNALRRHKEKLEEKIMDQYKFYDPPPKKKNHWIGAKALVKLIKPKKEGSRERLKSTVDSPPWQLESSDPASPAASQPLRSQAENPDTPALGSNCAEERDAHNGSVGKGPGDLKPKRGSPHRGSLDRTDASTDLAMRSWPSELGSRTCSTSATTTAPSNSTPIARHPGRTKGYNSDDNLCEPSLEFEVPNHRQYVSRPSSLESSRNTSSNSSPLNLKGSSEQLHGRSESFSSEDLIPSRDLATLPREASTPGRNALGRHEYPLPRNGPLPQEGAQKRGTAPPYVGVRPCSASPSSEMVTLEEFLEESNRSSPTHDTPSCRDDLLSDYFRKASDPPAIGGQPGPPAKKEGAKMPTNFVAPTVKMAAPTSEGRPLKPGQYVKPNFRLTEAEAPPSVAPRQAQPPQSLSLGRPRQAPVPPASHAPASRSASLSRAFSLASADLLRASGPEACKQESPQKLGAPEALGGRETGSHTLQSPAPPSSHSLARERTPLVGKAGSSCQGPGPRSRPLDTRRFSLAPPKEERLAPLHQSATAPAIATAGAGAAAAGSGSNSQLLHFSPAAAPAARTKPKAPPRSGEVATITPVRAGLSLSEGDGVPGQGCSEGLPAKSPGRSPDLAPHLGRALEDCSRGSVSKSSPASPEPGGDPQTVWYEYGCV

SEQ ID NO: 5813 - protein, 313 aa, Homo sapiens
MKSPPLLSPCLSWKRMAGIFFLPFISSGFAPRFKQEENFMLGRAHPSQPRFNWSHLTPLELKNRSVGLGTESTGRGKPHFTLEGHKFLIFGGSIHYFRVPREYWRDRLLKLKACGFNTVTTYVPWNLHEPERGKFDFSGNLDLEAFVLMAAEIGLWVILRPGRYICSEMDLGGLPSWLLQDPRLLLRTTNKSFIEAVEKYFDHLIPRVIPLQYRQAGPVIAVQVENEYGSFNKDKTYMPYLHKALLRRGIVELLLTSDGEKHVLSGHTKGVLAAINLQKLHQDTFNQLHKVQGASIDAGLLSDASQAATSSSL

SEQ ID NO: 5814 - protein, 998 aa, Homo sapiens
MKDSGDSKDQQLMVALRVRPISVAELEEGATLIAHKVDEQMVVLMDPMEDPDDILRAHRSREKSYLFDVAFDFTATQEMVYQATTKSLIEGVISGYNATVFAYGPTGCGKTYTMLGTDQEPGIYVQTLNDLFRAIEETSNDMEYEVSMSYLEIYNEMIRDLLNPSLGYLELREDSKGVIQVAGITEVSTINAKEIMQLLMKGNRQRTQEPTAANQTSSRSHAVLQVTVRQRSRVKNILQEVRQGRLFMIDLAGSERASQTQNRGQRMKEGAHINRSLLALGNCINALSDKGSNKYINYRDSKLTRLLKDSLGGNSRTVMIAHISPASSAFEESRNTLTYAGRAKNIKTRVKQNLLNVSYHIAQYTSIIADLRGEIQRLKRKIDEQTGRGQARGRQDRGDIRHIQAEVQLHSGQGEKAGMGQLREQLASAFQEQMDVRRRLLELENRAMEVQIDTSRHLLTIAGWKHEKSRRALKWREEQRKECYAKDDSEKDSDTGDDQPDILEPPEVAAARESIAALVDEQKQLRKQKLALEQRCRELRARGRRLEETLPRRIGSEEQREVLSLLCRVHELEVENTEMQSHALLRDGALRHRHEAVRRLEQHRSLCDEIIQGQRQIIDDYNLAVPQRLEELYEVYLRELEEGSLEQATIMDQVASRALQDSSLPKITPAGTSLTPDSDLESVKTLSSDAQHLQNSALPPLSTESEGHHVFKAGTGAWQAKSSSVPTPPPIQLGSLVTQEAPAQDSLGSWINSSPDSSENLSEIPLSHKERKEILTGTKCIWVKAARRRSRALGTEGRHLLAPATERSSLSLHSLSEGDDARPPGPLACKRPPSPTLQHAASEDNLSSSTGEAPSRAVGHHGDGPRPWLRGQKKSLGKKREESLEAKRRKRRSRSFEVTGQGLSHPKTHLLGPHQAERISDHRMPVCRHPAPGIRHLGKVTLPLAKVKLPPSQNTGPGDSSPLAVPPNPGGGSRRATRGPRLPHGTSTHGKDGCSRHN

SEQ ID NO: 5815 - protein, 365 aa, Homo sapiens
MSDDRETDTASESSYQLSRHKKSPSSLTNLSSSSGMTSLSSVSGSVMSVYSGDFGNLEVKGNIQFAIEYVESLKELHVFVAQCKDLAAADVKKQRSDPYVKAYLLPDKGKMGKKKTLVVKKTLNPVYNEILRYKIEKQILKTQKLNLSIWHRDTFKRNSFLGEVELDLETWDWDNKQNKQLRWYPLKRKTAPVALEAENRGEMKLALQYVPEPVPGKKLPTTGEVHIWVKECLDLPLLRGSHLNSFVKCTILPDTSRKSRQKTRAVGKTTNPIFNHTMVYDGFRPEDLMEACVELTVWDHYKLTNQFLGGLRIGFGTGKSYGTEVDWMDSTSEEVALWEKMVNSPNTWIEATLPLRMLLIAKISK

SEQ ID NO: 5816 - protein, 910 aa, Homo sapiens
MIDLSFLTEEEQEAIMKVLQRDAALKRAEEERVRHLPEKIKDDQQLKNMSGQWFYEAKAKRHRDKIHGADIIRASMRKKRPQIAAEQSKDRENGAKESWVNNVNKDAFLPPELAGVVEEPEEDAAPASPSSSVVNPASSVIDMSQENTRKPNVSPEKRKNPFNSSKLPEGHSSQQTKNEQSKNGRTGLFQTSKEDELSESKEKSTVADTSIQKLEKSKQTLPGLSNGSQIKAPIPKARKMIYKSTDLNKDDNQSFPRQRTDSLKARGAPRGILKRNSSSSSTDSETLRYNHNFEPKSKIVSPGLTIHERISEKEHSLEDNSSPNSLEPLKHVRFSAVKDELPQSPGLIHGREVGEFSVLESDRLKNGMEDAGDTEEFQSDPKPSQYRKPSLFHQSTSSPYVSKSETHQPMTSGSFPINGLHSHSEVLTARPQSMENSPTINEPKDKSSELTRLESVLPRSPADELSHCVEPEPSQVPGGSSRDRQQGSEEEPSPVLKTLERSAARKMPSKSLEDISSDSSNQAKVDNQPEELVRSAEDDEKPDQKPVTNECVPRISTVPTQPDNPFSHPDKLKRMSKSVPAFLQDEVSGSVMSVYSGDFGNLEVKGNIQFAIEYVESLKELHVFVAQCKDLAAADVKKQRSDPYVKAYLLPDKGKMGKKKTLVVKKTLNPVYNEILRYKIEKQILKTQKLNLSIWHRDTFKRNSFLGEVELDLETWDWDNKQNKQLRWYPLKRKTAPVALEAENRGEMKLALQYVPEPVPGKKLPTTGEVHIWVKECLDLPLLRGSHLNSFVKCTILPDTSRKSRQKTRAVGKTTNPIFNHTMVYDGFRPEDLMEACVELTVWDHYKLTNQFLGGLRIGFGTGKSYGTEVDWMDSTSEEVALWEKMVNSPNTWIEATLPLRMLLIAKISK

SEQ ID NO: 5817 - protein, 690 aa, Homo sapiens
MTTTVATDYDNIEIQQQYSDVNNRWDVDDWDNENSSARLFERSRIKALADEREAVQKKTFTKWVNSHLARVSCRITDLYTDLRDGRMLIKLLEVLSGERLPKPTKGRMRIHCLENVDKALQFLKEQRVHLENMGSHDIVDGNHRLTLGLIWTIILRFQIQDISVETEDNKEKKSAKDALLLWCQMKTAGYPNVNIHNFTTSWRDGMAFNALIHKHRPDLIDFDKLKKSNAHYNLQNAFNLAEQHLGLTKLLDPEDISVDHPDEKSIITYVVTYYHYFSKMKALAVEGKRIGKVLDNAIETEKMIEKYESLASDLLEWIEQTIIILNNRKFANSLVGVQQQLQAFNTYRTVEKPPKFTEKGNLEVLLFTIQSKMRANNQKVYMPREGKLISDINKAWERLEKAEHERELALRNELIRQEKLEQLARRFDRKAAMRETWLSENQRLVSQDNFGFDLPAVEAATKKHEAIETDIAAYEERVQAVVAVARELEAENYHDIKRITARKDNVIRLWEYLLELLRARRQRLEMNLGLQKIFQEMLYIMDWMDEMKVLVLSQDYGKHLLGVEDLLQKHTLVEADIGIQAERVRGVNASAQKFATDGEGYKPCDPQVIRDRVAHMEFCYQELCQLAAERRARLEESRRLWKFFWEMAEEEGWIREKEKILSSDDYGKDLTSVMRLLSKHRAFEDEMSGR

SEQ ID NO: 5818 - protein, 106 aa, Homo sapiens
TVAAPSVFIFPPSDEQLKSGTASVVCLLNNFYPREAKVQWKVDNALQSGNSQESVTEQDSKDSTYSLSSTLTLSKADYEKHKVYACEVTHQGLSSPVTKSFNRGEC

SEQ ID NO: 5819 - protein, 105 aa, Homo sapiens
QPKANPTVTLFPPSSEELQANKATLVCLISDFYPGAVTVAWKADGSPVKAGVETTKPSKQSNNKYAASSYLSLTPEQWKSHRSYSCQVTHEGSTVEKTVAPTECS

SEQ ID NO: 5820 - protein, 105 aa, Homo sapiens
QPKAAPSVTLFPPSSEELQANKATLVCLISDFYPGAVTVAWKADSSPVKAGVETTTPSKQSNNKYAASSYLSLTPEQWKSHRSYSCQVTHEGSTVEKTVAPTECS

SEQ ID NO: 5821 - protein, 105 aa, Homo sapiens
QPKAAPSVTLFPPSSEELQANKATLVCLISDFYPGAVTVAWKADSSPVKAGVETTTPSKQSNNKYAASSYLSLTPEQWKSHKSYSCQVTHEGSTVEKTVAPTECS

SEQ ID NO: 5822 - protein, 340 aa, Homo sapiens
ASPTSPKVFPLSLDSTPQDGNVVVACLVQGFFPQEPLSVTWSESGQNVTARNFPPSQDASGDLYTTSSQLTLPATQCPDGKSVTCHVKHYTNSSQDVTVPCRVPPPPPCCHPRLSLHRPALEDLLLGSEANLTCTLTGLRDASGATFTWTPSSGKSAVQGPPERDLCGCYSVSSVLPGCAQPWNHGETFTCTAAHPELKTPLTANITKSGNTFRPEVHLLPPPSEELALNELVTLTCLARGFSPKDVLVRWLQGSQELPREKYLTWASRQEPSQGTTTYAVTSILRVAAEDWKKGETFSCMVGHEALPLAFTQKTIDRMAGKPTHINVSVVMAEADGTCY

SEQ ID NO: 5823 - protein, 295 aa, Homo sapiens
ASTKGPSVFPLAPSSKSTSGGTAALGCLVKDYFPEPVTVSWNSGALTSGVHTFPAVLQSSGLYSLSSVVTVPSSSLGTQTYICNVNHKPSNTKVDKKVEPKSCDKTHTCPPCPAPELLGGPSVFLFPPKPKDTLMISRTPEVTCVVVDVSHEDPEVKFNWYVDGVEYKCKVSNKALPAPIEKTISKAKGQPREPQVYTLPPSRDELTKNQVSLTCLVKGFYPSDIAVEWESNGQPENNYKTTPPVLDSDGSFFLYSKLTVDKSRWQQGNVFSCSVMHEALHNHYTQKSLSLSPGK

SEQ ID NO: 5824 - protein, 327 aa, Homo sapiens
ASTKGPSVFPLAPCSRSTSESTAALGCLVKDYFPEPVTVSWNSGALTSGVHTFPAVLQSSGLYSLSSVVTVPSSSLGTKTYTCNVDHKPSNTKVDKRVESKYGPPCPSCPAPEFLGGPSVFLFPPKPKDTLMISRTPEVTCVVVDVSQEDPEVQFNWYVDGVEVHNAKTKPREEQFNSTYRVVSVLTVLHQDWLNGKEYKCKVSNKGLPSSIEKTISKAKGQPREPQVYTLPPSQEEMTKNQVSLTCLVKGFYPSDIAVEWESNGQPENNYKTTPPVLDSDGSFFLYSRLTVDKSRWQEGNVFSCSVMHEALHNHYTQKSLSLSLGK

SEQ ID NO: 5825 - protein, 326 aa, Homo sapiens
ASTKGPSVFPLAPCSRSTSESTAALGCLVKDYFPEPVTVSWNSGALTSGVHTFPAVLQSSGLYSLSSVVTVPSSNFGTQTYTCNVDHKPSNTKVDKTVERKCCVECPPCPAPPVAGPSVFLFPPKPKDTLMISRTPEVTCVVVDVSHEDPEVQFNWYVDGVEVHNAKTKPREEQFNSTFRVVSVLTVVHQDWLNGKEYKCKVSNKGLPAPIEKTISKTKGQPREPQVYTLPPSREEMTKNQVSLTCLVKGFYPSDISVEWESNGQPENNYKTTPPMLDSDGSFFLYSKLTVDKSRWQQGNVFSCSVMHEALHNHYTQKSLSLSPGK

SEQ ID NO: 5826 - protein, 353 aa, Homo sapiens
ASPTSPKVFPLSLCSTQPDGNVVIACLVQGFFPQEPLSVTWSESGQGVTARNFPPSQDASGDLYTTSSQLTLPATQCLAGKSVTCHVKHYTNPSQDVTVPCPVPSTPPTPSPSTPPTPSPSCCHPRLSLHRPALEDLLLGSEANLTCTLTGLRDASGVTFTWTPSSGKSAVQGPPERDLCGCYSVSSVLPGCAEPWNHGKTFTCTAAYPESKTPLTATLSKSGNTFRPEVHLLPPPSEELALNELVTLTCLARGFSPKDVLVRWLQGSQELPREKYLTWASRQEPSQGTTTFAVTSILRVAAEDWKKGDTFSCMVGHEALPLAFTQKTIDRLAGKPTHVNVSVVMAEVDGTCY

SEQ ID NO: 5827 - protein, 330 aa, Homo sapiens [sequence omitted]

SEQ ID NO: 5828 - protein, 376 aa, Homo sapiens
STKGPSVFPLAPCSRSTSGGTAALGCLVKDYFPEPVTVSWNSGALTSGVHTFPAVLQSSGLYSLSSVVTVPSSSLGTQTYTCNVNHKPSNTKVDKRVELKTPLGDTTHTCPRCPEPKSCDTPPPCPRCPEPKSCDTPPPCPRCPEPKSCDTPPPCPRCPAPELLGGPSVFLFPPKPKDTLMISRTPEVTCVVVDVSHEDPEVQFKWYVDGVEVHNAKTKPREEQYNSTFRVVSVLTVLHQDWLNGKEYKCKVSNKALPAPIEKTISKTKGQPREPQVYTLPPSREEMTKNQVSLTCLVKGFYPSDIAVEWESSGQPENNYNTTPPMLDSDGSFFLYSKLTVDKSRWQQGNIFSCSVMHEALHNRFTQKSLSLSPGK

SEQ ID NO: 5829 - protein, 453 aa, Homo sapiens
GSASAPTLFPLVSCENSPSDTSSVAVGCLAQDFLPDSITFSWKYKNNSDISSTRGFPSVLRGGKYAATSQVLLPSKDVMQGTDEHVVCKVQHPNGNKEKNVPLPVIAELPPKVSVFVPPRDGFFGNPRKSKLICQATGFSPRQIQVSWLREGKQVGSGVTTDQVQAEAKESGPTTYKVTSTLTIKESDWLGQSMFTCRVDHRGLTFQQNASSMCVPDQDTAIRVFAIPPSFASIFLTKSTKLTCLVTDLTTYDSVTISWTRQNGEAVKTHTNISESHPNATFSAVGEASICEDDWNSGERFTCTVTHTDLPSPLKQTISRPKGVALHRPDVYLLPPAREQLNLRESATITCLVTGFSPADVFVQWMQRGQPLSPEKYVTSAPMPEPQAPGRYFAHSILTVSEEEWNTGETYTCVVAHEALPNRVTERTVDKSTGKPTLYNVSLVMSDTAGTCY

SEQ ID NO: 5830 - protein, 575 aa, Homo sapiens
MPPGKVLQPVLKMKVDELFLYWLSEASTQRMLQDCLRRIKAPGRDQPTPGDGEQPGAWPTAPLAAPRPSGLEPPGTPGPGPALPLGAASSPRNAPHVRGTRRSAGTRVVQTRKEEPLPPATSQSIPTFYFPRGRPQDSVNVDAVISKIESTFARFPHERATMDDMGLVAKACGCPLYWKGPLFYGAGGERTGSVSVHKFVAMWRKILQNCHDDAAKFVHLLMSPGCNYLVQEDFVPFLQDVVNTHPGLSFLKEASEFHSRYITTVIQRIFYAVNRSWSGRITCAELRRSSFLQNVALLEEEADINQLTEFFSYEHFYVIYCKFWELDTDHDLLIDADDLARHNDHALSTKMIDRIFSGAVTRGRKVQKEGKISYADFVWFLISEEDKKTPTSIEYWFRCMDLDGDGALSMFELEYFYEEQCRRLDSMAIEALPFQDCLCQMLDLVKPRTEGKITLQDLKRCKLANVFFDTFFNIEKYLDHEQKEQISLLRDGDSGGPELSDWEKYAAEEYDILVAEETAGEPWEDGFEAELSPVEQKLSALRSPLAQRPFFEAPSPLGAVDLYEYACGDEDLEPL

SEQ ID NO: 5831 - protein, 79 aa, Homo sapiens
MPVARSWVCRKTYVTPRRPFEKSRLDQELKLIGEYGLRNKREVWRVKFTLAKIRKAARELLTLDEKDPRRLFEGSASRW

SEQ ID NO: 5832 - protein, 193 aa, Homo sapiens
MELEQREGTMAAVGFEEFSAPPGSELALPPLFGGHILESELETEVEFVSGGLGGSGLRERDEEEEAARGRRRRQRELNRRKYQALGRRCREIEQVNERVLNRLHQVQRITRRLQQERRFLMRVLDSYGDDYRASQFTIVLEAMRRMSLQRKRHCPRPEGLLHPQNPAAQPPVRGPVGGRGGECHGMDAEQEMR

SEQ ID NO: 5833 - protein, 546 aa, Homo sapiens
MMKTFFSTGQGNTEAFHTGTLQRQASHHIGDFCFQKIEKDIHGFQFQWKEDETNDHAAPMTEIKELTGSTGQHDQRHAGNKHIKDQLGLSFHSHLPELHIFQPEGKIGNQVEKSINNASSVSTSQRICCRPKTHISNKYGNNSLHSSLLTQKRNVHMREKSFQCIESGKSFNCSSLLKKHQITHLEEKQCKCDVYGKVFNQKRYLACHRRSHIDEKPYKCNECGKIFGHNTSLFLHKALHTADKPYECEECDKVFSRKSHLETHKIIYTGGKPYKCKVCDKAFTCNSYLAKHTIIHTGEKPYKCNECGKVFNRLSTLARHRRLHTGEKPYECEECEKVFSRKSHLERHKRIHTGEKPYKCKVCDKAFAYNSYLAKHSIIHTGEKPYKCNECGKVFNQQSTLARHHRLHTAEKPYKCEECDKVFRCKSHLERHRRIHTGEKPYKCKVCDKAFRSDSCLTEHQRVHTGEKPYMCNECGKVFSTKANLACHHKLHTAEKPYKCEECEKVFSRKSHMERHRRIHTGEKPYKCKVCDKAFRRDSHLAQHQR

SEQ ID NO: 5834 - protein, 353 aa, Homo sapiens
MAAAEAANCIMEVSCGQAESSEKPNAEDMTSKDYYFDSYAHFGIHEEMLKDEVRTLTYRNSMFHNRHLFKDKVVLDVGSGTGILCMFAAKAGARKVIGIECSSISDYAVKIVKANKLDHVVTIIKGKVEEVELPVEKVDIIISEWMGYCLFYESMLNTVLYARDKWLAPDGLIFPDRATLYVTAIEDRQYKDYKIHWWENVYGFDMSCIKDVAIKEPLVDVVDPKQLVTNACLIKEVDIYTVKVEDLTFTSPFCLQVKRNDYVHALVAYFNIEFTRCHKRTGFSTSPESPYTHWKQTVFYMEDYLTVKTGEEIFGTIGMRPNAKNNRDLDFTIDLDFKGQLCELSCSTDYRMR

SEQ ID NO: 5835 - protein, 203 aa, Homo sapiens [sequence omitted]

SEQ ID NO: 5836 - protein, 207 aa, Homo sapiens
MNFQQRLQSLWTLASRPFCPPLLATASQMQMVVLPCLGFTLLLWSQVSGAQGQEFHFGPCQVKGVVPQKLWEAFWAVKDTMQAQDNITSARLLQQEVLQNVSDAESCYLVHTLLEFYLKTVFKNYHNRTVEVRTLKSFSTLANNFVLIVSQLQPSQENEMFSIRDSAHRRFLLFRRAFKQLDVEAALTKALGEVDILLTWMQKFYKL

SEQ ID NO: 5837 - protein, 672 aa, Homo sapiens
MRAGRGATPARELFRDAAFPAADSSLFCDLSTPLAQFREDITWRRPQEICATPRLFPDDPREGQVKQGLLGDCWFLCACAALQKSRHLLDQVIPPGQPSWADQEYRGSFTCRIWQFGRWVEVTTDDRLPCLAGRLCFSRCQREDVFWLPLLEKVYAKVHGSYEHLWAGQVADALVDLTGGLAERWNLKGVAGSGGQQDRPGRWEHRTCRQLLHLKDQCLISCCVLSPRAGARELGEFHAFIVSDLRELQGQAGQCILLLRIQNPWGRRCWQGLWREGGEGWSQVDAAVASELLSQLQEGEFWVEEEEFLREFDELTVGYPVTEAGHLQSLYTERLLCHTRALPGAWVKGQSAGGCRNNSGFPSNPKFWLRVSEPSEVYIAVLQRSRLHAADWAGRARALVGDSHTSWSPASIPGKHYQAVGLHLWKVEKRRVNLPRVLSMPPVAGTACHAYDREVHLRCELSPGYYLAVPSTFLKDAPGEFLLRVFSTGRVSLSAIRAVAKNTTPGAALPAGEWGTVQLRGSWRVGQTAGGSRNFASYPTNPCFPFSVPEGPGPRCVRITLHQHCRPSDTEFHPIGFHIFQVPEGGRSQDAPPLLLQEPLLSCVPHRYAQEVSRLCLLPAGTYKVVPSTYLPDTEGAFTVTIATRIDRPSIHSQEMLGQFLQEVSIMAVMKT

SEQ ID NO: 5838 - protein, 270 aa, Homo sapiens
MDLQNDLGQTALHLAAILGETSTVEKLYAAGAGLCVAERRGHTALHLACRVGAHACARALLQPRPRRPREAPDTYLAQGPDRTPDTNHTPVALYPDSDLEKEEEESEEDWKLQLEAENYEGHTPLHVAVIHKDVEMVRLLRDAGADLDKPEPTCGRSPLHLAVEAQAADVLELLLRAGANPAARMYGGRTPLGSAMLRPNPILARLLRAHGAPEPEGEDEKSGPCSSSSDSDSGDEGDEYDDIVVHSSRSQTRLPPTPASKPLPDDPRPV

SEQ ID NO: 5839 - protein, 433 aa, Homo sapiens
MGNACWELYCLEHGIQPDGQMPSDKTIGGGDDSFTTFFCETGAGKHVPRAVFVDLEPTVIDEIRNGPYRQLFHPEQLITGKEDAANNYARGHYTIGKEIIDPVLDRIRKLSDQCTGLQGFLVFHSFGGGTGSGFTSLLMERLSVDYGKKSKLEFSIYPAPQVSTAVVEPYNSILTTHTTLEHSDCAFMVDNEAIYDICRRNLDIERPTYTNLNRLISQIVSSITASLRFDGALNVDLTEFQTNLVPYPRIHFPLATYAPVISAEKAYHEQLSVAEITNACFEPANQMVKCDPRHGKYMACCLLYRGDVVPKDVNAAIAAIKTKRSIQFVDWCPTGFKVGINYQPPTVVPGGDLAKVQRAVCMLSNTTAIAEAWARLDHKFDLMYAKRAFVHWYVGEGMEEGEFSEAREDMAALEKDYEEVGIDSYEDEDEGEE

SEQ ID NO: 5840 - protein, 119 aa, Homo sapiens
MAASAGAGAVIAAPDSRRWLWSVLAAALGLLTAGVSALEVYTPKEIFVANGTQGKLTCKFKSTSTTGGLTSVSWSFQPEGADTTVSGPVIYAQLDHSGGHHSDKINKSESVVYADIRKN

SEQ ID NO: 5841 - protein, 452 aa, Homo sapiens
MANNYKKIVLLKGLEVINDYHFRIVKSLLSNDLKLNPKMKEEYDKIQIADLMEEKFPGDAGLGKLIEFFKEIPTLGDLAETLKREKLKVKGIIPSKKTKQKEVYPATPACTPSNRLTAKGAEETLGPQKRKKPSEEETGTKRSKMSKEQTRPSCSAGASTSTAMGRSPPPQTSSSAPPNTSSTESLKPLANRHATASKNIFREDPIIAMVLNATKVFKYESSENEQRRMFHATVATQTQFFHVKVLNINLKRKFIKKRIIIISNYSKRNSLLEVNEASSVSEAGPDQTFEVPKDIIRRAKKIPKINILHKQTSGYIVYGLFMLHTKIVNRKTTIYEIQDKTGSMAVVGKGECHNIPCEKGDKLRLFCFRLRKRENMSKLMSEMHSFIQIQKNTNQRSHDSRSMALPQEQSQHPKPSEASTTLPESHLKTPQMPPTTPSSSSFTKVTKDKDIK

SEQ ID NO: 5842 - protein, 461 aa, Homo sapiens
MANNYKKIVLLKGLEVINDYHFRIVKSLLSNDLKLNPKMKEEYDKIQIADLMEEKFPGDAGLGKLIEFFKEIPTLGDLAETLKREKLKVANKIESIPVKGIIPSKKTKQKEVYPATPACTPSNRLTAKGAEETLGPQKRKKPSEEETGTKRSKMSKEQTRPSCSAGASTSTAMGRSPPPQTSSSAPPNTSSTESLKPLANRHATASKNIFREDPIIAMVLNATKVFKYESSENEQRRMFHATVATQTQFFHVKVLNINLKRKFIKKRIIIISNYSKRNSLLEVNEASSVSEAGPDQTFEVPKDIIRRAKKIPKINILHKQTSGYIVYGLFMLHTKIVNRKTTIYEIQDKTGSMAVVGKGECHNIPCEKGDKLRLFCFRLRKRENMSKLMSEMHSFIQIQKNTNQRSHDSRSMALPQEQSQHPKPSEASTTLPESHLKTPQMPPTTPSSSSFTKVTKDKDIK

SEQ ID NO: 5843 - protein, 1107 aa, Homo sapiens
MAKMEVKTSLLDNMIGVGDMVLLEPLNEETFINNLKKRFDHSEIYTYIGSVVISVNPYRSLPIYSPEKVEEYRNRNFYELSPHIFALSDEAYRSLRDQDKDQCILITGESGAGKTEASKLVMSYVAAVCGKGAEVNQVKEQLLQSNPVLEAFGNAKTVRNDNSSRFGKYMDIEFDFKGDPLGGVISNYLLEKSRVVKQPRGERNFHVFYQLLSGASEELLNKLKLERDFSRYNYLSLDSAKVNGVDDAANFRTVRNAMQIVGFMDHEAESVLAVVAAVLKLGNIEFKPESRVNGLDESKIKDKNELKEICELTGIDQSVLERAFSFRTVEAKQEKVSTTLNVAQAYYARDALAKNLYSRLFSWLVNRINESIKAQTKVRKKVMGVLDIYGFEIFEDNSFEQFIINYCNEKLQQIFIELTLKEEQEEYIREDIEWTHIDYFNNAIICDLIENNTNGILAMLDEECLRPGTVTDETFLEKLNQVCATHQHFESRMSKCSRFLNDTSLPHSCFRIQHYAGKVLYQVEGFVDKNNDLLYRDLSQAMWKASHALIKSLFPEGNPAKINLKRPPTAGSQFKASVATLMKNLQTKNPNYIRCIKPNDKKAAHIFNEALVCHQIRYLGLLENVRVRRAGYAFRQAYEPCLERYKMLCKQTWPHWKGPARSGVEVLFNELEIPVEEYSFGRSKIFIRNPRTLFKLEDLRKQRLEDLATLIQKIYRGWKCRTHFLLMKKSQIVIAAWYRRYAQQKRYQQTKSSALVIQSYIRGWKARKILRELKHQKRCKEAVTTIAAYWHGTQARRELKRLKEEARRKHAVAVIWAYWLGLKVRREYRKFFRANAGKKIYEFTLQRIVQKYFLEMKNKMPSLSPIDKNWPSRPYLFLDSTHKELKRIFHLWRCKKYRDQFTDQQKLIYEEKLEASELFKDKKALYPSSVGQPFQGAYLEINKNPKYKKLKDAIEEKIIIAEVVNKINRANGKSTSRIFLLTNNNLLLADQKSGQIKSEVPLVDVTKVSMSSQNDGFFAVHLKEGSEAASKGDFLFSSDHLIEMATKLYRTTLSQTKQKLNIEISDEFLVQFRQDKVCVKFIQGNQKNGSVPTCKRKNNRLLEVAVP

SEQ ID NO: 5844 - protein, 712 aa, Homo sapiens
MSQWYELQQLDSKFLEQVHQLYDDSFPMEIRQYLAQWLEKQDWEHAANDVSFATIRFHDLLSQLDDQYSRFSLENNFLLQHNIRKSKRNLQDNFQEDPIQMSMIIYSCLKEERKILENAQRFNQAQSGNIQSTVMLDKQKELDSKVRNVKDKVMCIEHEIKSLEDLQDEYDFKCKTLQNREHETNGVAKSDQKQEQLLLKKMYLMLDNKRKEVVHKIIELLNVTELTQNALINDELVEWKRRQQSACIGGPPNACLDQLQNWFTIVAESLQQVRQQLKKLEELEQKYTYEHDPITKNKQVLWDRTFSLFQQLIQSSFVVERQPCMPTHPQRPLVLKTGVQFTVKLRLLVKLQELNYNLKVKVLFDKDVNERNTVKGFRKFNILGTHTKVMNMEESTNGSLAAEFRHLQLKEQKNAGTRTNEGPLIVTEELHSLSFETQLCQPGLVIDLETTSLPVVVISNVSQLPSGWASILWYNMLVAEPRNLSFFLTPPCARWAQLSEVLSWQFSSVTKRGLNVDQLNMLGEKLLGPNASPDGLIPWTRFCKENINDKNFPFWLWIESILELIKKHLLPLWNDGCIMGFISKERERALLKDQQPGTFLLRFSESSREGAITFTWVERSQNGGEPDFHAVEPYTKKELSAVTFPDIIRNYKVMAAENIPENPLKYLYPNIDKDHAFGKYYSRPKEAPEPMELDGPKGTGYIKTELISVSEV

SEQ ID NO: 5845 - protein, 714 aa, Homo sapiens
MWMSQWYELQQLDSKFLEQVHQLYDDSFPMEIRQYLAQWLEKQDWEHAANDVSFATIRFHDLLSQLDDQYSRFSLENNFLLQHNIRKSKRNLQDNFQEDPIQMSMIIYSCLKEERKILENAQRFNQAQSGNIQSTVMLDKQKELDSKVRNVKDKVMCIEHEIKSLEDLQDEYDFKCKTLQNREHETNGVAKSDQKQEQLLLKKMYLMLDNKRKEVVHKIIELLNVTELTQNALINDELVEWKRRQQSACIGGPPNACLDQLQNWFTIVAESLQQVRQQLKKLEELEQKYTYEHDPITKNKQVLWDRTFSLFQQLIQSSFVVERQPCMPTHPQRPLVLKTGVQFTVKLRLLVKLQELNYNLKVKVLFDKDVNERNTVKGFRKFNILGTHTKVMNMEESTNGSLAAEFRHLQLKEQKNAGTRTNEGPLIVTEELHSLSFETQLCQPGLVIDLETTSLPVVVISNVSQLPSGWASILWYNMLVAEPRNLSFFLTPPCARWAQLSEVLSWQFSSVTKRGLNVDQLNMLGEKLLGPNASPDGLIPWTRFCKENINDKNFPFWLWIESILELIKKHLLPLWNDGCIMGFISKERERALLKDQQPGTFLLRFSESSREGAITFTWVERSQNGGEPDFHAVEPYTKKELSAVTFPDIIRNYKVMAAENIPENPLKYLYPNIDKDHAFGKYYSRPKEAPEPMELDGPKGTGYIKTELISVSEV

SEQ ID NO: 5846 - protein, 81 aa, Homo sapiens
MEGAGAGSGFRKELVSRLLHLHFKDDKTKVSGDALQLMVELLKVFVVEAAVRGVRQAQAEDALRVDVDQLEKVLPQLLLDF

SEQ ID NO: 5847 - protein, 233 aa, Homo sapiens
MAAQGEPQVQFKLVLVGDGGTGKTTFVKRHLTGEFEKKYVATLGVEVHPLVFHTNRGPIKFNVWDTAGQEKFGGLRDGYYIQEMGIHHVAHAGLELMSSAQCAIIMFDVTSRVTYKNVPNWHRDLVRVCENIPIVLCGNKVDIKDRKVKAKSIVFHRKKNLQYYDISAKSNYNFEKPFLWLARKLIGDPNLEFVAMPALAPPEVVMDPALAAQYEHDLEVAQTTALPDEDDDL

SEQ ID NO: 5848 - protein, 216 aa, Homo sapiens
MAAQGEPQVQFKLVLVGDGGTGKTTFVKRHLTGEFEKKYVATLGVEVHPLVFHTNRGPIKFNVWDTAGQEKFGGLRDGYYIQAQCAIIMFDVTSRVTYKNVPNWHRDLVRVCENIPIVLCGNKVDIKDRKVKAKSIVFHRKKNLQYYDISAKSNYNFEKPFLWLARKLIGDPNLEFVAMPALAPPEVVMDPALAAQYEHDLEVAQTTALPDEDDDL

SEQ ID NO: 5849 - protein, 1639 aa, Homo sapiens
PFVPTLKSDDDTSNFDEPEKNSWVSSSPCQLSPSGFSGEELPFVGFSYSKALGILGRSESVVSGLDSPAKTSSMEKKLLIKSKELQDSQDKCHKMEQEMTRLHRRVSEVEAVLSQKEVELKASETQRSLLEQDLATYITECSSLKRSLEQARMEVSQEDDKALQLLHDIREQSRKLQEIKEQEYQAQVEEMRLMMNQLEEDLVSARRRSDLYESELRESRLAAEEFKRKATECQHKLLKAKDQGKPEVGEYAKLEKINAEQQLKIQELQEKLEKAVKASTEATELLQNIRQAKERAERELEKLQNREDSSEGIRKKLVEAEELEEKHREAQVSAQHLEVHLKQKEQHYEEKIKVLDNQIKKDLADKETLENMMQRHEEEAHEKGKILSEQKAMINAMDSKIRSLEQRIVELSEANKLAANSSLFTQRNMKAQEEMISELRQQKFYLETQAGKLEAQNRKLEEQLEKISHQDHSDKNRLLELETRLREVSLEHEEQKLELKRQLTELQLSLQERESQLTALQAARAALESQLRQAKTELEETTAEAEEEIQALTAHRDEIQRKFDALRNSCTVITDLEEQLNQLTEDNAELNNQNFYLSKQLDEASGANDEIVQLRSEVDHLRREITEREMQLTSQKQTMEALKTTCTMLEEQVMDLEALNDELLEKERQWEAWRSVLGDEKSQFECRVRELQRMLDTEKQSRARADQRITESRQVVELAVKEHKAEILALQQALKEQKLKAESLSDKLNDLEKKHAMLEMNARSLQQKLETERELKQRLLEEQAKLQQQMDLQKNHIFRLTQGLQEALDRADLLKTERSDLEYQLENIQVLYSHEKVKMEGTISQQTKLIDFLQAKMDQPAKKKKVPLQYNELKLALEKEKARCAELEEALQKTRIELRSAREEAAHRKATDHPHPSTPATARQQIAMSAIVRSPEHQPSAMSLLAPPSSRRKESSTPEEFSRRLKERMHHNIPHRFNVGLNMRATKCAVCLDTVHFGRQASKCLECQVMCHPKCSTCLPATCGLPAEYATHFTEAFCRDKMNSPGLQTKEPSSSLHLEGWMKVPRNNKRGQQGWDRKYIVLEGSKVLIYDNEAREAGQRPVEEFELCLPDGDVSIHGAVGASELANTAKADVPYILKMESHPHTTCWPGRTLYLLAPSFPDKQRWVTALESVVAGGRVSREKAEADAKLLGNSLLKLEGDDRLDMNCTLPFSDQVVLVGTEEGLYALNVLKNSLTHVPGIGAVFQIYIIKDLEKLLMIAGEERALCLVDVKKVKQSLAQSHLPAQPDISPNIFEAVKGCHLFGAGKIENGLCICAAMPSKVVILRYNENLSKYCIRKEIETSEPCSCIHFTNYSILIGTNKFYEIDMKQYTLEEFLDKNDHSLAPAVFAASSNSFPVSIVQVNSAGQREEYLLCFHEFGVFVDSYGRRSRTDDLKWSRLPLAFAYREPYLFVTHFNSLEVIEIQARSSAGTPARAYLDIPNPRYLGPAISSGAIYLASSYQDKLRVICCKGNLVKESGTEHHRGPSTSRSSPNKRGPPTYNEHITKRVASSPAPPEGPSHPREPSTPHRYREGRTELRRDKSPGRPLEREKSPGRMLSTRRERSPGRLFEDSSRGRLPAGAVRTPLSQVNKVWDQSSV

SEQ ID NO: 5850 - protein, 2069 aa, Homo sapiens
MLKFKYGARNPLDAGAAEPIASRASRLNLFFQGKPPFMTQQQMSPLSREGILDALFVLFEECSQPALMKIKHVSNFVRKYSDTIAELQELQPSAKDFEVRSLVGCGHFAEVQVVREKATGDIYAMKVMKKKALLAQEQVSFFEEERNILSRSTSPWIPQLQYAFQDKNHLYLVMEYQPGGDLLSLLNRYEDQLDENLIQFYLAELILAVHSVHLMGYVHRDIKPENILVDRTGHIKLVDFGSAAKMNSNKMVNAKLPIGTPDYMAPEVLTVMNGDGKGTYGLDCDWWSVGVIAYEMIYGRSPFAEGTSARTFNNIMNFQRFLKFPDDPKVSSDFLDLIQSLLCGQKERLKFEGLCCHPFFSKIDWNNIRNSPPPFVPTLKSDDDTSNFDEPEKNSWVSSSPCQLSPSGFSGEELPFVGFSYSKALGILGRSESVVSGLDSPAKTSSMEKKLLIKSKELQDSQDKCHKMEQEMTRLHRRVSEVEAVLSQKEVELKASETQRSLLEQDLATYITECSSLKRSLEQARMEVSQEDDKALQLLHDIREQSRKLQEIKEQEYQAQVEEMRLMMNQLEEDLVSARRRSDLYESELRESRLAAEEFKRKATECQHKLLKAKDQGKPEVGEYAKLEKINAEQQLKIQELQEKLEKAVKASTEATELLQNIRQAKERAERELEKLQNREDSSEGIRKKLVEAEERRHSLENKVKRLETMERRENRLKDDIQTKSQQIQQMADKILELEEKHREAQVSAQHLEVHLKQKEQHYEEKIKVLDNQIKKDLADKETLENMMQRHEEEAHEKGKILSEQKAMINAMDSKIRSLEQRIVELSEANKLAANSSLFTQRNMKAQEEMISELRQQKFYLETQAGKLEAQNRKLEEQLEKISHQDHSDKNRLLELETRLREVSLEHEEQKLELKRQLTELQLSLQERESQLTALQAARAALESQLRQAKTELEETTAEAEEEIQALTAHRDEIQRKFDALRNSCTVITDLEEQLNQLTEDNAELNNQNFYLSKQLDEASGANDEIVQLRSEVDHLRREITEREMQLTSQKQTMEALKTTCTMLEEQVMDLEALNDELLEKERQWEAWRSVLGDEKSQFECRVRELQRMLDTEKQSRARADQRITESRQVVELAVKEHKAEILALQQALKEQKLKAESLSDKLNDLEKKHAMLEMNARSLQQKLETERELKQRLLEEQAKLQQQMDLQKNHIFRLTQGLQEALDRADLLKTERSDLEYQLENIQVLYSHEKVKMEGTISQQTKLIDFLQAKMDQPAKKKKGLFSRRKEDPALPTQVPLQYNELKLALEKEKARCAELEEALQKTRIELRSAREEAAHRKATDHPHPSTPATARQQIAMSAIVRSPEHQPSAMSLLAPPSSRRKESSTPEEFSRRLKERMHHNIPHRFNVGLNMRATKCAVCLDTVHFGRQASKCLECQVMCHPKCSTCLPATCGLPAEYATHFTEAFCRDKMNSPGLQTKEPSSSLHLEGWMKVPRNNKRGQQGWDRKYIVLEGSKVLIYDNEAREAGQRPVEEFELCLPDGDVSIHGAVGASELANTAKADVPYILKMESHPHTTCWPGRTLYLLAPSFPDKQRWVTALESVVAGGRVSREKAEADAKLLGNSLLKLEGDDRLDMNCTLPFSDQVVLVGTEEGLYALNVLKNSLTHVPGIGAVFQIYIIKDLEKLLMIAGEERALCLVDVKKVKQSLAQSHLPAQPDISPNIFEAVKGCHLFGAGKIENGLCICAAMPSKVVILRYNENLSKYCIRKEIETSEPCSCIHFTNYSILIGTNKFYEIDMKQYTLEEFLDKNDHSLAPAVFAASSNSFPVSIVQVNSAGQREEYLLCFHEFGVFVDSYGRRSRTDDLKWSRLPLAFAYREPYLFVTHFNSLEVIEIQARSSAGTPARAYLDIPNPRYLGPAISSGAIYLASSYQDKLRVICCKGNLVKESGTEHHRGPSTSRSSPNKRGPPTYNEHITKRVASSPAPPEGPSHPREPSTPHRYREGRTELRRDKSPGRPLEREKSPGRMLSTRRERSPGRLFEDSSRGRLPAGAVRTPLSQVNKVWDQSSV

SEQ ID NO: 5851 - protein, 189 aa, Homo sapiens
MTGTPGAVATRDGEAPERSPPCSPSYDLTGKVMLLGDTGVGKTCFLIQFKDGAFLSGTFIATVGIDFRNKVVTVDGVRVKLQIWDTAGQERFRSVTHAYYRDAQALLLLYDITNKSSFDNIRAWLTEIHEYAQRDVVIMLLGNKADMSSERVIRSEDGETLAREYGVPFLETSAKTGMNVELAFLAIAK

SEQ ID NO: 5852 - protein, 186 aa, Homo sapiens
MTGTPGAVATRDGEAPERSPPCSPSYDLTGKNKVVTVDGVRVKLQIWDTAGQERFRSVTHAYYRDAQALLLLYDITNKSSFDNIRAWLTEIHEYAQRDVVIMLLGNKADMSSERVIRSEDGETLAREYGVPFLETSAKTGMNVELAFLAIAKELKYRAGHQADEPSFQIRDYVESQKKRSSCCSFM

SEQ ID NO: 5853 - protein, 223 aa, Homo sapiens
MTGTPGAVATRDGEAPERSPPCSPSYDLTGKVMLLGDTGVGKTCFLIQFKDGAFLSGTFIATVGIDFRNKVVTVDGVRVKLQIWDTAGQERFRSVTHAYYRDAQALLLLYDITNKSSFDNIRAWLTEIHEYAQRDVVIMLLGNKADMSSERVIRSEDGETLAREYGVPFLETSAKTGMNVELAFLAIAKELKYRAGHQADEPSFQIRDYVESQKKRSSCCSFM

SEQ ID NO: 5854 - protein, 228 aa, Homo sapiens
MWLMSEAHGAEPVLLREAARPFTQTLRLCVPSGNSKVMLLGDTGVGKTCFLIQFKDGAFLSGTFIATVGIDFRNKVVTVDGVRVKLQIWDTAGQERFRSVTHAYYRDAQALLLLYDITNKSSFDNIRAWLTEIHEYAQRDVVIMLLGNKADMSSERVIRSEDGETLAREYGVPFLETSAKTGMNVELAFLAIAKELKYRAGHQADEPSFQIRDYVESQKKRSSCCSFM

SEQ ID NO: 5855 - protein, 191 aa, Homo sapiens
MWLMSEAHGAEPVLLREAARPFTQTLRLCVPSGNSKNKVVTVDGVRVKLQIWDTAGQERFRSVTHAYYRDAQALLLLYDITNKSSFDNIRAWLTEIHEYAQRDVVIMLLGNKADMSSERVIRSEDGETLAREYGVPFLETSAKTGMNVELAFLAIAKELKYRAGHQADEPSFQIRDYVESQKKRSSCCSFM

SEQ ID NO: 5856 - protein, 914 aa, Homo sapiens
MAENSVLTSTTGRTSLADSSIFDSKVTEISKENLLIGSTSYVEEEMPQIETRVILVQEAGKQEELIKALKTIKIMEVPVIKIKESCPGKSDEKLIKSVINMDIKVGFVKMESVEEFEGLDSPEFENVFVVTDFQDSVFNDLYKADCRVIGPPVVLNCSQKGEPLPFSCRPLYCTSMMNLVLCFTGFRKKEELVRLVTLVHHMGGVIRKDFNSKVTHLVANCTQGEKFRVAVSLGTPIMKPEWIYKAWERRNEQDFYAAVDDFRNEFKVPPFQDCILSFLGFSDEEKTNMEEMTEMQGGKYLPLGDERCTHLVVEENIVKDLPFEPSKKLYVVKQEWFWGSIQMDARAGETMYLYEKANTPELKKSVSMLSLNTPNSNRKRRRLKETLAQLSRETDVSPFPPRKRPSAEHSLSIGSLLDISNTPESSINYGDTPKSCTKSSKSSTPVPSKQSARWQVAKELYQTESNYVNILATIIQLFQVPLEEEGQRGGPILAPEEIKTIFGSIPDIFDVHTKIKDDLEDLIVNWDESKSIGDIFLKYSKDLVKTYPPFVNFFEMSKETIIKCEKQKPRFHAFLKINQAKPECGRQSLVELLIRPVQRLPSVALLLNDLKKHTADENPDKSTLEKAIGSLKEVMTHINEDKRKTEAQKQIFDVVYEVDGCPANLLSSHRSLVQRVETISLGEHPCDRGEQVTLFLFNDCLEIARKRHKVIGTFRSPHGQTRPPASLKHIHLMPLSQIKKVLDIRETEDCHNAFALLVRPPTEQANVLLSFQMTSDELPKENWLKMLCRHVANTICKADAENLIYTADPESFEVNTKDMDSTLSRASRAIKKTSKKVTRAFSFSKTPKRALRRALMTSHGSVEGRSPSSNDKHVMSRLSSTSSLAGIPSPSLVSLPSFFERRSHTLSRSTTHLI

SEQ ID NO: 5857 - protein, 344 aa, Homo sapiens
MLSEVLLVSAPGKVILHGEHAVVHGKVALAVSLNLRTFLRLQPHSNGKVDLSLPNIGIKRAWDVARLQSLDTSFLEQGDVTTPTSEQVEKLKEVAGLPDDCAVTERLAVLAFLYLYLSICRKQRWTKEDLELINKWAFQGERMIHGNPSGVDNAVSTWGGALRYHQGKISSLKRSPALQILLTNTKVPRNTRALVAGVRNRLLKFPEIVAPLLTSIDAISLECERVLGEMGEAPAPEQYLVLEELIDMNQHHLNALGVGHASLDQLCQVTRARGLHSKLTGAGGGGCGITLLKPGLEQPEVEATKQALTSCGFDCLETSIGAPGVSIHSATSLDSRVQQALDGL

SEQ ID NO: 5858 - protein, 568 aa, Homo sapiens
MESSKKMDSPGALQTNPPLKLHTDRSAGTPVFVPEQGGYKEKFVKTVEDKYKCEKCHLVLCSPKQTECGHRFCESCMAALLSSSSPKCTACQESIVKDKVFKDNCCKREILALQIYCRNESRGCAEQLMLGHLLVHLKNDCHFEELPCVRPDCKEKVLRKDLRDHVEKACKYREATCSHCKSQVPMIALQKHEDTDCPCVVVSCPHKCSVQTLLRSELSAHLSECVNAPSTCSFKRYGCVFQGTNQQIKAHEASSAVQHVNLLKEWSNSLEKKVSLLQNESVEKNKSIQSLHNQICSFEIEIERQKEMLRNNESKILHLQRVIDSQAEKLKELDKEIRPFRQNWEEADSMKSSVESLQNRVTELESVDKSAGQVARNTGLLESQLSRHDQMLSVHDIRLADMDLRFQVLETASYNGVLIWKIRDYKRRKQEAVMGKTLSLYSQPFYTGYFGYKMCARVYLNGDGMGKGTHLSLFFVIMRGEYDALLPWPFKQKVTLMLMDQGSSRRHLGDAFKPDPNSSSFKKPTGEMNIASGCPVFVAQTVLENGTYIKDDTIFIKVIVDTSDLPDP

SEQ ID NO: 5859 - protein, 2132 aa, Homo sapiens
MESGERLPSSAASSTTPTSSSTPSVASVVSKGGLSTGVASLSSTINPCGHLFRTAGDQPFNLSTVSSAFPMVSHPVFGLHSASSGHSEFGGLGTLGTPTALAAHPQLASFPEWWRTTDAHTRTGATFFPPLLGIPPLFAPPAQNHDSSSFHSRTSGKSNRNGPEKGVNGSINGSNTSSVIGINTSVLSTTASSSMGQTKSTSSGGGNRKCNQEQSKNQPLDARVDKIKDKKPRKKAMESSSNSDSDSGTSSDTSSEGISSSDSDDLEEDEEEEDQSIEESEDDDSDSESEAQHKSNNQVLLHGISDPKADGQKATEKAQEKRIHQPLPLASESQTHSFQSQQKQPQVLSQQLPFIFQSSQAKEESVNKHTSVIQSTGLVSNVKPLSLVNQAKKETYMKLIVPSPDVLKAGNKNTSEESSLLTSELRSKREQYKQAFPSQLKKQESSKSLKKVIAALSNPKATSSSPAHPKQTLENNHPNPFLTNALLGNHQPNGVIQSVIQEAPLALTTKTKMQSKINENIAAASSTPFSSPVNLSTSGRRTPGNQTPVMPSASPILHSQGKEKAVSNNVNPVKTQHHSHPAKSLVEQFRGTDSDIPSSKDSEDSNEDEEEDDEEEDEEDDEDDESDDSQSESDSNSESDTEGSEEEDDDDKDQDESDSDTEGEKTSMKLNKTTSSVKSPSMSLTGHSTPRNLHIAKAPGSAPAALCSESQSPAFLGTSSSTLTSSPHSGTSKRRRVTDERELRIPLEYGWQRETRIRNFGGRLQGEVAYYAPCGKKLRQYPEVIKGMQWCLLKEEDVIPRIRAMEGRRGRPPNPDRQRAREESRMRRRKGRPPNVGNAEFLDNADAKLLRKLQAQEIARQAAQIKLLRKLQKQEQARVAKEAKKQQAIMAAEEKRKQKEQIKIMKQQEKIKRIQQIRMEKELRAQQILEAKKKKKEEAANAKLLEAEKRIKEKEMRRQQAVLLKHQERERRRQHMMLMKAMEARKKAEEKERLKQEKRDEKRLNKERKLEQRRLELEMAKELKKPNEDMCLADQKPLPELPRIPGLVLSGSTFSDCLMVVQFLRNFGKVLGFDVNIDVPNLSVLQEGLLNIGDSMGEVQDLLVRLLSAAVCDPGLITGYKAKTALGEHLLNVGVNRDNVSEILQIFMEAHCGQTELTESLKTKAFQAHTPAQKASVLAFLINELACSKSVVSEIDKNIDYMSNLRRDKWVVEGKLRKLRIIHAKKTGKRDTSGGIDLGEEQHPLGTPTPGRKRRRKGGDSDYDDDDDDDSDDQGDEDDEDEEDKEDKKGKKTDICEDEDEGDQAASVEELEKQIEKLSKQQSQYRRKLFDASHSLRSVMFGQDRYRRRYWILPQCGGIFVEGMESGEGLEEIAKEREKLKKAESVQIKEEMFETSGDSLNCSNTDHCEQKEDLKEKDNTNLFLQKPGSFSKLSKLLEVAKMPPESEVMTPKPNAGANGCTLSYQNSGKHSLGSVQSTATQSNVEKADSNNLFNTGSSGPGKFYSPLPNDQLLKTLTEKNRQWFSLLPRTPCDDTSLTHADMSTASLVTPQSQPPSKSPSPTPAPLGSSAQNPVGLNPFALSPLQVKGGVSMMGLQFCGWPTGVVTSNIPFTSSVPSLGSGLGLSEGNGNSFLTSNVASSKSESPVPQNEKATSAQPAAVEVAKPVDFPSPKPIPEEMQFGWWRIIDPEDLKALLKVLHLRGIREKALQKQIQKHLDYITQACLKNKDVAIIELNENEENQVTRDIVENWSVEEQAMEMDLSVLQQVEDLERRVASASLQVKGWMCPEPASEREDLVYFEHKSFTKLCKEHDGEFTGEDESSAHALERKSDNPLDIAVTRLADLERNIERRIEEDIAPGLRVWRRALSEARSAAQVALCIQQLQKSIAWEKSIMKVYCQICRKGDNEELLLLCDGCDKGCHTYCHRPKITTIPDGDWFCPACIAKASGQTLKIKKLHVKGKKTNESKKGKKVTLTGDTEDEDSASTSSSLKRGNKDLKKRKMEENTSINLSKQESFTSVKKPKRDDSKDLALCSMILTEMETHEDAWPFLLPVNLKLVPGYKKVIKKPMDFSTIREKLSSGQYPNLETFALDVRLVFDNCETFNEDDSDIGRAGHNMRKYFEKKWTDTFKVS

SEQ ID NO: 5860 - protein, 2168 aa, Homo sapiens
MESGERLPSSAASSTTPTSSSTPSVASVVSKGGLSTGVASLSSTINPCGHLFRTAGDQPFNLSTVSSAFPMVSHPVFGLHSASSGHSEFGGLGTLGTPTALAAHPQLASFPGAEWWRTTDAHTRTGATFFPPLLGIPPLFAPPAQNHDSSSFHSRTSGKSNRNGPEKGVNGSINGSNTSSVIGINTSVLSTTASSSMGQTKSTSSGGGNRKCNQEQSKNQPLDARVDKIKDKKPRKKAMESSSNSDSDSGTSSDTSSEGISSSDSDDLEEDEEEEDQSIEESEDDDSDSESEAQHKSNNQVLLHGISDPKADGQKATEKAQEKRIHQPLPLASESQTHSFQSQQKQPQVLSQQLPFIFQSSQAKEESVNKHTSVIQSTGLVSNVKPLSLVNQAKKETYMKLIVPSPDVLKAGNKNTSEESSLLTSELRSKREQYKQAFPSQLKKQESSKSLKKVIAALSNPKATSSSPAHPKQTLENNHPNPFLTNALLGNHQPNGVIQSVIQEAPLALTTKTKMQSKINENIAAASSTPFSSPVNLSTSGRRTPGNQTPVMPSASPILHSQGKEKAVSNNVNPVKTQHHSHPAKSLVEQFRGTDSDIPSSKDSEDSNEDEEEDDEEEDEEDDEDDESDDSQSESDSNSESDTEGSEEEDDDDKDQDESDSDTEGEKTSMKLNKTTSSVKSPSMSLTGHSTPRNLHIAKAPGSAPAALCSESQSPAFLGTSSSTLTSSPHSGTSKRRRVTDERELRIPLEYGWQRETRIRNFGGRLQGEVAYYAPCGKKLRQYPEVIKYLSRNGIMDISRDNFSFSAKIRVGDFYEARDGPQGMQWCLLKEEDVIPRIRAMEGRRGRPPNPDRQRAREESRMRRRKGRPPNVGNAEFLDNADAKLLRKLQAQEIARQAAQIKLLRKLQKQEQARVAKEAKKQQAIMAAEEKRKQKEQIKIMKQQEKIKRIQQIRMEKELRAQQILEAKKKKKEEAANAKLLEAEKRIKEKEMRRQQAVLLKHQERERRRQHMMLMKAMEARKKAEEKERLKQEKRDEKRLNKERKLEQRRLELEMAKELKKPNEDMCLADQKPLPELPRIPGLVLSGSTFSDCLMVVQFLRNFGKVLGFDVNIDVPNLSVLQEGLLNIGDSMGEVQDLLVRLLSAAVCDPGLITGYKAKTALGEHLLNVGVNRDNVSEILQIFMEAHCGQTELTESLKTKAFQAHTPAQKASVLAFLINELACSKSVVSEIDKNIDYMSNLRRDKWVVEGKLRKLRIIHAKKTGKRDTSGGIDLGEEQHPLGTPTPGRKRRRKGGDSDYDDDDDDDSDDQGDEDDEDEEDKEDKKGKKTDICEDEDEGDQAASVEELEKQIEKLSKQQSQYRRKLFDASHSLRSVMFGQDRYRRRYWILPQCGGIFVEGMESGEGLEEIAKEREKLKKAESVQIKEEMFETSGDSLNCSNTDHCEQKEDLKEKDNTNLFLQKPGSFSKLSKLLEVAKMPPESEVMTPKPNAGANGCTLSYQNSGKHSLGSVQSTATQSNVEKADSNNLFNTGSSGPGKFYSPLPNDQLLKTLTEKNRQWFSLLPRTPCDDTSLTHADMSTASLVTPQSQPPSKSPSPTPAPLGSSAQNPVGLNPFALSPLQVKGGVSMMGLQFCGWPTGVVTSNIPFTSSVPSLGSGLGLSEGNGNSFLTSNVASSKSESPVPQNEKATSAQPAAVEVAKPVDFPSPKPIPEEMQFGWWRIIDPEDLKALLKVLHLRGIREKALQKQIQKHLDYITQACLKNKDVAIIELNENEENQVTRDIVENWSVEEQAMEMDLSVLQQVEDLERRVASASLQVKGWMCPEPASEREDLVYFEHKSFTKLCKEHDGEFTGEDESSAHALERKSDNPLDIAVTRLADLERNIERRIEEDIAPGLRVWRRALSEARSAAQVALCIQQLQKSIAWEKSIMKVYCQICRKGDNEELLLLCDGCDKGCHTYCHRPKITTIPDGDWFCPACIAKASGQTLKIKKLHVKGKKTNESKKGKKVTLTGDTEDEDSASTSSSLKRGNKDLKKRKMEENTSINLSKQESFTSVKKPKRDDSKDLALCSMILTEMETHEDAWPFLLPVNLKLVPGYKKVIKKPMDFSTIREKLSSGQYPNLETFALDVRLVFDNCETFNEDDSDIGRAGHNMRKYFEKKWTDTFKVS

SEQ ID NO: 5861 - protein, 467 aa, Homo sapiens
MCVSEIEPACCRSRAPSPCELPSDPLLSMKQPIMADGPRCKRRKQANPRRKNVVNYDNVVDTGSETDEEDKLHIAEDDGIANPLDQETSPASVPNHESSPHVSQALLPREEEEDEIREGGVEHPWHNNEILQASVDGPEEMKEDYDTMGPEATIQTAINNGTVKNANCTSDFEEYFAKRKLEERDGHAVSIEEYLQRSDTAIIYPEAPEELSRLGTPEANGQEENDLPPGTPDAFAQLLTCPYCDRGYKRLTSLKEHIKYRHEKNEENFSCPLCSYTFAYRTQLERHMVTHKPGTDQHQMLTQGAGNRKFKCTECGKAFKYKHHLKEHLRIHSGEKPYECPNCKKRFSHSGSYSSHISSKKCIGLISVNGRMRNNIKTGSSPNSVSSSPTNSAITQLRNKLENGKPLSMSEQTGLLKIKTEPLDFNDYKVLMATHGFSGTSPFMNGGLGATSPLGVHPSAQSPMQHL

SEQ ID NO: 5862 - protein, 78 aa, Homo sapiens
MIGFLTEDKKKWNLGSNAKDPRGMYQCKGSQNKSKPLQVYYRTSDKQTLLPNDQLYQPLKDREDDQYSHLQGNQLRRN

SEQ ID NO: 5863 - protein, 144 aa, Homo sapiens
MAVFNQKSVSDMIKEFRKNWRALCNSERTTLCGADSMLLALQLSMAENNKQHSGEFTVSLSDVLLTWKYLLHEKLNLPVENMDVTDHYEDVRKIYDDFLKNSNMLDLIDVYQKCRALTSNCENYNTVSPGNFQCGEKVDRKIYP

SEQ ID NO: 5864 - protein, 498 aa, Homo sapiens
MDVTDHYEDVRKIYDDFLKNSNMLDLIDVYQKCRALTSNCENYNTVSPSQLLDFLSGKQYAVGDETDLSIPTSPTSKYNRDNEKVQLLARKIIFSYLNLLVNSKNDLAVAYILNIPDRGLGREAFTDLKHAAREKQMSIFLVATSFIRTIELGGKGYAPPPSDPLRTHVKGLSNFINFIDKLDEILGEIPNPSIAGGQILSVIKMQLIKGQNSRDPFCKAIEEVAQDLDLRIKNIINSQEGVVALSTTDISPARPKSHAINHGTAYCGRDTVKALLVLLDEEAANAPTKNKAELLYDEENTIHHHGTSILTLFRSPTQVNNSIKPLRERICVSMQEKKIKMKQTLIRSQFACTYKDDYMISKDNWNNVNLASKPLCVLYMENDLSEGVNPSVGRSTIGTSFGNVHLDRSKNEKVSRKSTSQTGNKSSKRKQVDLDGENILCDNRNEPPQHKNAKIPKKSNDSQNRLYGKLAKVAKSNKCTAKDKLISGQAKLTQFFRL

SEQ ID NO: 5865 - protein, 104 aa, Homo sapiens
MGKESGWDSGRAAVAAVVGGVVAVGTVLVALSAMGFTSVGIAASSIAAKMMSTAAIANGGGVAAGSLVAILQSVGAAGLSVTSKVIGGFAGTALGAWLGSPPSS

SEQ ID NO: 5866 - protein, 913 aa, Homo sapiens
MAREAGQVCARPAVPRGRKGSVFFACVSVVTARRRAVARRAALQSPTPWLAPLPAPATTESSTQEIGEELINGVIYSISLRKVQLHHGGNKGQRWLGYENESALNLYETCKVRTVKAGTLEKLVEHLVPAFQGSDLSYVTIFLCTYRAFTTTQQVLDLLFKRYGRCDALTASSRYGCILPYSDEDGGPQDQLKNAISSILGTWLDQYSEDFCQPPDFPCLKQLVAYVQLNMPGSDLERRAHLLLAQLEHSEPIEAEPEALSPVPALKPTPELELALTPARAPSPVPAPAPEPEPAPTPAPGSELEVAPAPAPELQQAPEPAVGLESAPAPALELEPAPEQDPAPSQTLELEPAPAPVPSLQPSWPSPVVAENGLSEEKPHLLVFPPDLVAEQFTLMDAELFKKVVPYHCLGSIWSQRDKKGKEHLAPTIRATVTQFNSVANCVITTCLGNRSTKAPDRARVVEHWIEVARECRILKNFSSLYAILSALQSNSIHRLKKTWEDVSRDSFRIFQKLSEIFSDENNYSLSRELLIKEGTSKFATLEMNPKRAQKRPKETGIIQGTVPYLGTFLTDLVMLDTAMKDYLYGRLINFEKRRKEFEVIAQIKLLQSACNNYSIAPDEQFGAWFRAVERLSETESYNLSCELEPPSESASNTLRTKKNTAIVKRWSDRQAPSTELSTSGSSHSKSCDQLRCGPYLSSGDIADALSVHSAGSSSSDVEEINISFVPESPDGQEKKFWESASQSSPETSGISSASSSTSSSSASTTPVAATRTHKRSVSGLCNSSSALPLYNQQVGDCCIIRVSLDVDNGNMYKSILVTSQDKAPAVIRKAMDKHNLEEEEPEDYELLQILSDDRKLKIPENANVFYAMNSTANYDFVLKKRTFTKGVKVKHGASSTLPRMKQKGLKIAKGIF

SEQ ID NO: 5867 - protein, 859 aa, Homo sapiens
MMVDCQSSTQEIGEELINGVIYSISLRKVQLHHGGNKGQRWLGYENESALNLYETCKVRTVKAGTLEKLVEHLVPAFQGSDLSYVTIFLCTYRAFTTTQQVLDLLFKRYGRCDALTASSRYGCILPYSDEDGGPQDQLKNAISSILGTWLDQYSEDFCQPPDFPCLKQLVAYVQLNMPGSDLERRAHLLLAQLEHSEPIEAEPEALSPVPALKPTPELELALTPARAPSPVPAPAPEPEPAPTPAPGSELEVAPAPAPELQQAPEPAVGLESAPAPALELEPAPEQDPAPSQTLELEPAPAPVPSLQPSWPSPVVAENGLSEEKPHLLVFPPDLVAEQFTLMDAELFKKVVPYHCLGSIWSQRDKKGKEHLAPTIRATVTQFNSVANCVITTCLGNRSTKAPDRARVVEHWIEVARECRILKNFSSLYAILSALQSNSIHRLKKTWEDVSRDSFRIFQKLSEIFSDENNYSLSRELLIKEGTSKFATLEMNPKRAQKRPKETGIIQGTVPYLGTFLTDLVMLDTAMKDYLYGRLINFEKRRKEFEVIAQIKLLQSACNNYSIAPDEQFGAWFRAVERLSETESYNLSCELEPPSESASNTLRTKKNTAIVKRWSDRQAPSTELSTSGSSHSKSCDQLRCGPYLSSGDIADALSVHSAGSSSSDVEEINISFVPESPDGQEKKFWESASQSSPETSGISSASSSTSSSSASTTPVAATRTHKRSVSGLCNSSSALPLYNQQVGDCCIIRVSLDVDNGNMYKSILVTSQDKAPAVIRKAMDKHNLEEEEPEDYELLQILSDDRKLKIPENANVFYAMNSTANYDFVLKKRTFTKGVKVKHGASSTLPRMKQKGLKIAKGIF

SEQ ID NO: 5868 - protein, 82 aa, Homo sapiens
MANLERTFIAIKPDGVQRGLVGEIIKRFEQKGFRLVAMKFLRASEEHLKQHYIDLKDRPFFPGLVKYMNSGPVVAMEHHSWQ

SEQ ID NO: 5869 - protein, 301 aa, Homo sapiens
MKKKKYVNSGTVTLLSFAVESECTFLDYIKGGTQINFTVAIDFTASNGNPSQSTSLHYMSPYQLNAYALALTAVGEIIQHYDSDKMFPALGFGAKLPPDGRVSHEFPLNGNQENPSCCGIDGILEAYHRSLRTVQLYGPTNFAPVVTHVARNAAAVQDGSQYSVLLIITDGVISDMAQTKEAIVNAAKLPMSIIIVGVGQAEFDAMVELDGDDVRISSRGKLAERDIVQFVPFRDYVDRTGNHVLSMARLARDVLAEIPDQLVSYMKAQGIRPRPPPAAPTHSPSQSPARTPPASPLHTHI

SEQ ID NO: 5870 - protein, 152 aa, Homo sapiens
MANLERTFIAIKPDGVQRGLVGEIIKRFEQKGFRLVAMKFLRASEEHLKQHYIDLKDRPFFPGLVKYMNSGPVVAMVWEGLNVVKTGRVMLGETNPADSKPGTIRGDFCIQVGRNIIHGSDSVKSAEKEISLWFKPEELVDYKSCAHDWVYE

SEQ ID NO: 5871 - protein, 267 aa, Homo sapiens
MANCERTFIAIKPDGVQRGLVGEIIKRFEQKGFRLVGLKFMQASEDLLKEHYVDLKDRPFFAGLVKYMHSGPVVAMVWEGLNVVKTGRVMLGETNPADSKPGTIRGDFCIQVGRTMANLERTFIAIKPDGVQRGLVGEIIKRFEQKGFRLVAMKFLRASEEHLKQHYIDLKDRPFFPGLVKYMNSGPVVAMVWEGLNVVKTGRVMLGETNPADSKPGTIRGDFCIQVGRNIIHGSDSVKSAEKEISLWFKPEELVDYKSCAHDWVYE

SEQ ID NO: 5872 - protein, 152 aa, Homo sapiens
MANCERTFIAIKPDGVQRGLVGEIIKRFEQKGFRLVGLKFMQASEDLLKEHYVDLKDRPFFAGLVKYMHSGPVVAMVWEGLNVVKTGRVMLGETNPADSKPGTIRGDFCIQVGRNIIHGSDSVESAEKEIGLWFHPEELVDYTSCAQNWIYE

SEQ ID NO: 5873 - protein, 71 aa, Homo sapiens
MAKQPSDVSSECDREGRQLQPAERPPQLRPGAPTSLQTEPQGNPEGNHGGEGDSCPHGSPQGPLAPPASPG

SEQ ID NO: 5874 - protein, 198 aa, Homo sapiens
MAKQPSDVSSECDREGRQLQPAERPPQLRPGAPTSLQTEPQGNPEGNHGGEGDSCPHGSPQGPLAPPASPGPFATRSPLFIFMRRSSLLSRSSSGYFSFDTDRSPAPMSCDKSTQTPSPPCQAFNHYLSAMASMRQAEPADMRPEIWIAQELRRIGDEFNAYYARRVFLNNYQAAEDHPRMVILRLLRYIVRLVWRMH

SEQ ID NO: 5875 - protein, 583 aa, Homo sapiens
MALKKSSPSLDSGDSDSEELPTFAFLKKEPSSTKRRQPEREEKIVVVDISDCEASCPPAPELFSPPVPEIAETVTQTQPVRLLSSESEDEEEFIPLAQRLTCKFLTHKQLSPEDSSSPVKSVLDHQNNEGASCDWKKPFPKIPEVPLHDTPERSAADNKDLILDPCCQLPAYLSTCPGQSSSLAVTKTNSDILPPQKKTKPSQKVQGRGSHGCRQQRQARQKESTLRRQERKNAALVTRMKAQRPEECLKHIIVVLDPVLLQMEGGGQLLGALQTMECRCVIEAQAVPCSVTWRRRAGPSEDREDWVEEPTVLVLLRAEAFVSMIDNGKQGSLDSTMKGKETLQGFVTDITAKTAGKALSLVIVDQEKCFSLELLFFDFLPCTSAQNPPRRGKQGANKQTKKQQQRQPEASIGSMVSRVDAEEALVDLQLHTEAQAQIVQSWKELADFTCAFTKAVAEAPFKKLRDETTFSFCLESDWAGGVKVDLAGRGLALVWRRQIQQLNRVSLEMASAVVNAYPSPQLLVQAYQQCFSDKERQNLLADIQVRRGEGVTSTSRRIGPELSRRIYLQMTTLQPHLSLDSAD

SEQ ID NO: 5876 - protein, 353 aa, Homo sapiens
MDETVAEFIKRTILKIPMNELTTILKAWDFLSENQLQTVNFRQRKESVVQHLIHLCEEKRASISDAALLDIIYMQFHQHQKVWEVFQMSKGPGEDVDLFDMKQFKNSFKKILQRALKNVTVSFRETEENAVWIRIAWGTQYTKPNQYKPTYVVYYSQTPYAFTSSSMLRRNTPLLGQALTIASKHHQIVKMDLRSRYLDSLKAIVFKQYNQTFETHNSTTPLQERSLGLDINMDSRIIHENIVEKERVQRITQETFGDYPQPQLEFAQYKLETKFKSGLNGSILAEREEPLRCLIKFSSPHLLEALKSLAPAALVCRIQKLLCYSGSHSQGTQDPSSWQKDLYLLFVPLYPRC

SEQ ID NO: 5877 - protein, 373 aa, Homo sapiens
MASELAMSNSDLPTSPLAMEYVNDFDLMKFEVKKEPVETDRIISQCGRLIAGGSLSSTPMSTPCSSVPPSPSFSAPSPGSGSEQKAHLEDYYWMTGYPQQLNPEALGFSPEDAVEALISNSHQLQGGFDGYARGAQQLAAAAGAGAGASLGGSGEEMGPAAAVVSAVIAAAAAQSGAGPHYHHHHHHAAGHHHHPTAGAPGAAGSAAASAGGAGGAGGGGPASAGGGGGGGGGGGGGGAAGAGGALHPHHAAGGLHFDDRFSDEQLVTMSVRELNRQLRGVSKEEVIRLKQKRRTLKNRGYAQSCRFKRVQQRHVLESEKNQLLQQVDHLKQEISRLVRERDAYKEKYEKLVSSGFRENGSSSDNPSSPEFFM

SEQ ID NO: 5878 - protein, 122 aa, Homo sapiens
MTSPEIASLSWGQMKVKGSNTTYKDCKVWPGGSRTWDWRETGTEHSPGVQPADVKEVVEKGVQTLVIGRGMSEALKVPSSTVEYLKKHGIDVRVLQTEQAVKEYNALVAQGVRVGGVFHSTC

SEQ ID NO: 5879 - protein, 241 aa, Homo sapiens
MYTNGSPAPGSPAQVKGQEVRKVRLIQFEKVTEEPMGITLKLNEKQSCTVARILHGGMIHRQGSLHVGDEILEINGTNVTNHSVDQLQKAMKETKGMISLKVIPNQQSRLPALQMFMRAQFDYDPKKDNLIPCKEAGLKFATGDIIQIINKDDSNWWQGRVEGSSKESAGLIPSPELQEWRVASMAQSAPSEAPSCSPFGKKKKYKDKYLAKHSSIFDQLDVVSYEEVVRLPAFKRKTLVL

SEQ ID NO: 5880 - protein, 446 aa, Homo sapiens
MTLKASEGESGGSMHTALSDLYLEHLLQKRSRPEAVSHPLNTVTEDMYTNGSPAPGSPAQVKGQEVRKVRLIQFEKVTEEPMGITLKLNEKQSCTVARILHGGMIHRQGSLHVGDEILEINGTNVTNHSVDQLQKAMKETKGMISLKVIPNQQSRLPALQEAGLKFATGDIIQIINKDDSNWWQGRVEGSSKESAGLIPSPELQEWRVASMAQSAPSEAPSCSPFGKKKKYKDKYLAKHSSIFDQLDVVSYEEVVRLPAFKRKTLVLIGASGVGRSHIKNALLSQNPEKFVYPVPYTTRPPRKSEEDGKEYHFISTEEMTRNISANEFLEFGSYQGNMFGTKFETVHQIHKQNKIAILDIEPQTLKIVRTAELSPFIVFIAPTDQGTQTEALQQLQKDSEAIRSQYAHYFDLSLVNNGVDETLKKLQEAFDQACSSPQWVPVSWVY

SEQ ID NO: 5881 - protein, 195 aa, Homo sapiens
MDSFKVVLEGPAPWGFRLQGGKDFNVPLSISRLTPGGKAAQAGVAVGDWVLSIDGENAGSLTHIEAQNKIRACGERLSLGLSRAQPVQSKPQKAPTLPCPPALPGCVSAQASAPAADPPRYTFAPSVSLNKTARPFGAPPPADSAPQQNGQPLRPLVPDASKQRLMENTEDWRPRPGTGQSRSFRILAHLTGTEF

SEQ ID NO: 5882 - protein, 287 aa, Homo sapiens
MDSFKVVLEGPAPWGFRLQGGKDFNVPLSISRLTPGGKAAQAGVAVGDWVLSIDGENAGSLTHIEAQNKIRACGERLSLGLSRAQPVQSKPQKASAPAADPPRYTFAPSVSLNKTARPFGAPPPADSAPQQNGQPLRPLVPDASKQRLMENTEDWRPRPGTGQSRSFRILAHLTGTEFMQDPDEEHLKKSRPYRPQPYQPPALGCGPCVCRALCPGQNEHSADPAQPAGHAHAAAEPHLHCAGSCRRGARRGQQQRQDSRVSPVPQGHPGPLPGGAGPRVPPGGVCV

SEQ ID NO: 5883 - protein, 662 aa, Homo sapiens
MAEWLLSASWQRRAKAMTAAAGSAGRAAVPLLLCALLAPGGAYVLDDSDGLGREFDGIGAVSGGGPNFGASLHILKVEIGGDGQTTDGTEPSHMHYALDENYFRGYEWWLMKEAKKRNPNITLIGLPWSFPGWLGKGFDWPYVNLQLTAYYVVTWIVGAKRYHDLDIDYIGIWNERSYNANYIKILRKMLNYQGLQRVKIIASDNLWESISASMLLDAELFKVVDVIGAHYPGTHSAKDAKLTGKKLWSSEDFSTLNSDMGAGCWGRILNQNYINGYMTSTIAWNLVASYYEQLPYGRCGLMTAQEPWSGHYVVESPVWVSAHTTQFTQPGWYYLKTVGHLEKGGSYVALTDGLGNLTIIIETMSHKHSKCIRPFLPYFNVSQQFATFVLKGSFSEIPELQVWYTKLGKTSERFLFKQLDSLWLLDSDGSFTLSLHEDELFTLTTLTTGRKGSYPLPPKSQPFPSTYKDDFNVDYPFFSEAPNFADQTGVFEYFTNIEDPGEHHFTLRQVLNQRPITWAADASNTISIIGDYNWTNLTIKCDVYIETPDTGGVFIAGRVNKGGILIRSARGIFFWIFANGSYRVTGDLAGWIIYALGRVEVTAKKWYTLTLTIKGHFTSGMLNDKSLWTDIPVNFPKNGWAAIGTHSFEFAQFDNFLVEATR

SEQ ID NO: 5884 - protein, 659 aa, Homo sapiens
MLGKSHGRATHGPLPLADLGIHLPCVKVLHQVTPEEKPAATSRLLVNYPEPYRSQILDYLFKPNFGASLHILKVEIGGDGQTTDGTEPSHMHYALDENYFRGYEWWLMKEAKKRNPNITLIGLPWSFPGWLGKGFDWPYVNLQLTAYYVVTWIVGAKRYHDLDIDYIGIWNERSYNANYIKILRKMLNYQGLQRVKIIASDNLWESISASMLLDAELFKVVDVIGAHYPGTHSAKDAKLTGKKLWSSEDFSTLNSDMGAGCWGRILNQNYINGYMTSTIAWNLVASYYEQLPYGRCGLMTAQEPWSGHYVVESPVWVSAHTTQFTQPGWYYLKTVGHLEKGGSYVALTDGLGNLTIIIETMSHKHSKCIRPFLPYFNVSQQFATFVLKGSFSEIPELQVWYTKLGKTSERFLFKQLDSLWLLDSDGSFTLSLHEDELFTLTTLTTGRKGSYPLPPKSQPFPSTYKDDFNVDYPFFSEAPNFADQTGVFEYFTNIEDPGEHHFTLRQVLNQRPITWAADASNTISIIGDYNWTNLTIKCDVYIETPDTGGVFIAGRVNKGGILIRSARGIFFWIFANGSYRVTGDLAGWIIYALGRVEVTAKKWYTLTLTIKGHFTSGMLNDKSLWTDIPVNFPKNGWAAIGTHSFEFAQFDNFLVEATR

SEQ ID NO: 5885 - protein, 139 aa, Homo sapiens
MGTSSLGLVDTTGGPGDDYGVLGSTANETEKKSSRRRKESSDNQENRGKPEGSSKARKERTAFTKEQLRELEAEFAHHNYLTRLRRYEIAVNLDLSERQVKVWFQNRRMKWKRVKGGQPISPNGQDPEDGDSTASPSSE

SEQ ID NO: 5886 - protein, 775 aa, Homo sapiens
MGCNMCVVQKPEEQYKVMLQVNGKELSKLSQEQTLQALRSSKEPLVIQVLRRSPRLRGDSSCHDLQLVDSGTQTDITFEHIMALGKLRPPTPPMVILEPYVLSELPPISHEYYDPAEFMEGGPQEADRLDELEYEEVELYKSSHRDKLGLMVCYRTDDEEDLGIYVGEVNPNSIAAKDGRIREGDRIIQINGVDVQNREEAVAILSQEENTNISLLVARPESQLAKRWKDSDRDDFLDDFGSENEGELRARKLKSPPAQQPGNEEEKGAPDAGPGLSNSQELDSGVGRTDESTRNEESSEHDLLGDEPPSSTNTPGSLRKFGLQGDALQSRDFHFSMDSLLAEGAGLGGGDVPGLTDEEYERYRELLEIKCHLENGNQLGLLFPRASGGNSALDVNRNESLGHEMAMLEEELRHLEFKCRNILRAQKMQQLRERCMKAWLLEEESLYDLAASEPKKHELSDISELPEKSDKDSTSAYNTGESCRSTPLLVEPLPESPLRRAMAGNSNLNRTPPGPAVATPAKAAPPPGSPAKFRSLSRDPEAGRRQHAEERGRRNPKTGLTLERVGPESSPYLSRRHRGQGQEGEHYHSCVQLAPTRGLEELGHGPLSLAGGPRVGGVAAAATEAPRMEWKVKVRSDGTRYVAKRPVRDRLLKARALKIREERSGMTTDDDAVSEMKMGRYWSKEERKQHLIRAREQRKRREFMMQSRLECLREQQNGDSKPELNIIALSHRKTMKKRNKKILDNWITIQEMLAHGARSADGKRVYNPLLSVTTV

SEQ ID NO: 5887 - protein, 420 aa, Homo sapiens
MEPLTASRLQVRKKNSLKDCVAVAGPLGVTHFLILSKTETNVYFKLMRLPGGPTLTFQVKKYSLVRDVVSSLRRHRMHEQQFAHPPLLVLNSFGPHGMHVKLMATMFQNLFPSINVHKVNLNTIKRCLLIDYNPDSQELDFRHYSIKVVPVGASRGMKKLLQEKFPNMSRLQDISELLATGAGLSESEAEPDGDHNITELPQAVAGRGNMRAQQSAVRLTEIGPRMTLQLIKVQEGVGEGKVMFHSFVSKTEEELQAILEAKEKKLRLKAQRQAQQAQNVQRKQEQREAHRKKSLEGMKKARVGGSDEEASGIPSRTASLELGEDDDEQEDDDIEYFCQAVGEAPSEDLFPEAKQKRLAKSPGRKRKRWEMDRGRGRLCDQKFPKTKDKSQGAQARRGPRGASRDGGRGRGRGRPGKRVA

SEQ ID NO: 5888 - protein, 217 aa, Homo sapiens
MSKGRAEAAAGAAGILLRYLQEQNRPYSSQDVFGNLQREHGLGKAVVVKTLEQLAQQGKIKEKMYGKQKIYFADQDQFDMVSDADLQVLDGKIVALTAKVQSLQQSCRYMEAELKELSSALTTPEMQKEIQELKKECAGYRERLKNIKAATNHVTPEEKEQVYRERQKYCKEWRKRKRMATELSDAILEGYPKSKKQFFEEVGIETDEDYNVTLPDP

SEQ ID NO: 5889 - protein, 259 aa, Homo sapiens
MEDSMDMDMSPLRPQNYLFGCELKADKDYHFKVDNDENEHQLSLRTVSLGAGAKDELHIVEAEAMNYEGSPIKVTLATLKMSVQPTVSLGGFEITPPVVLRLKCGSGPVHISGQHLVAVEEDAESEDEEEEDVKLLSISGKRSAPGGGSKVPQKKVKLAADEDDDDDDEEDDDEDDDDDDFDDEEAEEKAPVKKSIRDTPAKNAQKSNQNGKDSKPSSTPRSKGQESFKKQEKTPKTPKGPSSVEDIKAKMQASIEKAH

SEQ ID NO: 5890 - protein, 154 aa, Homo sapiens
MLNNWDKWMAKKHKKIRLRCQKGIPPSLRGRAWQYLSGGKVKLQQNPGKFDELDMSPGDPKWLDVIERDLHRQFPFHEMFVSRGGHGQQDLFRVLKAYTLYRPEEGYCQAQAPIAAVLLMHMPAEQAFWCLVQICEKYLPGYYSEKLEAIQLDG

SEQ ID NO: 5891 - protein, 725 aa, Homo sapiens
MSFPKAPLKRFNDPSGCAPSPGAYDVKTLEVLKGPVSFQKSQRFKQQKESKQNLNVDKDTTLPASARKVKSSESKKESQKNDKDLKILEKEIRVLLQERGAQDRRIQDLETELEKMEARLNAALREKTSLSANNATLEKQLIELTRTNELLKSKFSENGNQKNLRILSLELMKLRNKRETKMRGMMAKQEGMEMKLQVTQRSLEESQGKIAQLEGKLVSIEKEKIDEKSETEKLLEYIEEISCASDQVEKYKLDIAQLEENLKEKNDEILSLKQSLEENIVILSKQVEDLNVKCQLLEKEKEDHVNRNREHNENLNAEMQNLKQKFILEQQEREKLQQKELQIDSLLQQEKELSSSLHQKLCSFQEEMVKEKNLFEEELKQTLDELDKLQQKEEQAERLVKQLEEEAKSRAEELKLLEEKLKGKEAELEKSSAAHTQATLLLQEKYDSMVQSLEDVTAQFESYKALTASEIEDLKLENSSLQEKAAKAGKNAEDVQHQILATESSNQEYVRMLLDLQTKSALKETEIKEITVSFLQKITDLQNQLKQQEEDFRKQLEDEEGRKAEKENTTAELTEEINKWRLLYEELYNKTKPFQLQLDAFEVEKQALLNEHGAAQEQLNKIRDSYAKLLGHQNLKQKIKHVVKLKDENSQLKSEVSKLRCQLAKKKQSETKLQEELNKVLGIKHFDPSKAFHHESKENFALKTPLKEGNTNCYRAPMECQESWK

SEQ ID NO: 5892 - protein, 884 aa, Homo sapiens
MPAERPAGSGGSEAPAMVEQLDTAVITPAMLEEEEQLEAAGLERERKMLEKARMSWDRESTEIRYRRLQHLLEKSNIYSKFLLTKMEQQQLEEQKKKEKLERKKESLKVKKGKNSIDASEEKPVMRKKRGREDESYNISEVMSKEEILSVAKKNKKENEDENSSSTNLCVEDLQKNKDSNSIIKDRLSETVRQNTKFFFDPVRKCNGQPVPFQQPKHFTGGVMRWYQVEGMEWLRMLWENGINGILADEMGLGKTVQCIATIALMIQRGVPGPFLVCGPLSTLPNWMAEFKRFTPDIPTMLYHGTQEERQKLVRNIYKRKGTLQIHPVVITSFEIAMRDRNALQHCYWKYLIVDEGHRIKNMKCRLIRELKRFNADNKLLLTGTPLQNNLSELWSLLNFLLPDVFDDLKSFESWFDITSLSETAEDIIAKEREQNVLHMLHQERIPRMYVSEFTDEGFFEGKLPSRKDLYDIRPYENTYLLKLHTNFEILTPFLLRRLKSDVALEVPPKREVVVYAPLSKKQEIFYTAIVNRTIANMFGSSEKETIELSPTGRPKRRTRKSINYSKIDDFPNELEKLISQIQPEVDRERAVVEVNIPVESEVNLKLQNIMMLLRKCCNHPYLIEYPIDPVTQEFKIDEELVTNSGKFLILDRMLPELKKRGHKVLLFSQMTSMLDILMDYCHLRDFNFSRLDGSMSYSEREKNMHSFNTDPEVFIFLVSTRAGGLGINLTAADTVIIYDSDWNPQSDLQAQDRCHRIGQTKPVVVYRLVTANTIDQKIVERAAAKRKLEKLIIHKNHFKGGQSGLNLSKNFLDPKELMELLKSRDYEREIKGSREKVISDKDLELLLDRSDLIDQMNASGPIKEKMGIFKILENSEDSSPECLF

SEQ ID NO: 5893 - protein, 740 aa, Homo sapiens
MPAERPAGSGGSEAPAMVEQLDTAVITPAMLEEEEQLEAAGLERERKMLEKARMSWDRESTEIRYRRLQHLLEKSNIYSKFLLTKMEQQQLEEQKKKEKLERKKESLKVKKGKNSIDASEEKPVMRKKRGREDESYNISEVMSKEEILSVAKKNKKENEDENSSSTNLCVEDLQKNKDSNSIIKDRLSETVRQNTKFFFDPVRKCNGQPVPFQQPKHFTGGVMRWYQVEGMEWLRMLWENGINGILADEMGLGKTVQCIATIALMIQRGVPGPFLVCGPLSTLPNWMAEFKRFTPDIPTMLYHGTQEERQKLVRNIYKRKGTLQIHPVVITSFEIAMRDRNALQILTPFLLRRLKSDVALEVPPKREVVVYAPLSKKQEIFYTAIVNRTIANMFGSSEKETIELSPTGRPKRRTRKSINYSKIDDFPNELEKLISQIQPEVDRERAVVEVNIPVESEVNLKLQNIMMLLRKCCNHPYLIEYPIDPVTQEFKIDEELVTNSGKFLILDRMLPELKKRGHKVLLFSQMTSMLDILMDYCHLRDFNFSRLDGSMSYSEREKNMHSFNTDPEVFIFLVSTRAGGLGINLTAADTVIIYDSDWNPQSDLQAQDRCHRIGQTKPVVVYRLVTANTIDQKIVERAAAKRKLEKLIIHKNHFKGGQSGLNLSKNFLDPKELMELLKSRDYEREIKGSREKVISDKDLELLLDRSDLIDQMNASGPIKEKMGIFKILENSEDSSPECLF

SEQ ID NO: 5894 - protein, 350 aa, Homo sapiens
MAATSLMSALAARLLQPAHSCSLRLRPFHLAAVRNEAVVISGRKLAQQIKQEVRQEVEEWVASGNKRPHLSVILVGENPASHSYVLNKTRAAAVVGINSETIMKPASISEEELLNLINKLNNDDNVDGLLVQLPLPEHIDERRICNAVSPDKDVDGFHVINVGRMCLDQYSMLPATPWGVWEIIKRTGIPTLGKNVVVAGRSKNVGMPIAMLLHTDGAHERPGGDATVTISHRYTPKEQLKKHTILADIVISAAGIPNLITADMIKEGAAVIDVGINRVHDPVTAKPKLVGDVDFEGVRQKAGYITPVPGGVGPMTVAMLMKNTIIAAKKVLRLEEREVLKSKELGVATN

SEQ ID NO: 5895 - protein, 618 aa, Homo sapiens
MGVGRQQRGPFQGVRVKNSVKELLLHIRSHKQKASGQAVDDFKTQGVNIEQFRELKNTVSYSGKRKGPDSLSDGPACKRPALLHSQFLTPPQTPTPGESMEDVHLNEPKQESSADLLQNIINIKNECSPVSLNTVQVSWLNPVVVPQSSPAEQCQDFHGGQVFSPPQKCQPFQVRGSQQMIDQASLYQYSPQNQHVEQQPHYTHKPTLEYSPFPIPPQSPAYEPNLFDGPESQFCPNQSLVSLLGDQRESENIANPMQTSSSVQQQNDAHLHSFSMMPSSACEAMVGHEMASDSSNTSLPFSNMGNPMNTTQLGKSLFQWQVEQEESKLANISQDQFLSKDADGDTFLHIAVAQGRRALSYVLARKMNALHMLDIKEHNGQSAFQVAVAANQHLIVQDLVNIGAQVNTTDCWGRTPLHVCAEKGHSQVLQAIQKGAVGSNQFVDLEATNYDGLTPLHCAVIAHNAVVHELQRNQQPHSPEVQELLLKNKSLVDTIKCLIQMGAAVEAKDRKSGRTALHLAAEEANLELIRLFLELPSCLSFVNAKAYNGNTALHVAASLQYRLTQLDAVRLLMRKGADPSTRNLENEQPVHLVPDGPVGEQIRRILKGKSIQQRAPPY

SEQ ID NO: 5896 - protein, 157 aa, Homo sapiens [sequence omitted]

SEQ ID NO: 5897 - protein, 327 aa, Homo sapiens
MEDIQTNAELKSTQEQSVPAESAAVLNDYSLTKSHEMENVDSGEGPANEDEDIGASAEARHIKAEMGSERALVLDRLASNVAKRKSSMPQKFIGEKRHCFDVNYNSSYMYEKESELIQTRMMDQAINNAISYLGAEALRPLVQTPPAPTSEMVPVISSMYPIALTRAEMSNGAPQELEKKSIHLPEKSVPSERGLSPNNSGHDSTDTDSNHEERQNHIYQQNHMVLSRARNGMPLLKEVPRSYELLKPPPICPRDSVKVINKEGEVMDVYRCDHCRVLFLDYVMFTIHMGCHGFRDPFECNMCGYRSHDRYEFSSHIARGEHRALLK

SEQ ID NO: 5898 - protein, 1042 aa, Homo sapiens
MPMWAGGVGSPRRGMAPASTDDLFARKLRQPARPPLTPHTFEPRPVRGPLLRSGSDAGEARPPTPASPRARAHSHEEASRPAATSTRLFTDPLALLGLPAEEPEPAFPPVLEPRWFAHYDVQSLLFDWAPRSQGMGSHSEASSGTLASAEDQAASSDLLHGAPGFVCELGGEGELGLGGPASPPVPPALPNAAVSILEEPQNRTSAYSLEHADLGAGYYRKYFYGKEHQNFFGMDESLGPVAVSLRREEKEGSGGGTLHSYRVIVRTTQLRTLRGTISEDALPPGPPRGLSPRKLLEHVAPQLSPSCLRLGSASPKVPRTLLTLDEQVLSFQRKVGILYCRAGQGSEEEMYNNQEAGPAFMQFLTLLGDVVRLKGFESYRAQLDTKTDSTGTHSLYTTYQDHEIMFHVSTMLPYTPNNQQQLLRKRHIGNDIVTIVFQEPGSKPFCPTTIRSHFQHVFLVVRAHTPCTPHTTYRVAVSRTQDTPAFGPALPAGGGPFAANADFRAFLLAKALNGEQAAGHARQFHAMATRTRQQYLQDLATNEVTTTSLDSASRFGLPSLGGRRRAAPRGPGAELQAAGSLVWGVRAAPGARVAAGAQASGPEGIEVPCLLGISAEALVLVAPRDGRVVFNCACRDVLAWTFSEQQLDLYHGRGEAITLRFDGSPGQAVGEVVARLQLVSRGCETRELALPRDGQGRLGFEVDAEGFVTHVERFTFAETAGLRPGARLLRVCGQTLPSLRPEAAAQLLRSAPKVCVTVLPPDESGRPRRSFSELYTLSLQEPSRRGAPDPVQDEVQGVTLLPTTKQLLHLCLQDGGSPPGPGDLAEERTEFLHSQNSLSPRSSLSDEAPVLPNTTPDLLLATTAKPSVPSADSETPLTQDRPGSPSGSEDKGNPAPELRASFLPRTLSLRNSISRIMSEAGSGTLEDEWQAISEIASTCNTILESLSREGQPIPESGDPKGTPKSDAEPEPGNLSEKVSHLESMLRKLQEDLQKEKADRAALEEEVRSLRHNNRRLQAESESAATRLLLASKQLGSPTADLA

SEQ ID NO: 5899 - protein, 620 aa, Homo sapiens
MRRSEVLAEESIVCLQKALNHLREIWELIGIPEDQRLQRTEVVKKHIKELLDMMIAEEESLKERLIKSISVCQKELNTLCSELHVEPFQEEGETTILQLEKDLRTQVELMRKQKKERKQELKLLQEQDQELCEILCMPHYDIDSASVPSLEELNQFRQHVTTLRETKASRREEFVSIKRQIILCMEALDHTPDTSFERDVVCEDEDAFCLSLENIATLQKLLRQLEMQKSQNEAVCEGLRTQIRELWDRLQIPEEEREAVATIMSGSKAKVRKALQLEVDRLEELKMQNMKKVIEAIRVELVQYWDQCFYSQEQRQAFAPFCAEDYTESLLQLHDAEIVRLKNYYEVHKELFEGVQKWEETWRLFLEFERKASDPNRFTNRGGNLLKEEKQRAKLQKMLPKLEEELKARIELWEQEHSKAFMVNGQKFMEYVAEQWEMHRLEKERAKQERQLKNKKQTETEMLYGSAPRTPSKRRGLAPNTPGKARKLNTTTMSNATANSSIRPIFGGTVYHSPVSRLPPSGSKPVAASTCSGKKTPRTGRHGANKENLELNGSILSGGYPGSAPLQRNFSINSVASTYSEFAKDPSLSDSSTVGLQRELSKASKSDATSGILNSTNIQS

SEQ ID NO: 5900 - protein, 140 aa, Homo sapiens [sequence omitted]

SEQ ID NO: 5901 - protein, 114 aa, Homo sapiens
MSKRGRGGSSGAKFRISLGLPVGAVINCADNTGAKNLYIISVKGIKGRLNRLPAAGVGDMVMATVKKGKPELRKKVLLCHTGWSAVTPLKLTVTLNCWTWNPPAVAFKGLQLQV

SEQ ID NO: 5902 - protein, 272 aa, Homo sapiens
MSGCRVFIGRLNPAAREKDVERFFKGYGRIRDIDLKRGFGFVEFEDPRDADDAVYELDGKELCSERVTIEHARARSRGGRGRGRYSDRFSSRRPRNDRRNAPPVRTENRLIVENLSSRVSWQDLKDFMRQAGEVTFADAHRPKLNEGVVEFASYGDLKNAIEKLSGKEINGRKIKLIEGSKRHSRSRSRSRSRTRSSSRSRSRSRSRSRKSYSRSRSRSRSRSRSKSRSVSRSPVPEKSQKRGSSSRSKSPASVDRQRSRSRSRSRSVDSGN

SEQ ID NO: 5903 - protein, 501 aa, Homo sapiens
MVLQPSERHYRDWNHRRLGPWCSPTGSPAPLSCETGCGEGSWILVCRLLVPTQVSLLSMEEDIDTRKINNSFLRDHSYATEADIISTVEFNHTGELLATGDKGGRVVIFQREQESKNQVHRRGEYNVYSTFQSHEPEFDYLKSLEIEEKINKIRWLPQQNAAYFLLSTNDKTVKLWKVSERDKRPEGYNLKDEEGRLRDPATITTLRVPVLRPMDLMVEATPRRVFANAHTYHINSISVNSDYETYMSADDLRINLWNFEITNQSFNIVDIKPANMEELTEVITAAEFHPHHCNTFVYSSSKGTIRLCDMRASALCDRHTKFFEEPEDPSNRSFFSEIISSISDVKFSHSGRYIMTRDYLTVKVWDLNMENRPIETYQVHDYLRSKLCSLYENDCIFDKFECVWNGSDSVIMTGSYNNFFRMFDRNTKRDVTLEASRENSKPRAILKPRKVCVGGKRRKDEISVDSLDFSKKILHTAWHPSENIIAVAATNNLYIFQDKVN

SEQ ID NO: 5904 - protein, 509 aa, Homo sapiens
MLLSLPALHLQTSEHHPFFQLPHRRLGPWCSPTGSPAPLSCETGCGEGSWILVCRLLVPTQVSLLSMEEDIDTRKINNSFLRDHSYATEADIISTVEFNHTGELLATGDKGGRVVIFQREQESKNQVHRRGEYNVYSTFQSHEPEFDYLKSLEIEEKINKIRWLPQQNAAYFLLSTNDKTVKLWKVSERDKRPEGYNLKDEEGRLRDPATITTLRVPVLRPMDLMVEATPRRVFANAHTYHINSISVNSDYETYMSADDLRINLWNFEITNQSFNIVDIKPANMEELTEVITAAEFHPHHCNTFVYSSSKGTIRLCDMRASALCDRHTKFFEEPEDPSNRSFFSEIISSISDVKFSHSGRYIMTRDYLTVKVWDLNMENRPIETYQVHDYLRSKLCSLYENDCIFDKFECVWNGSDSVIMTGSYNNFFRMFDRNTKRDVTLEASRENSKPRAILKPRKVCVGGKRRKDEISVDSLDFSKKILHTAWHPSENIIAVAATNNLYIFQDKVN

SEQ ID NO: 5905 - protein, 771 aa, Homo sapiens
MTANRLAESLLALSQQEELADLPKDYLLSESEDEGDNDGERKHQKLLEAISSLDGKNRRKLAERSEASLKVSEFNVSSEGSGEKLVLADLLEPVKTSSSLATVKKQLSRVKSKKTVELPLNKEEIERIHREVAFNKTAQVLSKWDPVVLKNRQAEQLVFPLEKEEPAIAPIEHVLSGWKARTPLEQEIFNLLHKNKQPVTDPLLTPVEKASLRAMSLEEAKMRRAELQRARALQSYYEAKARREKKIKSKKYHKVVKKGKAKKALKEFEQLRKVNPAAALEELEKIEKARMMERMSLKHQNSGKWAKSKAIMAKYDLEARQAMQEQLSKNKELTQKLQVASESEEEEGGTEDVEELLVPDVVNEVQMNADGPNPWMLRSCTSDTKEAATQEDPEQLPELEAHGVSESEGEERPVAEEEILLREFEERRSLRKRSELSQDAEPAGSQETKDSGSQEVLSELRVLSQKLKENHQSRKQKASSEGTIPQVQREEPAPEEEEPLLLQRPERVQTLEELEELGKEECFQNKELPRPVLEGQQSERTPNNRPDAPKEKKKKEQMIDLQNLLTTQSPSVKSLAVPTIEELEDEEERNHRQMIKEAFAGDDVIRDFLKEKREAVEASKPKDVDLTLPGWGEWGGVGLKPSAKKRRRFLIKAPEGPPRKDKNLPNVIINEKRNIHAAAHQVRVLPYPFTHHWQFERTIQTPIGSTWNTQRAFQKLTTPKVVTKPGHIINPIKAEDVGYRSSSRSDLSVIQRNPKRITTRHKKQLKKCSVD

SEQ ID NO: 5906 - protein, 382 aa, Homo sapiens
MVPSSPSPPPPPRVYKPCFVCNDKSSGYHYGVSSCEGCKGFFRRSIQKNMVYTCHRDKNCIINKVTRNRCQYCRLQKCFEVGMSKEAVRNDRNKKKKEVKEEGSPDSYELSPQLEELITKVSKAHQETFPSLCQLGKYTTNSSADHRVQLDLGLWDKFSELATKCIIKIVEFAKRLPGFTGLSIADQITLLKAACLDILMLRICTRYTPEQDTMTFSDGLTLNRTQMHNAGFGPLTDLVFAFAGQLLPLEMDDTETGLLSAICLICGDRMDLEEPEKVDKLQEPLLEALRLYARRRRPSQPYMFPRMLMKITDLRGISTKGAERAITLKMEIPGPMPPLIREMLENPEMFEDDSSQPGPHPNASSEDEVPGGQGKGGLKSPA

SEQ ID NO: 5907 - protein, 63 aa, Homo sapiens
MAGTLDLDKGCTVEELLRGCIEAFAGGQAAPHLPTIPEGQLQFPAGENVPPGQVLDLRLPSGV

SEQ ID NO: 5908 - protein, 66 aa, Homo sapiens
MAGTLDLDKGCTVEELLRGCIEAFELSGLLNPLLHLPTIPEGQLQFPAGENVPPGQVLDLRLPSGV

SEQ ID NO: 5909 - protein, 669 aa, Homo sapiens
MWTPVRRGAAWLGTLLGPGEGPPEPRGGAAHAHKPPAGSRKSTDQAVRFGPSQGMCSEARLARRLRDALREEEPWAVEELLRCGADPNLVLEDGAAAVHLAAGARHPRGLRCLGALLRQGGDPNARSVEALTPLHVAAAWGCRRGLELLLSQGADPALRDQDGLRPLDLALQQGHLECARVLQDLDTRTRTRTRIGAETQEPEPAPGTPGLSGPTDETLDSIALQKQPCRGDNRDIGLEADPGPPSLPVPLETVDKHGSSASPPGHWDYSSDASFVTAVEVSGAEDPASDTPPWAGSLPPTRQGLLHVVHANQRVPRSQGTEAELNARLQALTLTPPNAAGFQSSPSSMPLLDRSPAHSPPRTPTPGASDCHCLWEHQTSIDSDMATLWLTEDEASSTGGREPVGPCRHLPVSTVSDLELLKGLRALGENPHPITPFTRQLYHQQLEEAQIAPGPEFSGHSLELAAALRTGCIPDVQADEDALAQQFEQPDPARRWREGVVKSSFTYLLLDPRETQDLPARAFSLTPAERLQTFIRAIFYVGKGTRARPYVHLWEALGHHGRSRKQPHQACPKVRQILDIWASGCGVVSLHCFQHVVAVEAYTREACIVEALGIQTLTNQKQGHCYGVVAGWPPARRRRLGVHLLHRALLVFLAEGERQLHPQDIQARG

SEQ ID NO: 5910 - protein, 292 aa, Homo sapiens
MNPFWSMSTSSVRKRSEGEEKTLTGDVKTSPPRTAPKKQLPSIPKNALPITKPTSPAPAAQSTNGTHASYGPFYLEYSLLAEFTLVVKQKLPGVYVQPSYRSALMWFGVIFIRHGLYQDGVFKFTVYIPDNYPDGDCPRLVFDIPVFHPLVDPTSGELDVKRAFAKWRRNHNHIWQVLMYARRVFYKIDTASPLNPEAAVLYEKDIQLFKSKVVDSVKVCTARLFDQPKIEDPYAISFSPWNPSVHDEAREKMLTQKKPEEQHNKSVHVAGLSWVKPGSVQPFSKEEKTVAT

SEQ ID NO: 5911 - protein, 117 aa, Homo sapiens [sequence omitted]

SEQ ID NO: 5912 - protein, 1163 aa, Homo sapiens
MPVSTSLHQDGSQERPVSLTSTTSSSGSSCDSRSAMEEPSSSEAPAKNGAGSLRSRHLPNSNNNSSSWLNVKGPLSPFNSRAAAGPAHHKLSYLGRVVREIVETERMYVQDLRSIVESQEFDIYTQYCNNYPNSVAALTECMRDKQQAKFFRDRQELLQHSLPLGSYLLKPVQRILKYHLLLQEIAKHFDEEEDGFEVVEDAIDTMTCVAWYINDMKRRHEHAVRLQEIQSLLINWKGPDLTTYGELVLEGTFRVHRVRNERTFFLFDKTLLITKKRGDHFVYKGNIPCSSLMLIESTRDSLCFTVTHYKHSKQQYSIQAKTVEEKRNWTHHIKRLILENHHATIPQKAKEAILEMDSYYPNRYRCSPERLKKAWSSQDEVSTNVRQGRRQSEPTKHLLRQLNEKARAAGMKGKGRRESESSRSSRRPSGRSPTSTEKRMSFESISSLPEVEPDPEAGSEQEVFSAVEGPSAEETPSDTESPEVLETQLDAHQGLLGMDPPGDMVDFVAAESTEDLKALSSEEEEEMGGAAQEPESLLPPSVLDQASVIAERFVSSFSRRSSVAQEDSKSSGFGSPRLVSRSSSVLSLEGSEKGLARHGSATDSLSCQLSPEVDISVGVATEDSPSVNGMEPPSPGCPVEPDRSSCKKKESALSTRDRLLLDKIKSYYENAEHHDAGFSVRRRESLSYIPKGLVRNSISRFNSLPRPDPEPVPPVGSKRQVGSRPTSWALFELPGPSQAVKGDPPPISDAEFRPSSEIVKIWEGMESSGGSPGKGPGQGQANGFDLHEPLFILEEHELGAITEESATASPESSSPTEGRSPAHLARELKELVKELSSSTQGELVAPLHPRIVQLSHVMDSHVSERVKNKVYQLARQYSLRIKSNKPVMARPPLQWEKVAPERDGKSPTVPCLQEEAGEPLGGKGKRKPVLSLFDYEQLMAQEHSPPKPSSAGEMSPQRFFFNPSAVSQRTTSPGGRPSARSPLSPTETFSWPDVRELCSKYASRDEARRAGGGRPRGPPVNRSHSVPENMVEPPLSGRVGRCRSLSTKRGRGGGEAAQSPGPLPQSKPDGGETLYVTADLTLEDNRRVIVMEKGPLPSPTAGLEESSGQGPSSPVALLGQVQDFQQSAECQPKEEGSRDPADPSQQGRVRNLREKFQALNSVG

SEQ ID NO: 5913 - protein, 181 aa, Homo sapiens
RPVEHLNDKIKIKFGLAISQLVDVDEKNQLMTTNVWLKQEWIDVKLRWNPDDYGGIKVIRVPSDSVWTPDIVLFDNADGRFEGTSTKTVIRYNGTVTWTPPANYKSSCTIDVTFFPFDLQNCSMKFGSWTYDGSQVDIILEDQDVDKRDFFDNGEWEIVSATGSKGNRTDSCCWLLKIGNS

SEQ ID NO: 5914 - protein, 918 aa, Homo sapiens
MGTTAPGPIHLLELCDQKLMEFLCNMDNKDLVWLEEIQEEAERMFTREFSKEPELMPKTPSQKNRRKKRRISYVQDENRDPIRRRLSRRKSRSSQLSSRRLRSKDSVEKLATVVGENGSVLRRVTRAAAAAAAATMALAAPSSPTPESPTMLTKKPEDNHTQCQLVPVVEIGISERQNAEQHVTQLMSTEPLPRTLSPTPASATAPTSQGIPTSDEESTPKKSKARILESITVSSLMATPQDPKGQGVGTGRSASKLRIAQVSPGPRDSPAFPDSPWRERVLAPILPDNFSTPTGSRTDSQSVRHSPIAPSSPSPQVLAQKYSLVAKQESVVRRASRRLAKKTAEEPAASGRIICHSYLERLLNVEVPQKVGSEQKEPPEEAEPVAAAEPEVPENNGNNSWPHNDTEIANSTPNPKPAASSPETPSAGQQEAKTDQADGPREPPQSARRKRSYKQAVSELDEEQHLEDEELQPPRSKTPSSPCPASKVVRPLRTFLHTVQRNQMLMTPTSAPRSVMKSFIKRNTPLRMDPKCSFVEKERQRLENLRRKEEAEQLRRQKVEEDKRRRLEEVKLKREERLRKVLQARERVEQMKEEKKKQIEQKFAQIDEKTEKAKEERLAEEKAKKKAAAKKMEEVEARRKQEEEARRLRWLQQEEEERRHQELLQKKKEEEQERLRKAAEAKRLAEQREQERREQERREQERREQERREQERREQERQLAEQERRREQERLQAERELQEREKALRLQKEQLQRELEEKKKKEEQQRLAERQLQEEQEKKAKEAAGASKALNVTVDVQSPACTSYQMTPQGHRAPPKINPDNYGMDLNSDDSTDDEAHPRKPIPTWARGTPLSQAIIHQYYHPPNLLELFGTILPLDLEDIFKKSKPRYHKRTSSAVWNSPPLQGARVPSSLAYSLKKH

SEQ ID NO: 5915 - protein, 626 aa, Homo sapiens
MIPANASARKGPEGKYPLHYLVWHNRHRELEKEVRAGQVDIEQLDPRGRTPLHLATTLGHLECARVLLAHGADVGRENRSGWTVLQEAVSTRDLELVQLVLRYRDYQRVVKRLAGIPVLLEKLRKAQDFYVEMKWEFTSWVPLVSKICPSDTYKVWKSGQNLRVDTTLLGFDHMTWQRGNRSFVFRGQDTSAVVMEIDHDRRVVYTETLALAGQDRELLLAAAQPTEEQVLSRLTAPVVTTQLDTKNISFERNKTGILGWRSEKTEMVNGYEAKVYGASNVELITRTRTEHLSEQHKGKVKGCKTPLQSFLGIAEQHGGPQNGTLITQTLSQANPTAITAEEYFNPNFELGNRDMGRPMELTTKTQKFKAKLWLCEEHPLSLCEQVAPIIDLMAVSNALFAKLRDFITLRLPPGFPVKIEIPIFHILNARITFGNLNGCDEPVPSVRGSPSSETPSPGSDSSSVSSSSSTTSCRGCEISPALFEAPRGYSMMGGQREAATRDDDDDLLQFAIQQSLLEAGSEYDQVTIWEALTNSKPGTHPMSYEGRRQDRSAPPTPQRQPAPPASVPSPRPSSGPGSGGHVFRSYDEQLRLAMELSAQEQEERRRRARQEEEELERILRLSLTEQ

SEQ ID NO: 5916 - protein, 890 aa, Homo sapiens
MSQGILSPPAGLLSDDDVVVSPMFESTAADLGSVVRKNLLSDCSVVSTSLEDKQQVPSEDSMEKVKVYLRVRPLLPSELERQEDQGCVRIENVETLVLQAPKDSFALKSNERGIGQATHRFTFSQIFGPEVGQASFFNLTVKEMVKDVLKGQNWLIYTYGVTNSGKTHTIQGTIKDGGILPRSLALIFNSLQGQLHPTPDLKPLLSNEVIWLDSKQIRQEEMKKLSLLNGGLQEEELSTSLKRSVYIESRIGTSTSFDSGIAGLSSISQCTSSSQLDETSHRWAQPDTAPLPVPANIRFSIWISFFEIYNELLYDLLEPPSQQRKRQTLRLCEDQNGNPYVKDLNWIHVQDAEEAWKLLKVGRKNQSFASTHLNQNSSRSHSIFSIRILHLQGEGDIVPKISELSLCDLAGSERCKDQKSGERLKEAGNINTSLHTLGRCIAALRQNQQNRSKQNLVPFRDSKLTRVFQGFFTGRGRSCMIVNVNPCASTYDETLHVAKFSAIASQLVHAPPMQLGFPSLHSFIKEHSLQVSPSLEKGAKADTGLDDDIENEADISMYGKEELLQVVEAMKTLLLKERQEKLQLEMHLRDEICNEMVEQMQQREQWCSEHLDTQKELLEEMYEEKLNILKESLTSFYQEEIQERDEKIEELEALLQEARQQSVAHQQSGSELALRRSQRLAASASTQQLQEVKAKLQQCKAELNSTTEELHKYQKMLEPPPSAKPFTIDVDKKLEEGQKNIRLLRTELQKLGESLQSAERACCHSTGAGKLRQALTTCDDILIKQDQTLAELQNNMVLVKLDLRKKAACIAEQYHTVLKLQGQVSAKKRLGTNQENQQPNQQPPGKKPFLRNLLPRTPTCQSSTDCSPYARILRSRRSPLLKSGPFGKKY

SEQ ID NO: 5917 - protein, 359 aa, Homo sapiens
MAAPCAEDPSLERHFKGHRDAVTCVDFSINTKQLASGSMDSCLMVWHMKPQSRAYRFTGHKDAVTCVNFSPSGHLLASGSRDKTVRIWVPNVKGESTVFRAHTATVRSVHFCSDGQSFVTASDDKTVKVWATHRQKFLFSLSQHINWVRCAKFSPDGRLIVSASDDKTVKLWDKSSRECVHSYCEHGGFVTYVDFHPSGTCIAAAGMDNTVKVWDVRTHRLLQHYQLHSAAVNGLSFHPSGNYLITASSDSTLKILDLMEGRLLYTLHGHQGPATTVAFSRTGEYFASGGSDEQVMVWKSNFDIVDHGEVTKVPRPPATLASSMGNLTVSILEQRLTLTEDKLKQCLENQQLIMQRATP

SEQ ID NO: 5918 - protein, 115 aa, Homo sapiens
MTTFSQLRELHLEGNFLHRLPSEVSALQHLKAIDLSRNQFQDFPEQLTALPALETINLEENEIVDVPVEKLAAMPALRSINLRFNPLNAEVRVIAPPLIKFDMLMSPEGARAPLP

SEQ ID NO: 5919 - protein, 481 aa, Homo sapiens
MPQLDSGGGGAGGGDDLGAPDELLAFQDEGEEQDDKSRDSAAGPERDLAELKSSLVNESEGAAGGAGIPGVPGAGAGARGEAEALGREHAAQRLFPDKLPEPLEDGLKAPECTSGMYKETVYSAFNLLMHYPPPSGAGQHPQPQPPLHKANQPPHGVPQLSLYEHFNSPHPTPAPADISQKQVHRPLQTPDLSGFYSLTSGSMGQLPHTVSWFTHPSLMLGSGVPGHPAAIPHPAIVPPSGKQELQPFDRNLKTQAESKAEKEAKKPTIKKPLNAFMLYMKEMRAKVIAECTLKESAAINQILGRRWHALSREEQAKYYELARKERQLHMQLYPGWSARDNYGKKKRRSREKHQESTTDPGSPKKCRARFGLNQQTDWCGPCRRKKKCIRYLPGEGRCPSPVPSDDSALGCPGSPAPQDSPSYHLLPRFPTELLTSPAEPAPTSPGLSTALSLPTPGPPQAPRSTLQSTQVQQQESQRQVA

SEQ ID NO: 5920 - protein, 466 aa, Homo sapiens
MPTRRWAPGTQCITKCEHTRPKPGELAFRKGDVVTILEACENKSWYRVKHHTSGQEGLLAAGALREREALSADPKLSLMPWFHGKISGQEAVQQLQPPEDGLFLVRESARHPGDYVLCVSFGRDVIHYRVLHRDGHLTIDEAVFFCNLMDMVEHYSKDKGAICTKLVRPKRKHGTKSAEEELARAGWLLNLQHLTLGAQIGEGEFGAVLQGEYLGQKVAVKNIKCDVTAQAFLDETAVMTKMQHENLVRLLGVILHQGLYIVMEHVSKGNLVNFLRTRGRALVNTAQLLQFSLHVAEGMEYLESKKLVHRDLAARNILVSEDLVAKVSDFGLAKAERKGLDSSRLPVKWTAPEALKHGKFTSKSDVWSFGVLLWEVFSYGRAPYPKMSLKEVSEAVEKGYRMEPPEGCPGPVHVLMSSCWEAEPARRPPFRKLAEKLARELRSAGAPASVSGQDADGSTSPRSQEP

SEQ ID NO: 5921 - protein, 508 aa, Homo sapiens
MQGHFPAERREGRPRRGTRGQQQLLVSPRFLRAWHPPPVSARMPTRRWAPGTQCITKCEHTRPKPGELAFRKGDVVTILEACENKSWYRVKHHTSGQEGLLAAGALREREALSADPKLSLMPWFHGKISGQEAVQQLQPPEDGLFLVRESARHPGDYVLCVSFGRDVIHYRVLHRDGHLTIDEAVFFCNLMDMVEHYSKDKGAICTKLVRPKRKHGTKSAEEELARAGWLLNLQHLTLGAQIGEGEFGAVLQGEYLGQKVAVKNIKCDVTAQAFLDETAVMTKMQHENLVRLLGVILHQGLYIVMEHVSKGNLVNFLRTRGRALVNTAQLLQFSLHVAEGMEYLESKKLVHRDLAARNILVSEDLVAKVSDFGLAKAERKGLDSSRLPVKWTAPEALKHGKFTSKSDVWSFGVLLWEVFSYGRAPYPKMSLKEVSEAVEKGYRMEPPEGCPGPVHVLMSSCWEAEPARRPPFRKLAEKLARELRSAGAPASVSGQDADGSTSPRSQEP

SEQ ID NO: 5922 - protein, 626 aa, Homo sapiens
MPCVQAQYSPSPPGSSYAAQTYSSEYTTEIMNPDYTKLTMDLGSTEITATATTSLPSISTFVEGYSSNYELKPSCVYQMQRPLIKVEEGRAPSYHHHHHHHHHHHHHHQQQHQQPSIPPASSPEDEVLPSTSMYFKQSPPSTPTTPAFPPQAGALWDEALPSAPGCIAPGPLLDPPMKAVPTVAGARFPLFHFKPSPPHPPAPSPAGGHHLGYDPTAAAALSLPLGAAAAAGSQAAALESHPYGLPLAKRAAPLAFPPLGLTPSPTASSLLGESPSLPSPPSRSSSSGEGTCAVCGDNAACQHYGVRTCEGCKGFFKRTVQKNAKYVCLANKNCPVDKRRRNRCQYCRFQKCLSVGMVKEVVRTDSLKGRRGRLPSKPKSPLQQEPSQPSPPSPPICMMNALVRALTDSTPRDLDYSRYCPTDQAAAGTDAEHVQQFYNLLTASIDVSRSWAEKIPGFTDLPKEDQTLLIESAFLELFVLRLSIRSNTAEDKFVFCNGLVLHRLQCLRGFGEWLDSIKDFSLNLQSLNLDIQALACLSALSMITERHGLKEPKRVEELCNKITSSLKDHQSKGQALEPTESKVLGALVELRKICTLGLQRIFYLKLEDLVSPPSIIDKLFLDTLPF

SEQ ID NO: 5923 - protein, 92 aa, Homo sapiens
MSGEPELIELRELAPAGRAGKGRTRLERANALRIARGTACNPTRQLVPGRGHRFQPAGPATHTWCDLCGDFIWGVVRKGLQCARRACGVGDT

SEQ ID NO: 5924 - protein, 250 aa, Homo sapiens
MSAEVIHQVEEALDTDEKEMLLFLCRDVAIDVVPPNVRDLLDILRERGKLSVGDLAELLYRVRRFDLLKRILKMDRKAVETHLLRNPHLVSDYRVLMAEIGEDLDKSDVSSLIFLMKDYMGRGKISKEKSFLDLVVELEKLNLVAPDQLDLLEKCLKNIHRIDLKTKIQKYKQSGGWNGTWMTKASFSLWLEIASLYILHIPDLPTPLPCIFMISAKCCQAVLNISVFKKESGICTGWQSYGHSGVLHVC

SEQ ID NO: 5925 - protein, 799 aa, Homo sapiens
MKPSPAGTAKELEPPAPARGEQRTAEPEGRWREKGEADTERQRTRERQEATLAGLAELEYLRQRQELLVRGALRGAGGAGAAAPRAGELLGEAAQRSRLEEKFLEENILLLRKQLNCLRRRDAGLLNQLQELDKQISDLRLDVEKTSEEHLETDSRPSSGFYELSDGASGSLSNSSNSVFSECLSSCHSSTCFCSPLEATLSLSDGCPKSADVNPKYQCDLVSKNGNDVYRYPSPLHAVAVQSPMFLLCLTGNPLREEDRLGNHASDICGGSELDAVKTDSSLPSPSSLWSASHPSSSKKMDGYILSLVQKKTHPVRTNKPRTSVNADPTKGLLRNGSVCVRAPGGVSQGNSVNLKNSKQACLPSGGIPSLNNGTFSPPKQWSKESKAEQAESKRVPLPEGCPSGAASDLQSKHLPKTAKPASQEHARCSAIGTGESPKESAQLSGASPKESPSRGPAPPQENKVVQPLKKMSQKNSLQGVPPATPPLLSTAFPVEERPALDFKSEGSSQSLEEAHLVKAQFIPGQQPSVRLHRGHRNMGVVKNSSLKHRGPALQGLENGLPTVREKTRAGSKKCRFPDDLDTNKKLKKASSKGRKSGGGPEAGVPGRPAGGGHRAGSRAHGHGREAVVAKPKHKRTDYRRWKSSAEISYEEALRRARRGRRENVGLYPAPVPLPYASPYAYVASDSEYSAECESLFHSTVVDTSEDEQSNYTTNCFGDSESSVSEGEFVGESTTTSDSEESGGLIWSQFVQTLPIQTVTAPDLHNHPAKTFVKIKASHNLKKKILRFRSGSLKLMTTV

SEQ ID NO: 5926 - protein, 251 aa, Homo sapiens
MPMYQVKPYHGGGAPLRVELPTCMYRLPNVHGRSYGPAPGAGHVQDYGALKDIVINANPASPPLSLLVLHRLLCEHFRVLSTVHTHSSVKSVPENLLKCFGEQNKKQPRQDYQLGFTLIWKNVPKTQMKFSIQTMCPIEGEGNIARFLFSLFGQKHNAVNATLIDSWVDIAIFQLKEGSSKEKAAVFRSMNSALGKSPWLAGNELTVADVVLWSVLQQIGGCSVTVPANVQRWMRSCENLAPFNTALKLLK

SEQ ID NO: 5927 - protein, 407 aa, Homo sapiens
MQQKAFEESRYPWQESFENVAVCLPLRCPRCGDHTRFRSLSSLRAHLEFSHSYEERTLLTKCSLFPSLKDTDLVTSSELLKPGKLQSSGNVVKQKPSYVNLYSISHEHSKDRKPFEVVAERPVSYVQTYTAMDLHADSLDGTRSGPGLPTSDTKASFEAHVREKFNRMVEAVDRTIEKRIDKLTKELAQKTAELLEVRAAFVQLTQKKQEVQRRERALNRQVDVAVEMIAVLRQRLTESEEELLRKEEEVVTFNHFLEAAAEKEVQGKARLQDFIENLLQRVELAEKQLEYYQSQQASGFVRDLSGHVLTDISSNRKPKCLSRGHPHSVCNHPDLKAHFHPKGRNHLKKAKDDRASMQPAKAIHEQAESSRDLCRPPKKGELLGFGRKGNIRPKMAKKKPTAIVNII

SEQ ID NO: 5928 - protein, 333 aa, Homo sapiens
MQQKAFEESRYPWQESFENVAVCLPLRCPRCGDHTRFRSLSSLRAHLEFSHSYEERTLLTKCSLFPSLKDTDLVTSSELLKPGKLQSSGNVVKQKPSYVNLYSISHEHSKDRKPFEVVAERPVSYVQTYTAMDLHADSLDGTRSGPGLPTSDTKASFEAHVREKFNRMVEAVDRTIEKRIDKLTKELAQKTAELLEVRAAFVQLTQKKQEVQRRERALNRQVDVAVEMIAVLRQRLTESEEELLRKEEEVVTFNHFLEAAAEKEVQGKARLQDFIENLLQRVELAEKQLEYYQSQQASGFVRDLSGHVSWKGAGEARLVCQNDLELEESAIVE

SEQ ID NO: 5929 - protein, 163 aa, Homo sapiens
MEGPSLRGPALRLAGLPTQQDCNIQEKIDLEIRMREGIWKLLSLSTQKDQVLHAVKNLMVCNARLMAYTSELQKLEEQIANQTGRCDVKFESKERTACKGKIAISDIRIPLMWKDSDHFSNKERSRRYAIFCLFKMGANVFDTDVVNVDKTITDICFENVTIL

SEQ ID NO: 5930 - protein, 297 aa, Homo sapiens
MEDYTKIEKIGEGTYGVVYKGRHKTTGQVVAMKKIRLESEEEGVPSTAIREISLLKELRHPNIVSLQDVLMQDSRLYLIFEFLSMDLKKYLDSIPPGQYMDSSLVKSYLYQILQGIVFCHSRRVLHRDLKPQNLLIDDKGTIKLADFGLARAFGIPIRVYTHEVVTLWYRSPEVLLGSARYSTPVDIWSIGTIFAELATKKPLFHGDSEIDQLFRIFRALGTPNNEVWPEVESLQDYKNTFPKWKPGSLASHVKNLDENGLDLLSKMLIYDPAKRISGKMALNHPYFNDLDNQIKKM

SEQ ID NO: 5931 - protein, 427 aa, Homo sapiens
MEAMAASTSLPDPGDFDRNVPRICGVCGDRATGFHFNAMTCEGCKGFFRRSMKRKALFTCPFNGDCRITKDNRRHCQACRLKRCVDIGMMKEFILTDEEVQRKREMILKRKEEEALKDSLRPKLSEEQQRIIAILLDAHHKTYDPTYSDFCQFRPPVRVNDGGGSHPSRPNSRHTPSFSGDSSSSCSDHCITSSDMMDSSSFSNLDLSEEDSDDPSVTLELSQLSMLPHLADLVSYSIQKVIGFAKMIPGFRDLTSEDQIVLLKSSAIEVIMLRSNESFTMDDMSWTCGNQDYKYRVSDVTKAGHSLELIEPLIKFQVGLKKLNLHEEEHVLLMAICIVSPDRPGVQDAALIEAIQDRLSNTLQTYIRCRHPPPGSHLLYAKMIQKLADLRSLNEEHSKQYRCLSFQPECSMKLTPLVLEVFGNEIS

SEQ ID NO: 5932 - protein, 387 aa, Homo sapiens
MATATPVPPRMGSRAGGPTTPLSPTRLSRLQEKEELRELNDRLAVYIDKVRSLETENSALQLQVTEREEVRGRELTGLKALYETELADARRALDDTARERAKLQIELGKCKAEHDQLLLNYAKKESDLNGAQIKLREYEAALNSKDAALATALGDKKSLEGDLEDLKDQIAQLEASLAAAKKQLADETLLKVDLENRCQSLTEDLEFRKSMYEEEINETRRKHETRLVEVDSGRQIEYEYKLAQALHEMREQHDAQVRLYKEELEQTYHAKLENARLSSEMNTSTVNSAREELMESRMRIESLSSQLSNLQKESRACLERIQELEDLLAKEKDNSRRMLTDKEREMAEIRDQMQQQLNDYEQLLDVKLALDMEISAYRKLLEGEEER

SEQ ID NO: 5933 - protein, 297 aa, Homo sapiens
MDAEGLALLLPPVTLAALVDSWLREDCPGLNYAALVSGAGPSQAALWAKSPGVLAGQPFFDAIFTQLNCQVSWFLPEGSKLVPVARVAEVRGPAHCLLLGERVALNTLARCSGIASAAAAAVEAARGAGWTGHVAGTRKTTPGFRLVEKYGLLVGGAASHRYDLGGLVMVKDNHVVAAGGVEKAVRAARQAADFTLKVEVECSSLQEAVQAAEAGADLVLLDNFKPEELHPTATVLKAQFPSVAVEASGGITLDNLPQFCGPHIDVISMGMLTQAAPALDFSLKLFAKEVAPVPKIH

SEQ ID NO: 5934 - protein, 952 aa, Homo sapiens
MKSARAKTPRKPTVKKGSQTNLKDPVGVYCRVRPLGFPDQECCIEVINNTTVQLHTPEGYRLNRNGDYKETQYSFKQVFGTHTTQKELFDVVANPLVNDLIHGKNGLLFTYGVTGSGKTHTMTGSPGEGGLLPRCLDMIFNSIGSFQAKRYVFKSNDRNSMDIQCEVDALLERQKREAMPNPKTSSSKRQVDPEFADMITVQEFCKAEEVDEDSVYGVFVSYIEIYNNYIYDLLEEVPFDPIKPKPPQSKLLREDKNHNMYVAGCTEVEVKSTEEAFEVFWRGQKKRRIANTHLNRESSRSHSVFNIKLVQAPLDADGDNVLQEKEQITISQLSLVDLAGSERTNRTRAEGNRLREAGNINQSLMTLRTCMDVLRENQMYGTNKMVPYRDSKLTHLFKNYFDGEGKVRMIVCVNPKAEDYEENLQVMRFAEVTQEVEVARPVDKAICGLTPGRRYRNQPRGPVGNEPLVTDVVLQSFPPLPSCEILDINDEQTLPRLIEALEKRHNLRQMMIDEFNKQSNAFKALLQEFDNAVLSKENHMQGKLNEKEKMISGQKLEIERLEKKNKTLEYKIEILEKTTTIYEEDKRNLQQELETQNQKLQRQFSDKRRLEARLQGMVTETTMKWEKECERRVAAKQLEMQNKLWVKDEKLKQLKAIVTEPKTEKPERPSRERDREKVTQRSVSPSPVPLSSNYIAQISNGQQLMSQPQLHRRSNSCSSISVASCISEWEQKIPTYNTPLKVTSIARRRQQEPGQSKTCIVSDRRRGMYWTEGREVVPTFRNEIEIEEDHCGRNAPPIRLRHRRSRSAGDRWVDHKPASNMQTETVMQPHVPHAITVSVANEKALAKCEKYMLTHQELASDGEIETKLIKGDIYKTRGGGQSVQFTDIETLKQESPNGRKRRSSTVAPAQPDGAESEWTDVETRCSVAVEMRAGSQLGPGYQHHAQPKRKKP

SEQ ID NO: 5935 - protein, 132 aa, Homo sapiens
MAKDILGEAGLHFDELNKLRVLDPEVTQQTIELKEECKDFVDKIGQFQKIVGGLIELVDQLAKEAENEKMKAIGARNLLKSIAKQREAQQQQLQALIAEKKMQLERYRVEYEALCKVEAEQNEFIDQFIFQK

SEQ ID NO: 5936 - protein, 842 aa, Homo sapiens
MSSSHFASRHRKDISTEMIRTKIAHRKSLSQKENRHKEYERNRHFGLKDVNIPTLEGRILVELDETSQGLVPEKTNVKPRAMKTILGDQRKQMLQKYKEEKQLQKLKEQREKAKRGIFKVGRYRPDMPCFLLSNQNAVKAEPKKAIPSSVRITRSKAKDQMEQTKIDNESDVRAIRPGPRQTSEKKVSDKEKKVVQPVMPTSLRMTRSATQAAKQVPRTVSSTTARKPVTRAANENEPEGKVPSKGRPAKNVETKPDKGISCKVDSEENTLNSQTNATSGMNPDGVLSKMENLPEINTAKIKGKNSFAPKDFMFQPLDGLKTYQVTPMTPRSANAFLTPSYTWTPLKTEVDESQATKEILAQKCKTYSTKTIQQDSNKLPCPLGPLTVWHEEHVLNKNEATTKNLNGLPIKEVPSLERNEGRIAQPHHGVPYFRNILQSETEKLTSHCFEWDRKLELDIPDDAKDLIRTAVGQTRLLMKERFKQFEGLVDDCEYKRGIKETTCTDLDGFWDMVSFQIEDVIHKFNNLIKLEESGWQVNNNMNHNMNKNVFRKKVVSGIASKPKQDDAGRIAARNRLAAIKNAMRERIRQEECAETAVSVIPKEVDKIVFDAGFFRVESPVKLFSGLSVSSEGPSQRLGTPKSVNKAVSQSRNEMGIPQQTTSPENAGPQNTKSEHVKKTLFLSIPESRSSIEDAQCPGLPDLIEENHVVNKTDLKVDCLSSERMSLPLLAGGVADDINTNKKEGISDVVEGMELNSSITSQDVLMSSPEKNTASQNSILEEGETKISQSELFDNKSLTTECHLLDSVGSCYVARAGLEVLGSSDPTTSASRVAGTTARSKLQ

SEQ ID NO: 5937 - protein, 46 aa, Homo sapiens
MESPASSQPASMPQSKERLVISMVTIYGPQQVPICAVNPVLSTLQT

SEQ ID NO: 5938 - protein, 446 aa, Homo sapiens
MEKDKHSHFYNQKSDFRIEHSMLEELENKLIHSRKTERAKIQQQLAKIHNNVKKLQHQLKDVKPTPDFVEKLREMMEEIENAINTFKEEQRLIYEELIKEEKTTNNELSAISRKIDTWALGNSETEKAFRAISSKVPVDKVTPSTLPEEVLDFEKFLQQTGGRQGAWDDYDHQNFVKVRNKHKGKPTFMEEVLEHLPGKTQDEVQQHEKWYQKFLALEERKKESIQIWKTKKQQKREEIFKLKEKADNTPVLFHNKQEDNQKQKEEQRKKQKLAVEAWKKQKSIEMSMKCASQLKEEEEKEKKHQKERQRQFKLKLLLESYTQQKKEQEEFLRLEKEIREKAEKAEKRKNAADEISRFQERDLHKLELKILDRQAKEDEKSQKQRRLAKLKEKVENNVSRDPSRLYKPTKGWEERTKKIGPTGSGPLLHIPHRAIPTWRQGIQRRV

SEQ ID NO: 5939 - protein, 166 aa, Homo sapiens
MNPCCKFKDVRRNVQKDTEELKSCGIQDIFVFCTRGELSKYRVPNLLDLYQQCGIITHHHPIADGGTPDIASCCEIMEELTTCLKNYRKTLIHCYGGLGRSCLVAACLLLYLSDTISPEQAIDSLRDLRGSGAIQTIKQYNYLHEFRDKLAAHLSSRDSQSRSVSR

SEQ ID NO: 5940 - protein, 487 aa, Homo sapiens
MAALMTPGTGAPPAPGDFSGEGSQGLPDPSPEPKQLPELIRMKRDGGRLSEADIRGFVAAVVNGSAQGAQIGAMLMAIRLRGMDLEETSVLTQALAQSGQQLEWPEAWRQQLVDKHSTGGVGDKVSLVLAPALAACGCKVPMISGRGLGHTGGTLDKLESIPGFNVIQSPEQMQVLLDQAGCCIVGQSEQLVPADGILYAARDVTATVDSLPLITASILSKKLVEGLSALVVDVKFGGAAVFPNQEQARELAKTLVGVGASLGLRVAAALTAMDKPLGRCVGHALEVEEALLCMDGAGPPDLRDLVTTLGGALLWLSGHAGTQAQGAARVAAALDDGSALGRFERMLAAQGVDPGLARALCSGSPAERRQLLPRAREQEELLAPADAPLPAGTVELVRALPLALVLHELGAGRSRAGEPLRLGVGAELLVDVGQRLRRGTPWLRVHRDGPALSGPQSRALQEALVLSDRAPFAAPSPFAELVLPPQQ

SEQ ID NO: 5941 - protein, 1294 aa, Homo sapiens
MPYEVNAGYDFTNMVRKKNPPLRNVASEGEGQILEPIGTESKVSGKNKEFSADQMSENTDQSDAAELNHKEEHSLHVQDPSSSSKKDLKSAVLSEKAGFNYESPSKGGNFPSFPHDEVTDRNMLAFSSPAAGGVCEPLKSPQRAEADDPQDMACTPSGDSLETKEDQKMSPKATEETGQAQSGQANCQGLSPVSVASKNPQVPSDGGVRLNKSKTDLLVNDNPDPAPLSPELQDFKCNICGYGYYGNDPTDLIKHFRKYHLGLHNRTRQDAELDSKILALHNMVQFSHSKDFQKVNRSVFSGVLQDINSSRPVLLNGTYDVQVTSGGTFIGIGRKTPDCQGNTKYFRCKFCNFTYMGNSSTELEQHFLQTHPNKIKASLPSSEVAKPSEKNSNKSIPALQSSDSGDLGKWQDKITVKAGDDTPVGYSVPIKPLDSSRQNGTEATSYYWCKFCSFSCESSSSLKLLEHYGKQHGAVQSGGLNPELNDKLSRGSVINQNDLAKSSEGETMTKTDKSSSGAKKKDFSSKGAEDNMVTSYNCQFCDFRYSKSHGPDVIVVGPLLRHYQQLHNIHKCTIKHCPFCPRGLCSPEKHLGEITYPFACRKSNCSHCALLLLHLSPGAAGSSRVKHQCHQCSFTTPDVDVLLFHYESVHESQASDVKQEANHLQGSDGQQSVKESKEHSCTKCDFITQVEEEISRHYRRAHSCYKCRQCSFTAADTQSLLEHFNTVHCQEQDITTANGEEDGHAISTIKEEPKIDFRVYNLLTPDSKMGEPVSESVVKREKLEEKDGLKEKVWTESSSDDLRNVTWRGADILRGSPSYTQASLGLLTPVSGTQEQTKTLRDSPNVEAAHLARPIYGLAVETKGFLQGAPAGGEKSGALPQQYPASGENKSKDESQSLLRRRRGSGVFCANCLTTKTSLWRKNANGGYVCNACGLYQKLHSTPRPLNIIKQNNGEQIIRRRTRKRLNPEALQAEQLNKQQRGSNEEQVNGSPLERRSEDHLTESHQREIPLPSLSKYEAQGSLTKSHSAQQPVLVSQTLDIHKRMQPLHIQIKSPQESTGDPGNSSSVSEGKGSSERGSPIEKYMRPAKHPNYSPPGSPIEKYQYPLFGLPFVHNDFQSEADWLRFWSKYKLSVPGNPHYLSHVPGLPNPCQNYVPYPTFNLPPHFSAVGSDNDIPLDLAIKHSRPGPTANGASKEKTKAPPNVKNEGPLNVVKTEKVDRSTQDELSTKCVHCGIVFLDEVMYALHMSCHGDSGPFQCSICQHLCTDKYDFTTHIQRGLHRNNAQVEKNGKPKE

SEQ ID NO: 5942 - protein, 42 aa, Homo sapiens
MFSLDSFRKDRAQHRQRQCKLPPPRLPPMCVNPTPGGTISRG

SEQ ID NO: 5943 - protein, 354 aa, Homo sapiens
MAQAPADPGREAERPQQHAATIPETPGPQFSQQREEDIYRFLKDNGPQRALVIAQALGMRTAKDVNRDLYRMKSRHLLDMDEQSKAWTIYRPEDSGRRAKSASIIYQHNPINMICQNGPNSWISIANSEAIQIGHGNIITRQTVSREDGSAGPRHLPSMAPGDSSTWGTLVDPWGPQDIHMEQSILRRVQLGHSNEMRLHGVPSEGPAHIPPGSPPVSATAAGPEASFEARIPSPGTHPEGEAAQRIHMKSCFLEDATIGNSNKMSISPGVAGPGGVAGSGEGEPGEDAGRRPADTQSRSHFPRDIGQPITPSHSKLTPKLETMTLGNRSHKAAEGSHYVDEASHEGSWWGGGI

SEQ ID NO: 5944 - protein, 761 aa, Homo sapiens
MLASSKRMNSSSRSQILLRWKSDKAQSGPYNVEKEILTSRFLRDTETCRQNFRNFPYPDLAGPRKALSQLRELCLKWLRPEIHSKEQILELLVLEQFLTILPGEVRTWVKSQYPESSEEAVTLVEDLTQILEEEAPQNSTLSQDTPEEDPRGKHAFQTGWLNDLVTKESMTFKDVAVDITQEDWELMRPVQKELYKTVTLQNYWNMVSLGLTVYRPTVIPILEEPWMVIKEILEGPSPEWETKAQACTPVEDMSKLTKEETHTIKLEDSYDYDDRLERRGKGGFWKIHTDERGFSLKSVLSQEYDPTEECLSKYDIYRNNFEKHSNLIVQFDTQLDNKTSVYNEGRATFNHVSYGIVHRKILPGEKPYKCNVCGKKFRKYPSLLKHQSTHAKEKSYECEECGKEFRHISSLIAHQRMHTGEKPYECHQCGKAFSQRAHLTIHQRIHTGEKPYKCDDCGKDFSQRAHLTIHQRTHTGEKPYKCLECGKTFSHSSSLINHQRVHTGEKPYICNECGKTFSQSTHLLQHQKIHTGKKPYKCNECWKVFSQSTYLIRHQRIHSGEKCYKCNECGKAFAHSSTLIQHQTTHTGEKSYICNICGKAFSQSANLTQHHRTHTGEKPYKCSVCGKAFSQSVHLTQHQRIHNGEKPFKCNICGKAYRQGANLTQHQRIHTGEKPYKCNECGKAFIYSSSLNQHQRTHTGERPYKCNECDKDFSQRTCLIQHQRIHTGEKPYACRICGKTFTQSTNLIQHQRVHTGAKHRN

SEQ ID NO: 5945 - protein, 469 aa, Homo sapiens
MEERMEMISERPKESMYSWNKTAEKSDFEAVEALMSMSCSWKSDFKKYVENRPVTPVSDLSEEENLLPGTPDFHTIPAFCLTPPYSPSDFEPSQVSNLMAPAPSTVHFKSLSDTAKPHIAAPFKEEEKSPVSAPKLPKAQATSVIRHTADAQLCNHQTCPMKAASILNYQNNSFRRRTHLNVEAARKNIPCAAVSPNRSKCERNTVADVDEKASAALYDFSVPSSETVICRSQPAPVSPQQKSVLVSPPAVSAGGVPPMPVICQMVPLPANNPVVTTVVPSTPPSQPPAVCPPVVFMGTQVPKGAVMFVVPQPVVQSSKPPVVSPNGTRLSPIAPAPGFSPSAAKVTPQIDSSRIRSHICSHPGCGKTYFKSSHLKAHTRTHTGEKPFSCSWKGCERRFARSDELSRHRRTHTGEKKFACPMCDRRFMRSDHLTKHARRHLSAKKLPNWQMEVSKLNDIALPPTPAPTQ

SEQ ID NO: 5946 - protein, 282 aa, Homo sapiens
MWWHQHNLCFRRPIEEDYSSGDVEEKVAAIAETDESAESEGVIDSHKRREILSRRPSYRKILNELSSDVPGVPKIEEERSEEEGTPPSIATMAVPTSIYQTSTGQYIAIAQGGTIQISNPGSDGVQGLQALTMTNSGAPPPGATIVQYAAQSADGTQQFFVPGSQVVVQDEETELAPSHMAAATGDMPTYQIRAPTAALPQGVVMAASPGSLHSPQQLAEEATRKRELRLMKNREAAKECRRRKKEYVKCLESRVAVLEVQNKKLIEELETLKDICSPKTDY

SEQ ID NO: 5947 - protein, 347 aa, Homo sapiens
MDRSKENCISGPVKATAPVGGPKRVLVTQQFPCQNPLPVNSGQAQRVLCPSNSSQRIPLQAQKLVSSHKPVQNQKQKQLQATSVPHPVSRPLNNTQKSKQPLPSAPENNPEEELASKQKNEESKKRQWALEDFEIGRPLGKGKFGNVYLAREKQSKFILALKVLFKAQLEKAGVEHQLRREVEIQSHLRHPNILRLYGYFHDATRVYLILEYAPLGTVYRELQKLSKFDEQRTATYITELANALSYCHSKRVIHRDIKPENLLLGSAGELKIADFGWSVHAPSSRRTTLCGTLDYLPPEMIEGRMHDEKVDLWSLGVLCYEFLVGKPPFEANTYQETYKRISRVRRN

SEQ ID NO: 5948 - protein, 67 aa, Homo sapiens
MGHQQLYWSHPRKFGQGSRSCRVCSNRHGLIRKYGLNMCRQCFRQYAKDIGFIKKDLSCLPWHCLWR

SEQ ID NO: 5949 - protein, 1087 aa, Homo sapiens
MDPFTEKLLERTRARRENLQRKMAERPTAAPRSMTHAKRARQPLSEASNQQPLSGGEEKSCTKPSPSKKRCSDNTEVEVSNLENKQPVESTSAKSCSPSPVSPQVQPQAADTISDSVAVPASLLGMRRGLNSRLEATAASSVKTRMQKLAEQRRRWDNDDMTDDIPESSLFSPMPSEEKAASPPRPLLSNASATPVGRRGRLANLAATICSWEDDVNHSFAKQNSVQEQPGTACLSKFSSASGASARINSSSVKQEATFCSQRDGDASLNKALSSSADDASLVNASISSSVKATSPVKSTTSITDAKSCEGQNPELLPKTPISPLKTGVSKPIVKSTLSQTVPSKGELSREICLQSQSKDKSTTPGGTGIKPFLERFGERCQEHSKESPARSTPHRTPIITPNTKAIQERLFKQDTSSSTTHLAQQLKQERQKELACLRGRFDKGNIWSAEKGGNSKSKQLETKQETHCQSTPLKKHQGVSKTQSLPVTEKVTENQIPAKNSSTEPKEVIREIEMSVDDDDINSSKVINDLFSDVLEEGELDMEKSQEEMDQALAESSEEQEDALNISSMSLLAPLAQTVGVVSPESLVSTPRLELKDTSRSDESPKPGKFQRTRVPRAESGDSLGSEDRDLLYSIDAYRSQRFKETERPSIKQVIVRKEDVTSKLDEKNNAFPCQVNIKQKMQELNNEINMQQTVIYQASQALNCCVDEEHGKGSLEEAEAERLLLIATGKRTLLIDELNKLKNEGPQRKNKASPQSEFMPSKGSVTLSEIRLPLKADFVCSTVQKPDAANYYYLIILKAGAENMVATPLASTSNSLNGDALTFTTTFTLQDVSNDFEINIEVYSLVQKKDPSGLDKKKKTSKSKAITPKRLLTSITTKSNIHSSVMASPGGLSAVRTSNFALVGSYTLSLSSVGNTKFVLDKVPFLSSLEGHIYLKIKCQVNSSVEERGFLTIFEDVSGFGAWHRRWCVLSGNCISYWTYPDDEKRKNPIGRINLANCTSRQIEPANREFCARRNTFELITVRPQREDDRETLVSQCRDTLCVTKNWLSADTKEERDLWMQKLNQVLVDIRLWQPDACYKPIGKP

SEQ ID NO: 5950 - protein, 374 aa, Homo sapiens
MSRRSSRLQAKQQPQPSQTESPQEAQIIQAKKRKTTQDVKKRREEVTKKHQYEIRNCWPPVLSGGISPCIIIETPHKEIGTSDFSRFTNYRFKNLFINPSPLPDLSWGCSKEVWLNMLKKESRYVHDKHFEVLHSDLEPQMRSILLDWLLEVCEVYTLHRETFYLAQDFFDRFMLTQKDINKNMLQLIGITSLFIASKLEEIYAPKLQEFAYVTDGACSEEDILRMELIILKALKWELCPVTIISWLNLFLQVDALKDAPKVLLPQYSQETFIQIAQLLDLCILAIDSLEFQYRILTAAALCHFTSIEVVKKASGLEWDSISECVDWMVPFVNVVKSTSPVKLKTFKKIPMEDRHNIQTHTNYLAMLCMISSHV

SEQ ID NO: 5951 - protein, 988 aa, Homo sapiens
MSFALEETLESDWVAVRPHVFDEREKHKFVFIVAWNEIEGKFAITCHNRTAQRQRSGSREQAGARGGAEAGGAASDGSRGPGSPAGRGRPEATASATLVRSPGPRRSSAWAEGGSPRSTRSLLGDPRLRSPGSKGAESRLRSPVRAKPIPGQKTSEADDAAGAAAAAARPAPREAQVSSVRIVSASGTVSEEIEVLEMVKEDEAPLALSDAEQPPPATELESPAEECSWAGLFSFQDLRAVHQQLCSVNSQLEPCLPVFPEEPSGMWTVLFGGAPEMTEQEIDTLCYQLQVYLGHGLDTCGWKILSQVLFTETDDPEEYYESLSELRQKGYEEVLQRARKRIQELLDKHKNTESMVELLDLYQMEDEAYSSLAEATTELYQYLLQPFRDMRELAMLRRQQIKISMENDYLGPRRIESLQKEDADWQRKAHMAVLSIQDLTVKYFEITAKAQKAVYDRMRADQKKFGKASWAAAAERMEKLQYAVSKETLQMMRAKEICLEQRKHALKEEMQSLRGGTEAIARLDQLEADYYDLQLQLYEVQFEILKCEELLLTAQLESIKRLISEKRDEVVYYDTYESMEAMLEKEEMAASAYLQREELQKLQQKARQLEARRGRVSAKKSYLRNKKEICIAKHNEKIQQRTRIEDEYRTHHTVQLKREKLHDEEERKSAWVSQERQRTLDRLRTFKQRYPGQVILKSTRLRLAHARRKGAASPVLQEDHCDSLPSVLQVEEKTEEVGEGRVKRGPSQTTEPQSLVQLEDTSLTQLEATSLPLSGVTSELPPTISLPLLNNNLEPCSVTINPLPSPLPPTPPPPPPPPPPPPPPPLPVAKDSGPETLEKDLPRKEGNEKRIPKSASAPSAHLFDSSQLVSARKKLRKTAEGLQRRRVSSPMDEVLASLKRGSFHLKKVEQRTLPPFPDEDDSNNILAQIRKGVKLKKVQKDVLRESFTLLPDTDPLTRSIHEALRRIKEASPESEDEEEALPCTDWEN

SEQ ID NO: 5952 - protein, 1270 aa, Homo sapiens
MEPIYPFARPQMNTRFPSSRMVPFHFPPSKCALWNPTPTGDFIYLHLSYYRNPKLVVTEKTIRLAYRHAKQNKKNSSCFLLGSLTADEDEEGVTLTVDRFDPGREVPECLEITPTASLPGDFLIPCKVHTQELCSREMIVHSVDDFSSALKALQCHICSKDSLDCGKLLSLRVHITSRESLDSVEFDLHWAAVTLANNFKCTPVKPIPIIPTALARNLSSNLNISQVQGTYKYGYLTMDETRKLLLLLESDPKVYSLPLVGIWLSGITHIYSPQVWACCLRYIFNSSVQERVFSESGNFIIVLYSMTHKEPEFYECFPCDGKIPDFRFQLLTSKETLHLFKNVEPPDKNPIRCELSAESQNAETEFFSKASKNFSIKRSSQKLSSGKMPIHDHDSGVEDEDFSPRPIPSPHPVSQKISKIQPSVPELSLVLDGNFIESNPLPTPLEMVNNENPPLINHLEHLKPLQPQLYDEKHSPEVEAGEPSLRGIPNQLNQDKPALLRHCKVRQPPAYKKGNPHTRNSIKPSSHNGPSHDIFEKLQTVSAGNVQNEEYPIRPSTLNSRQSSLAPQSQPHDFVFSPHNSGRPMELQIPTPPLPSYCSTNVCRCCQHHSHIQYSPLNSWQGANTVGSIQDVQSEALQKHSLFHPSGCPALYCNAFCSSSSPIALRPQGDMGSCSPHSNIEPSPVARPPSHMDLCNPQPCTVCMHTPKTESDNGMMGLSPDAYRFLTEQDRQLRLLQAQIQRLLEAQSLMPCSPKTTAVEDTVQAGRQMELVSVEAQSSPGLHMRKGVSIAVSTGASLFWNAAGEDQEPDSQMKQDDTKISSEDMNFSVDINNEVTSLPGSASSLKAVDIPSFEESNIAVEEEFNQPLSVSNGQLAESVSMCLQTGPTGGASNNSETSEEPKIEHVMQPLLHQPSDNQKIYQDLLGQVNHLLNSSSKETEQPSTKAVIISHECTRTQNVYHTKKKTHHSRLVDKDCVLNATLKQLRSLGVKIDSPTKVKKNAHNVDHASVLACISPEAVISGLNCMSFANVGMSGLSPNGVDLSMEANAIALKYLNENQLSQLSVTRSNQNNCDPFSLLHINTDRSTVGLSLISPNNMSFATKKYMKRYGLLQSSDNSEDEEEPPDNADSKSEYLLNQNLRSIPEQLGGQKEPSKNDHEIINCSNCESVGTNADTPVLRNITNEVLQTKAKQQLTEKPAFLVKNLKPSPAVNLRTGKAEFTQHPEKENEGDITIFPESLQPSETLKQMNSMNSVGTFLDVKRLRQLPKLF

SEQ ID NO: 5953 - protein, 274 aa, Homo sapiens
MATLKDQLIYNLLKEEQTPQNKITVVGVGAVGMACAISILMKDLADELALVDVIEDKLKGEMMDLQHGSLFLRTPKIVSGKDYNVTANSKLVIITAGARQQEGESRLNLVQRNVNIFKFIIPNVVKYSPNCKLLIVSNPVDILTYVAWKISGFPKNRVIGSGCNLDSARFRYLMGERLGVHPLSCHGWVLGEHGDSSVPVWSGMNVAGVSLKTLHPDLGTDKDKEQWKECRYTLGDPKGAAILKSSDVISFHCLGYNRILGGGCACCPFYLICD

SEQ ID NO: 5954 - protein, 1121 aa, Homo sapiens
MADTQTQVAPTPTMRMATAEDLPLPPPPALEDLPLPPPKESFSKFHQQRQASELRRLYRHIHPELRKNLAEAVAEDLAEVLGSEEPTEGDVQCMRWIFENWRLDAIGEHERPAAKEPVLCGDVQATSRKFEEGSFANSTDQEPTRPQPGGGDVRAARWLFETKPLDELTGQAKELEATVREPAASGDVQGTRMLFETRPLDRLGSRPSLQEQSPLELRSEIQELKGDVKKTVKLFQTEPLCAIQDAEGAIHEVKAACREEIQSNAVRSARWLFETRPLDAINQDPSQVRVIRGISLEEGARPDVSATRWIFETQPLDAIREILVDEKDFQPSPDLIPPGPDVQQQQHLFETRALDTLKGDEEAGAEAPPKEEVVPGDVRSTLWLFETKPLDAFRDKVQVGHLQRVDPQDGEGHLSSDSSSALPFSQSAPQRDELKGDVKTFKNLFETLPLDSIGQGEVLAHGSPSREEGTDSAGQAQGIGSPVYAMQDSKGRLHALTSVSREQIVGGDVQGYRWMFETQPLDQLGRSPSTIDVVRGITRQEVVAGDVGTARWLFETQPLEMIHQREQQERQKEEGKSQGDPQPEAPPKGDVQTIRWLFETCPMSELAEKQGSEVTDPTAKAEAQSCTWMFKPQPVDRPVGSREQHLQVSQVPAGERQTDRHVFETEPLQASGRPCGRRPVRYCSRVEIPSGQVSRQKEVFQALEAGKKEEQEPRVIAGSIPAGSVHKFTWLFENCPMGSLAAESIQGGNLLEEQPMSPSGNRMQESQETAAEGTLRTLHATPGILHHGGILMEARGPGELCLAKYVLSGTGQGHPYIRKEELVSGELPRIICQVLRRPDVDQQGLLVQEDPTGQLQLKPLRLPTPGSSGNIEDMDPELQQLLACGLGTSVARTGLVMQETEQGLVALTAYSLQPRLTSKASERSSVQLLASCIDKGDLSGLHSLRWEPPADPSPVPASEGAQSLHPTESIIHVPPLDPSMGMGHLRASGATPCPPQAIGKAVPLAGEAAAPAQLQNTEKQEDSHSGQKGMAVLGKSEGATTTPPGPGAPDLLAAMQSLRMATAEAQSLHQQVLNKHKQGPTPTATSNPIQDGLRKAGATQSNIRPGGGSDPRIPAAPRKLL

SEQ ID NO: 5955 - protein, 205 aa, Homo sapiens
MSNVRVSNGSPSLERMDARQAEHPKPSACRNLFGPVDHEELTRDLEKHCRDMEEASQRKWNFDFQNHKPLEGKYEWQEVEKGSLPEFYYRPPRPPKGACKVPAQESQDVSGSRPAAPLIGAPANSEDTHLVDPKTDPSDSQTGLAEQCAGIRKRPATDDTSLLDEARKIYMKILKIHIADFMEWTSCISTEKQQHNNTKILGTLK

SEQ ID NO: 5956 - protein, 426 aa, Homo sapiens
MFWEVISDEHGIDPTGTYHGDSDLQLDRISVYYNEATGGKYVPRAILVDLEPGTMDSVRSGPFGQIFRPDNFVFGQSGAGNNWAKGHYTEGAELVDSVLDVVRKEAESCDCLQGFQLTHSLGGGTGSGMGTLLISKIREEYPDRIMNTFSVVPSPKVSDTVVEPYNATLSVHQLVENTDETYCIDNEALYDICFRTLKLTTPTYGDLNHLVSATMSGVTTCLRFPGQLNADLRKLAVNMVPFPRLHFFMPGFAPLTSRGSQQYRALTVPELTQQVFDAKNMMAACDPRHGRYLTVAAVFRGRMSMKEVDEQMLNVQNKNSSYFVEWIPNNVKTAVCDIPPRGLKMAVTFIGNSTAIQELFKRISEQFTAMFRRKAFLHWYTGEGMDEMEFTEAESNMNDLVSEYQQYQDATAEEEEDFGEEAEEEA

SEQ ID NO: 5957 - protein, 135 aa, Homo sapiens
MLQMAGQCSQNEYFDSLLHACIPCQLRCSSNTPPLTCQRYCNARSGLLGMANIDLEKSRTGDEIILPRGLEYTVEECTCEDCIKSKPKVDSDHCFPLPAMEEGATILVTTKTNDYCKSLPAALSATEIEKSISAR

SEQ ID NO: 5958 - protein, 39 aa, Homo sapiens
MEDSASASLSSAAATGTSTSTPAAPTARKQLDKEQDLAS

SEQ ID NO: 5959 - protein, 62 aa, Homo sapiens
MGKSASKQFHNEVLKAHNEYRQKHGVPPLKLCKNLNREAQQTLHGHGMEEHQEDGRGEGVRK

SEQ ID NO: 5960 - protein, 424 aa, Homo sapiens
MEVCYQLPVLPLDRPVPQHVLSRRGAISFSSSSALFGCPNPRQLSQRRGAISYDSSDQTALYIRMLGDVRVRSRAGFESERRGSHPYIDFRIFHSQSEIEVSVSARNIRRLLSFQRYLRSSRFFRGTAVSNSLNILDDDYNGQAKCMLEKVGNWNFDIFLFDRLTNGNSLVSLTFHLFSLHGLIEYFHLDMMKLRRFLVMIQEDYHSQNPYHNAVHAADVTQAMHCYLKEPKLANSVTPWDILLSLIAAATHDLDHPGVNQPFLIKTNHYLATLYKNTSVLENHHWRSAVGLLRESGLFSHLPLESRQQMETQIGALILATDISRQNEYLSLFRSHLDRGDLCLEDTRHRHLVLQMALKCADICNPCRTWELSKQWSEKVTEEFFHQGDIEKKYHLGVSPLCDRHTESIANIQIGNYTYLDIAG

SEQ ID NO: 5961 - protein, 208 aa, Homo sapiens [sequence omitted]

SEQ ID NO: 5962 - protein, 154 aa, Homo sapiens
MIHFILLFSRQGKLRLQKWYITLPDKERKKITREIVQIILSRGHRTSSFVDWKELKLVYKRYASLYFCCAIENQDNELLTLEIVHRYVELLDKYFGNVCELDIIFNFEKAYFILDEFIIGGEIQETSKKIAVKAIEDSDMLQETMEEYMNKPTF

SEQ ID NO: 5963 - protein, 249 aa, Homo sapiens
MAPSRKFFVGGNWKMNGRKQSLGELIGTLNAAKVPADTEVVCAPPTAYIDFARQKLDPKIAVAAQNCYKVTNGAFTGEISPGMIKDCGATWVVLGHSERRHVFGESDELIGQKVAHALAEGLGVIACIGEKLDEREAGITEKVVFEQTKVIADNVKDWSKVVLAYEPVWAIGTGKTATPQQAQEVHEKLRGWLKSNVSDAVAQSTRIIYGGSVTGATCKELASQPDVDGFLVGGASLKPEFVDIINAKQ

SEQ ID NO: 5964 - protein, 261 aa, Homo sapiens
MESMFSSPAEAALQRETGVPGLLTPLPDLDGVYELERVAGFVRDLGCERVALQFPDQLLGDAVAVAARLEETTGSKMFILGDTAYGSCCVDVLGAEQAGAQALIHFGPACLSPPARPLPVAFVLRQRSVALELCVKAFEAQNPDPKAPVVLLSEPACAHALGSPFHVALPPPESELWETPDVSLITGDLRPPPAWKSSNDHGSLALTPRPQLELAESSPAASFLSSRSWQGLEPRLGQTPVTEAVSGRRGIAIAYEDEGSG

SEQ ID NO: 5965 - protein, 559 aa, Homo sapiens
MNPLFGPNLFLLQQEQQGLAGPLGDSLGGDHFAGGGDLPPAPLSPAGPAAYSPPGPGPAPPAAMALRNDLGSNINVLKTLNLRFRCFLAKVHELERRNRLLEKQLQQALEEGKQGRRGLGRRDQAVQTGFVSPIRPLGLQLGARPAAVCSPSARVLGSPARSPAGPLAPSAASLSSSSTSTSTTYSSSARFMPGTIWSFSHARRLGPGLEPTLVQGPGLSWVHPDGVGVQIDTITPEIRALYNVLAKVKRERDEYKRRWEEEYTVRIQLQDRVNELQEEAQEADACQEELALKVEQLKAELVVFKGLMSNNLSELDTKIQEKAMKVDMDICRRIDITAKLCDVAQQRNCEDMIQMFQVPSMGGRKRERKAAVEEDTSLSESEGPRQPDGDEEESTALSINEEMQRMLNQLREYDFEDDCDSLTWEETEETLLLWEDFSGYAMAAAEAQGEQEDSLEKVIKDTESLFKTREKEYQETIDQIELELATAKNDMNRHLHEYMEMCSMKRGLDVQMETCRRLITQSGDRKSPAFTAVPLSDPPPPPSEAEDSDRDVSSDSSMR

SEQ ID NO: 5966 - protein, 260 aa, Homo sapiens
MEEMRDPSKIKWGDAGAEYVVESTGVFTTMEKAGAHLQGGAKRVIISAPSADAPMFVMGVNHEKYDNSLKIISNASCTTNCLAPLAKVIHDNFGIVEGLMTTVHAITATQKTVDGPSGKLWRDGRGALQNIIPASTGAAKAVGKVIPELNGKLTGMAFRVPTANVSVVDLTCRLEKPAKYDDIKKVVKQASEGPLKGILGYTEHQVVSSDFNSDTHSSTFDAGAGIALNDHFVKLISWYDNEFGYSNRVVDLMAHMASKE

SEQ ID NO: 5967 - protein, 293 aa, Homo sapiens
MVYMFQYDSTHGKFHGTVKAENGKLVINGNPITIFQERDPSKIKWGDAGAEYVVESTGVFTTMEKAGAHLQGGAKRVIISAPSADAPMFVMGVNHEKYDNSLKIISNASCTTNCLAPLAKVIHDNFGIVEGLMTTVHAITATQKTVDGPSGKLWRDGRGALQNIIPASTGAAKAVGKVIPELNGKLTGMAFRVPTANVSVVDLTCRLEKPAKYDDIKKVVKQASEGPLKGILGYTEHQVVSSDFNSDTHSSTFDAGAGIALNDHFVKLISWYDNEFGYSNRVVDLMAHMASKE

SEQ ID NO: 5968 - protein, 676 aa, Homo sapiens
MSRRTRCEDLDELHYQDTDSDVPEQRDSKCKVKWTHEENRTDQQCQYRWLRVLNPDLVKGPWTKEEDQKVIELVKKYGTKQWTLIAKHLKGRLGKQCRERWHNHLNPEVKKSCWTEEEDRIICEAHKVLGNRWAEIAKMLPGRTDNAVKNHWNSTIKRKVDTGGFLSESKDCKPPVYLLLELEDKDGLQSAQPTEGQGSLLTNWPSVPPTIKEEENSEEELAAATTSKEQEPIGTDLDAVRTPEPLEEFPKREDQEGSPPETSLPYKWVVEAANLLIPAVGSSLSEALDLIESDPDAWCDLSKFDLPEEPSAEDSINNSLVQLQASHQQQVLPPRQPSALVPSVTEYRLDGHTISDLSRSSRGELIPISPSTEVGGSGIGTPPSVLKRQRKRRVALSPVTENSTSLSFLDSCNSLTPKSTPVKTLPFSPSQFLNFWNKQDTLELESPSLTSTPVCSQKVVVTTPLHRDKTPLHQKHAAFVTPDQKYSMDNTPHTPTPFKNALEKYGPLKPLPQTPHLEEDLKEVLRSEAGIELIIEDDIRPEKQKRKPGLRRSPIKKVRKSLALDIVDEDVKLMMSTLPKSLSLPTTAPSNSSSLTLSGIKEDNSLLNQGFLQAKPEKAAVAQKPRSHFTTPAPMSSAWKTVACGGTRDQLFMQEKARQLLGRLKPSHTSRTLILS

SEQ ID NO: 5969 - protein, 313 aa, Homo sapiens
MEAGPWRVSAPPSGPPQFPAVVPGPSLEVARAHMLALGPQQLLAQDEEGDTLLHLFAARGLRWAAYAAAEVLQVYRRLDIREHKGKTPLLVAAAANQPLIVEDLLNLGAEPNAADHQGRSVLHVAATYGLPGVLLAVLNSGVQVDLEARDFEGLTPLHTAILALNVAMRPSDLCPRVLSTQARDRLDCVHMLLQMGANHTSQEIKSNKTVLHLAVQAANPTLVQLLLELPRGDLRTFVNMKAHGNTALHMAAALPPGPAQEAIVRHLLAAGADPTLRNLENEQPVHLLRPGPGPEGLRQLLKRSRVAPPGLSS

SEQ ID NO: 5970 - protein, 142 aa, Homo sapiens
MSYCRQEGKDRIIFVTKEDHETPSSAELVADDPNDPYEEHGLILPNGNINWNCPCLGGMASGPCGEQFKSAFSCFHYSTEEIKGSDCVDQFRAMQECMQKYPDLYPQEDEDEEEEREKKPAEQAEETAPIEATATKEEEGSS

SEQ ID NO: 5971 - protein, 135 aa, Homo sapiens [sequence omitted]

SEQ ID NO: 5972 - protein, 441 aa, Homo sapiens
MAALYRPGLRLNWHGLSPLGWPSCRSIQTLRVLSGDLGQLPTGIRDFVEHSARLCQPEGIHICDGTEAENTATLTLLEQQGLIRKLPKYNNCWLARTDPKDVARVESKTVIVTPSQRDTVPLPPGGARGQLGNWMSPADFQRAVDERFPGCMQGRTMYVLPFSMGPVGSPLSRIGVQLTDSAYVVASMRIMTRLGTPVLQALGDGDFVKCLHSVGQPLTGQGEPVSQWPCNPEKTLIGHVPDQREIISFGSGYGGNSLLGKKCFALRIASRLARDEGWLAEHMLILGITSPAGKKRYVAAAFPSACGKTNLAMMRPALPGWKVECVGDDIAWMRFDSEGRLRAINPENGFFGVAPGTSATTNPNAMATIQSNTIFTNVAETSDGGVYWEGIDQPLPPGVTVTSWLGKPWKPGMCGGEGVAQPPGLSTLMVEKLSPQPPTIF

SEQ ID NO: 5973 - protein, 126 aa, Homo sapiens
MPEPSKSAPAPKKGSKKAVTKAQKKDGKKRKRSRKESYSVYVYKVLKQVHPDTGISSKAMGIMNSFVNDIFERIAGEASRLAHYNKRSTITSREIQTAVRLLLPGELAKHAVSEGTKAVTKYTSSK

SEQ ID NO: 5974 - protein, 1096 aa, Homo sapiens
MPLRGGAGPSPASHGPTHGPSDPRTCLPGRGAGGMRPHGRGALGCCGLCSFYTCHGAAGDEIMHQDIVPLCAADIQDQLKKRFAYLSGGRGQDGSPVITFPDYPAFSEIPDKEFQNVMTYLTSIPSLQDAGIGFILVIDRRRDKWTSVKASVLRIAASFPANLQLVLVLRPTGFFQRTLSDIAFKFNRDDFKMKVPVIMLSSVPDLHGYIDKSQLTEDLGGTLDYCHSRWLCQRTAIESFALMVKQTAQMLQSFGTELAETELPNDVQSTSSVLCAHTEKKDKAKEDLRLALKEGHSVLESLRELQAEGSEPSVNQDQLDNQATVQRLLAQLNETEAAFDEFWAKHQQKLEQCLQLRHFEQGFREVKAILDAASQKIATFTDIGNSLAHVEHLLRDLASFEEKSGVAVERARALSLDGEQLIGNKHYAVDSIRPKCQELRHLCDQFSAEIARRRGLLSKSLELHRRLETSMKWCDEGIYLLASQPVDKCQSQDGAEAALQEIEKFLETGAENKIQELNAIYKEYESILNQDLMEHVRKVFQKQASMEEVFHRRQASLKKLAARQTRPVQPVAPRPEALAKSPCPSPGIRRGSENSSSEGGALRRGPYRRAKSEMSESRQGRGSAGEEEESLAILRRHVMSELLDTERAYVEELLCVLEGYAAEMDNPLMAHLLSTGLHNKKDVLFGNMEEIYHFHNRIFLRELENYTDCPELVGRCFLERMEDFQIYEKYCQNKPRSESLWRQCSDCPFFQECQRKLDHKLSLDSYLLKPVQRITKYQLLLKEMLKYSRNCEGAEDLQEALSSILGILKAVNDSMHLIAITGYDGNLGDLGKLLMQGSFSVWTDHKRGHTKVKELARFKPMQRHLFLHEKAVLFCKKREENGEGYEKAPSYSYKQSLNMAAVGITENVKGDAKKFEIWYNAREEVYIVQAPTPEIKAAWVNEIRKVLTSQLQACREASQHRALEQSQSLPLPAPTSTSPSRGNSRNIKKLEERKTDPLSLEGYVSSAPLTKPPEKGKGWSKTSHSLEAPEDDGGWSSAEEQINSSDAEEDGGLGPKKLVPGKYTVVADHEKGGPDALRVRSGDVVELVQEGDEGLW

SEQ ID NO: 5975 - protein, 786 aa, Homo sapiens
MGSGGVVHCRCAKCFCYPTKRRIRRRPRNLTILSLPEDVLFHILKWLSVEDILAVRAVHSQLKDLVDNHASVWACASFQELWPSPGNLKLFERAAEKGNFEAAVKLGIAYLYNEGLSVSDEARAEVNGLKASRFFSLAERLNVGAAPFIWLFIRPPWSVSGSCCKAVVHESLRAECQLQRTHKASILHCLGRVLSLFEDEEKQQQAHDLFEEAAHQGCLTSSYLLWESDRRTDVSDPGRCLHSFRKLRDYAAKGCWEAQLSLAKACANANQLGLEVRASSEIVCQLFQASQAVSKQQVFSVQKGLNDTMRYILIDWLVEVATMKDFTSLCLHLTVECVDRYLRRRLVPRYRLQLLGIACMVICTRFISKEILTIREAVWLTDNTYKYEDLVRMMGEIVSALEGKIRVPTVVDYKEVLLTLVPVELRTQHLCSFLCELSLLHTSLSAYAPARLAAAALLLARLTHGQTQPWTTQLWDLTGFSYEDLIPCVLSLHKKCFHDDAPKDYRQVSLTAVKQRFEDKRYGEISQEEVLSYSQLCAALGVTQDSPDPPTFLSTGEIHAFLSSPSGRRTKRKRENSLQEDRGSFVTTPTAELSSQEETLLGSFLDWSLDCCSGYEGDQESEGEKEGDVTAPSGILDVTVVYLNPEQHCCQESSDEEACPEDKGPQDPQALALDTQIPATPGPKPLVRTSREPGKDVTTSGYSSVSTASPTSSVDGGLGALPQPTSVLSLDSDSHTQPCHHQARKSCLQCRPPSPPESSVPQQQVKRINLCIHSEEEDMNLGLVRL

SEQ ID NO: 5976 - protein, 348 aa, Homo sapiens
MAVAQQLRAESDFEQLPDDVAISANIADIEEKRGFTSHFVFVIEVKTKGGSKYLIYRRYRQFHALQSKLEERFGPDSKSSALACTLPTLPAKVYVGVKQEIAEMRIPALNAYMKSLLSLPVWVLMDEDVRIFFYQSPYDSEQVPQALRRLRPRTRKVKSVSPQGNSVDRMAAPRAEALFDFTGNSKLELNFKAGDVIFLLSRINKDWLEGTVRGATGIFPLSFVKILKDFPEEDDPTNWLRCYYYEDTISTIKSVAWEGGACPAFLPSLRPLPLTSPSHGSLSHSKAPSGSQMSHNAVTSHQRPGWPGQPHSPFPHPTPHFQPDASLLQPVTPLGTSRWRKISAALPY

SEQ ID NO: 5977 - protein, 39 aa, Homo sapiens
MLGAVEGPRWKQAEDIRDIYDFRDVLGTLSPGGGKDDRH

SEQ ID NO: 5978 - protein, 567 aa, Homo sapiens
MLERRCRGPLAMGLAQPRLLSGPSQESPQTLGKESRGLRQQGTSVAQSGAQAPGRAHRCAHCRRHFPGWVALWLHTRRCQARLPLPCPECGRRFRHAPFLALHRQVHAAATPDLGFACHLCGQSFRGWVALVLHLRAHSAAKRPIACPKCERRFWRRKQLRAHLRRCHPPAPEARPFICGNCGRSFAQWDQLVAHKRVHVAEALEEAAAKALGPRPRGRPAVTAPRPGGDAVDRPFQCACCGKRFRHKPNLIAHRRVHTGERPHQCPECGKRFTNKPYLTSHRRIHTGEKPYPCKECGRRFRHKPNLLSHSKIHKRSEGSAQAAPGPGSPQLPAGPQESAAEPTPAVPLKPAQEPPPGAPPEHPQDPIEAPPSLYSCDDCGRSFRLERFLRAHQRQHTGERPFTCAECGKNFGKKTHLVAHSRVHSGERPFACEECGRRFSQGSHLAAHRRDHAPDRPFVCPDCGKAFRHKPYLAAHRRIHTGEKPYVCPDCGKAFSQKSNLVSHRRIHTGERPYACPDCDRSFSQKSNLITHRKSHIRDGAFCCAICGQTFDDEERLLAHQKKHDV

SEQ ID NO: 5979 - protein, 239 aa, Homo sapiens
MKQTNIQKNTNTRDTSKKTKDQLIIDAGQKHFGATVCKSCGMIYTASNPEDEMQHVQHHHRFLEGIKYVGWKKERVVAEFWDGKIVLVLPHDPSFAIKKVEDVQELVDNELGFQQVVPKCPNKIKTFLFISDEKRVVGCLIAEPIKQAFRVLSEPIGPESPSSTECPRAWQCSDVPEPAVCGISRIWVFRLKRRKRIARRLVDTLRNCFMFGCFLSTDEIAFSDPTPDDCRRLNRYQET

SEQ ID NO: 5980 - protein, 466 aa, Homo sapiens
MRGPNSGTEKGRLVIPEKQGFDFLCMPVFHPRFKREFIQEPAKNRPGPQTRSDLLLSGRDWNTLIVGKLSPWIRPDSKVEKIRRNSEALEVQFIITGTNHHSEKEFCSYLQYLEYLSQNRPPPNAYELFAKGYEDYLQSPLQPLMDNLESQTYEVFEKDPIKYSQYQQAIYKCLLDRVPEEEKDTNVQVLMVLGAGRGPLVNASLRAAKQADRRIKLYAVEKNPNAVVTLENWQFEEWGSQVTVVSSDMREWVAPEKADIIVSELLGSFADNELSPECLDGAQHFLKDDGVSIPGEYTSFLAPISSSKLYNEVRACREKDRDPEAQFEMPYVVRLHNFHQLSAPQPCFTFSHPNRDPMIDNNRYCTLEFPVEVNTVLHGFAGYFETVLYQDITLSIRPETHSPGMFSWFPILFPIKQPITVREGQTICVRFWRCSNSKKVWYEWAVTAPVCSAIHNPTGRSYTIGL

SEQ ID NO: 5981 - protein, 620 aa, Homo sapiens
MRGPNSGTEKGRLVIPEKQGFDFLCMPVFHPRFKREFIQEPAKNRPGPQTRSDLLLSGRDWNTLIVGKLSPWIRPDSKVEKIRRNSEAAMLQELNFGAYLGLPAFLLPLNQEDNTNLARVLTNHIHTGHHSSMFWMRVPLVAPEDLRDDIIENAPTTHTEEYSGEEKTWMWWHNFRTLCDYSKRIAVALEIGADLPSNHVIDRWLGEPIKAAILPTSIFLTNKKGFPVLSKMHQRLIFRLLKLEVQFIITGTNHHSEKEFCSYLQYLEYLSQNRPPPNAYELFAKGYEDYLQSPLQPLMDNLESQTYEVFEKDPIKYSQYQQAIYKCLLDRVPEEEKDTNVQVLMVLGAGRGPLVNASLRAAKQADRRIKLYAVEKNPNAVVTLENWQFEEWGSQVTVVSSDMREWVAPEKADIIVSELLGSFADNELSPECLDGAQHFLKDDGVSIPGEYTSFLAPISSSKLYNEVRACREKDRDPEAQFEMPYVVRLHNFHQLSAPQPCFTFSHPNRDPMIDNNRYCTLEFPVEVNTVLHGFAGYFETVLYQDITLSIRPETHSPGMFSWFPILFPIKQPITVREGQTICVRFWRCSNSKKVWYEWAVTAPVCSAIHNPTGRSYTIGL

SEQ ID NO: 5982 - protein, 1169 aa, Homo sapiens
MSTLLDIKSSVLRQVQVCPSFRRRTEQDPGSASADPQEPATGAWKPGDGVEFFAHMRLMLKKGEGRQGLPCLEAWGSPCRQSPHPGPHTQVPLRSGSPAPPEPVDPSLGLRALAPEEVEMLYEEALYTVLYRAGTMGPDQVDDEEALLSYLQQVFGTSLEEHTEAIERVRKAKAPTYALKVSVMRAKNLLAKDPNGFSDPYCMLGILPASDATREPRAQKEQRFGFRKGSKRGGPLPAKCIQVTEVKSSTLNPVWKEHFLFEIEDVSTDQLHLDIWDHDDDVSLVEACRKLNEVIGLKGMGRYFKQIVKSARANGTAGPTEDHTDDFLGCLNIPVREVPVAGVDRWFKLEPRSSASRVQGHCHLVLKLITTQRDTAMSQRGRSGFLSHLLLLSHLLRLEHSAEEPNSSSWRGELSTPAATILCLHGAQSNLSPLQLAVLHWQVSSRHHQTCTLDYSYLLGLLEDMQAHWEEAPSLPQEQEESLADSLSAFSEFGLQLLRQLRDYFPATNSTAVHRLELLLKCLGKLQLFQPSFEICPFESELNMDIAAALKRGNREWYDRILNDKSPREQPGPQRLPGLVVLADAVYDDLQFCYSVYASLFHSILNVDVFTLTFRQLERLVAEEAWVLTEELSPKMTLEVASGLFELYLTLADLQRFWDSIPGRDSRSLALAGIHAPFLPAVKLWFQVLRDQAKWRLQGAVDMDTLEPVDASSRHSSSAATAGLCLSHIQELWVRLAWPDPAQAQGLGTQLGQDVCEATLFYTELLRKKVDTQPGAAGEAVSEALCVVLNNVELVRKAAGQALKGLAWPEGATGPEGVLPRPLLSCTQALDDDLQREAHTVTAHLTSKMVGDIRKYVQHISLSPDSIQNDEAVAPLMKYLDEKLALLNASLVKGNLSRVLEALWELLLQAILQALGANRDVSADFYSRFHFTLEALVSFFHAEGQGLPLESLRDGSYKRLKEELRLHKCSTRECIEQFYLDKLKQRTLEQNRFGRLSVRCHYEAAEQRLAVEVLHAADLLPLDANGLSDPFVIVELGPPHLFPLVRSQRTQVKTRTLHPVYDELFYFSVPAEACRRRAACVLFTVMDHDWLSTNDFAGEAALGLGGVTGVARPQVGGGARAGQPVTLHLCRPRAQVRSALRRLEGRTSKEAQEFVKKLKELEKCMEADP

SEQ ID NO: 5983 - protein, 72 aa, Homo sapiens
MGDREQLLQRARLAEQAERYDDMASAMKAVAGKIPPSVQVEAACLLSQHFGAPPAPTPGCSGIPFCGGDRAE

SEQ ID NO: 5984 - protein, 262 aa, Homo sapiens
MMCQSEARQGPELRAAKWLHFPQLALRRRLGQLSCMSRPALKLRSWPLTVLYYLLPFGALRPLSRVGWRPVSRVALYKSVPTRLLSRAWGRLNQVELPHWLRRPVYSLYIWTFGVNMKEAAVEDLHHYRNLSEFFRRKLKPQARPVCGLHSVISPSDGRILNFGQVKNCEVEQVKGVTYSLESFLGPRMCTEDLPFPPAASCDSFKNQLVTREGNELYHCVIYLAPGDYHCFHSPTDWTVSHRRHFPGPAHKQPKAQQGLLQ

SEQ ID NO: 5985 - protein, 441 aa, Homo sapiens
MYSPYCLTQDEFHPFIEALLPHVRAFSYTWFNLQARKRKYFKKHEKRMSKDEERAVKDELLGEKPEIKQKWASRLLAKLRKDIRPEFREDFVLTITGKKPPCCVLSNPDQKGKIRRIDCLRQADKVWRLDLVMVILFKGIPLESTDGERLYKSPQCSNPGLCVQPHHIGVTIKELDLYLAYFVHTPESGQSDSSNQQGDADIKPLPNGHLSFQDCFVTSGVWNVTELVRVSQTPVATASGPNFSLADLESPSYYNINQVTLGRRSITSPPSTSTTKRPKSIDDSEMESPVDDVFYPGTGRSPAAGSSQSSGWPNDVDAGPASLKKSGKLDFCSALSSQGSSPRMAFTHHPLPVLAGVRPGSPRATASALHFPSTSIIQQSSPYFTHPTIRYHHHHGQDSLKEFVQFVCSDGSGQATGQHSQRQAPPLPTGLSASDPGTATF

SEQ ID NO: 5986 - protein, 215 aa, Homo sapiens
MGKVRGLRARVHQAAVRPKGEAAPGPAPPAPEATPPPASAAGKDWAFINTNIFARTKIDPSALVQKLELDVRSVTSVRRGAEAKTVLPKKEKMKLRREQWLQKIEAIKLAEQKHREERRRRATVVVGDLHPLRDALPELLGLEAGSRRQARSRESNKPRPSELSRMSAAQRQQLLEEERTRFQELLASPAYRASPLVAIGQTLARQMQLEDGGQL

SEQ ID NO: 5987 - protein, 533 aa, Homo sapiens
MDSSQHLVTFEDVAVDFTQEEWTLLDQAQRDLYRDVMLENYKNLIILAGSELFKRSLMSGLEQMEELRTGVTGVLQELDLQLKTKGSPLLQDISAERSPNGVQLERSNTAEKLYDSNHSGKVFNEHPFLMTHMITHIGEKTSEDNQSGKALRKNFPHSFYKKSHAEGKMPKCVKHEKAFNQFPNLTRQNKTHTQEKLCECKDCWRTFLNQSSLKLHIRSHNGDKHYVCKECGKAFSNSSHLIGHGRIHSGEKPYVCKECGKAFTQSTGLKLHIRTHSGEKPYKCKECGKAFTHSSYLTDHTRIHSGKKPYVCMECGKAFTRSTGLILHMRIHTGEKPYECKECGKAFIHSSYLTKHVRIHSGEKLYLCKACGKAFTRSSGLVLHMRTHTGEKPYECKECGKAFNNSSMLSQHVRIHTGEKPYECKECGKAFTQSSGLSTHLRTHTGEKACECKECGKAFARSTNLNMHMRTHTGEKPYACKECGKAFRYSTYLNVHTRTHTGAKPYECKKCGKNFTQSSALAKHLRTKACEKT

SEQ ID NO: 5988 - protein, 297 aa, Homo sapiens
MMMVRRGLLAWISRVVVLLVLLCCAISVLYMLACTPKGDEEQLALPRANSPTGKEGYQAVLQEWEEQHRNYVSSLKRQIAQLKEELQERSEQLRNGQYQASDAAGLGLDRSPPEKTQADLLAFLHSQVDKAEVNAGVKLATEYAAVPFDSFTLQKVYQLETGLTRHPEEKPVRKDKRDELVEAIESALETLNSPAENSPNHRPYTASDFIEGIYRTERDKGTLYELTFKGDHKHEFKRLILFRPFGPIMKVKNEKLNMANTLINVIVPLAKRVDKFRQFMQNFRPADEVFRCVPLSP

SEQ ID NO: 5989 - protein, 162 aa, Homo sapiens
MSRESDVEAQQSHGSSACSQPHGSVTQSQGSSSQSQGISSSSTSTMPNSSQSSHSSSGTLSSLETVSTQELYSIPEDQEPEDQEPEEPTPAPWARLWALQDGFANLECVNDNYWFGRDKSCEYCFDEPLLKRTDKYRTYSKKHFRIFREVGPKNSYIAYIED

SEQ ID NO: 5990 - protein, 1474 aa, Homo sapiens
MALACCMPKNAAVSNLDIESKLSVYYRAPWHQQRNIFLPATRPPCVEELHRHARQSLQALRREHRSRSDRREQRAAAPLSIAAPPLPAYPPAHSQRRREFKDRHFLTFNSTRSPSPTECCHMTPWSRKSHPPEDEDTDVMLGQRPKNPIHNIPSTLDKQTNWSKALPLPTPEEKMKQDAQVISSCIIPINVTGVGFDREASIRCSLVHSQSVLQRRRKLRRRKTISGIPRRVQQEIDSDESPVARERNVIVHTNPDPSNTVNRISGTRDSECQTEDILIAAPSRRRIRAQRGQSIAASLSHSAGNISALADKGDTMFTPAVSSRTRSRSLPREGNRGGDAEPKVGAKPSAYEEGESFVGDHERTPNDFSEAPSSPSAQDHQPTLGLACSQHLHSPQHKLSERGRSRLSRMAADSGSCDISSNSDTFGSPIHCISTAGVLLSSHMDQKDDHQSSSGNWSGSSSTCPSQTSETIPPAASPPLTGSSHCDSELSLNTAPHANEDASVFVTEQYNDHLDKVRGHRANSFTSTVADLLDDPNNSNTSDSEWNYLHHHHDASCRQDFSPERPKADSLGCPSFTSMATYDSFLEKSPSDKADTSSHFSVDTEGYYTSMHFDCGLKGNKSYVCHYAALGPENGQGVGASPGLPDCAWQDYLDHKRQGRPSISFRKPKAKPTPPKRSSSLRKSDGNADISEKKEPKISSGQHLPHSSREMKLPLDFANTPSRMENANLPTKQEPSWINQSEQGIKEPQLDASDIPPFKDEVAESTHYADLWLLNDLKTNDPYRSLSNSSTATGTTVIECIKSPESSESQTSQSESRATTPSLPSVDNEFKLASPEKLAGLASPSSGYSSQSETPTSSFPTAFFSGPLSPGGSKRKPKVPERKSSLQQPSLKDGTISLSKDLELPIIPPTHLDLSALHNVLNKPFHHRHPLHVFTHNKQNTVGETLRSNPPPSLAITPTILKSVNLRSINKSEEVKQKEENNTDLPYLEESTLTTAALSPSKIRPHTANKSVSRQYSTEDTILSFLDSSAVEMGPDKLHLEKNSTFDVKNRCDPETITSAGSSLLDSNVTKDQVRTETEPIPENTPTKNCAFPTEGFQRVSAARPNDLDGKIIQYGPGPDETLEQVQKAPSAGLEEVAQPESVDVITSQSDSPTRATDVSNQFKHQFVMSRHHDKVPGTISYESEITSVNSFPEKCSKQENIASGISAKSASDNSKAEETQGNVDEASLKESSPSDDSIISPLSEDSQAEAEGVFVSPNKPRTTEDLFAVIHRSKRKVLGRKDSGDMSVRSKSRAPLSSSSSSASSITSPSSNVTTPNSQRSPGLIYRNAKKSNTSNEEFKLLLLKKGSRSDSSYRMSATEILKSPILPKPPGELTAESPQSTDDAHQGSQGAEALSPLSPCSPRVNAEGFSSKSFATSASARVGRSRAPPAASSSRYSVRCRLYNTPMQAISEGETENSDGSPHDDRSSQSST

SEQ ID NO: 5991 - protein, 121 aa, Homo sapiens
MVQIVISSARAGGLAEWVLMELQGEIEARYSTGLAGNLLGDLHYTTEGIPVLIVGHHILYGKIIHLEKPFAVLVKHTPGDQDCDELGRETGTRYLVTALIKDKILFKTRPKPIITSVPKKV

SEQ ID NO: 5992 - protein, 234 aa, Homo sapiens
MSVKEGAQRKWAALKEKLGPQDSDPTEANLESADPELCIRLLQMPSVVNYSGLRKRLEGSDGGWMVQFLEQSGLDLLLEALARLSGRGVARISDALLQLTCVSCVRAVMNSRQGIEYILSNQGYVRQLSQALDTSNVMVKKQVFELLAALCIYSPEGHVLTLDALDHYKTVCSQQYRFSIVMNELSGSDNVPYVVTLLSVINAVILGPEDLRARTQLRNEFIGLQLLDVLARLR

SEQ ID NO: 5993 - protein, 1034 aa, Homo sapiens
MASVFMCGVEDLLFSGSRFVWNLTVSTLRRWYTERLRACHQVLRTWCGLQDVYQMTEGRHCQVHLLDDRRLELLVQPKLLARELLDLVASHFNLKEKEYFGITFIDDTGQQNWLQLDHRVLDHDLPKKPGPTILHFAVRFYIESISFLKDKTTVELFFLNAKACVHKGQIEVESETIFKLAAFILQEAKGDYTSDENARKDLKTLPAFPTKTLQEHPSLAYCEDRVIEHYLKIKGLTRGQAVVQYMKIVEALPTYGVHYYAVKDKQGLPWWLGISYKGIGQYDIQDKVKPRKLFQWKQLENLYFREKKFAVEVHDPRRISVSRRTFGQSGLFVQTWYANSSLIKSIWVMAISQHQFYLDRKQSKAKIPSARSLDEIAMDLTETGTQRASKLVTLETKSQFIMASNGSLISSGSQDSEVSEEQKREKILELKKKEKLLQEKLLKKVEELKKICLREAELTGKMPKEYPLNIGEKPPQVRRRVGTAFKLDDNLLPSEEDPALQELESNFLIQQKLVEAAKKLANEPDLCKTVKKKRKQDYTDAMKKLQEIENAINEYRIRCGKKPSQKATVLPEDIIPSESSSLSDTTTYDDPSDAFTFPGQRSSSVPHSPRILPPKSLGIERIHFRKSSINEQFVDTRQSREMLSTHSSPYKTLERRPQGGRSMPTTPVLTRNAYSSSHLEPESSSQHCRQRSGSLESQSHLLSEMDSDKPFFSLSKSQRSSSTEILDDGSSYTSQSSTEYYCVTPVTGPYYTTQTLDTRTRGRRRSKKQNVSTSNSGSMPNLAQKDSLRNGVYSKSQEPPSSSYYIAGYTPYAECDFYYSGGYVYENDTEGQYSVNPSYRSSAHYGYERQRDYSRSFHEDEVDRVPHNPYATLRLPRKAAAKSEHITKNIHKALVAEHLRGWYQRASGQKDQGHSPQTSFDSDRGSQRCLGFAGLQVPCSPSSRASSYSSVSSTNASGNWRTQLTIGLSDYETPAHSSYTSCYGNVYNPLPSPSRQYTEISQLDGTDGNQLEDNLESSEQRLFWHEDSKPGTLV

SEQ ID NO: 5994 - protein, 174 aa, Homo sapiens
MPPYTVVYFPVRGRCAALRMLLADQGQSWKEEVVTVETWQEGSLKASCLYGQLPKFQDGDLTLYQSNTILRHLGRTLGLYGKDQQEAALVDMVNDGVEDLRCKYISLIYTNYISFADYNLLDLLLIHEVLAPGCLDAFPLLSAYVGRLSARPKLKAFLASPEYVNLPINGNGKQ

SEQ ID NO: 5995 - protein, 210 aa, Homo sapiens
MPPYTVVYFPVRGRCAALRMLLADQGQSWKEEVVTVETWQEGSLKASCLYGQLPKFQDGDLTLYQSNTILRHLGRTLGLYGKDQQEAALVDMVNDGVEDLRCKYISLIYTNYEAGKDDYVKALPGQLKPFETLLSQNQGGKTFIVGDQISFADYNLLDLLLIHEVLAPGCLDAFPLLSAYVGRLSARPKLKAFLASPEYVNLPINGNGKQ

SEQ ID NO: 5996 - protein, 1537 aa, Homo sapiens
MGEKLELRLKSPVGAEPAVYPWPLPVYDKHHDAAHEIIETIRWVCEEIPDLKLAMENYVLIDYDTKSFESMQRLCDKYNRAIDSIHQLWKGTTQPMKLNTRPSTGLLRHILQQVYNHSVTDPEKLNNYEPFSPEVYGETSFDLVAQMIDEIKMTDDDLFVDLGSGVGQVVLQVAAATNCKHHYGVEKADIPAKYAETMDREFRKWMKWYGKKHAEYTLERGDFLSEEWRERIANTSVIFVNNFAFGPEVDHQLKERFANMKEGGRIVSSKPFAPLNFRINSRNLSDIGTIMRVVELSPLKGSVSWTGKPVSYYLHTIDRTILENYFSSLKNPKLREEQEAARRRQQRESKSNAATPTKGPEGKVAGPADAPMDSGAEEEKAGAATVKKPSPSKARKKKLNKKGRKMAGRKRGRPKKMNTANPERKPKKNQTALDALHAQTVSQTAASSPQDAYRSPHSPFYQLPPSVQRHSPNPLLVAPTPPALQKLLESFKIQYLQFLAYTKTPQYKASLQELLGQEKEKNAQLLGAAQQLLSHCQAQKEEIRRLFQQKLDELGVKALTYNDLIQAQKEISAHNQQLREQSEQLEQDNRALRGQSLQLLKARCEELQLDWATLSLEKLLKEKQALKSQISEKQRHCLELQISIVELEKSQRQQELLQLKSCVPPDDALSLHLRGKGALGRELEPDASRLHLELDCTKFSLPHLSSMSPELSMNGQAAGYELCGVLSRPSSKQNTPQYLASPLDQEVVPCTPSHVGRPRLEKLSGLAAPDYTRLSPAKIVLRRHLSQDHTVPGRPAASELHSRAEHTKENGLPYQSPSVPGSMKLSPQDPRPLSPGALQLAGEKSSEKGLRERAYGSSGELITSLPISIPLSTVQPNKLPVSIPLASVVLPSRAERARSTPSPVLQPRDPSSTLEKQIGANAHGAGSRSLALAPAGFSYAGSVAISGALAGSPASLTPGAEPATLDESSSSGSLFATVGSRSSTPQHPLLLAQPRNSLPASPAHQLSSSPRLGGAAQGPLPEASKGDLPSDSGFSDPESEAKRRIVFTITTGAGSAKQSPSSKHSPLTASARGDCVPSHGQDSRRRGRRKRASAGTPSLSAGVSPKRRALPSVAGLFTQPSGSPLNLNSMVSNINQPLEITAISSPETSLKSSPVPYQDHDQPPVLKKERPLSQTNGAHYSPLTSDEEPGSEDEPSSARIERKIATISLESKSPPKTLENGGGLAGRKPAPAGEPVNSSKWKSTFSPISDIGLAKSADSPLQASSALSQNSLFTFRPALEEPSADAKLAAHPRKGFPGSLSGADGLSPGTNPANGCTFGGGLAADLSLHSFSDGASLPHKGPEAAGLSSPLSFPSQRGKEGSDANPFLSKRQLDGLAGLKGEGSRGKEAGEGGLPLCGPTDKTPLLSGKAAKARDREVDLKNGHNLFISAAAVPPGSLLSGPGLAPAASSAGGAASSAQTHRSFLGPFPPGPQFALGPMSLQANLGSVAGSSVLQSLFSSVPAAAGLVHVSSAATRLTNSHAMGSFSGVAGGTVGGN

SEQ ID NO: 5997 - protein, 288 aa, Homo sapiens
MPVEEFVAGWISGALGLVLGHPFDTVKVRLQTQTTYRGIVDCMVKIYRHESLLGFFKGMSFPIASIAVVNSVLFGVYSNTLLVLTATSHQERRAQPPSYMHIFLAGCTGGFLQAYCLAPFDLIKVRLQNQTEPRAQPGSPPPRYQGPVHCAASIFREEGPRGLFRGAWALTLRDTPTVGIYFITYEGLCRQYTPEGQNPSSATVLVAGGFAGIASWVAATPLDMIKSRMQMDGLRRRVYQGMLDCMVSSIRQEGLGVFFRGVTINSARAFPVNAVTFLSYEYLLRWWG

SEQ ID NO: 5998 - protein, 594 aa, Homo sapiens
MALAGCPDSFLHHPYYQDKVEQTPRSQQDPAGPGLPAQSDRLANHQEDDVDLEALVNDMNASLESLYSACSMQSDTVPLLQNGQHARSQPRASGPPRSIQPQVSPRQRVQRSQPVHILAVRRLQEEDQQFRTSSLPAIPNPFPELCGPGSPPVLTPGSLPPSQAAAKQDVKVFSEDGTSKVVEILADMTARDLCQLLVYKSHCVDDNSWTLVEHHPHLGLERCLEDHELVVQVESTMASESKFLFRKNYAKYEFFKNPMNFFPEQMVTWCQQSNGSQTQLLQNFLNSSSCPEIQGFLHVKELGKKSWKKLYVCLRRSGLYCSTKGTSKEPRHLQLLADLEDSNIFSLIAGRKQYNAPTDHGLCIKPNKVRNETKELRLLCAEDEQTRTCWMTAFRLLKYGMLLYQNYRIPQQRKALLSPFSTPVRSVSENSLVAMDFSGQTGRVIENPAEAQSAALEEGHAWRKRSTRMNILGSQSPLHPSTLSTVIHRTQHWFHGRISREESHRIIKQQGLVDGLFLLRDSQSNPKAFVLTLCHHQKIKNFQILPCEDDGQTFFSLDDGNTKFSDLIQLVDFYQLNKGVLPCKLKHHCIRVAL

SEQ ID NO: 5999 - protein, 23 aa, Homo sapiens
VGTDQKSCDPGLEDPCGLNRARS

SEQ ID NO: 6000 - protein, 119 aa, Homo sapiens
MVRISKPKTFQAYLDDCHRRYSCAHCRAHLANHDDLISKSFQGSQGRAYLFNSVVNVGCGPAEERVLLTGLHAVADIHCENCKTTLGWKYEQAFESSQKYKEGKYIIELNHMIKDNGWD

SEQ ID NO: 6001 - protein, 157 aa, Homo sapiens
MCVAQVLTAHLLPPRQALGSLCSPWAAPRVGPLPPAPAMVRISKPKTFQAYLDDCHRRYSCAHCRAHLANHDDLISKSFQGSQGRAYLFNSVVNVGCGPAEERVLLTGLHAVADIHCENCKTTLGWKYEQAFESSQKYKEGKYIIELNHMIKDNGWD

SEQ ID NO: 6002 - protein, 223 aa, Homo sapiens
MAGNKGRGRAAYTFNIEAVGFSKGEKLPDVVLKPPPLFPDTDYKPVPLKTGEGEEYMLALKQELRETMKRMPYFIETPEERQDIERYSKRYMKVYKEEWIPDWRRLPREMMPRNKCKKAGPKPKKAKDAGKGTPLTNTEDVLKKMEELEKRGDGEKSDEENEEKEGSKEKSKEGDDDDDDDAAEQEEYDEEEQEEENDYINSYFEDGDDFGADSDDNMDEATY

SEQ ID NO: 6003 - protein, 687 aa, Homo sapiens
MEQLNELELLMEKSFWEEAELPAELFQKKVVASFPRTVLSTGMDNRYLVLAVNTVQNKEGNCEKRLVITASQSLENKELCILRNDWCSVPVEPGDIIHLEGDCTSDTWIIDKDFGYLILYPDMLISGTSIASSIRCMRRAVLSETFRSSDPATRQMLIGTVLHEVFQKAINNSFAPEKLQELAFQTIQEIRHLKEMYRLNLSQDEIKQEVEDYLPSFCKWAGDFMHKNTSTDFPQMQLSLPSDNSKDNSTCNIEVVKPMDIEESIWSPRFGLKGKIDVTVGVKIHRGYKTKYKIMPLELKTGKESNSIEHRSQVVLYTLLSQERRADPEAGLLLYLKTGQMYPVPANHLDKRELLKLRNQMAFSLFHRISKSATRQKTQLASLPQIIEEEKTCKYCSQIGNCALYSRAVEQQMDCSSVPIVMLPKIEEETQHLKQTHLEYFSLWCLMLTLESQSKDNKKNHQNIWLMPASEMEKSGSCIGNLIRMEHVKIVCDGQYLHNFQCKHGAIPVTNLMAGDRVIVSGEERSLFALSRGYVKEINMTTVTCLLDRNLSVLPESTLFRLDQEEKNCDIDTPLGNLSKLMENTFVSKKLRDLIIDFREPQFISYLSSVLPHDAKDTVACILKGLNKPQRQAMKKVLLSKDYTLIVGMPGTGKTTTICTLVRFRRFIQLSSNLQSKKFADQSPLNP

SEQ ID NO: 6004 - protein, 298 aa, Homo sapiens
MAQNLKDLAGRLPAGPRGMGTALKLLLGAGAVAYGVRESVFTVEGGHRAIFFNRIGGVQQDTILAEGLHFRIPWFQYPIIYDIRARPRKISSPTGSKDLQMVNISLRVLSRPNAQELPSMYQRLGLDYEERVLPSIVNEVLKSVVAKFNASQLITQRAQVSLLIRRELTERAKDFSLILDDVAITELSFSREYTAAVEAKQVAQQEAQRAQFLVEKAKQEQRQKIVQAEGEAEAAKMLGEALSKNPGYIKLRKIRAAQNISKTIATSQNRIYLTADNLVLNLQDESFTRSDSLIKGKK

SEQ ID NO: 6005 - protein, 808 aa, Homo sapiens
MGRKLDPTKEKRGPGRKARKQKGAETELVRFLPAVSDENSKRLSSRARKRAAKRRLGSVEAPKTNKSPEAKPLPGKLPKGAVQTAGKKGPQSLFNAPRGKKRPAPGSDEEEEEEDSEEDGMVNHGDLWGSEDDADTVDDYGADSNSEDEEEGEALLPIERAARKQKAREAAAGIQWSEEETEDEEEEKEVTPESGPPKVEEADGGLQINVDEEPFVLPPAGEMEQDAQAPDLQRVHKRIQDIVGILRDFGAQREEGRSRSEYLNRLKKDLAIYYSYGDFLLGKLMDLFPLSELVEFLEANEVPRPVTLRTNTLKTRRRDLAQALINRGVNLDPLGKWSKTGLVVYDSSVPIGATPEYLAGHYMLQGASSMLPVMALAPQEHERILDMCCAPGGKTSYMAQLMKNTGVILANDANAERLKSVVGNLHRLGVTNTIISHYDGRQFPKVVGGFDRVLLDAPCSGTGVISKDPAVKTNKDEKDILRCAHLQKELLLSAIDSVNATSKTGGYLVYCTCSITVEENEWVVDYALKKRNVRLVPTGLDFGQEGFTRFRERRFHPSLRSTRRFYPHTHNMDGFFIAKFKKFSNSIPQSQTGNSETATPTNVDLPQVIPKSENSSQPAKKAKGAAKTKQQLQKQQHPKKASFQKLNGISKGADSELSTVPSVTKTQASSSFQDSSQPAGKAEGIREPKVTGKLKQRSPKLQSSKKVAFLRQNAPPKGTDTQTPAVLSPSKTQATLKPKDHHQPLGRAKGVEKQQLPEQPFEKAAFQKQNDTPKGPQPPTVSPIRSSRPPPAKRKKSQSRGNSQLLLS

SEQ ID NO: 6006 - protein, 2316 aa, Homo sapiens
MDGVSSEANEENDNIERPVRRRHSSILKPPRSPLQDLRGGNERVQESNALRNKKNSRRVSFADTIKVFQTESHMKIVRKSEMEETETGENLLLIQNKKLEDNYCEITGMNTLLSAPIHTQMQQKEFSIIEHTRERKHANDQTVIFSDENQMDLTSSHTVMITKGLLDNPISEKSTKIDTTSFLANLKLHTEDSRMKKEVNFSVDQNTSSENKIDFNDFIKRLKTGKCSAFPDVPDKENFEIPIYSKEPNSASSTHQMHVSLKEDENNSNITRLFREKDDGMNFTQCHTANIQTLIPTSSETNSRESKGNDITIYGNDFMDLTFNHTLQILPATGNFSEIENQTQNAMDVTTGYGTKASGNKTVFKSKQNTAFQDLSINSADKIHITRSHIMGAETHIVSQTCNQDARILAMTPESIYSNPSIQGCKTVFYSSCNDAMEMTKCLSNMREEKNLLKHDSNYAKMYCNPDAMSSLTEKTIYSGEENMDITKSHTVAIDNQIFKQDQSNVQIAAAPTPEKEMMLQNLMTTSEDGKMNVNCNSVPHVSKERIQQSLSNPLSISLTDRKTELLSGENMDLTESHTSNLGSQVPLAAYNLAPESTSESHSQSKSSSDECEEITKSRNEPFQRSDIIAKNSLTDTWNKDKDWVLKILPYLDKDSPQSADCNQEIATSHNIVYCGGVLDKQITNRNTVSWEQSLFSTTKPLFSSGQFSMKNHDTAISSHTVKSVLGQNSKLAEPLRKSLSNPTPDYCHDKMIICSEEEQNMDLTKSHTVVIGFGPSELQELGKTNLEHTTGQLTTMNRQIAVKVEKCGKSPIEKSGVLKSNCIMDVLEDESVQKPKFPKEKQNVKIWGRKSVGGPKIDKTIVFSEDDKNDMDITKSYTIEINHRPLLEKRDCHLVPLAGTSETILYTCRQDDMEITRSHTTALECKTVSPDEITTRPMDKTVVFVDNHVELEMTESHTVFIDYQEKERTDRPNFELSQRKSLGTPTVICTPTEESVFFPGNGESDRLVANDSQLTPLEEWSNNRGPVEVADNMELSKSATCKNIKDVQSPGFLNEPLSSKSQRRKSLKLKNDKTIVFSENHKNDMDITQSCMVEIDNESALEDKEDFHLAGASKTILYSCGQDDMEITRSHTTALECKTLLPNEIAIRPMDKTVLFTDNYSDLEVTDSHTVFIDCQATEKILEENPKFGIGKGKNLGVSFPKDNSCVQEIAEKQALAVGNKIVLHTEQKQQLFAATNRTTNEIIKFHSAAMDEKVIGKVVDQACTLEKAQVESCQLNNRDRRNVDFTSSHATAVCGSSDNYSCLPNVISCTDNLEGSAMLLCDKDEEKANYCPVQNDLAYANDFASEYYLESEGQPLSAPCPLLEKEEVIQTSTKGQLDCVITLHKDQDLIKDPRNLLANQTLVYSQDLGEMTKLNSKRVSFKLPKDQMKVYVDDIYVIPQPHFSTDQPPLPKKGQSSINKEEVILSKAGNKSLNIIENSSAPICENKPKILNSEEWFAAACKKELKENIQTTNYNTALDFHSNSDVTKQVIQTHVNAGEAPDPVITSNVPCFHSIKPNLNNLNGKTGEFLAFQTVHLPPLPEQLLELGNKAHNDMHIVQATEIHNINIISSNAKDSRDEENKKSHNGAETTSLPPKTVFKDKVRRCSLGIFLPRLPNKRNCSVTGIDDLEQIPADTTDINHLETQPVSSKDSGIGSVAGKLNLSPSQYINEENLPVYPDEINSSDSINIETEEKALIETYQKEISPYENKMGKTCNSQKRTWVQEEEDIHKEKKIRKNEIKFSDTTQDREIFDHHTEEDIDKSANSVLIKNLSRTPSSCSSSLDSIKADGTSLDFSTYRSSQMESQFLRDTICEESLREKLQDGRITIREFFILLQVHILIQKPRQSNLPGNFTVNTPPTPEDLMLSQYVYRPKIQIYREDCEARRQKIEELKLSASNQDKLLVDINKNLWEKMRHCSDKELKAFGIYLNKIKSCFTKMTKVFTHQGKVALYGKLVQSAQNEREKLQIKIDEMDKILKKIDNCLTEMETETKNLEDEEKNNPVEEWDSEMRAAEKELEQLKTEEEELQRNLLELEVQKEQTLAQIDFMQKQRNRTEELLDQLSLSEWDVVEWSDDQAVFTFVYDTIQLTITFEESVVGFPFLDKRYRKIVDVNFQSLLDEDQAPPSSLLVHKLIFQYVEEKESWKKTCTTQHQLPKMLEEFSLVVHHCRLLGEEIEYLKRWGPNYNLMNIDINNNELRLLFSSSAAFAKFEITLFLSAYYPSVPLPSTIQNHVGNTSQDDIATILSKVPLENNYLKNVVKQIYQDLFQDCHFYH

SEQ ID NO: 6007 - protein, 432 aa, Homo sapiens
MATAEVLNIGKKLYEGKTKEVYELLDSPGKVLLQSKDQITAGNAARKNHLEGKAAISNKITSCIFQLLQEAVTSYKSNRIKTAFTRKCGETAFIAPQCEMIPIEWVCRRIATGSFLKRNPGVKEGYKFYPPKVELFFKDDANNDPQWSEEQLIAAKFCFAGLLIGQTEVDIMSHATQAIFEILEKSWLPQNCTLVDMKIEFGVDVTTKEIVLADVIDNDSWRLWPSGDRSQQKDKQSYRDLKEVTPEGLQMVKKNFEWVAERVELLLKSESQCRVVVLMGSTSDLGHCEKIKKACGNFGIPCELRVTSAHKGPDETLRIKAEYEGDGIPTVFVAVAGRSNGLGPVMSGNTAYPVISCPPLTPDWGVQDVWSSLRLPSGLGCSTVLSPEGSAQFAAQIFGLSNHLVWSKLRASILNTWISLKQADKKIRECNL

SEQ ID NO: 6008 - protein, 580 aa, Homo sapiens
MNISGSSCGSPNSADTSSDFKDLWTKLKECHDREVQGLQVKVTKLKQERILDAQRLEEFFTKNQQLREQQKVLHETIKVLEDRLRAGLCDRCAVTEEHMRKKQQEFENIRQQNLKLITELMNERNTLQEENKKLSEQLQQKIENDQQHQAAELECEEDVIPDSPITAFSFSGVNRLRRKENPHVRYIEQTHTKLEHSVCANEMRKVSKSSTHPQHNPNENEILVADTYDQSQSPMAKAHGTSSYTPDKSSFNLATVVAETLGLGVQEESETQGPMSPLGDELYHCLEGNHKKQPFEESTRNTEDSLRFSDSTSKTPPQEELPTRVSSPVFGATSSIKSGLDLNTSLSPSLLQPGKKKHLKTLPFSNTCISRLEKTRSKSEDSALFTHHSLGSEVNKIIIQSSNKQILINKNISESLGEQNRTEYGKDSNTDKHLEPLKSLGGRTSKRKKTEEESEHEVSCPQASFDKENAFPFPMDNQFSMNGDCVMDKPLDLSDRFSAIQRQEKSQGSETSKNKFRQVTLYEALKTIPKGFSSSRKASDGNCTLPKDSPGEPCSQECIILQPLNKCSPDNKPSLQIKEE

SEQ ID NO: 6009 - protein, 867 aa, Homo sapiens
MNISGSSCGSPNSADTSSDFKDLWTKLKECHDREVQGLQVKVTKLKQERILDAQRLEEFFTKNQQLREQQKVLHETIKVLEDRLRAGLCDRCAVTEEHMRKKQQEFENIRQQNLKLITELMNERNTLQEENKKLSEQLQQKIENDQQHQAAELECEEDVIPDSPITAFSFSGVNRLRRKENPHVRYIEQTHTKLEHSVCANEMRKVSKSSTHPQHNPNENEILVADTYDQSQSPMAKAHGTSSYTPDKSSFNLATVVAETLGLGVQEESETQGPMSPLGDELYHCLEGNHKKQPFEESTRNTEDSLRFSDSTSKTPPQEELPTRVSSPVFGATSSIKSGLDLNTSLSPSLLQPGKKKHLKTLPFSNTCISRLEKTRSKSEDSALFTHHSLGSEVNKIIIQSSNKQILINKNISESLGEQNRTEYGKDSNTDKHLEPLKSLGGRTSKRKKTEEESEHEVSCPQASFDKENAFPFPMDNQFSMNGDCVMDKPLDLSDRFSAIQRQEKSQGSETSKNKFRQVTLYEALKTIPKGFSSSRKASDGNCTLPKDSPGEPCSQECIILQPLNKCSPDNKPSLQIKEENAVFKIPLRPRESLETENVLDDIKSAGSHEPIKIQTRSDHGGCELASVLQLNPCRTGKIKSLQNNQDVSFENIQWSIDPGADLSQYKMDVTVIDTKDGSQSKLGGETVDMDCTLVSETVLLKMKKQEQKGEKSSNEERKMNDSLEDMFDRTTHEEYESCLADSFSQAADEEEELSTATKKLHTHGDKQDKVKQKAFVEPYFKGDESIMQICQQKKEKRNWLPAQDTDSATFHPTHQRIFGKLVFLPLRLVWKEVILRKILILVLVQKDVSLTTQYFLQKARSRRHRR

SEQ ID NO: 6010 - protein, 714 aa, Homo sapiens
MLDTMEAPGHSRQLLLQLNNQRTKGFLCDVIIVVQNALFRAHKNVLAASSAYLKSLVVHDNLLNLDHDMVSPAVFRLVLDFIYTGRLADGAEAAAAAAVAPGAEPSLGAVLAAASYLQIPDLVALCKKRLKRHGKYCHLRGGGGGGGGYAPYGRPGRGLRAATPVIQACYPSPVGPPPPPAAEPPSGPEAAVNTHCAELYASGPGPAAALCASERRCSPLCGLDLSKKSPPGSAAPERPLAERELPPRPDSPPSAGPAAYKEPPLALPSLPPLPFQKLEEAAPPSDPFRGGSGSPGPEPPGRPDGPSLLYRWMKHEPGLGSYGDELGRERGSPSERCEERGGDAAVSPGGPPLGLAPPPRYPGSLDGPGAGGDGDDYKSSSEETGSSEDPSPPGGHLEGYPCPHLAYGEPESFGDNLYVCIPCGKGFPSSEQLNAHVEAHVEEEEALYGRAEAAEVAAGAAGLGPPFGGGGDKVAGAPGGLGELLRPYRCASCDKSYKDPATLRQHEKTHWLTRPYPCTICGKKFTQRGTMTRHMRSHLGLKPFACDACGMRFTRQYRLTEHMRIHSGEKPYECQVCGGKFAQQRNLISHMKMHAVGGAAGAAGALAGLGGLPGVPGPDGKGKLDFPEGVFAVARLTAEQLSLKQQDKAAAAELLAQTTHFLHDPKVALESLYPLAKFTAELGLSPDKAAEVLSQGAHLAAGPDGRTIDRFSPT

SEQ ID NO: 6011 - protein, 107 aa, Homo sapiens
MGKKRTKGKTVPIDDSSETLEPVCRHIRKGLEQGNLKKALVNVEWNICQDCKTDNKVKDKAEEETEEKPSVWLCLKCGHQGCGRNSQEQHALKHYLTPRSEPHCLVL

SEQ ID NO: 6012 - protein, 388 aa, Homo sapiens
MDPIRSFCGKLRSLASTLDCETARLQRALDGEESDFEDYPMRILYDLHSEVQTLKDDVNILLDKARLENQEGIDFIKATKVLMEKNSMDIMKIREYFQKYGYSPRVKKNSVHEQEAINSDPELSNCENFQKTDVKDDLSDPPVASSCISEKSPRSPQLSDFGLERYIVSQVLPNPPQAVNNYKEEPVIVTPPTKQSLVKVLKTPKCALKMDDFECVTPKLEHFGISEYTMCLNEDYTMGLKNARNNKSEEAIDTESRLNDNVFATPSPIIQQLEKSDAEYTNSPLVPTFCTPGLKIPSTKNSIALVSTNYPLSKTNSSSNDLEVEDRTSLVLNSDTCFENLTDPSSPTISSYENLLRTPTPPEVTKIPEDILQKFQWIYPTQKLNKMR

SEQ ID NO: 6013 - protein, 1123 aa, Homo sapiens
MERHQPRLHHPAQGSAAGTPYPSSASLRGCRESKMPRRKGPQHPPPPSGPEEPGEKRPKFEDMNLNEDKKAPLREKDFSIKKEMVMQYINTASKTGSLKRSRQISPQEFIHELKMGSADERLVTCLESLRVSLTSNPVSWVESFGHEGLGLLLDILEKLISGKIQEKVVKKNQHKVIQCLKALMNTQYGLERIMSEERSLSLLAKAVDPRHPNMMTDVVKLLSAVCIVGEESILEEVLEALTSAGEEKKIDRFFCIVEGLRHNSVQLQVACMQLINALVTSPDDLDFRLHIRNEFMRCGLKEILPNLKCIKNDGLDIQLKVFDEHKEEDLFELSHRLEDIRAELDEAYDVYNMVWSTVKETRAEGYFISILQHLLLIRNDYFIRQQYFKLIDECVSQIVLHRDGMDPDFTYRKRLDLDLTQFVDICIDQAKLEEFEEKASELYKKFEKEFTDHQETQAELQKKEAKINELQAELQAFKSQFGALPADCNIPLPPSKEGGTGHSALPPPPPLPSGGGVPPPPPPPPPPPLPGMRMPFSGPVPPPPPLGFLGGQNSPPLPILPFGLKPKKEFKPEISMRRLNWLKIRPHEMTENCFWIKVNENKYENVDLLCKLENTFCCQQKERREEEDIEEKKSIKKKIKELKFLDSKIAQNLSIFLSSFRVPYEEIRMMILEVDETRLAESMIQNLIKHLPDQEQLNSLSQFKSEYSNLCEPEQFVVVMSNVKRLRPRLSAILFKLQFEEQVNNIKPDIMAVSTACEEIKKSKSFSKLLELVLLMGNYMNAGSRNAQTFGFNLSSLCKLKDTKSADQKTTLLHFLVEICEEKYPDILNFVDDLEPLDKASKVSVETLEKNLRQMGRQLQQLEKELETFPPPEDLHDKFVTKMSRFVISAKEQYETLSKLHENMEKLYQSIIGYYAIDVKKVSVEDFLTDLNNFRTTFMQAIKENIKKREAEEKEKRVRIAKELAERERLERQQKKKRLLEMKTEGDETGVMDNLLEALQSGAAFRDRRKRTPMPKDVRQSLSPMSQRPVLKVCNHENQKVQLTEGSRSHYNINCNSTRTPVAKELNYNLDTHTSTGRIKAAEKKEACNVESNRKKETELLGSFSKNESVPEVEALLARLRAL

SEQ ID NO: 6014 - protein, 1147 aa, Homo sapiens
MERHQPRLHHPAQGSAAGTPYPSSASLRGCRESKMPRRKGPQHPPPPSGPEEPGEKRPKFLDKFASIRIPGSKKERPPLPNLKTAFASSDCSAAPLEMMENFPKPLSENELLELFEKMMGSLKRSRQISPQEFIHELKMGSADERLVTCLESLRVSLTSNPVSWVESFGHEGLGLLLDILEKLISGKIQEKVVKKNQHKVIQCLKALMNTQYGLERIMSEERSLSLLAKAVDPRHPNMMTDVVKLLSAVCIVGEESILEEVLEALTSAGEEKKIDRFFCIVEGLRHNSVQLQVACMQLINALVTSPDDLDFRLHIRNEFMRCGLKEILPNLKCIKNDGLDIQLKVFDEHKEEDLFELSHRLEDIRAELDEAYDVYNMVWSTVKETRAEGYFISILQHLLLIRNDYFIRQQYFKLIDECVSQIVLHRDGMDPDFTYRKRLDLDLTQFVDICIDQAKLEEFEEKASELYKKFEKEFTDHQETQAELQKKEAKINELQAELQAFKSQFGALPADCNIPLPPSKEGGTGHSALPPPPPLPSGGGVPPPPPPPPPPPLPGMRMPFSGPVPPPPPLGFLGGQNSPPLPILPFGLKPKKEFKPEISMRRLNWLKIRPHEMTENCFWIKVNENKYENVDLLCKLENTFCCQQKERREEEDIEEKKSIKKKIKELKFLDSKIAQNLSIFLSSFRVPYEEIRMMILEVDETRLAESMIQNLIKHLPDQEQLNSLSQFKSEYSNLCEPEQFVVVMSNVKRLRPRLSAILFKLQFEEQVNNIKPDIMAVSTACEEIKKSKSFSKLLELVLLMGNYMNAGSRNAQTFGFNLSSLCKLKDTKSADQKTTLLHFLVEICEEKYPDILNFVDDLEPLDKASKVSVETLEKNLRQMGRQLQQLEKELETFPPPEDLHDKFVTKMSRFVISAKEQYETLSKLHENMEKLYQSIIGYYAIDVKKVSVEDFLTDLNNFRTTFMQAIKENIKKREAEEKEKRVRIAKELAERERLERQQKKKRLLEMKTEGDETGVMDNLLEALQSGAAFRDRRKRTPMPKDVRQSLSPMSQRPVLKVCNHENQKVQLTEGSRSHYNINCNSTRTPVAKELNYNLDTHTSTGRIKAAEKKEACNVESNRKKETELLGSFSKNESVPEVEALLARLRAL

SEQ ID NO: 6015 - protein, 1193 aa, Homo sapiens
MERHQPRLHHPAQGSAAGTPYPSSASLRGCRESKMPRRKGPQHPPPPSGPEEPGEKRPKFHLNIRTLTDDMLDKFASIRIPGSKKERPPLPNLKTAFASSDCSAAPLEMMENFPKPLSENELLELFEKMMEDMNLNEDKKAPLREKDFSIKKEMVMQYINTASKTGSLKRSRQISPQEFIHELKMGSADERLVTCLESLRVSLTSNPVSWVESFGHEGLGLLLDILEKLISGKIQEKVVKKNQHKVIQCLKALMNTQYGLERIMSEERSLSLLAKAVDPRHPNMMTDVVKLLSAVCIVGEESILEEVLEALTSAGEEKKIDRFFCIVEGLRHNSVQLQVACMQLINALVTSPDDLDFRLHIRNEFMRCGLKEILPNLKCIKNDGLDIQLKVFDEHKEEDLFELSHRLEDIRAELDEAYDVYNMVWSTVKETRAEGYFISILQHLLLIRNDYFIRQQYFKLIDECVSQIVLHRDGMDPDFTYRKRLDLDLTQFVDICIDQAKLEEFEEKASELYKKFEKEFTDHQETQAELQKKEAKINELQAELQAFKSQFGALPADCNIPLPPSKEGGTGHSALPPPPPLPSGGGVPPPPPPPPPPPLPGMRMPFSGPVPPPPPLGFLGGQNSPPLPILPFGLKPKKEFKPEISMRRLNWLKIRPHEMTENCFWIKVNENKYENVDLLCKLENTFCCQQKERREEEDIEEKKSIKKKIKELKFLDSKIAQNLSIFLSSFRVPYEEIRMMILEVDETRLAESMIQNLIKHLPDQEQLNSLSQFKSEYSNLCEPEQFVVVMSNVKRLRPRLSAILFKLQFEEQVNNIKPDIMAVSTACEEIKKSKSFSKLLELVLLMGNYMNAGSRNAQTFGFNLSSLCKLKDTKSADQKTTLLHFLVEICEEKYPDILNFVDDLEPLDKASKVSVETLEKNLRQMGRQLQQLEKELETFPPPEDLHDKFVTKMSRFVISAKEQYETLSKLHENMEKLYQSIIGYYAIDVKKVSVEDFLTDLNNFRTTFMQAIKENIKKREAEEKEKRVRIAKELAERERLERQQKKKRLLEMKTEGDETGVMDNLLEALQSGAAFRDRRKRTPMPKDVRQSLSPMSQRPVLKVCNHENQKVQLTEGSRSHYNINCNSTRTPVAKELNYNLDTHTSTGRIKAAEKKEACNVESNRKKETELLGSFSKNESVPEVEALLARLRAL

SEQ ID NO: 6016 - protein, 644 aa, Homo sapiens
MEIPAPEPEKTALSSQDPALSLKENLEDISGWGLPEARSKESVSFKDVAVDFTQEEWGQLDSPQRALYRDVMLENYQNLLALGPPLHKPDVISHLERGEEPWSMQREVPRGPCPEWELKAVPSQQQGICKEEPAQEPIMERPLGGAQAWGRQAGALQRSQAAPWAPAPAMVWDVPVEEFPLRCPLFAQQRVPEGGPLLDTRKNVQATEGRTKAPARLCAGENASTPSEPEKFPQVRRQRGAGAGEGEFVCGECGKAFRQSSSLTLHRRWHSREKAYKCDECGKAFTWSTNLLEHRRIHTGEKPFFCGECGKAFSCHSSLNVHQRIHTGERPYKCSACEKAFSCSSLLSMHLRVHTGEKPYRCGECGKAFNQRTHLTRHHRIHTGEKPYQCGSCGKAFTCHSSLTVHEKIHSGDKPFKCSDCEKAFNSRSRLTLHQRTHTGEKPFKCADCGKGFSCHAYLLVHRRIHSGEKPFKCNECGKAFSSHAYLIVHRRIHTGEKPFDCSQCWKAFSCHSSLIVHQRIHTGEKPYKCSECGRAFSQNHCLIKHQKIHSGEKSFKCEKCGEMFNWSSHLTEHQRLHSEGKPLAIQFNKHLLSTYYVPGSLLGAGDAGLRDVDPIDALDVAKLLCVVPPRAGRNFSLGSKPRN

SEQ ID NO: 6017 - protein, 306 aa, Homo sapiens
MRQHDTRNGRIVLISGRRSFCSIFSVLPYRDSTQVGDLKLDGGRQSTGAVSLKEIIGLEGVELGADGKTVSYTQFLLPTNAFGARRNTIDSTSSFSQFRNLSHRSLSIGRASGTQGSLDTGSDLGDFMDYDPNLLDDPQWPCGKHKRVLIFPSYMTTVIDYVKPSDLKKDMNETFKEKFPHIKLTLSKIRSLKREMRKLAQEDCGLEEPTVAMAFVYFEKLALKGKLNKQNRKLCAGACVLLAAKIGSDLKKHEVKHLIDKLEEKFRLNRRELIAFEFPVLVALEFALHLPEHEVMPHYRRLVQSS

SEQ ID NO: 6018 - protein, 242 aa, Homo sapiens
MIQTPDADLDVTNIIQADEPTTLTTNALDLNSVLGKDYGALKDIVINANPASPPLSLLVLHRLLCEHFRVLSTVHTHSSVKSVPENLLKCFGEQNKKQPRQDYQLGFTLIWKNVPKTQMKFSIQTMCPIEGEGNIARFLFSLFGQKHNAVNATLIDSWVDIAIFQLKEGSSKEKAAVFRSMNSALGKSPWLAGNELTVADVVLWSVLQQIGGCSVTVPANVQRWMRSCENLAPFNTALKLLK

SEQ ID NO: 6019 - protein, 597 aa, Homo sapiens
MDSCSLEIANWRNHQETLKYQFDAFYGERSTQQDIYAGSVQPILRHLLEGQNASVLAYGPTGAGKTHTMLGSPEQPGVIPRALMDLLQLTREEGAEGRPWALSVTMSYLEIYQEKVLDLLDPASGDLVIREDCRGNILIPGLSQKPISSFADFERHFLPASRNRTVGATRLNQRSSRSHAVLLVKVDQRERLAPFRQREGKLYLIDLAGSEDNRRTGNKGLRLKESGAINTSLFVLGKVVDALNQGLPRVPYRDSKLTRLLQDSLGGSAHSILIANIAPERRFYLDTVSALNFAARSKEVINRPFTNESLQPHALGPVKLSQKELLGPPEAKRARGPEEEEIGSPEPMAAPASASQKLSPLQKLSSMDPAMLERLLSLDRLLASQGSQGAPLLSTPKRERMVLMKTVEEKDLEIERLKTKQKELEAKMLAQKAEEKENHCPTMLRPLSHRTVTGAKPLKKAVVMPLQLIQEQAASPNAEIHILKNKGRKRKLESLDALEPEEKAEDCWELQISPELLAHGRQKILDLLNEGSARDLRSLQRIGPKKAQLIVGWRELHGPFSQVEDLERVEGITGKQMESFLKANILGLAAGQRCGAS

SEQ ID NO: 6020 - protein, 241 aa, Homo sapiens
RPPHRGNAHHPRPGLVLIFSAGGHPPAPAPGPSRQHAEDFLGEVYVNGEWVTNISEGGSFGELALIYGTPRAATVKAKTDLKLWGIDRDSYRRILMGSTLRKRKMYEEFLSKVSILESLEKWERLTVADALEPVQFEDGEKIVVQGEPGDDFYIITEGTASVLQRRSPNEEYVEVGRLGPSDYFGEIALLLNRPRAATVVARGPLKCVKLDRPRFERVLGPCSEILKRNIQRYNSFISLTV

SEQ ID NO: 6021 - protein, 205 aa, Homo sapiens
QRQAAALGSQSPSPAGLRAGAVPPARACLQEAEIPREVIERLARSQIHSIRDLQRLLEIDSVGSEDSLDTSLRAHGVHATKHVPEKRPLPIRRKRSIEEAVPAVCKTRTVIYEIPRSQVDPTSANFLIWPPCVEVKRCTGCCNTSSVKCQPSRVHHRSVKVAKVEYVRKKPKLKEVQVRLEEHLECACATTSLNPDYREEDTDVR

SEQ ID NO: 6022 - protein, 252 aa, Homo sapiens
FAKKLALHSGMDYAIMTGGDVAPMGREGVTAMHKLFDWANTSRRGLLLFVDEADAFLRKRATEKISEDLRATLNAFLYRTGQHSNNPSHVSHGGSSPAGRPWLTPQARWAPRFMLVLASNQPEQFDWAINDRINEMVHFDLPGQEERERLVRMYFDKYVLKPATEGKQRLKLAQFDYGRKCSEVARLTEGMSGREIAQLAVSWQATAYASEDGVLTEAMMDTRVQDAVQQHQQKMCWLKAEGPGRGDEPSPS

SEQ ID NO: 6023 - protein, 164 aa, Homo sapiens
MEEEAETEEQQRFSYQQRLKAAVHYTVGCLCEEVALDKEMQFSKQTIAAISELTFRQCENFAKDLEMFARHAKRTTINTEDVKLLARRSNSLHMQEAAGIRKSSLLTFLAWWFEWTSQASAGPLIGEEAREVARRQEGAPPQQSARRDRMPCRNFFWKTFSSCK

SEQ ID NO: 6024 - protein, 320 aa, Homo sapiens
MSGRVGDLSPRQKEALAKFRENVQDVLPALPNPDDYFLLRWLRARSFDLQKSEAMLRKLGRKVETITIIYDCEGLGLKHLWKPAVEAYGEFLCMFEENYPETLKRLFVVKAPKLFPVAYNLIKPFLSEDTRKKIMVLGANWKEVLLKHISPDQVPVEYGGTMTDPDGNPKCKSKINYGGDIPRKYYVRDQVKQQYEHSVQISRGSSHQVEYEILFPGCVLRWQFMSDGADVGFGIFLKTKMGERQRAGEMTEVLPNQRYNSHLVPEDGTLTCSDPGIYVLRFDNTYSFIHAKKVNFTVEVLLPDKASEEKMKQLGAGTPK

SEQ ID NO: 6025 - protein, 231 aa, Homo sapiens
MASMAAIGSCSKEYRVLLGQLQKQTDLMQDTSRLLDPYIRIQGLDVPKLREHCRERPGAFPSEETLRGLGRRGFLQTLNATLGCVLHRLADLEQRLPKAQDLERSGLNIEDLEKLQMARPNILGLRNNIYCMAQLLDNSDTAEPTKAGRGASQPPTPTPASDAFQRKLEGCRFLHGYHRFMHSVGRVFSKWGESPNRSRRHSPHQALRKGVRRTRPSRKGKRLMTRGQLPR

SEQ ID NO: 6026 - protein, 438 aa, Homo sapiens
MPGVPGPGPELAAALEEQLGRALEELRAVAEAGRVAVTQAAEVAVATVEPVARAAEELRAERAALSRRLDALSRQVEVLSLRLGVPLVSGLEPELEPSELLLAAADPEALFQAAEDAGTPVAHPPAFSTRRRSSTGTTRSTSLMEAEPAEPLAAAVEAANGAEQTRVNKAPEGRSPLSAEELMTIEDEGVLDKMLDQSTDFEERKLIRAALRELRQRKRDGSGSTMMQTKTFSSSSSSKKMGSIFDREDQASPRAGSLAALEKRQAEKKKELMKAQSLPKTSASQARKAMIEKLEKEGAAGSPGGPRAAVQRSTSFGVPNANSIKQMLLDWCRAKTRGYEHVDIQNFSSSWSDGMAFCALVHNFFPEAFDYGQLSPQNRRQNFEVAFSSAETHADCPQLLDTEDMVRLREPDWKCVYTYIQEFYRCLVQKGLVKTKKS

SEQ ID NO: 6027 - protein, 277 aa, Homo sapiens
MLLSLKPSEAPELDEDEGFGDWSQRPEQRQQHEGAQGALDSGEPPQCRSPEGEQEDRPGLHAYEKEDSDEVHLEELSLSKEGPGPEDTVQDNLGAAGAEEEQEEHQKCQQPRTPSPLVLEGTIEQSSPPLSPTTKLIDRTESLNRSIEKSNSVKKSQPDLPISKIDQWLEQYTQAIETAGRTPKLARQASIELPSMAVASTKSRWETGEVQAQSAAKTPSCKDIVAGDMSKKSLWEQKGGSKTSSTIKSTPSGKRYKFVATGHGKYEKVLVEGGPAP

SEQ ID NO: 6028 - protein, 216 aa, Homo sapiens
MDLQRPDSYQGGAGPDFNDHVLHKTILVGDSGVGKTSLLVQFDQGKFIPGSFSATVGIGFTNKVVTVDGVRVKLQIWDTAGQERFRSVTHAYYRDAQALLLLYDITNKSSFDNIRAWLTEIHEYAQRDVVIMLLGNKADMSSERVIRSEDGETLAREYGVPFLETSAKTGMNVELAFLAIAKELKYRAGHQADEPSFQIRDYVESQKKRSSCCSFM

SEQ ID NO: 6029 - protein, 139 aa, Homo sapiens
MPVARSWVCRKTYVTPRRPFEKSRLDQELKLIGEYGLRNKREVWRVKFTLAKIRKAARELLTLDEKDPRRLFEGNALLRRLVRIGVLDEGKMKLDYILGLKIEDFLERRLQTQVFKLGLAKSIHHARVLIRQRHISPRR

SEQ ID NO: 6030 - protein, 337 aa, Homo sapiens
MPALEPAPPLLADLGPALEPESPAALGPPGYLHSAPGPAPAPGEGPPPGTVLEPQSAPESSCPCRGSVKNQPSEELPDMTTFPPRLLAEQLTLMDAELFKKVVLHECLGCIWGQGHLKGNEHMAPTVRATIAHFNRLTNCITTSCLGDHSMRARDRARVVEHWIKVARECLSLNNFSSVHVIVSALCSNPIGQLHKTWAGVSSKSMKELKELCKKDTAVKRDLLIKAGSFKVATQERNPQRVQMRLRRQKKGVVPFLGDFLTELQRLDSAIPDDLDGNTNKRSKEVRVLQEMQLLQVAAMNYRLRPLEKFVTYFTRMEQLSDKESYKLSCQLEPENP

SEQ ID NO: 6031 - protein, 137 aa, Homo sapiens
MDLSANQDEETDQETFQLEIDRDTKKCAFRTHTGKYWTLTATGGVQSTASSKNASCYFDIEWRDRRITLRASNGKFVTSKKNGQLAASVETAGDSELFLMKLINRPIIVFRGEHGFIGCRKVTGTLDANRSSYDVFQ

SEQ ID NO: 6032 - protein, 151 aa, Homo sapiens
MEVAEVESPLNPSCKIMTFRPSMEEFREFNKYLAYMESKGAHRAGLAKVIPPKEWKPRQCYDDIDNLLIPAPIQQMVTGQSGLFTQYNIQKKAMTVKEFRQLANSGKYCTPRYLDYEDLERKYWKNLTFVAPIYGADINGSIYDEVHSYLQ

SEQ ID NO: 6033 - protein, 615 aa, Homo sapiens
MCSEARLARRLRDALREEEPWAVEELLRCGADPNLVLEDGAAAVHLAAGARHPRGLRCLGALLRQGGDPNARSVEALTPLHVAAAWGCRRGLELLLSQGADPALRDQDGLRPLDLALQQGHLECARVLQDLDTRTRTRTRIGAETQEPEPAPGTPGLSGPTDETLDSIALQKQPCRGDNRDIGLEADPGPPSLPVPLETVDKHGSSASPPGHWDYSSDASFVTAVEVSGAEDPASDTPPWAGSLPPTRQGLLHVVHANQRVPRSQGTEAELNARLQALTLTPPNAAGFQSSPSSMPLLDRSPAHSPPRTPTPGASDCHCLWEHQTSIDSDMATLWLTEDEASSTGGREPVGPCRHLPVSTVSDLELLKGLRALGENPHPITPFTRQLYHQQLEEAQIAPGPEFSGHSLELAAALRTGCIPDVQADEDALAQQFEQPDPARRWREGVVKSSFTYLLLDPRETQDLPARAFSLTPAERLQTFIRAIFYVGKGTRARPYVHLWEALGHHGRSRKQPHQACPKVRQILDIWASGCGVVSLHCFQHVVAVEAYTREACIVEALGIQTLTNQKQGHCYGVVAGWPPARRRRLGVHLLHRALLVFLAEGERQLHPQDIQARG

SEQ ID NO: 6034 - protein, 577 aa, Homo sapiens
MLQTIYESDSCFSSDGVAGREQLLAQQRMHSMISSVDVKSEVPVGLEPISPLDLRTDLRMMMPVVDPVVREKQLQQELLLIQQQQQIQKQLLIAEFQKQHENLTRQHQAQLQEHIKLQQELLAIKQQQELLEKEQKLEQQRQEQEVERHRREQQLPPLRGKDRGRERAVASTEVKQKLQEFLLSKSATKDTPTNGKNHSVSRHPKLWYTAAHHTSLDQSSPPLSGTSPSYKYTLPGAQDAKDDFPLRKTESSVSSSSPGSGPSSPNNGPTGSVTENETSVLPPTPHAEQMVSQQRILIHEDSMNLLSLYTSPSLPNITLGLPAVPSQLNASNSLKEKQKCETQTLRQGVPLPGQYGGSIPASSSHPHVTLEGKPPNSSHQALLQHLLLKEQMRQQKLLVAGGVPLHPQSPLATKERISPGIRGTHKLPRHRPLNRTQSAPLPQSTLAQLVIQQQHQQFLEKQKQYQQQIHMNKLLSKSIEQLKQPGSHLEEAEEELQGDQAMQEDRAPSSGNSTRSDSSACVDDTLGQVGAVKVKEEPVDSDEDAQIQEMESGEQAAFMQQVIGKDLAPGFVIKVII

SEQ ID NO: 6035 - protein, 158 aa, Homo sapiens
MELSAIGEQVFAVESIRKKRVRKGKVEYLVKWKGWPPKYSTWEPEEHILDPRLVMAYEEKEERDRASGYRKRGPKPKRLLLQEPPAPDVLQAAGEWEPAAQPPEEEADADLAEGPPPWTPALPSSEVTVTDITANSITVTFREAQAAEGFFRDRSGKF

SEQ ID NO: 6036 - protein, 125 aa, Homo sapiens
MLKEDCASELKVHLAKSLPLPSSVNRPRIDLIVFVVNLHSKYRIREARTSAFSVVKFCSLVCFLTLAWPPQSPEHRGVPAPCGCQLLLGEGVFPRHRCWAGEPLQHSPAHRGEAGPHLSKPPALL

SEQ ID NO: 6037 - protein, 329 aa, Homo sapiens
MELHILEHRVRVLSVARPGLWLYTHPLIKLLFLPRRSRCKFFSLTETPEDYTLMVDEEGFKELPPSEFLQVAEATWLVLNVSSHSGAAVQAAGVTKIARSVIAPLAEHHVSVLMLSTYQTDFILVREQDLSVVIHTLAQEFDIYREVGGEPVPVTRDDSSNGFPRTQHGPSPTVHPIQSPQNRFCVLTLDPETLPAIATTLIDVLFYSHSTPKEAASSSPEPSSITFFAFSLIEGYISIVMDAETQKKFPSDLLLTSSSGELWRMVRIGGQPLGFDECGIVAQIAGPLAAADISAYYISTFNFDHALVPEDGIGSVIEVLQRRQEGLAS

SEQ ID NO: 6038 - protein, 1192 aa, Homo sapiens
MPRRAGSGQLPLPRGWEEARDYDGKVFYIDHNTRRTSWIDPRDRLTKPLSFADCVGDELPWGWEAGFDPQIGVYYIDHINKTTQIEDPRKQWRGEQEKMLKDYLSVAQDALRTQKELYHVKEQRLALALDEYVRLNDAYKEKSSSHTSLFSGSSSSTKYDPDILKAEISTTRLRVKKLKRELSQMKQELLYKEQGFETLQQIDKKMSGGQSGYELSEAKAILTELKSIRKAISSGEKEKQDLMQSLAKLQERFHLDQNIGRSEPDLRCSPVNSHLCLSRQTLDAGSQTSISGDIGVRSRSNLAEKVRLSLQYEEAKRSMANLKIELSKLDSEAWPGALDIEKEKLMLINEKEELLKELQFVTPQKRTQDELERLEAERQRLEEELLSVRGTPSRALAERLRLEERRKELLQKLEETTKLTTYLHSQLKSLSASTLSMSSGSSLGSLASSRGSLNTSSRGSLNSLSSTELYYSSQSDQIDVDYQYKLDFLLQEKSGYIPSGPITTIHENEVVKSPSQPGQSGLCGVAAAATGHTPPLAEAPKSVASLSSRSSLSSLSPPGSPLVLEGTFPMSSSHDASLHQFTADFEDCELSSHFADISLIENQILLDSDSGGASQSLSEDKDLNECAREPLYEGTADVEKSLPKRRVIHLLGEKTTCVSAAVSDESVAGDSGVYEAFVKQPSEMEDVTYSEEDVAIVETAQVQIGLRYNAKSSSFMVIIAQLRNLHAFLIPHTSKVYFRVAVLPSSTDVSCLFRTKVHPPTESILFNDVFRVAISQTALQQKTLRVDLCSVSKHRREECLAGTQISLADLPFSSEVFTLWYNLLPSKQMPCKKNEENEDSVFQPNQPLVDSIDLDAVSALLARTSAELLAVEQELAQEEEEESGQEEPRGPDGDWLTMLREASDEIVAEKEAEVKLPEDSSCTEDLSSCTSVPEMNEDGNRKESNCAKDLRSQPPTRIPTLVDKETNTDEAANDNMAVRPKERSSLSSRQHPFVRSSVIVRSQTFSPGERNQYICRLNRSDSDSSTLAKKSLFVRNSTERRSLRVKRTVCQSVLRRTTQECPVRTSLDLELDLQASLTRQSRLNDELQALRDLRQKLEELKAQGETDLPPGVLEDERFQRLLKQAEKQAEQSKEEQKQGLNAEKLMRQVSKDVCRLREQSQKVPRQVQSFREKIAYFTRAKISIPSLPADDV

SEQ ID NO: 6039 - protein, 571 aa, Homo sapiens
MGGLEKKKYERGSATNYITRNKARKKLQLSLADFRRLCILKGIYPHEPKHKKKVNKGSTAARTFYLIKDIRFLLHEPIVNKFREYKVFVRKLRKAYGKSEWNTVERLKDNKPNYKLDHIIKERYPTFIDALRDLDDALSMCFLFSTFPRTGKCHVQTIQLCRRLTVEFMHYIIAARALRKVFLSIKGIYYQAEHPTDVDYRVMATFTEFYTTLLGFVNFRLYQLLNLHYPPKLEGQAQAEAKAGEGTYALDSESCMEKLAALSASLARVVVPATEEEAEVDEFPTDGEMSAQEEDRRKELEAQEKHKKLFEGLKFFLNREVPREALAFIIRSFGGEVSWDKSLCIGATYDVTDSRITHQIVDRPGQQTSVIGRCYVQPQWVFDSVNARLLLPVAEYFSGVQLPPHLSPFVTEKEGDYVPPEKLKLLALQRGEDPGNLNESEEEEEEDDNNEGDGDEEGENEEEEEDAEAGSEKEEEARLAALEEQRMEGKKPRVMAGTLKLEDKQRLAQEEESEAKRLAIMMMKKREKYLYQKIMFGKRRKIREANKLAEKRKAHDEAVRSEKKAKKARPE

SEQ ID NO: 6040 - protein, 449 aa, Homo sapiens
MCFLFSTFPRTGKCHVQTIQLCRRLTVEFMHYIIAARALRKVFLSIKGIYYQAEVLGQPIVWITPYAFSHDHPTDVDYRVMATFTEFYTTLLGFVNFRLYQLLNLHYPPKLEGQAQAEAKAGEGTYALDSESCMEKLAALSASLARVVVPATEEEAEVDEFPTDGEMSAQEEDRRKELEAQEKHKKLFEGLKFFLNREVPREALAFIIRSFGGEVSWDKSLCIGATYDVTDSRITHQIVDRPGQQTSVIGRCYVQPQWVFDSVNARLLLPVAEYFSGVQLPPHLSPFVTEKEGDYVPPEKLKLLALQRGEDPGNLNESEEEEEEDDNNEGDGDEEGENEEEEEDAEAGSEKEEEARLAALEEQRMEGKKPRVMAGTLKLEDKQRLAQEEESEAKRLAIMMMKKREKYLYQKIMFGKRRKIREANKLAEKRKAHDEAVRSEKKAKKARPE

SEQ ID NO: 6041 - protein, 590 aa, Homo sapiens
MHSMISSVDVKSEVPVGLEPISPLDLRTDLRMMMPVVDPVVREKQLQQELLLIQQQQQIQKQLLIAEFQKQHENLTRQHQAQLQEHIKELLAIKQQQELLEKEQKLEQQRQEQEVERHRREQQLPPLRGKDRGRERAVASTEVKQKLQEFLLSKSATKDTPTNGKNHSVSRHPKLWYTAAHHTSLDQSSPPLSGTSPSYKYTLPGAQDAKDDFPLRKTASEPNLKVRSRLKQKVAERRSSPLLRRKDGNVVTSFKKRMFEVTESSVSSSSPGSGPSSPNNGPTGSVTENETSVLPPTPHAEQMVSQQRILIHEDSMNLLSLYTSPSLPNITLGLPAVPSQLNASNSLKEKQKCETQTLRQGVPLPGQYGGSIPASSSHPHVTLEGKPPNSSHQALLQHLLLKEQMRQQKLLVAGGVPLHPQSPLATKERISPGIRGTHKLPRHRPLNRTQSAPLPQSTLAQLVIQQQHQQFLEKQKQYQQQIHMNKLLSKSIEQLKQPGSHLEEAEEELQGDQAMQEDRAPSSGNSTRSDSSACVDDTLGQVGAVKVKEEPVDSDEDAQIQEMESGEQAAFMQQVIGKDLAPGFVIKVII

SEQ ID NO: 6042 - protein, 653 aa, Homo sapiens
MRAGRGATPARELFRDAAFPAADSSLFCDLSTPLAQFREDITWRRPQEICATPRLFPDDPREGQVKQGLLGDCWFLCACAALQKSRHLLDQVIPPGQPSWADQEYRGSFTCRIWQFGRWVEVTTDDRLPCLAGRLCFSRCQREDVFWLPLLEKVYAKVHGSYEHLWAGQVADALVDLTGGLAERWNLKGVAGSGGQQDRPGRWEHRTCRQLLHLKDQCLISCCVLSPRAGARELGEFHAFIVSDLRELQGQAGQCILLLRIQNPWGRRCWQGLWREGGEGWSQVDAAVASELLSQLQEGEFWVEEEEFLREFDELTVGYPVTEAGHLQSLYTERLLCHTRALPGAWVKGQSAGGCRNNSGFPSNPKFWLRVSEPSEVYIAVLQRSRLHAADWAGRARALVGDSHTSWSPASIPGKHYQAVGLHLWKVEKRRVNLPRVLSMPPVAGTACHAYDREVHLRCELSPGYYLAVPSTFLKDAPGEFLLRVFSTGRVSLSAIRAVAKNTTPGAALPAGEWGTVQLRGSWRVGQTAGGSRNFASYPTNPCFPFSVPEGPGPRCVRITLHQHCRPSDTEFHPIGFHIFQVPEGGRSQDAPPLLLQEPLLSCVPHRYAQEVSRLCLLPAGTYKVVPSTYLPDTEGAFTVTIATRIDRSPSWQ

SEQ ID NO: 6043 - protein, 1368 aa, Homo sapiens
MASWLYECLCEAELAQYYSHFTALGLQKIDELAKITMKDYSKLGVHDMNDRKRLFQLIKIIKIMQEEDKAVSIPERHLQTSSLRIKSQELRSGPRRQLNFDSPADNKDRNASNDGFEMCSLSDFSANEQKSTYLKVLEHMLPDDSQYHTKTGILNATAGDSYVQTEISTSLFSPNYLSAILGDCDIPIIQRISHVSGYNYGIPHSCIRQNTSEKQNPWTEMEKIRVCVRKRPLGMREVRRGEINIITVEDKETLLVHEKKEAVDLTQYILQHVFYFDEVFGEACTNQDVYMKTTHPLIQHIFNGGNATCFAYGQTGAGKTYTMIGTHENPGLYALAAKDIFRQLEVSQPRKHLFVWISFYEIYCGQLYDLLNRRKRLFAREDSKHMVQIVGLQELQVDSVELLLEVILKGSKERSTGATGVNADSSRSHAVIQIQIKDSAKRTFGRISFIDLAGSERAADARDSDRQTKMEGAEINQSLLALKECIRALDQEHTHTPFRQSKLTQVLKDSFIGNAKTCMIANISPSHVATEHTLNTLRYADRVKELKKGIKCCTSVTSRNRTSGNSSPKRIQSSPGALSEDKCSPKKVKLGFQQSLTVAAPGSTRGKVHPLTSHPPNIPFTSAPKVSGKRGGSRGSPSQEWVIHASPVKGTVRSGHVAKKKPEESAPLCSEKNRMGNKTVLGWESRASGPGEGLVRGKLSTKCKKVQTVQPVQKQLVSRVELSFGNAHHRAEYSQDSQRGTPARPASEAWTNIPPHQKEREEHLRFYHQQFQQPPLLQQKLKYQPLKRSLRQYRPPEGQLTNETPPLFHSYSENHDGAQVEELDDSDFSEDSFSHISSQRATKQRNTLENSEDSFFLHQTWGQGPEKQVAERQQSLFSSPRTGDKKDLTKSWVDSRDPINHRRAALDHSCSPSKGPVDWSRENSTSSGPSPRDSLAEKPYCSQVDFIYRQERGGGSSFDLRKDASQSEVSGENEGNLPSPEEDGFTISLSHVAVPGSPDQRDTVTTPLREVSADGPIQVTSTVKNGHAVPGEDPRGQLGTHAEYASGLMSPLTMSLLENPDNEGSPPSEQLVQDGATHSLVAESTGGPVVSHTVPSGDQEAALPVSSATRHLWLSSSPPDNKPGGDLPALSPSPIRQHPADKLPSREADLGEACQSRETVLFSHEHMGSEQYDADAEETGLDGSWGFPGKPFTTIHMGVPHSGPTLTPRTGSSDVADQLWAQERKHPTRLGWQEFGLSTDPIKLPCNSENVTWLKPRPISRCLARPSSPLVPSCSPKTAGTLRQPTLEQAQQVVIRAHQEQLDEMAELGFKEETLMSQLASNDFEDFVTQLDEIMVLKSKCIQSLRSQLQLYLTCHGPTAAPEGTVPS

SEQ ID NO: 6044 - protein, 88 aa, Homo sapiens
MKVLAAVHSPGGAVPQQPGQAMWPQRDGLPALPRQRHGEGQAGGAVPHSRVPWHLPGQHHPGPEDPQPQCPQPPQQAQRHRRHPARPP

SEQ ID NO: 6045 - protein, 121 aa, Homo sapiens
MATEGDVELELETETSGPERPPEKPRKHDSGAADLERVTDYAEEKEIQSSNLETAMSVIGDRRSREQKAKQEREKELAKVTIKKEDLELIMTEMEISRAAAERSLREHMGNVVEALIALTN

SEQ ID NO: 6046 - protein, 20 aa, Homo sapiens
MGVLLTQRTLLNTYPRPGCS

SEQ ID NO: 6047 - protein, 75 aa, Homo sapiens
MSPQKRVKNVQAQNRTSQGSSSFQTTLSAWKVKQDPSNSKNISKHGQNNPVGDYEHADDQAEEDALQMAVGYFEK

SEQ ID NO: 6048 - protein, 309 aa, Homo sapiens
MASKSWLNFLTFLCGSAIGFLLCSQLFSILLGEKVDTQPNVLHNDPHARHSDDNGQNHLEGQMNFNADSSQHKDENTDIAENLYQKVRILCWVMTGPQNLEKKAKHVKATWAQRCNKVLFMSSEENKDFPAVGLKTKEGRDQLYWKTIKAFQYVHEHYLEDADWFLKADDDTYVILDNLRWLLSKYDPEEPIYFGRRFKPYVKQGYMSGGAGYVLSKEALKRFVDAFKTDKCTHSSSIEDLALGRCMEIMNVEAGDSRDTIGKETFHPFVPEHHLIKGYLPRTFWYWNYNYYPPVEVSLEILLLCQYLD

SEQ ID NO: 6049 - protein, 212 aa, Homo sapiens
MTAPCPPPPPDPQFVLRGTQSPVHALHFCEGAQAQGRPLLFSGSQSGLVHIWSLQTRRAVTTLDGHGGQCVTWLQTLPQGRQLLSQGRDLKLCLWDLAEGRSAVVDSVCLESVGFCRSSILAGGQPRWTLAVPGRGSDEVQILEMPSKTSVCALKPKADAKLGMPMCLRLWQADCSSRPLLLAGYEDGSVVLWDVSEQKVCSRIACHEEPGL

SEQ ID NO: 6050 - protein, 352 aa, Homo sapiens
MARGRKMSKPRAVEAAAAAAAVAATAPGPEMVERRGPGRPRTDGENVFTGQSKIYSYMSPNKCSGMRFPLQEENSVTHHEVKCQGKPLAGIYRKREEKRNAGNAVRSAMKSEEQKIKDARKGPLVPFPNQKSEAAEPPKTPPSSCDSTNAAIAKQALKKPIKGKQAPRKKAQGKTQQNRKLTDFYPVRRSSRKSKAELQSEERKRIDELIESGKEEGMKIDLIDGKGRGVIATKQFSRGDFVVEYHGDLIEITDAKKREALYAQDPSTGCYMYYFQYLSKTYCVDATRETNRLGRLINHSKCGNCQTKLHDIDGVPHLILIASRDIAAGEELLYDYGDRSKASIEAHPWLKH

SEQ ID NO: 6051 - protein, 312 aa, Homo sapiens
MECDLMETDILESLEDLGYKGPLLEDGALSQAVSAGASSPEFTKLCAWLVSELRVLCKLEENVQATNSPSEAEEFQLEVSGLLGEMNCPYLSLTSGDVTKRLLIQKNCLLLLTYLISELEAARMLCVNAPPKKAQEGGGSEVFQELKGICIALGMSKPPANITMFQFFSGIEKKLKETLAKVPPNHVGKPLLKKPMGPAHWEKIEAINQAIANEYEVRRKLLIKRLDVTVQSFGWSDRAKSQTEKLAKVYQPKRSVLSPKTTISVAHLLAARQDLSKILRTSSGSIREKTACAINKVIRVPLIFSKCIYFCS

SEQ ID NO: 6052 - protein, 146 aa, Homo sapiens
MLKEDCASELKVHLAKSLPLPSSVNRPRIDLIVFVVNLHSKYSLQNTEESLRHVDASFFLGKVCFLATGAGRESHCSIHRHTVVKLAHTYQSPLLYCDLEVEGFRATMAQRLVRVLQICAGHVPGVSALNLLSLLRSSEGPSLEDL

SEQ ID NO: 6053 - protein, 107 aa, Homo sapiens
MSVLRPLDKLPGLNTATILLVGTEDALLQQLADSMLKEDCASELKVHLAKSLPLPSSVNRPRIDLIVFVVNLHSKYSLQNTEESLRHVDASFFLGKVCFLATGGGRL

SEQ ID NO: 6054 - protein, 385 aa, Homo sapiens
MCSEARLARRLRDALREEEPWAVEELLRCGADPNLVLEDGAAAVHLAAGARHPRGLRCLGALLRQGGDPNARSVEALTPLHVAAAWGCRRGLELLLSQGADPALRDQDGLRPLDLALQQGHLECARVLQDLDTRTRTRTRIGAETQEPEPAPGTPGLSGPTDETLDSIALQKQPCRGDNRDIGLEADPGPPSLPVPLETVDKHGSSASPPGHWDYSSDASFVTAVEVSGAEDPASDTPPWAGSLPPTRQGLLHVVHANQRVPRSQGTEAELNARLQALTLTPPNAAGFQSSPSSMPLLDRSPAHSPPRTPTPGASDCHCLWEHQTSIDSDMATLWLTEDEASSTGGREPVGPCRHLPVSTVSDLELLKGLRALGRLRTCQPEPSH

SEQ ID NO: 6055 - protein, 524 aa, Homo sapiens
MKEESAAQLGCCHRPMALGGTGGSLSPSLDFQLFRGDQVFSACRPLPDMVDAHGPSCASWLCPLPLAPGRSALLACLQDLDLNLCTPQPAPLGTDLQGLQEDALSMKHEPPGLQASSTDDKKFTVKYPQNKDKLGKQPERAGEGAPCPAFSSHNSSSPPPLQNRKSPSPLAFCPCPPVNSISKELPFLLHAFYPGYPLLLPPPHLFTYGALPSDQCPHLLMLPQDPSYPTMAMPSLLMMVNELGHPSARWETLLPYPGAFQASGQALPSQARNPGAGAAPTDSPGLERGGMASPAKRVPLSSQTGTAALPYPLKKKNGKILYECNICGKSFGQLSNLKVHLRVHSGERPFQCALCQKSFTQLAHLQKHHLVHTGERPHKCSIPWVPGRNHWKSFQAWREREVCHKRFSSSSNLKTHLRLHSGARPFQCSVCRSRFTQHIHLKLHHRLHAPQPCGLVHTQLPLASLACLAQWHQGALDLMAVASEKHMGYDIDEVKVSSTSQGKARAVSLSSAGTPLVMGQDQNN

SEQ ID NO: 6056 - protein, 299 aa, Homo sapiens
SLPHVSDVNECASQPCQNGGTCTHGINSFRCQCPAGFGGPTCETAQSPCDTKECQHGGQCQVENGSAVCVCQAGYTGAACEMDVDDCSPDPCLNGGSCVDLVGNYTCLCAEPFKGLRCETGDHPVPDACLSAPCHNGGTCVDADQGYVCECPEGFMGLDCRERVPDDCECRNGGRCLGANTTLCQCPLGFFGLLCEFEITAMPCNMNTQCPDGGYCMEHGGSYLCVCHTDHNASHSLPSPCDSDPCFNGGSCDAHDDSYTCECPRGFHGKHCEKARPHLCSSGPCRNGGTCKEAGGEYH

SEQ ID NO: 6057 - protein, 1523 aa, Homo sapiens
MAAVGSGGYARNDAGEKLPSVMAGVPARRGQSSPPPAPPICLRRRTRLSTASEETVQNRVSLEKVLGITAQNSSGLTCDPGTGHVAYLAGCVVVILDPKENKQQHIFNTARKSLSALAFSPDGKYIVTGENGHRPAVRIWDVEEKNQVAEMLGHKYGVACVAFSPNMKHIVSMGYQHDMVLNVWDWKKDIVVASNKVSCRVIALSFSEDSSYFVTVGNRHVRFWFLEVSTETKVTSTVPLVGRSGILGELHNNIFCGVACGRGRMAGSTFCVSYSGLLCQFNEKRVLEKWINLKVSLSSCLCVSQELIFCGCTDGIVRIFQAHSLHYLANLPKPHYLGVDVAQGLEPSFLFHRKAEAVYPDTVALTFDPIHQWLSCVYKDHSIYIWDVKDINRVGKVWSELFHSSYVWNVEVYPEFEDQRACLPSGSFLTCSSDNTIRFWNLDSSPDSHWQKNIFSNTLLKVVYVENDIQHLQDMSHFPDRGSENGTPMDVKAGVRVMQVSPDGQHLASGDRSGNLRIHELHFMDELVKVEAHDAEVLCLEYSKPETGLTLLASASRDRLIHVLNVEKNYNLEQTLDDHSSSITAIKFAGNRDIQMISCGADKSIYFRSAQQGSDGLHFVRTHHVAEKTTLYDMDIDITQKYVAVACQDRNVRVYNTVNGKQKKCYKGSQGDEGSLLKVHVDPSGTFLATSCSDKSISVIDFYSGECIAKMFGHSEIITSMKFTYDCHHLITVSGDSCVFIWHLGPEITNCMKQHLLEIDHRQQQQHTNDKKRSGHPRQDTYVSTPSEIHSLSPGEQTEDDLEEECEPEEMLKTPSKDSLDPDPRCLLTNGKLPLWAKRLLGDDDVADGLAFHAKRSYQPHGRWAERAGQEPLKTILDAQDLDCYFTPMKPESLENSILDSLEPQSLASLLSESESPQEAGRGHPSFLPQQKESSEASELILYSLEAEVTVTGTDSQYCRKEVEAGPGDQQGDSYLRVSSDSPKDQSPPEDSGESEADLECSFAAIHSPAPPPDPAPRFATSLPHFPGCAGPTEDELSLPEGPSVPSSSLPQTPEQEKFLRHHFETLTESPCRELFPAALGDVEASEAEDHFFNPRLSISTQFLSSLQKASRFTHTFPPRATQCLVKSPEVKLMDRGGSQPRAGTGYASPDRTHVLAAGKAEETLEAWRPPPPCLTSLASCVPASSVLPTDRNLPTPTSAPTPGLAQGVHAPSTCSYMEATASSRARISRSISLGDSEGPIVATLAQPLRRPSSVGELASLGQELQAITTATTPSLDSEGQEPALRSWGNHEARANLRLTLSSACDGLLQPPVDTQPGVTVPAVSFPAPSPVEESALRLHGSAFRPSLPAPESPGLPAHPSNPQLPEARPGIPGGTASLLEPTSGALGLLQGSPARWSEPWVPVEALPPSPLELSRVGNILHRLQTTFQEALDLYRVLVSSGQVDTGQQQARTELVSTFLWIHSQLEAECLVGTSVAPAQALPSPGPPSPPTLYPLASPDLQALLEHYSELLVQAVRRKARGH

SEQ ID NO: 6058 - protein, 73 aa, Homo sapiens
MLKEDCASELKVHLAKSLPLPSSVNRPRIDLIVFVVNLHSKYSLQNTEESLRHVDASFFLGKVCFLATGGGRL

SEQ ID NO: 6059 - protein, 200 aa, Homo sapiens
MAAAKDTHEDHDTSTENTDESNHDPQFEPIVSLPEQEIKTLEEDEEELFKMRAKLFRFASENDLPEWKERGTGDVKLLKHKEKGAIRLLMRRDKTLKICANHYITPMMELKPNAGSDRAWVWNTHADFADECPKPELLAIRFLNAENAQKFKTKFEECRKEIEEREKKGSGKNDHAEKVAEKLEALSVKEETKEDAEEKQ

SEQ ID NO: 6060 - protein, 346 aa, Homo sapiens
MVGGGRRVGRDEPVPSVGALGQGSPDSMSVGFIGAGQLAFALAKGFTAAGVLAAHKIMASSPDMDLATVSALRKMGVKLTPHNKETVQHSDVLFLAVKPHIIPFILDEIGADIEDRHIVVSCAAGVTISSIEKKLSAFRPAPRVIRCMTNTPVVVREGATVYATGTHAQVEDGRLMEQLLSSVGFCTEVEEDLIDAVTGLSGSGPAYAFTALDALADGGVKMGLPRRLAVRLGAQALLGAAKMLLHSEQHPGQLKDNVSSPGGATIHALHVLESGGFRSLLINAVEASCIRTRELQSMADQEQVSPAAIKKTILDKVKLDSPAGTALSPSGHTKLLPRSLAPAGKD

SEQ ID NO: 6061 - protein, 520 aa, Homo sapiens
MFVSDFRKEFYEVVQSQRVLLFVASDVDALCACKILQALFQCDHVQYTLVPVSGWQELETAFLEHKEQIKLLIKQDDDLEVPAYEDIFRDEEEDEEHSGNDSDGSEPSEKRTRLEEEIVEQTMRRRQRREWEARRRDILFDYEQYEYHGTSSAMVMFELAWMLSKDLNDMLWWAIVGLTDQWVQDKITQMKYVTDVGVLQRHVSRHNHRNEDEENTLSVDCTRISFEYDLRLVLYQHWSLHDSLCNTSYTAARFKLWSVHGQKRLQEFLADMGLPLKQVKQKFQAMDISLKENLREMIEESANKFGMKDMRVQTFSIHFGFKHKFLASDVVFATMSLMESPEKDGSGTDHFIQALDSLSRSNLDKLYHGLELAKKQLRATQQTIASCLCTNLVISQGPFLYCSLMEGTPDVMLFSRPASLSLLSKHLLKSFVCSTKNRRCKLLPLVMAAPLSMEHGTVTVVGIPPETDSSDRKNFFGRAFEKAAESTSSRMLHNHFDLSVIELKAEDRSKFLDALISLLS

SEQ ID NO: 6062 - protein, 515 aa, Homo sapiens
MAKSNGENGPRAPAAGESLSGTRESLAQGPDAATTDELSSLGSDSEANGFAERRIDKFGFIVGSQGAEGAPCPLLHRLEEVPLEVLRQRESKWLDMLNNWDKWMAKKHKKIRLRCQKGIPPSLRGRAWQYLSGGKVKLQQNPGKFDELDMSPGDPKWLDVIERDLHRQFPFHEMFVSRGGHGQQDLFRVLKAYTLYRPEEGYCQAQAPIAAVLLMHMPAEQAFWCLVQICEKYLPGYYSEKLEAIQLDGEILFSLLQKVSPVAHKHLSRQKIDPLLYMTEWFMCAFSRTLPWSSVLRVWDMFFCEGVKIIFRVGLVLLKHALGSPEKVKACQGQYETIERLRSLSPKIMQEAFLVQEVVELPVTERQIEREHLIQLRRWQETRGELQCRSPPRLHGAKAILDAEPGPRPALQPSPSIRLPLDAPLPGSKAKPKPPKQAQKEQRKQMKGRGQLEKPPAPNQAMVVAAAGDACPPQHVPPKDSAPKDSAPQDLAPQVSAHHRSQESLTSQESEDTYL

SEQ ID NO: 6063 - protein, 194 aa, Homo sapiens [sequence omitted]

SEQ ID NO: 6064 - protein, 217 aa, Homo sapiens
MAAHGKLRRERGLQAEYETQVKEMRWQLSEQLRCLELQGELRRELLQELAEFMRRRAEVELEYSRGLEKLAERFSSRGGRLGSSREHQSFRKEPSLLSPLHCWAVLLQHTRQQSRESAALSEVLAGPLAQRLSHIAEDVGRLVKKSRDLEQQLQDELLEVVSELQTHHLALGLPAGQEDVPGISHGERECRGQAPGGRAAGGEAGRPECPHHHRWCH

SEQ ID NO: 6065 - protein, 420 aa, Homo sapiens
MLNNWDKWMAKKHKKIRLRCQKGIPPSLRGRAWQYLSGGKVKLQQNPGKFDELDMSPGDPKWLDVIERDLHRQFPFHEMFVSRGGHGQQDLFRVLKAYTLYRPEEGYCQAQAPIAAVLLMHMPAEQAFWCLVQICEKYLPGYYSEKLEAIQLDGEILFSLLQKVSPVAHKHLSRQKIDPLLYMTEWFMCAFSRTLPWSSVLRVWDMFFCEGVKIIFRVGLVLLKHALGSPEKVKACQGQYETIERLRSLSPKIMQEAFLVQEVVELPVTERQIEREHLIQLRRWQETRGELQCRSPPRLHGAKAILDAEPGPRPALQPSPSIRLPLDAPLPGSKAKPKPPKQAQKEQRKQMKGRGQLEKPPAPNQAMVVAAAGDACPPQHVPPKDSAPKDSAPQDLAPQVSAHHRSQESLTSQESEDTYL

SEQ ID NO: 6066 - protein, 490 aa, Homo sapiens
MNPQIRNPMERMYRDTFYDNFENEPILYGRSYTWLCYEVKIKRGRSNLLWDTGVFRGQVYFKPQYHAEMCFLSWFCGNQLPAYKCFQITWFVSWTPCPDCVAKLAEFLSEHPNVTLTISAARLYYYWERDYRRALCRLSQAGARVTIMDYEEFAYCWENFVYNEGQQFMPWYKFDENYAFLHRTLKEILRYLMDPDTFTFNFNNDPLVLRRRQTYLCYEVERLDNGTWVLMDQHMGFLCNEAKNLLCGFYGRHAELRFLDLVPSLQLDPAQIYRVTWFISWSPCFSWGCAGEVRAFLQENTHVRLRIFAARIYDYDPLYKEALQMLRDAGAQVSIMTYDEFEYCWDTFVYRQGCPFQPWDGLEEHSQALSGRLRAILQVRASSLCLVPHRPPPPPRSPVPCLPLCSEPPLGSLLPTGRPAPSLPFLLTASFSFPPPASLPPLPSLSLSPGHLPVPSFHSLTSCSIQPPCSSRIRETEGWASVSKEGRDLG

SEQ ID NO: 6067 - protein, 224 aa, Homo sapiens
MASPQLCRALVSAQWVAEALRAPRAGQPLQLLDASWYLPKLGRDARREFEERHIPGAAFFDIDQCSDRTSPYDHMLPGAEHFAEYAGRLGVGAATHVVIYDASDQGLYSAPRVWWMFRAFGHHAVSLLDGGLRHWLRQNLPLSSGKSQPAPAEFRAQLDPAFIKTYEDIKENLESRRFQVVDSRATGRFRGTEPEPRDGSGSTAQAGVQWHNHGSLQPQPPGLR

SEQ ID NO: 6068 - protein, 357 aa, Homo sapiens
MNPQIRNPMERMYRDTFYDNFENEPILYGRSYTWLCYEVKIKRGRSNLLWDTGVFRGQVYFKPQYHAEMCFLSWFCGNQLPAYKCFQITWFVSWTPCPDCVAKLAEFLSEHPNVTLTISAARLYYYWERDYRRALCRLSQAGARVTIMDYEEFAYCWENFVYNEGQQFMPWYKFDENYAFLHRTLKEILRYLMDPDTFTFNFNNDPLVLRRRQTYLCYEVERLDNGTWVLMDQHMGFLCNELDPAQIYRVTWFISWSPCFSWGCAGEVRAFLQENTHVRLRIFAARIYDYDPLYKEALQMLRDAGAQVSIMTYDEFEYCWDTFVYRQGCPFQPWDGLEEHSQALSGRLRAILQNQGN

SEQ ID NO: 6069 - protein, 392 aa, Homo sapiens
MSGRVGDLSPRQKEALAKFRENVQDVLPALPNPDDYFLLRWLRARSFDLQKSEAMLRKHVEFRKQKDIDNIISWQPPEVIQQYLSGGMCGYDLDGCPVWYDIIGPLDAKGLLFSASKQDLLRTKMRECELLLQECAHQTTKLGRKVETITIIYDCEGLGLKHLWKPAVEAYGEFLCMFEENYPETLKRLFVVKAPKLFPVAYNLIKPFLSEDTRKKIMVLGANWKEVLLKHISPDQVPVEYGGTMTDPDGNPKCKSKINYGGDIPRKYYVRDQVKQQYEHSVQISRGSSHQVEYEILFPGCVLRWQFMSDGADVGFGIFLKTKMGERQRAGEMTEVLPNQRYNSHLVPEDGTLTCSDPGICKYLCLGNALKPHVQLSACEVPLPPWIFGSEC

SEQ ID NO: 6070 - protein, 234 aa, Homo sapiens
MLLEPGRGCCALAILLAIVDIQSGGCINITSSASQEGTRLNLICTVWHKKEEAEGFVVFLCKDRSGDCSPETSLKQLRLKRDPGIDGVGEISSQLMFTISQVTPLHSGTYQCCARSQKSGIRLQGHFFSILFTETGNYTVTGLKQRQHLEFSHNEGTLSSGFLQEKVWVMLVTSLVALQGMSKRAVSTPSNEGAIIFLPPWLFSRRRRLERMSRGREKCYSSPGYPQESSNQFH

SEQ ID NO: 6071 - protein, 398 aa, Homo sapiens
MRRRQRREWEARRRDILFDYEQYEYHGTSSAMVMFELAWMLSKDLNDMLWWAIVGLTDQWVQDKITQMKYVTDVGVLQRHVSRHNHRNEDEENTLSVDCTRISFEYDLRLVLYQHWSLHDSLCNTSYTAARFKLWSVHGQKRLQEFLADMGLPLKQVKQKFQAMDISLKENLREMIEESANKFGMKDMRVQTFSIHFGFKHKFLASDVVFATMSLMESPEKDGSGTDHFIQALDSLSRSNLDKLYHGLELAKKQLRATQQTIASCLCTNLVISQGPFLYCSLMEGTPDVMLFSRPASLSLLSKHLLKSFVCSTKNRRCKLLPLVMAAPLSMEHGTVTVVGIPPETDSSDRKNFFGRAFEKAAESTSSRMLHNHFDLSVIELKAEDRSKFLDALISLLS

SEQ ID NO: 6072 - protein, 149 aa, Homo sapiens
SYHSSGEYSSDFLTPEFVKFSMDLTNTEITATTSLPSFSTFMDNYSTGYDVKPPCLYQMPLSGQQSSIKRTVQKNAKYVCLANKNCPVDKRRRNRCQYCRFQKCLAVGMVKEVVRTDSLKGRRGRLPSKPKSPQEPSPPSPPVSLISAL

SEQ ID NO: 6073 - protein, 709 aa, Homo sapiens
MADAGIRRVVPSDLYPLVLGFLRDNQLSEVANKFAKATGATQQDANASSLLDIYSFWLKSAKVPERKLQANGPVAKKAKKKASSSDSEDSSEEEEEVQGPPAKKAAVPAKRVGLPPGKAAAKASESSSSEESSDDDDEEDQKKQPVQKGVKPQAKAAKAPPKKAKSSDSDSDSSSEDEPPKNQKPKITPVTVKAQTKAPPKPARAAPKIANGKAASSSSSSSSSSSSDDSEEEKAAATPKKVWTITSVRAETVPKKQVVAKAPVKAATTPTRKSSSSEDSSSDEEEEQKKPMKNKPGPYSSVPPPSAPPPKKSLGTQPPKKAVEKQQPVESSEDSSDESDSSSEEEKKPPTKAVVSKATTKPPPAKKAAESSSDSSDSDSSEDDEAPSKPAGTTKNSSNKPAVTTKSPAVKPAAAPKQPVGGGQKLLTRKADSSSSEEESSSSEEEKTKKMVATTKPKATAKAALSLPAKQAPQGSRDSSSDSDSSSSEEEEEKTSKSAVKKKPQKVAGGAAPSKPASAKKGKAESSNSSSSDDSSEEEEEKLKGKGSPRPQAPKANGTSALTAQNGKAAKNSEEEEEEKKKAAVVVSKSGSLKKRKQNEAAKEAETPQAKKIKLQTPNTFPKRKKGEKRASSPFRRVREEEIEVDSRVADNSFDAKRGAAGDWGERANQVLKFTKGKSFRHEKTKKKRGSYRGGSISVQVNSIKFDSE

SEQ ID NO: 6074 - protein, 288 aa, Homo sapiens
MSVGFIGAGQLAFALAKGFTAAGVLAAHKIMASSPDMDLATVSALRKMGVKLTPHNKETVQHSDVLFLAVKPHIIPFILDEIGADIEDRHIVVSCAAGVTISSIEKKLSAFRPAPRVIRCMTNTPVVVREGATVYATGTHAQVEDGRLMEQLLSSVGFCTEVEEDLIDAVTGLSGSGPAYGAAKMLLHSEQHPGQLKDNVSSPGGATIHALHVLESGGFRSLLINAVEASCIRTRELQSMADQEQVSPAAIKKTILDKVKLDSPAGTALSPSGHTKLLPRSLAPAGKD

SEQ ID NO: 6075 - protein, 718 aa, Homo sapiens
MSRGYSENNNFLNNNNQMVLDMILYPLIGIPQTINWETIARLVPGLTPKECAKRFDELKSSGSSPVDNQYNSLMAAGESPVETLATYIKSSLLDIHGEFQETPVGHDAVSKTGRHSIASTRNCSSESENCTTHNGGEMTEESEGPNMVIHVCDEAKNLKEDFTCPRDLLISEMKYFAEYLSMDAQRWEEVDISVHCDVHIFNWLIKYIKRNTKENKDCEMPTLEPGNVISILISSEFLKMDSLVEQCIQYCHKNMNAIVATPCNMNCINANLLTRIADLFSHNEVDDLKDKKDKFKSKLFCKKIERLFDPEYLNPDSRSNAATLYRCCLCKKLLTKETERRIPCIPGKINVDRRGNIVYIHIRDKTWDVHEYLNSLFEELKSWRDVYWRLWGTINWLTCSRCYQAFLCIEFSHCQYHSETVVYPTAASSLNTVGTGIYPCCNQKVLRFDPTQLTKGCKVRDHMVTLRDQGEGGDLPSCPTARMLDDLHKYRDVIVVPFSKDTVSDVGVGLCDEKGIECDVLLEPNTPWGPKTGELNAFLSLKNWTLQLKQQSLFSEEEEYTTGSEVTEDEVGDEEEVSKKQRKKEKPKKFTRQPKKQVSSPCAQRKEKALEKSASRDVSPFVMSMQKNKWDATRSLRFNQDAQREDDQRRMTEITGHLIKMRLGDLDRVKSKEAKEFAGGIYSRLEAQIKASVPVSARQSSSEKNTRSKSRFGQGRPA

SEQ ID NO: 6076 - protein, 482 aa, Homo sapiens
MEVCYQLPVLPLDRPVPQHVLSRRGAISFSSSSALFGCPNPRQLSQRRGAISYDSSDQTALYIRMLGDVRVRSRAGFESERRGSHPYIDFRIFHSQSEIEVSVSARNIRRLLSFQRYLRSSRFFRGTAVSNSLNILDDDYNGQAKCMLEKVGNWNFDIFLFDRLTNGNSLVSLTFHLFSLHGLIEYFHLDMMKLRRFLVMIQEDYHSQNPYHNAVHAADVTQAMHCYLKEPKLANSVTPWDILLSLIAAATHDLDHPGVNQPFLIKTNHYLATLYKNTSVLENHHWRSAVGLLRESGLFSHLPLESRQQMETQIGALILATDISRQNEYLSLFRSHLDRGDLCLEDTRHRHLVLQMALKCADICNPCRTWELSKQWSEKVTEEFFHQGDIEKKYHLGVSPLCDRHTESIANIQIGFMTYLVEPLFTEWARFSNTRLSQTMLGHVGLNKASWKGLQREQSSSEDTDAAFELNSQLLPQENRLS

SEQ ID NO: 6077 - protein, 307 aa, Homo sapiens
MSGRRTRSGGAAQRSGPRAPSPTKPLRRSQRKSGSELPSILPEIWPKTPSAAAVRKPIVLKRIVAHAVEVPAVQSPRRSPRISFFLEKENEPPGRELTKEDLFKTHSVPATPTSTPVPNPEAESSSKEGELDARDLEMSKKVRRSYSRLETLGSASTSTPGRRSCFGFEGLLGAEDLSGVSPVVCSKLTEVPRVCAKPWAPDMTLPGISPPPEKQKRKKKKMPEILVSERQGFFSAVCSGRRAGLGLWLFWGIGSTCRVWVRCSSHHVPFSLTCSSFLFPQKTELDEWAAAMNAEFEAAEQFDLLVE

SEQ ID NO: 6078 - protein, 187 aa, Homo sapiens
MFSSSAKIVKPNGEKPDEFESGISQALLELEMNSDLKAQLRELNITAAKEIEVGGGRKAIIIFVPVPQLKSFQKIQVRLVRELEKKFSGKHVVFIAQRRILPKPTRKSRTKNKQKRPRSRTLTAVHDAILEDLVFPSEIVGKRIRVKLDGSRLIKVHLDKAQQNNVEHKVIGQHFIMERFSHSESGF

SEQ ID NO: 6079 - protein, 200 aa, Homo sapiens
MALLTAETFRLQFNNKRRLRRPYYPRKALLCYQLTPQNGSTPTRGYFENKKKCHAEICFINEIKSMGLDETQCYQVTCYLTWSPCSSCAWELVDFIKAHDHLNLGIFASRLYYHWCKPQQKGLRLLCGSQVPVEVMGFPEFADCWENFVDHEKPLSFNPYKMLEELDKNSRAIKRRLERIKIPGVRAQGRYMDILCDAEV

SEQ ID NO: 6080 - protein, 366 aa, Homo sapiens
MAAARHSTLDFMLGAKADGETILKGLQSIFQEQGMAESVHTWQDHGYLATYTNKNGSFANLRIYPHGLVLLDLQSYDGDAQGKEEIDSILNKVEERMKELSQDSTGRVKRLPPIVRGGAIDRYWPTADGRLVEYDIDEVVYDEDSPYQNIKILHSKQFGNILILSGDVNLAESDLAYTRAIMGSGKEDYTGKDVLILGGGDGGILCEIVKLKPKMVTMVEIDQMVIDGCKKYMRKTCGDVLDNLKGDCYQVLIEDCIPVLKRYAKEGREFDYVINDLTAVPISTSPEEDSTWEFLRLILDLSMKVLKQDGKYFTQGNCVNLTEALSLYEEQLGRLYCPVEFSKEIVCVPSYLELWVFYTVWKKAKP

SEQ ID NO: 6081 - protein, 272 aa, Homo sapiens
MTHIVREVDRPGSKVNKKEVVEAVTIVETPPMVVVGIVGYVETPRGLRTFKTVFAEHISDECKRRFYKNWHKSKKKAFTKYCKKWQDEDGKKQLEKDFSSMKKYCQVIRVIAHTQMRLLPLRQKKAHLMEIQVNGGTVAEKLDWARERLEQQVPVNQVFGQDEMIDVIGVTKGKGYKGVTSRWHTKKLPRKTHRGLRKVACIGAWHPARVAFSVARAGQKGYHHRTEINKKIYKIGQGYLIKDGKLIKNNASTDYDLSDKSINPLGGFVHYG

SEQ ID NO: 6082 - protein, 612 aa, Homo sapiens
MEIPAPEPEKTALSSQDPALSLKENLEDISGWGLPEARSKESVSFKDVAVDFTQEEWGQLDSPQRALYRDVMLENYQNLLALEWELKAVPSQQQGICKEEPAQEPIMERPLGGAQAWGRQAGALQRSQAAPWAPAPAMVWDVPVEEFPLRCPLFAQQRVPEGGPLLDTRKNVQATEGRTKAPARLCAGENASTPSEPEKFPQVRRQRGAGAGEGEFVCGECGKAFRQSSSLTLHRRWHSREKAYKCDECGKAFTWSTNLLEHRRIHTGEKPFFCGECGKAFSCHSSLNVHQRIHTGERPYKCSACEKAFSCSSLLSMHLRVHTGEKPYRCGECGKAFNQRTHLTRHHRIHTGEKPYQCGSCGKAFTCHSSLTVHEKIHSGDKPFKCSDCEKAFNSRSRLTLHQRTHTGEKPFKCADCGKGFSCHAYLLVHRRIHSGEKPFKCNECGKAFSSHAYLIVHRRIHTGEKPFDCSQCWKAFSCHSSLIVHQRIHTGEKPYKCSECGRAFSQNHCLIKHQKIHSGEKSFKCEKCGEMFNWSSHLTEHQRLHSEGKPLAIQFNKHLLSTYYVPGSLLGAGDAGLRDVDPIDALDVAKLLCVVPPRAGRNFSLGSKPRN

SEQ ID NO: 6083 - protein, 291 aa, Homo sapiens
MELHILEHRVRVLSVARPGLWLYTHPLIKLLFLPRRSRCKFFSLTETPEDYTLMVDEEGFKELPPSEFLQVAEATWLVLNVSSHSGAAVQAAGVTKIARSVIAPLAEHHVSVLMLSTYQTDFILVREQDLSVVIHTLAQEFDIYREVGGEPVPVTRDDSSNGFPRTQHGPSPTVHPIQSPQNRFCVLTLDPETLPAIATTLIDVLFYSHRFPSDLLLTSSSGELWRMVRIGGQPLGFDECGIVAQIAGPLAAADISAYYISTFNFDHALVPEDGIGSVIEVLQRRQEGLAS

SEQ ID NO: 6084 - protein, 79 aa, Homo sapiens
MASQNRDPAATSVAAARKGAEPSGGAARGPVGKRLQQELMTLMMSGDKGISAFPESDNLFKWVGTIHGAAGTNPTLIVP

SEQ ID NO: 6085 - protein, 253 aa, Homo sapiens
MSVGFIGAGQLAFALAKGFTAAGVLAAHKIMASSPDMDLATVSALRKMGVKLTPHNKETVQHSDVLFLAVKPHIIPFILDEIGADIEDRHIVVSCAAGVTISSIEKKLSAFRPAPRVIRCMTNTPVVVREGATVYATGTHAQVEDGRLMEQLLSSVGFCTEVEEDLIDAVTGLSGSGPAYAFTALDALADGGVKMGLPRRLAVRLGAQALLGAAKMLLHSEQHPGQLKDNVSSPGGATIHALHVLESGGFRSL

SEQ ID NO: 6086 - protein, 169 aa, Homo sapiens
MFDGYDSCSEDTSSSSSSEESEEEVAPLPSNLPIIKNNGQVYTYPDGKSGMATCEMCGMVGVRDAFYSKTKRFCSVSCSRSYSSNSKKASILARLQGKPPTKKAKVLQKQPLVAKLAAYAQYQATLQNQAKTKAAVSMEGFSWGNYINSNSFIAAPVTCFKHGRRVAPR

SEQ ID NO: 6087 - protein, 2568 aa, Homo sapiens
MAISSRLALWEQKIREEDKSPPPSSPPPLFSVIPGGFIKQLVRGTEKEAKEARQRKQLAVASPEREIPEISISQPNSKSSSGTRSGSQQISQDDQSSSPGSSDILGKESEGSRSPDPEQMTSINGEKAQELGSSATPTKKTVPFKRGVRRGDVLLMVAKLDPDSAKPEKTHPHDAPPCKTSPPATDTGKEKKGETSRTPCGSQASTEILAPKAEKTRTGGLGDPGQGTVALKKGEEGQSIVGKGLGTPKTTELKEAEPQGKDRQGTRPQAQGPGEGVRPGKAEKEGAEPTNTVEKGNVSKDVGSEGKHVRPQIPGRKWGGFLGRRSKWDGPQNKKDKEGVLLSKAEKTGEPQTQMEKTSQVQGELGDDLRMGEKAGELRSTTGKAGESWDKKEKMGQPQGKSGNAGEARSQTEKGCEAPKEVSTMVESPAAPGKGGWPGSRGQEAEEPCSRAGDGAGALETELEGPSQPALEKDAERPRIRKENQDGPAPQEEGKGGQSRDSDQAPEDRWYEAEKVWLAQKDGFTLATVLKPDEGTADLPAGRVRLWIDADKTITEVDEEHVHRANPPELDQVEDLASLISVNESSVLNTLLQRYKAQLLHTCTGPDLIVLQPRGPSVPSAGKVPKGRRDGLPAHIGSMAQRAYWALLNQRRDQSIVALGWSGAGKTTCCEQVLEHLVGMAGSVDGRVSVEKIRATFTVLRAFGSVSMAHSRSATRFSMVMSLDFNATGRITAAQLQTMLLEKSRVARQPEGESNFLVFSQMLAGLDLDLRTELNLHQMADSSSFGMGVWSKPEDKQKAAAAFAQLQGAMEMLGISESEQRAVWRVLAAIYHLGAAGACKVGRKQFMRFEWANYAAEALGCEYEELNTATFKHHLRQIIQQMTFGPSRWGLEDEETSSGLKMTGVDCVEGMASGLYQELFAAVVSLINRSFSSHHLSMASIMVVDSPGFQNPRHQGKDRAATFEELCHNYAHERLQLLFYQRTFVSTLQRYQEEGVPVQFDLPDPSPGTTVAVVDQNPSQQVRLPAGGGAQDARGLFWVLDEEVHVEGSSDSVVLERLCAAFEKKGAGTEGSSALRTCEQPLQCEIFHQLGWDPVRYDLTGWLHRAKPNLSALDAPQVLHQSKREELRSLFQARAKLPPVCRAVAGLEGTSQQALQRSRMVRRTFASSLAAVRRKAPCSQIKLQMDALTSMIKRSRLHFIHCLVPNPVVESRSGQESPPPPQPGRDKPGAGGPLALDIPALRVQLAGFHILEALRLHRTGYADHMGLTRFRRQFQVLDAPLLKKLMSTSEGIDERKAVEELLETLDLEKKAVAVGHSQVFLKAGVISRLEKQREKLVSQSIVLFQAACKGFLSRQEFKKLKIRRLAAQCIQKNVAVFLAVKDWPWWQLLGSLQPLLSATIGTEQLRAKEEELTTLRRKLEKSEKLRNELRQNTDLLESKIADLTSDLADERFKGDVACQVLESERAERLQAFREVQELKSKHEQVQKKLGDVNKQLEEAQQKIQLNDLERNPTGGADEWQMRFDCAQMENEFLRKRLQQCEERLDSELTARKELEQKLGELQSAYDGAKKMAHQLKRKCHHLTCDLEDTCVLLENQQSRNHELEKKQKKFDLQLAQALGESVFEKGLREKVTQENTSVRWELGQLQQQLKQKEQEASQLKQQVEMLQDHKRELLGSPSLGENCVAGLKERLWKLESSALEQQKIQSQQENTIKQLEQLRQRFELEIERMKQMHQKDREDQEEELEDVRQSCQKRLHQLEMQLEQEYEEKQMVLHEKQDLEGLIGTLCDQIGHRDFDVEKRLRRDLRRTHALLSDVQLLLGTMEDGKTSVSKEELEKVHSQLEQSEAKCEEALKTQKVLTADLESMHSELENMTRNKSLVDEQLYRLQFEKADLLKRIDEDQDDLNELMQKHKDLIAQSAADIGQIQELQLQLEEAKKEKHKLQEQLQVAQMRIEYLEQSTVDRAIVSRQEAVICDLENKTEFQKVQIKRFEVLVIRLRDSLIKMGEELSQAATSESQQRESSQYYQRRLEELKADMEELVQREAEASRRCMELEKYVEELAAVRQTLQTDLETSIRRIADLQAALEEVASSDSDTESVQTAVDCGSSGRKEMDNVSILSSQPEGSLQSWLSCTLSLATDTMRTPSRQSATSSRILSPRINEEAGDTERTQSALALSRARSTNVHSKTSGDKPVSPHFVRRQKYCHFGDGEVLAVQRKSTERLEPASSPLASRSTNTSPLSREKLPSPSAALSEFVEGLRRKRAQRGQGSTLGLEDWPTLPIYQTTGASTLRRGRAGSDEGNLSLRVGAKSPLEIEGAAGGLLRSTSLKCISSDGVGGTTLLPEKSKTQFSSCESLLESRPSMGRKLSSPTTPRDMLLSPTLRPRRRCLESSVDDAGCPDLGKEPLVFQNRQFAHLMEEPLGSDPFSWKLPSLDYERKTKVDFDDFLPAIRKPQTPTSLAGSAKGGQDGSQRSSIHFETEEANRSFLSGIKTILKKSPEPKEDPAHLSDSSSSSGSIVSFKSADSIKSRPGIPRLAGDGGERTSPERREPGTGRKDDDVASIMKKYLQK

SEQ ID NO: 6088 - protein, 351 aa, Homo sapiens
MTHIVREVDRPGSKVNKKEVVEAVTIVETPPMVVVGIVGYVETPRGLRTFKTVFAEHISDECKRRFYKNWHKSKKKAFTKYCKKWQDEDGKKQLEKDFSSMKKYCQVIRVIAHTQMRLLPLRQKKAHLMEIQVNGGTVAEKLDWARERLEQQVPVNQVFGQDEMIDVIGVTKGKGYKGVTSRWHTKKLPRKTHRGLRKVACIGAWHPARVAFSVARAGQKGYHHRTEINKKIYKIGQGYLIKDGKLIKNNASTDYDLSDKSINPLGGFVHYGEVTNDFVMLKGCVVGTKKRVLTLRKSLLVQTKRRALEKIDLKFIDTTSKFGHGRFQTMEEKKAFMGPLKKDRIAKEEGA

SEQ ID NO: 6089 - protein, 469 aa, Homo sapiens
MFSEQAAQRAHTLLSPPSANNATFARVPVATYTNSSQPFRLGERSFSRQYAHIYATRLIQMRPFLENRAQQHWGSGVGVKKLCELQPEEKCCVVGTLFKAMPLQPSILREVSEEHNLLPQPPRSKYIHPDDELVLEDELQRIKLKGTIDVSKLVTGTVLAVFGSVRDDGKFLVEDYCFADLAPQKPAPPLDTDRFVLLVSGLGLGGGGGESLLGTQLLVDVVTGQLGDEGEQCSAAHVSRVILAGNLLSHSTQSRDSINKAKYLTKKTQAASVEAVKMLDEILLQLSASVPVDVMPGEFDPTNYTLPQQPLHPCMFPLATAYSTLQLVTNPYQATIDGVRFLGTSGQNVSDIFRYSSMEDHLEILEWTLRVRHISPTAPDTLGCYPFYKTDPFIFPECPHVYFCGNTPSFGSKIIRGPEDQTVLLVTVPDFSATQTACLVNLRSLACQPISFSGFGAEDDDLGGLGLGP

SEQ ID NO: 6090 - protein, 269 aa, Homo sapiens
MSAALFSLDGPARGAPWPAEPAPFYEPGRAGKPGRGAEPGALGEPGAAAPAMYDDESAIDFSAYIDSMAAVPTLELCHDELFADLFNSNHKAGGAGPLELLPGGPARPLGPGPAAPRLLKREPDWGDGDAPGSLLPAQVAACAQTVVSLAAAGQPTPPTSPEPPRSSPRQTPAPGPAREKSAGKRGPDRGSPEYRQRRERNNIAVRKSRDKAKRRNQEMQQKLVELSAENEKLHQRVEQLTRDLAGLRQFFKQLPSPPFLPAAGTADCR

SEQ ID NO: 6091 - protein, 290 aa, Homo sapiens
MLGQRAGDGERPGLPGDGEGGVPARPGRRAERPPQRPAKVNKAVTCAAHLPGAAASRPLSPNKPDRVRPGQRDRIGAKRQRRRRADAGQARAASSRRVVPTAPEVLGAVASLPDRGRPTVARVATGSRLEGLFSAASLKLSALTQSLTRVRQAPTASGATIRLPASPVEMFLTSAFLTGFSFHCLYSGIGHGEDILASVEQITIVSRPLSGQRGAGPGNSAYTPRRSQGGPRAATTPGFRFPCRGLVRRAVLRLTVTVQDCILTALLAVSFHSIGVVIMTSSYLLGPVVK

SEQ ID NO: 6092 - protein, 1378 aa, Homo sapiens
MSLERELRQLSKAKAKAQRAGQRREEAALCHQLGELLAGHGRYAEALEQHWQELQLRERADDPLGCAVAHRKIGERLAEMEDYPAALQHQHQYLELAHSLRNHTELQRAWATIGRTHLDIYDHCQSRDALLQAQAAFEKSLAIVDEELEGTLAQGELNEMRTRLYLNLGLTFESLQQTALCNDYFRKSIFLAEQNHLYEDLFRARYNLGTIHWRAGQHSQAMRCLEGARECAHTMRKRFMESECCVVIAQVLQDLGDFLAAKRALKKAYRLGSQKPVQRAAICQNLQHVLAVVRLQQQLEEAEGRDPQGAMVICEQLGDLFSKAGDFPRAAEAYQKQLRFAELLDRPGAERAIIHVSLATTLGDMKDHHGAVRHYEEELRLRSGNVLEEAKTWLNIALSREEAGDAYELLAPCFQKALSCAQQAQRPQLQRQVLQHLHTVQLRLQPQEAPETETRLRELSVAEDEDEEEEAEEAAATAESEALEAGEVELSEGEDDTDGLTPQLEEDEELQGHLGRRKGSKWNRRNDMGETLLHRACIEGQLRRVQDLVRQGHPLNPRDYCGWTPLHEACNYGHLEIVRFLLDHGAAVDDPGGQGCEGITPLHDALNCGHFEVAELLLERGASVTLRTRKGLSPLETLQQWVKLYRRDLDLETRQKARAMEMLLQAAASGQDPHSSQAFHTPSSLLFDPETSPPLSPCPEPPSNSTRLPEASQAHVRVSPGQAAPAMARPRRSRHGPASSSSSSEGEDSAGPARPSQKRPRCSATAQRVAAWTPGPASNREAATASTSRAAYQAAIRGVGSAQSRLGPGPPRGHSKALAPQAALIPEEECLAGDWLELDMPLTRSRRPRPRGTGDNRRPSSTSGSDSEESRPRARAKQVRLTCMQSCSAPVNAGPSSLASEPPGSPSTPRVSEPSGDSSAAGQPLGPAPPPPIRVRVQVQDHLFLIPVPHSSDTHSVAWLAEQAAQRYYQTCGLLPRLTLRKEGALLAPQDLIPDVLQSNDEVLAEVTSWDLPPLTDRYRRACQSLGQGEHQQVLQAVELQGLGLSFSACSLALDQAQLTPLLRALKLHTALRELRLAGNRLGDKCVAELVAALGTMPSLALLDLSSNHLGPEGLRQLAMGLPGQATLQSLEELDLSMNPLGDGCGQSLASLLHACPLLSTLRLQACGFGPSFFLSHQTALGSAFQDAEHLKTLSLSYNALGAPALARTLQSLPAGTLLHLELSSVAAGKGDSDLMEPVFRYLAKEGCALAHLTLSANHLGDKAVRDLCRCLSLCPSLISLDLSANPEISCASLEELLSTLQKRPQGLSFLGLSGCAVQGPLGLGLWDKIAAQLRELQLCSRRLCAEDRDALRQLQPSRPGPGECTLDHGSKLFFRRL

SEQ ID NO: 6093 - protein, 247 aa, Homo sapiens
MECPVMETGSLFTSGIKRHLKDKRISKTTKLNVSLASKIKTKILNNSSIFKISLKHNNRALAQALSREKENSRRITTEKMLLQKEVEKLNFENTFLRLKLNNLNKKLIDIEALMNNNLITAIEMSSLSEFHQSSFLLSASKKKRISKQCKLMRLPFARVPLTSNDDEDEDKEKMQCDNNIKSKTLPDIPSSGSTTQPLSTQDNSEVLFLKENNQNVYGLDDSEHISSIVDVPPRGEIVLKIHFEYLY

SEQ ID NO: 6094 - protein, 120 aa, Homo sapiens
MAPAKKGGEKKKGRSAINEVVTREYTINIHKRIHGVGFKKRAPRALKEIRKFAMKEMGTPDVRIDTRLNKAVWAKGIRNVPYRIRVRLSRKRNEDEDSPNKLYTLVTYVPVTTFKNCHHQ

SEQ ID NO: 6095 - protein, 394 aa, Homo sapiens
MAGAAMAERGRVPPPAPAPSTEGLPRAFLQSLRTLFDILDDRRRGCVHLREIESRWQGTDARELPRGVLEGLRQVAPASGYLTFERFVAGLRTSLLSADGGPRDPTRAPARPGDQPPPPPQRLVFAPADEPRTVLERKPLPLGVRAPLAGPSAAARSPEQLCAPAEAAPCPAEPERSQSAALEPSSSADAGAVACRALEADSGDARRAPRARGERRRHTIASGVDCGLLKQMKELEQEKEVLLQGLEMMARGRDWYQQQLQRVQERQRRLGQSRASADFGAAGSPRPLGRLLPKVQEVARCLGELLAAACASRALPPSSSGPPCPALTSTSPPVWQQQTILMLKEQNRLLTQEVTEKSERITQLEQEKSALIKQLFEARALSQQDGGPLDSTFI

SEQ ID NO: 6096 - protein, 299 aa, Homo sapiens
MILLAGEITSRAAVDYQKVVREAVKHIGYDDSSKGFDYKTCNVLVALEQQSPDIAQGVHLDRNEEDIGAGDQGLMFGYATDETEECMPLTIVLAHKLNAKLAELRRNGTLPWLRPDSKTQVTVQYMQDRGAVLPIRVHTIVISVQHDEEVCLDEMRDALKEKVIKAVVPAKYLDEDTIYHLQPSGRFVIGGPQGDAGLTGRKIIVDTYGGWGAHGGGAFSGKDYTKVDRSAAYAARWVAKSLVKGGLCRRVLVQVSYAIGVSHPLSISIFHYGTSQKSERELLEIVKKNFDLRPGVIVR

SEQ ID NO: 6097 - protein, 218 aa, Homo sapiens
MAAQGVGPGPGSAAPPGLEAARQKLALRRKKVLSTEEMELYELAQAAGGAIDPDVFKILVDLLKLNVAPLAVFQMLKSMCAGQRLASEPQDPAAVSLPTSSVPETREASFLSARNSSPPARPSFSSSPQPAASPVLLHSPAATHSPLSPGPPGSLRLSCCLFSPFAGRNKGSAALGGALALAERSSREGSSQRMPRQPSATRLPKGGGPGKSPTRGST

SEQ ID NO: 6098 - protein, 112 aa, Homo sapiens
MLQKREAPVPTKTKVAVDENKAKEFLGSLKRQKRQLWDRTRPEVQQWYQQFLYMGFDEAKFEDDITYWLNRDRNGHEYYGDYYQRHYDEDSAIGPRSPYGFRHGASVNYDDY

SEQ ID NO: 6099 - protein, 101 aa, Homo sapiens
MAGQAFRKFLPLFDRVLVERSAAETVTKGGIMLPEKSQGKVLQATVVAVGSGSKGKGGEIQPVSVKVGDKVLLPEYGGTKVVLDDKVCKLNNSKKKSDICN

SEQ ID NO: 6100 - protein, 652 aa, Homo sapiens
MSSQGSPSVALSTTTVSSVAVQAGDSKIVIAVIKCGKWVQLQLAESQPNLLEIGSSQDETKKLLHDHELLLAKLKALEDRVWELLQEADKTAEENKDQSQVYDAMAETLGEAWAALVSMLERRTELLRLTSEFFENALEFAIKIDQAEDFLQNTHEFESAESLKSLLQLHEHHTKELLERSLALLNKSQQLTDFIEKFKCEGPNVNPELTQGAHSSCLKVDRLLELLQDRRRQLDKYLKQQWQELSQVLQICQWDQQENQVTCWFQKTIRNLQEQSLGSSLSDNEDRIHKQEELIIKAKEWNSAVEKLKSEALRILLSKDYVEKEHLQLSHQKLSQLQEEFGQLMVERNTWLKKANEFFNSANKAFDVLGRVEAYLKLLKSEGLSLAVLAVRHEELHRKIKDCTTDALQKGQTLISQVDSCSSQVSGIHEMMGCIKRRVDHLTEQCSAHKEYALKKQQLTASVEGYLRKVEMSIQKISPVLSNAMDVGSTRSESEKILNKYLELDIQAKETSHELEAAAKTMMEKNEFVSDEMVSLSSKARWLAEELNLFGQSIDYRSQVLQTYVAFLKSSEEVEMQFQSLKEFYETEIPQKEQDDAKAKHCSDSAEKQWQLFLKKSFITQDLGLEFLNLINMVRMALNGSHLLQGYSSKSK

SEQ ID NO: 6101 - protein, 222 aa, Homo sapiens
MAATSLMSALAARLLQPAHSCSLRLRPFHLAAVRNEAVVISGRKLAQQIKQEVRQEVEEWVASGNKRPHLSVILVGENPASHSYVLNKTRAAAVVGDATVTISHRYTPKEQLKKHTILADIVISAAGIPNLITADMIKEGAAVIDVGINRVHDPVTAKPKLVGDVDFEGVRQKAGYITPVPGGVGPMTVAMLMKNTIIAAKKVLRLEEREVLKSKELGVATN

SEQ ID NO: 6102 - protein, 267 aa, Homo sapiens
MAATSLMSALAARLLQPAHSCSLRLRPFHLAAVRNEAVVISGRKLAQQIKQEVRQEVEEWVASGNKRPHLSVILVGENPASHSYVLNKTRAAAVVEHIDERRICNAVSPDKDVDGFHVINVGRMCLDQYSMLPATPWGVWEIIKRTGIPTLGKNVVVAGRSKNVGMPIAMLLHTDGAHERPGGDATVTISHRYTPKEQLKKHTILADIVISAAGVRQKAGYITPVPGGVGPMTVAMLMKNTIIAAKKVLRLEEREVLKSKELGVATN

SEQ ID NO: 6103 - protein, 218 aa, Homo sapiens
MYTAIPQSGSPFPGSVQDPGLHVWRVEKLKPVPVAQENQGVFFSGDSYLVLHNGPEEVSHLHLWIGQQSSRDEQGACAVLAVHLNTLLGERPVQHREVQGNESDLFMSYFPRGLKYQEGGVESAFHKTSTGAPAAIKKLYQVKGKKNIRATERALNWDSFNTGDCFILDLGQNIFAWCGGKSNILERNKARDLALAIRDSERQGKAQVEIVTDGEEPA

SEQ ID NO: 6104 - protein, 527 aa, Homo sapiens
MEHPSKMEFFQKLGYDREDVLRVLGKLGEGALVNDVLQELIRTGSRPGALEHPAAPRLVPRGSCGVPDSAQRGPGTALEEDFRTLASSLRPIVIDGSNVAMSHGNKETFSCRGIKLAVDWFRDRGHTYIKVFVPSWRKDPPRADTPIREQHVLAELERQAVLVYTPSRKVHGKRLVCYDDRYIVKVAYEQDGVIVSNDNYRDLQSENPEWKWFIEQRLLMFSFVNDRFMPPDDPLGRHGPSLSNFLSRKPKPPEPSWQHCPYGKKCTYGIKCKFYHPERPHHAQLAVADELRAKTGARPGAGAEEQRPPRAPGGSAGARAAPREPFAHSLPPARGSPDLAALRGSFSRLAFSDDLGPLGPPLPVPACSLTPRLGGPDWVSAGGRVPGPLSLPSPESQFSPGDLPPPPGLQLQPRGEHRPRDLHGDLLSPRRPPDDPWARPPRSDRFPGRSVWAEPAWGDGATGGLSVYATEDDEGDARARARIALYSVFPRDQVDRVMAAFPELSDLARLILLVQRCQSAGAPLGKP

SEQ ID NO: 6105 - protein, 114 aa, Homo sapiens
MFTSEKGVVEEWLSEFKTLPETSLPNYATNLKDKSSLVSSLYKVIQEPQSELLEPVCHQLFEFYRSGEEQLLQFTLQFLPELIWCYLAVSASRNVHSSGCIEALLLGVYNLVCI

SEQ ID NO: 6106 - protein, 406 aa, Homo sapiens
MDARRVPQKDLRVKKNLKKFRYVKLISMETSSSSDDSCDSFASDNFANTKPRPDVTNELAGIFHADSDDESFCGFSESEIQDGMRLQSVREGCRTRSQCRHSGPLRVAMKFPARSTRGATNKKAESRQPSENSVTDSNSDSEDESGMNFLEKRALNIKQNKAMLAKLMSELESFPGSFRGRHPLPGSDSQSRRPRRRTFPGVASRRNPERRARPLTRSRSRILGSLDALPMEEEEEEDKYMLVRKRKTVDGYMNEDDLPRSRRSRSSVTLPHIIRPVEEITEEELENVCSNSREKIYNRSLGSTCHQCRQKTIDTKTNCRNPDCWGVRGQFCGPCLRNRYGEEVRDALLDPNWHCPPCRGICNCSFCRQRDGRCATGVLVYLAKYHGFGNVHAYLKSLKQEFEMQA

SEQ ID NO: 6107 - protein, 1028 aa, Homo sapiens
MDTPENVLQMLEAHMQSYKGNDPLGEWERYIQWVEENFPENKEYLITLLEHLMKEFLDKKKYHNDPRFISYCLKFAEYNSDLHQFFEFLYNHGIGTLSSPLYIAWAGHLEAQGELQHASAVLQRGIQNQAEPREFLQQQYRLFQTRLTETHLPAQARTSEPLHNVQVLNQMITSKSNPGNNMACISKNQGSELSGVISSACDKESNMERRVITISKSEYSVHSSLASKVDVEQVVMYCKEKLIRGESEFSFEELRAQKYNQRRKHEQWVNEDRHYMKRKEANAFEEQLLKQKMDELHKKLHQVVETSHEDLPASQERSEVNPARMGPSVGSQQELRAPCLPVTYQQTPVNMEKNPREAPPVVPPLANAISAALVSPATSQSIAPPVPLKAQTVTDSMFAVASKDAGCVNKSTHEFKPQSGAEIKEGCETHKVANTSSFHTTPNTSLGMVQATPSKVQPSPTVHTKEALGFIMNMFQAPTLPDISDDKDEWQSLDQNEDAFEAQFQKNVRSSGAWGVNKIISSLSSAFHVFEDGNKENYGLPQPKNKPTGARTFGERSVSRLPSKPKEEVPHAEEFLDDSTVWGIRCNKTLAPSPKSPGDFTSAAQLASTPFHKLPVESVHILEDKENVVAKQCTQATLDSCEENMVVPSRDGKFSPIQEKSPKQALSSHMYSASLLRLSQPAAGGVLTCEAELGVEACRLTDTDAAIAEDPPDAIAGLQAEWMQMSSLGTVDAPNFIVGNPWDDKLIFKLLSGLSKPVSSYPNTFEWQCKLPAIKPKTEFQLGSKLVYVHHLLGEGAFAQVYEATQGDLNDAKNKQKFVLKVQKPANPWEFYIGTQLMERLKPSMQHMFMKFYSAHLFQNGSVLVGELYSYGTLLDDEDDLSAGLALIDLGQSIDMKLFPKGTIFTAKCETSGFQCVEMLSNKPWNYQIDYFGVAATVYCMLFGTYMKVKNEGGECKPEGLFRRLPHLDMWNEFFHVMLNIPDCHHLPSLDLLRQKLKKVFQQHYTNKIRALRNRLIVLLLECKRSRK

SEQ ID NO: 6108 - protein, 128 aa, Homo sapiens
MAPAKKGGEKKKGRSAINEVVTREYTINIHKRIHGVGFKKRAPRALKEIRKFAMKEMGTPDVRIDTRLNKAVWAKGIRNVPYRIRVRLSRKRNEDEDSPNKLYTLVTYVPVTTFKISVLNSVTVAKSP

SEQ ID NO: 6109 - protein, 130 aa, Homo sapiens
MAPAKKGGEKKKGRSAINEVVTREYTINIHKRIHGVGFKKRAPRALKEIRKFAMKEMGTPDVRIDTRLNKAVWAKGIRNVPYRIRVRLSRKRNEDEDSPNKLYTLVTYVPVTTFKSLQNDDLFKTDCHHQ

SEQ ID NO: 6110 - protein, 329 aa, Homo sapiens
MDARRVPRLQSVREGCRTRSQCRHSGPLRVAMKFPARSTRGATNKKAESRQPSENSVTDSNSDSEDESGMNFLEKRALNIKQNKAMLAKLMSELESFPGSFRGRHPLPGSDSQSRRPRRRTFPGVASRRNPERRARPLTRSRSRILGSLDALPMEEEEEEDKYMLVRKRKTVDGYMNEDDLPRSRRSRSSVTLPHIIRPVEEITEEELENVCSNSREKIYNRSLGSTCHQCRQKTIDTKTNCRNPDCWGVRGQFCGPCLRNRYGEEVRDALLDPNWHCPPCRGICNCSFCRQRDGRCATGVLVYLAKYHGFGNVHAYLKSLKQEFEMQA

SEQ ID NO: 6111 - protein, 1214 aa, Homo sapiens
MKQPIMADGPRCKRRKQANPRRKNVVNYDNVVDTGSETDEEDKLHIAEDDGIANPLDQETSPASVPNHESSPHVSQALLPREEEEDEIREGGVEHPWHNNEILQASVDGPEEMKEDYDTMGPEATIQTAINNGTVKNANCTSDFEEYFAKRKLEERDGHAVSIEEYLQRSDTAIIYPEAPEELSRLGTPEANGQEENDLPPGTPDAFAQLLTCPYCDRGYKRLTSLKEHIKYRHEKNEENFSCPLCSYTFAYRTQLERHMVTHKPGTDQHQMLTQGAGNRKFKCTECGKAFKYKHHLKEHLRIHSGEKPYECPNCKKRFSHSGSYSSHISSKKCIGLISVNGRMRNNIKTGSSPNSVSSSPTNSAITQLRNKLENGKPLSMSEQTGLLKIKTEPLDFNDYKVLMATHGFSGTSPFMNGGLGATSPLGVHPSAQSPMQHLGVGMEAPLLGFPTMNSNLSEVQKVLQIVDNTVSRQKMDCKAEEISKLKGYHMKDPCSQPEEQGVTSPNIPPVGLPVVSHNGATKSIIDYTLEKVNEAKACLQSLTTDSRRQISNIKKEKLRTLIDLVTDDKMIENHNISTPFSCQFCKESFPGPIPLHQHERYLCKMNEEIKAVLQPHENIVPNKAGVFVDNKALLLSSVLSEKGMTSPINPYKDHMSVLKAYYAMNMEPNSDELLKISIAVGLPQEFVKEWFEQRKVYQYSNSRSPSLERSSKPLAPNSNPPTKDSLLPRSPVKPMDSITSPSIAELHNSVTNCDPPLRLTKPSHFTNIKPVEKLDHSRSNTPSPLNLSSTSSKNSHSSSYTPNSFSSEELQAEPLDLSLPKQMKEPKSIIATKNKTKASSISLDHNSVSSSSENSDEPLNLTFIKKEFSNSNNLDNKSTNPVFSMNPFSAKPLYTALPPQSAFPPATFMPPVQTSIPGLRPYPGLDQMSFLPHMAYTYPTGAATFADMQQRRKYQRKQGFQGELLDGAQDYMSGLDDMTDSDSCLSRKKIKKTESGMYACDLCDKTFQKSSSLLRHKYEHTGKRPHQCQICKKAFKHKHHLIEHSRLHSGEKPYQCDKCGKRFSHSGSYSQHMNHRYSYCKREAEEREAAEREAREKGHLEPTELLMNRAYLQSITPQGYSDSEERESMPRDGESEKEHEKEGEDGYGKLGRQDGDEEFEEEEEESENKSMDTDPETIRDEEETGDHSMDDSSEDGKMETKSDHEEDNMEDGM

SEQ ID NO: 6112 - protein, 553 aa, Homo sapiens
MPCVQAQYGSSPQGASPASQSYSYHSSGEYSSDFLTPEFVKFSMDLTNTEITATTSLPSFSTFMDNYSTGYDVKPPCLYQMPLSGQQSSIKVEDIQMHNYQQHSHLPPQSEEMMPHSGSVYYKPSSPPTPTTPGFQVQHSPMWDDPGSLHNFHQNYVATTHMIEQRKTPVSRLSLFSFKQSPPGTPVSSCQMRFDGPLHVPMNPEPAGSHHVVDGQTFAVPNPIRKPASMGFPGLQIGHASQLLDTQVPSPPSRGSPSNEGLCAVCGDNAACQHYGVRTCEGCKGFFKRTVQKNAKYVCLANKNCPVDKRRRNRCQYCRFQKCLAVGMVKEVVRTDSLKGRRGRLPSKPKSPQEPSPPSPPVSLISALVRAHVDSNPAMTSLDYSRFQANPDYQMSGDDTQHIQQFYDLLTGSMEIIRGWAEKIPGFADLPKADQDLLFESAFLELFVLRLAYRSNPVEEYEHRHFCLLLHCCPGYGHRETRAQGTQESGRTAKQDCKLSQRPRDFQQWGVEPPQLFVQTVGEAPRTSYPLHTGATAHFLPEIGRLGATASNN

SEQ ID NO: 6113 - protein, 1156 aa, Homo sapiens
MEKRETFVQAVSKELVGEFLQFVQLDKEASDPFSLNELLDELSRKQKEELWQRLKNLLTDVLLESPVDGWQVVEAQGEDNMETEHGSKMRKSIEIIYAITSVILASVSVINESENYEALLECVIILNGILYALPESERKLQSSIQDLCVTWWEKGLPAKEDTGKTAFVMLLRRSLETKTGADVCRLWRIHQALYCFDYDLEESGEIKDMLLECFININYIKKEEGRRFLSCLFNWNINFIKMIHGTIKNQLQGLQKSLMVYIAEIYFRAWKKASGKILEAIENDCIQDFMFHGIHLPRRSPVHSKVREVLSYFHHQKKVRQGVEEMLYRLYKPILWRGLKARNSEVRSNAALLFVEAFPIRDPNLHAIEMDSEIQKQFEELYSLLEDPYPMVRSTGILGVCKITSKYWEMMPPTILIDLLKKVTGELAFDTSSADVRCSVFKCLPMILDNKLSHPLLEQLLPALRYSLHDNSEKVRVAFVDMLLKIKAVRAAKFWKICPMEHILVRLETDSRPVSRRLVSLIFNSFLPVNQPEEVWCERCVTLVQMNHAAARRFYQYAHEHTACTNIAKLIHVIRHCLNACIQRAVREPPEDEEEEDGREKENVTVLDKTLSVNDVACMAGLLEIIVILWKSIDRSMENNKEAKLYTINKFASVLPEYLKVFKDDRCKIPLFMLMSFMPASAVPPFSCGVISTLRSREEGAVDKSYCTLLDCLCSWGQVGHILELVDNWLPTEHAQAKSNTASKGRVQIHDTRPVKPELALVYIEYLLTHPKNRECLLSAPRKKLNHLLKALETSKADLESLLQTPGGKPRGFSEAAAPRAFGLHCRLSIHLQHKFCSEGKVYLSMLEDTGFWLESKILSFIQDQEEDYLKLHRVIYQQIIQTYLTVCKDVVMVGLGDHQFQMQLLQRSLGIMQTVKGFFYVSLLLDILKEITGSSLIQKTDSDEEVAMLLDTVQKVFQKMLECIARSFRKQPEEGLRLLYSVQRPLHEFITAVQSRHTDTPVHRGVLSTLIAGPVVEISHQLRKVSDVEELTPPEHLSDLPPFSRCLIGIIIKSSNVVRSFLDELKACVASNDIEGIVCLTAAVHIILVINAGKHKSSKVREVAATVHRKLKTFMEITLEEDSIERYEDLLCCPGWALTPGLLDSIYPSASVPIG

SEQ ID NO: 6114 - protein, 167 aa, Homo sapiens
MEHPSKMEFFQKLGYDREDVLRVLGKLGEGALVNDVLQELIRTGSRPGALEHPAAPRLVPRGSCGVPDSAQRGPGTALEEDFRTLASSLRPIVIDGSNVAMSHGNKETFSCRGIKLAVDWFRDRGHTYIKVFVPSWRKDPPRADTPIRGIGMGNEWRSILLGAAARE

SEQ ID NO: 6115 - protein, 333 aa, Homo sapiens
MYTAIPQSGSPFPGSVQDPGLHVWRVEKLKPVPVAQENQGVFFSGDSYLVLHNGPEEVSHLHLWIGQQSSRDEQGACAVLAVHLNTLLGERPVQHREVQGNESDLFMSYFPRGLKYQEGGVESAFHKTSTGAPAAIKKLYQVKGKKNIRATERALNWDSFNTGDCFILDLGQNIFAWCGGKSNILERNKARDLALAIRDSERQGKAQVLGPKPALKEGNPEEDLTADKANAQAAALYKVSDATGQMNLTKVADSSPFALELLISDDCFVLDNGLCGKIYIWKGRKANEKERQAALQVAEGFISRMQYAPNTQVEILPQGHESPIFKQFFKDWK

SEQ ID NO: 6116 - protein, 47 aa, Homo sapiens
MGGEIQPVSVKVGDKVLLPEYGGTKVVLDDKDYFLFRDGDILGKYVD

SEQ ID NO: 6117 - protein, 79 aa, Homo sapiens
MAPAKKGGEKKKGRSAINEVVTREYTINIHKRIHGVGFKKRAPRALKEIRKFAMKEMGTPDVRIDTRLNKAVWAKGIRC

SEQ ID NO: 6118 - protein, 332 aa, Homo sapiens
MQKCVISEHMQVEEKCGGIVGIQTKTVQVSATEDGNVTKDSNVVLEIPAATTIAYGVIELYVKLDGQFEFCLLRGKQGGFENKKRIDSVYLDPLVFREFAFIDMPDAAHGISSQDGPLSVLKQATLLLERNFHPFAELPEPQQTALSDIFQAVLFDDELLMVLEPVCDDLVSGLSPTVAVLGELKPRQQQDLVAFLQLVGCSLQGGCPGPEDAGSKQLFMTAYFLVSALAEMPDSAAALLGTCCKLQIIPTLCHLLRALSDDGVSDLEDPTLTPLKDTERFGIVQRLFASADISLERLKSSVKAVILKDSKVFPLLLCITLNGLCALGREHS

SEQ ID NO: 6119 - protein, 539 aa, Homo sapiens
MWRLPRALCVHAAKTSKLSGPWSRPAAFMSTLLINQPQYAWLKELGLREENEGVYNGSWGGRGEVITTYCPANNEPIARVRQASVADYEETVKKAREAWKIWADIPAPKRGEIVRQIGDALREKIQVLGSLVSLEMGKILVEGVGEVQEYVDICDYAVGLSRMIGGPILPSERSGHALIEQWNPVGLVGIITAFNFPVAVYGWNNAIAMICGNVCLWKGAPTTSLISVAVTKIIAKVLEDNKLPGAICSLTCGGADIGTAMAKDERVNLLSFTGSTQVGKQVGLMVQERFGRSLLELGGNNAIIAFEDADLSLVVPSALFAAVGTAGQRCTTARRLFIHESIHDEVVNRLKKAYAQIRVGNPWDPNVLYGPLHTKQAVSMFLGAVEEAKKEGGTVVYGGKVMDRPGNYVEPTIVTGLGHDASIAHTETFAPILYVFKFKNEEEVFAWNNEVKQGLSSSIFTKDLGRIFRWLGPKGSDCGIVNVNIPTSGAEIGGAFGGEKHTGGGRESGSDAWKQYMRRSTCTINYSKDLPLAQGIKFQ

SEQ ID NO: 6120 - protein, 121 aa, Homo sapiens
MAPAKKGGEKKKGRSAINEVVTREYTINIHKRIHGVGFKKRAPRALKEIRKFAMKEMGTPDVRIDTRLNKAVWAKGIRNVPYRIRVRLSRKRNEDEDSPNKLYTLVTYVPVTTFKSKFSIP

SEQ ID NO: 6121 - protein, 137 aa, Homo sapiens
MIHFILLFSRQGKLRLQKWYITLPDKERKKITREIVQIILSRGHRTSSFVDWKELKLVYKRYASLYFCCAIENQDNELLTLEIVHRYVELLDKYFGNEFNCWFLLMRLLSVLDSWSTPALNSEVPQLATITPDFCLF

SEQ ID NO: 6122 - protein, 822 aa, Homo sapiens
MSNAMYNKMWHQTQEALGALLDKEPQKMIEPQRNQVFIFQTLATFYVKYVQIFRNLENVYDQFVHPQKRILIRKVLDGVMGRILELKNEMVELELTEFHYFDDILQDLKLAPQQLDIPIPKYFLKEKLEVIKGREKILAQILADSGIDTSDMKYPVKSIPFDEAVKLIQIAERARQGRLRALFMKQIYLQEYRAKQSKMLGKKVTDTWAAALRIQKVWRRFHQRKETEKLREEEMIFLGMNPPPLFNEVSATVIQAEKVDRLRNEVQIKHEEDYREALVTIKNDLKLIEGVDIKENLQDQIRHWFIECRNLTGTFPDYPDVEEGGSAIIFSDKTIQQVIEDIIANQEEEEKNKKKKKKKEKQPKKAKKQKKGTKEKNKEEDEKWKMSPSLFLPAMKEGCNAYKEIWMKKDESWNFSQDYDPELIKEEKRKELQSEIRIQVDELMRQELKNLKLAVDRERERPVKAGKKKDKKGKKGKKKEKKAKKDKDLTADRTIESLYKELVEEGLLIQALKVNLSDYIGEYSYLGTTLRQVSIEPMPSLLDVRQLITLYGIWPLGSAAVHEKAPLVKSLLLAGPSGVGKKMLVHAICTETGANLFNLSSSNIAGKYPGKNGLQMMLHAVFKVARQLQPSVVWIEDTEKTFYKKVPNAEKMNEPKRLKKHLPQILKLLKPDDRILIVGTTRRPFDAELQSFCKVYQKIILVPRPDYASRYVLWKQIIERNGGVLTSALNVSCLAKVTDGFTQGHIVEVVKGVLTDQRIRRQIHKPLTAVEFITAITSMNPVYKEEEESFKNWYAKTPLGKKRALAITGGSTEKAKDKGKRK

SEQ ID NO: 6123 - protein, 247 aa, Homo sapiens
MEVTQDLVQDGVASPATPGTGKSKLETLPKEDLIKFAKKQMMLIQKAKSRCTELEKEIEELRSKPVTEGTGDIIKALTERLDALLLEKAETEQQCLSLKKENIKMKQEVEDSVTKMGDAHKELEQSHINYVKEIENLKNELMAVRSKYSEDKANLQKQLEEAMNTQLELSEQLKFQNNSEDNVKKLQEEIEKIRPGFEEQILYLQKQLDATTDEKKETVTQLQNIIEANSQHYQKNINSLQEELLQL

SEQ ID NO: 6124 - protein, 235 aa, Homo sapiens
MQTFPSGEIIGGHEAKPHSRPYMAYLMIWDQKSLKRCGGFLIRDDFVLTAAHCWGSSINVTLGAHNIKEQEPTQQFIPVKRPIPHPAYNPKNFSNDIMLLQLERKAKRTRAVQPLRLPSNKAQVKPGQTCSVAGWGQTAPLGKHSHTLQEVKMTVQEDRKCESDLRHYYDSTIELCVGDPEIKKTSFKGDSGGPLVCNKVAQGIVSYGRNNGMPPRACTKVSSFVHWIKKTMKRY

SEQ ID NO: 6125 - protein, 68 aa, Homo sapiens
MGFGDLKSPAGLQVCVNVSVSLAGMCHHKQMWQYLKPCPAHRLPTCVMPYVGIITSSLTKRKRPACQE

SEQ ID NO: 6126 - protein, 84 aa, Homo sapiens
MQQHSGQHLITAVADHLFKLKTTSWELGRFRSAIELDTPSMTAEQVAAIEQSVNEKIRDRLPVNVRELSLDDPEVEQVRWPGFA

SEQ ID NO: 6127 - protein, 197 aa, Homo sapiens
RNSISDDRLETQSLPSRSPPGTPNHRNSTFTQEGTRLRPSSVGHLVDHMVHTSPSEVFVNQRSPSSTQANSIVLESSPSQETPGDGKPPALPPKQSKKNSWNQIHYSHSQQDLESHINETFDIPSSPEKPTPNGGIPHDNLVLIRMKPDENGRFGFNVKGGYDQKMPVIVSRVAPGTPVSYLNVSNKSCFQEYVLIL

SEQ ID NO: 6128 - protein, 426 aa, Homo sapiens
MNGVAGDGMINIDMTGEKRSLDLPYPSSFAPVSAPRNQTFTYMGKFSIDPQYPGASCYPEGIINIVSAGILQGVTSPASTTASSSVTSASPNPLATGPLGVCTMSQTQPDLDHLYSPPPPPPPYSGCAGDLYQDPSAFLSAATTSTSSSLAYPPPPSYPSPKPATDPGLFPMIPDYPGFFPSQCQRDLHGTAGPDRKPFPCPLDTLRVPPPLTPLSTIRNFTLGGPSAGVTGPGASGGSEGPRLPGSSSAAAAAAAAAAYNPHHLPLRPILRPRKYPNRPSKTPVHERPYPCPAEGCDRRFSRSDELTRHIRIHTGHKPFQCRICMRNFSRSDHLTTHIRTHTGEKPFACDYCGRKFARSDERKRHTKIHLRQKERKSSAPSASVPAPSTASCSGGVQPGGTLCSSNSSSLGGGPLAPCSSRTRTP

SEQ ID NO: 6129 - protein, 1236 aa, Homo sapiens
MSTAAFHISSLLEKMTSSDKDFRFMATSDLMSELQKDSIQLDEDSERKVVKMLLRLLEDKNGEVQNLAVKCLGPLVVKVKEYQVETIVDTLCTNMRSDKEQLRDIAGIGLKTVLSELPPAATGSGLATNVCRKITGQLTSAIAQQEDVAVQLEALDILSDMLSRLGVPLGAFHASLLHCLLPQLSSPRLAVRKRAVGALGHLAAACSTDLFVELADHLLDRLPGPRVPTSPTAIRTLIQCLGSVGRQAGHRLGAHLDRLVPLVEDFCNLDDDELRESCLQAFEAFLRKCPKEMGPHVPNVTSLCLQYIKHDPNYNYDSDEDEEQMETEDSEFSEQESEDEYSDDDDMSWKVRRAAAKCIAALISSRPDLLPDFHCTLAPVLIRRFKEREENVKADVFTAYIVLLRQTQPPKGWLEAMEEPTQTGSNLHMLRGQVPLVVKALQRQLKDRSVRARQGCFSLLTELAGVLPGSLAEHMPVLVSGIIFSLADRSSSSTIRMDALAFLQGLLGTEPAEAFHPHLPILLPPVMACVADSFYKIAAEALVVLQELVRALWPLHRPRMLDPEPYVGEMSAVTLARLRATDLDQEVKERAISCMGHLVGHLGDRLGDDLEPTLLLLLDRLRNEITRLPAIKALTLVAVSPLQLDLQPILAEALHILASFLRKNQRALRLATLAALDALAQSQGLSLPPSAVQAVLAELPALVNESDMHVAQLAVDFLATVTQAQPASLVEVSGPVLSELLRLLRSPLLPAGVLAAAEGFLQALVGTRPPCVDYAKLISLLTAPVYEQAVDGGPGLHKQVFHSLARCVAALSAACPQEAASTASRLVCDARSPHSSTGVKVLAFLSLAEVGQVAGPGHQRELKAVLLEALGSPSEDVRAAASYALGRVGAGSLPDFLPFLLEQIEAEPRRQYLLLHSLREALGAAQPDSLKPYAEDIWALLFQRCEGAEEGTRGVVAECIGKLVLVNPSFLLPRLRKQLAAGRPHTRSTVITAVKFLISDQPHPIDPLLKSFIGEFMESLQDPDLNVRRATLAFFNSAVHNKPSLVRDLLDDILPLLYQETKIRRDLIREVEMGPFKHTVDDGLDVRKAAFECMYSLLESCLGQLDICEFLNHVEDGLKDHYDIRMLTFIMVARLATLCPAPVLQRVDRLIEPLRATCTAKVKAGSVKQEFEKQDELKRSAMRAVAALLTIPEVGKSPIMADFSSQIRSNPELAALFESIQKDSASAPSTDSMELS

SEQ ID NO: 6130 - protein, 178 aa, Homo sapiens
DDGVSIPGEYTSFLAPISSSKLYNEVRACREKDRDPEAQFEMPYVVRLHNFHQLSAPQPCFTFSHPNRDPMIDNNRYCTLEFPVEVNTVLHGFAGYFETVLYQDITLSIRPETHSPGMFSWFPILFPIKPITVREGQTICVRFWRCSNSKKVWYEWAVTAPVCSAIHNPTGRSYTIGL

SEQ ID NO: 6131 - protein, 60 aa, Homo sapiens
MVLLSTLGIVFQGEGPPISSCDTGTMANCERTFIAIKPDGVQRGLVGEIIKRFEQKGFRL

SEQ ID NO: 6132 - protein, 94 aa, Homo sapiens
MSGRLWSKAIFAGYKRGLRNQREHTALLKIEGVYARDETEFYLGKRCAYVYKAKNNTVTPGGKPNKTRVIWGKVTRAHGNSGMVRAKFRSNLPA

SEQ ID NO: 6133 - protein, 203 aa, Homo sapiens
MLRKHVEFRKQKDIDNIISWQPPEVIQQYLSGGMCGYDLDGCPVWYDIIGPLDAKGLLFSASKQDLLRTKMRECELLLQECAHQTTKLGRKVETITIIYDCEGLGLKHLWKPAVEAYGEFLCMFEENYPETLKRLFVVKAPKLFPVAYNLIKPFLSEDTRKKIMVLGANWKEVLLKHISPDQVPVEYGGTMTDPDGNPKCKSK

SEQ ID NO: 6134 - protein, 231 aa, Homo sapiens
MEDLEEDVRFIVDETLDFGGLSPSDSREEEDITVLVTPEKPLRRGLSHRSDPNAVAPAPQGVRLSLGPLSPEKLEEILDEANRLAAQLEQCALQDRESAGEGLGPRRVKPSPRRETFVLKDSPVRDLLPTVNSLTRSTPSPSSLTPRLRSNDRKGSVRALRATSGKRPSNMKRESPTCNLFPASKSPASSPLTRSTPPVRGRAGPSGRAAASPPTPIRSVLAPQPSTSNSQ

SEQ ID NO: 6135 - protein, 121 aa, Homo sapiens
VVAASGAPRYFLPSKESACAILVDLLKLNVAPLAVFQMLKSMCAGQRLASEPQDPAAVSLPTSSVPETRGRNKGSAALGGALALAERSSREGSSQRMPRQPSATRLPKGGGPGKSPTRGST

SEQ ID NO: 6136 - protein, 51 aa, Homo sapiens
MANSGCKDVTGPDEESFLYFAYGSNLLTERIHLRNPSAAFFCVARLQARRG

SEQ ID NO: 6137 - protein, 133 aa, Homo sapiens
MGAYKYIQELWRKKQSDVMRFLLRVRCWQYRQLSALHRAPRPTRPDKARRLGYKAKQGYVIYRIRVRRGGRKRPVPKGATYGKPVHHGVNQLKFARSLQSVAEERAGRHCGALRVLNSYWVGEDSTYKFFEVI

SEQ ID NO: 6138 - protein, 186 aa, Homo sapiens
MLEEEEWYRSLKHFNYDVCQSCFFSGRTAKGHKLHYPMVEYCIPTTSGEDVRDFTKVLKNKFRSKKYFAKHPRLGYLPVQTVLEGDNLETPSQSPQLFHDDTHSRIEQYATRLAQMERTNGSFLTDSSSTTGSVEDEHALIQQYCQTLGGESPVSQPQSPAQILKSVEREERGELERIIADLEEEQ

SEQ ID NO: 6139 - protein, 559 aa, Homo sapiens
MSEETVPEAASPPPPQGQPYFDRFSEDDPEYMRLRNRAADLRQDFNLMEQKKRVTMILQSPSFREELEGLIQEQMKKGNNSSNIWALRQIADFMASTSHAVFPTSSMNVSMMTPINDLHTADSLNLAKGERLMRCKISSVYRLLDLYGWAQLSDTYVTLRVSKEQDHFLISPKGVSCSEVTASSLIKVNILGEVVEKGSSCFPVDTTGFCLHSAIYAARPDVRCIIHLHTPATAAVSAMKWGLLPVSHNALLVGDMAYYDFNGEMEQEADRINLQKCLGPTCKILVLRNHGVVALGDTVEEAFYKIFHLQAACEIQVSALSSAGGVENLILLEQEKHRPHEVGSVQWAGSTFGPMQKSRLGEHEFEALMRMLDNLGYRTGYTYRHPFVQEKTKHKSEVEIPATVTAFVFEEDGAPVPALRQHAQKQQKEKTRWLNTPNTYLRVNVADEVQRSMGSPRPKTTWMKADEVEKSSSGMPIRIENPNQFVPLYTDPQEVLEMRNKIREQNRQDVKSAGPQSQLLASVIAEKSRSPVEQRLPLTGGETCLPSGSSVPGAGLQDP

SEQ ID NO: 6140 - protein, 188 aa, Homo sapiens
MDRSKENCISGPVKATAPVGGPKRVLVTQQFPCQNPLPVNSGQAQRVLCPSNSSQRIPLQAQKLVSSHKPVQNQKQKQLQATSVPHPVSRPLNNTQKSKQPLPSAPENNPEEELASKQKNEESKKRQWALEDFEIGRPLGKGKFGNVYLAREKQSKFILALKVLFKAQLEKAGVEHQLRREVEIQSHL

SEQ ID NO: 6141 - protein, 128 aa, Homo sapiens
MQIFVKTLTGKTITLEVEPSDTIENVKAKIQDKEGIPPDQQRLIFAGKQLEDGRTLSDYNIQKESTLHLVLRLRGGIIEPSLRQLAQKYNCDKMICRKCYARLHPRAVNCRKKKCGHTNNLRPKKKVK

SEQ ID NO: 6142 - protein, 106 aa, Homo sapiens
MDNYSTGYDVKPPCLYQMPLSGQQSSIKVEDIQMHNYQQHSHLPPQSEEMMPHSGSVYYKPSSPPTPTTPGFQVQHSPMWDDPGSLHNFHQNYVATTHMIEQRKTP

SEQ ID NO: 6143 - protein, 238 aa, Homo sapiens
GRRAQSALAQLRGILEGELEGIRGAGTWKSERVITSRQGPHIRVDGVSGGILNFCANNYLGLSSHPEVIQAGLQALEEFGAGLSSVRFICGTQSIHKNLEAKIARFHQREDAILYPSCYDANAGLFESRALVQPGTETRGPQREAQNTLPLYPEERPGWQYSFLICWSPGQGRSPGWLNDGSTLTASLQALLTPEDAVLSDELNHASIIDGIRLCKAHKYRYRHLDMADLEAKLQEAQ

SEQ ID NO: 6144 - protein, 96 aa, Homo sapiens
MSGGSADYNREHGGPEGMDPDGVIESNWNEIVDNFDDMNLKESLLRGIYAYGFEKPSAIQQRAIIPCIKDPKGNSGTWRLYGSHLSCLHWWNKCSK

SEQ ID NO: 6145 - protein, 38 aa, Homo sapiens
MACGLVASNLNLKPGECLRVRGEVAPDAKSEFFQQASC

SEQ ID NO: 6146 - protein, 81 aa, Homo sapiens
MQNDAGEFVDLYVPRKCSASNRIIGAKDHASIQMNVAEVDKVTGRFNGQFKTYAICGAIRRMGESDDSILRLAKADGIVSK

SEQ ID NO: 6147 - protein, 154 aa, Homo sapiens
MFLRQELPVRLANIMKEISLLPDNLLRTPSVQLVQSWYIQSLQELLDFKDKSAEDAKAIYDFTDTVIRIRNRHNDVIPTMAQGVIEYKESFGVDPVTSQNVQYFLDRFYMSRISIRMLLNQHSLLFGGKGKGSPSHRKHIGSINPNCNVLEVIK

SEQ ID NO: 6148 - protein, 462 aa, Homo sapiens
MASPRELTQNPLKKIWMPYSNGRPALHACQRGVCMTNCPTLIVMVGLPARGKTYISKKLTRYLNWIGVPTREFNVGQYRRDVVKTYKSFEFFLPDNEEGLKIRKQCALAALRDVRRFLSEEGGHVAVFDATNTTRERRATIFNFGEQNGYKTFFVESICVDPEVIAANIVQVKLGSPDYVNRDSDEATEDFMRRIECYENSYESLDEDLDRDLSYIKIMDVGQSYVVNRVADHIQSRIVYYLMNIHVTPRSIYLCRHGESELNLKGRIGGDPGLSPRGREFAKSLAQFISDQNIKDLKVWTSQMKRTIQTAEALGVPYEQWKGVCEEMTYEEIQDNYPLEFALRDQDKYRYRYPKGESYEDLVQRLEPVIMELERQENVLVICHQAVMRCLLAYFLDKAAEQLPYLKCPLHTVLKLTPVAYGCKVESIFLNVAAVNTHRDRPQNVDISRPPEEALVTVPAHQ

SEQ ID NO: 6149 - protein, 414 aa, Homo sapiens
MVFHLRTRYEQANCDCLNGGTCVSNKYFSNIHWCNCPKKFGGQHCEIDKSKTCYEGNGHFYRGKASTDTMGRPCLPWNSATVLQQTYHAHRSDALQLGLGKHNYCRNPDNRRRPWCYVQVGLKLLVQECMVHDCADGKKPSSPPEELKFQCGQKTLRPRFKIIGGEFTTIENQPWFAAIYRRHRGGSVTYVCGGSLISPCWVISATHCFIDYPKKEDYIVYLGRSRLNSNTQGEMKFEVENLILHKDYSADTLAHHNDIALLKIRSKEGRCAQPSRTIQTICLPSMYNDPQFGTSCEITGFGKENSTDYLYPEQLKMTVVKLISHRECQQPHYYGSEVTTKMLCAADPQWKTDSCQGDSGGPLVCSLQGRMTLTGIVSWGRGCALKDKPGVYTRVSHFLPWIRSHTKEENGLAL

SEQ ID NO: 6150 - protein, 454 aa, Homo sapiens
MATNKERLFAAGALGPGSGYPGAGFPFAFPGALRGSPPFEMLSPSFRGLGQPDLPKEMASLSVETQSTSSEEMVPSSPSPPPPPRVYKPCFVCNDKSSGYHYGVSSCEGCKGFFRRSIQKNMVYTCHRDKNCIINKVTRNRCQYCRLQKCFEVGMSKEAVRNDRNKKKKEVKEEGSPDSYELSPQLEELITKVSKAHQETFPSLCQLGKYTTNSSADHRVQLDLGLWDKFSELATKCIIKIVEFAKRLPGFTGLSIADQITLLKAACLDILMLRICTRYTPEQDTMTFSDGLTLNRTQMHNAGFGPLTDLVFAFAGQLLPLEMDDTETGLLSAICLICGDRMDLEEPEKVDKLQEPLLEALRLYARRRRPSQPYMFPRMLMKITDLRGISTKGAERAITLKMEIPGPMPPLIREMLENPEMFEDDSSQPGPHPNASSEDEVPGGQGKGGLKSPA

SEQ ID NO: 6151 - protein, 562 aa, Homo sapiens
MMMPVVDPVVREKQLQQELLLIQQQQQIQKQLLIAEFQKQHENLTRQHQAQLQEHIKLQQELLAIKQQQELLEKEQKLEQQRQEQEVERHRREQQLPPLRGKDRGRERAVASTEVKQKLQEFLLSKSATKDTPTNGKNHSVSRHPKLWYTAAHHTSLDQSSPPLSGTSPSYKYTLPGAQDAKDDFPLRKTASEPNLKVRSRLKQKVAERRSSPLLRRKDGNVVTSFKKRMFEVTESSVSSSSPGSGPSSPNNGPTGSVTENETSVLPPTPHAEQMVSQQRILIHEDSMNLLSLYTSPSLPNITLGLPAVPSQLNASNSLKEKQKCETQTLRQGVPLPGQYGGSIPASSSHPHVTLEGKPPNSSHQALLQHLLLKEQMRQQKLLVAGGVPLHPQSPLATKERISPGIRGTHKLPRHRPLNRTQSAPLPQSTLAQLVIQQQHQQFLEKQKQYQQQIHMNKLLSKSIEQLKQPGSHLEEAEEELQGDQAMQEDRAPSSGNSTRSDSSACVDDTLGQVGAVKVKEEPVDSDEDAQIQEMESGEQAAFMQQVIGKDLAPGFVIKVII

SEQ ID NO: 6152 - protein, 200 aa, Homo sapiens
MGRRPARCYRYCKNKPYPKSRFCRGVPDAKIRIFDLGRKKAKVDEFPLCGHMVSDEYEQLSSEALEAARICANKYMVKSCGKDGFHIRVRLHPFHVIRINKMLSCAGADRLQTGMRGAFGKPQGTVARVHIGQVIMSIRTKLQNKEHVIEALRRAKFKFPGRQKIHISKKWGFTKFNADEFEDMVAEKRLIPDGCGVKYI

SEQ ID NO: 6153 - protein, 705 aa, Homo sapiens
MQLGEQLLVSSVNLPGAHFYPLESARGGSGGSAGHLPSAAPSPQKLDLDKASKKFSGSLSCEAVSGEPAAASAGAPAAMLSDTDAGDAFASAAAVAKPGPPDGRKGSPCGEEELPSAAAAAAAAAAAAAATARYSMDSLSSERYYLQSPGPQGSELAAPCSLFPYQAAAGAPHGPVYPAPNGARYPYGSMLPPGGFPAAVCPPGRAQFGPGAGAGSGAGGSSGGGGGPGTYQYSQGAPLYGPYPGAAAAGSCGGLGGLGVPGSGFRAHVYLCNRPLWLKFHRHQTEMIITKQGRRMFPFLSFNINGLNPTAHYNVFVEVVLADPNHWRFQGGKWVTCGKADNNMQGNKMYVHPESPNTGSHWMRQEISFGKLKLTNNKGANNNNTQMIVLQSLHKYQPRLHIVEVTEDGVEDLNEPSKTQTFTFSETQFIAVTAYQNTDITQLKIDHNPFAKGFRDNYDSMYTASENDRLTPSPTDSPRSHQIVPGGRYGVQSFFPEPFVNTLPQARYYNGERTVPQTNGLLSPQQSEEVANPPQRWLVTPVQQPGTNKLDISSYESEYTSSTLLPYGIKSLPLQTSHALGYYPDPTFPAMAGWGGRGSYQRKMAAGLPWTSRTSPTVFSEDQLSKEKVKEEIGSSWIETPPSIKSLDSNDSGVYTSACKRRRLSPSNSSNENSPSIKCEDINAEEYSKDTSKGMGGYYAFYTTP

SEQ ID NO: 6154 - protein, 476 aa, Homo sapiens
MAVPFVEDWDLVQTLGEGAYGEVQLAVNRVTEEAVAVKIVDMKRAVDCPENIKKEICINKMLNHENVVKFYGHRREGNIQYLFLEYCSGGELFDRIEPDIGMPEPDAQRFFHQLMAGVVYLHGIGITHRDIKPENLLLDERDNLKISDFGLATVFRYNNRERLLNKMCGTLPYVAPELLKRREFHAEPVDVWSCGIVLTAMLAGELPWDQPSDSCQEYSDWKEKKTYLNPWKKIDSAPLALLHKILVENPSARITIPDIKKDRWYNKPLKKGAKRPRVTSGGVSESPSGFSKHIQSNLDFSPVNSASSEENVKYSSSQPEPRTGLSLWDTSPSYIDKLVQGISFSQPTCPDHMLLNSQLLGTPGSSQNPWQRLVKRMTRFFTKLDADKSYQCLKETCEKLGYQWKKSCMNQVTISTTDRRNNKLIFKVNLLEMDDKILVDFRLSKGDGLEFKRHFLKIKGKLIDIVSSQKIWLPAT

SEQ ID NO: 6155 - protein, 142 aa, Homo sapiens
MQQLRVRGSYRSASQFAGWRRVFYQARQGGISGNKLKLMLQKREAPVPTKTKVAVDENKAKEFLGSLKRQKRQLWDRTRPEVQQWYQQFLYMGFDEAKFEDDITYWLNRDRNGHEYYGDYYQRHYDEDSAIGPRSPYGFRHG

SEQ ID NO: 6156 - protein, 719 aa, Homo sapiens
MTANRLAESLLALSQQEELADLPKDYLLSESEDEGDNDGERKHQKLLEAISSLDGKNRRKLAERSEASLKVSEFNVSSEGSGEKLVLADLLEPVKTSSSLATVKKQLSRVKSKKTVELPLNKEEIERARTPLEQEIFNLLHKNKQPVTDPLLTPVEKASLRAMSLEEAKMRRAELQRARALQSYYEAKARREKKIKSKKYHKVVKKGKAKKALKEFEQLRKVNPAAALEELEKIEKARMMERMSLKHQNSGKWAKSKAIMAKYDLEARQAMQEQLSKNKELTQKLQVASESEEEEGGTEDVEELLVPDVVNEVQMNADGPNPWMLRSCTSDTKEAATQEDPEQLPELEAHGVSESEGEERPVAEEEILLREFEERRSLRKRSELSQDAEPAGSQETKDSGSQEVLSELRVLSQKLKENHQSRKQKASSEGTIPQVQREEPAPEEEEPLLLQRPERVQTLEELEELGKEECFQNKELPRPVLEGQQSERTPNNRPDAPKEKKKKEQMIDLQNLLTTQSPSVKSLAVPTIEELEDEEERNHRQMIKEAFAGDDVIRDFLKEKREAVEASKPKDVDLTLPGWGEWGGVGLKPSAKKRRRFLIKAPEGPPRKDKNLPNVIINEKRNIHAAAHQVRVLPYPFTHHWQFERTIQTPIGSTWNTQRAFQKLTTPKVVTKPGHIINPIKAEDVGYRSSSRSDLSVIQRNPKRITTRHKKQLKKCSVD

SEQ ID NO: 6157 - protein, 84 aa, Homo sapiens
MAPGQLALFSVSDKTGLVEFARNLTALGLNLVASGGTAKALRDAGLAVRDVSELTGFPEMLGGRVKTLHPAVHAELLPAISIPL

SEQ ID NO: 6158 - protein, 75 aa, Homo sapiens
MAKRTKKVGIVGKYGTRYGASLRKMVKKIEISQHAKYTCSFCGKTKMKRRAVGIWHCGSCMKTVAGGAWTYNRME

SEQ ID NO: 6159 - protein, 154 aa, Homo sapiens
MIHFILLFSRQGKLRLQKWYITLPDKERKKITREIVQIILSRGHRTSSFVDWKELKLVYKRYASLYFCCAIENQDNELLTLEIVHRYVELLDKYFGNVCELDIIFNFEKAYFILDEFIIGGEIQETSKKIAVKAIEDSDMLQEVSTVSQTMGER

SEQ ID NO: 6160 - protein, 628 aa, Homo sapiens
MSSQGSPSVALSTTTVSSVAVQAGDSKIVIAVIKCGKWVQLQLAESQPNLLEIGSSQDETKKLLHDHELLLAKLKALEDRVWELLQEADKTAEENKDQSQVYDAMAETLGEAWAALVSMLERRTELLRLTSEFFENALEFAIKIDQAEDFLQNTHEFESAESLKSLLQLHEHHTKELLERSLALLNKSQQLTDFIEKFKCEGPNVNPELTQGAHSSCLKVDRLLELLQDRRRQLDKYLKQQWQELSQVLQICQWDQQENQVTCWFQKTIRNLQEQSLGSSLSDNEDRIHKQEELIIKAKAFDVLGRVEAYLKLLKSEGLSLAVLAVRHEELHRKIKDCTTDALQKGQTLISQVDSCSSQVSGIHEMMGCIKRRVDHLTEQCSAHKEYALKKQQLTASVEGYLRKVEMSIQKISPVLSNAMDVGSTRSESEKILNKYLELDIQAKETSHELEAAAKTMMEKNEFVSDEMVSLSSKARWLAEELNLFGQSIDYRSQVLQTYVAFLKSSEEVEMQFQSLKEFYETEIPQKEQDDAKAKHCSDSAEKQWQLFLKKSFITQDLGLEFLNLINMAKENEILDVKNEVYLMKNTMENQKAEREELSLLRLAWQLKATESKPGKQQWAAFKEQLKK

SEQ ID NO: 6161 - protein, 42 aa, Homo sapiens
MSQWYELQQLDSKFLEQVHQLYDDSFPMEIRQYLAQWLEKQD

SEQ ID NO: 6162 - protein, 91 aa, Homo sapiens
MIHTNLKKKFSCCVLVFLLFAVICVWKEKKKGSYYDSFKLQTKEFQVLKSLGKLAMGSDSQSVSSSSTQDPHRGRQTLGSLRGLAKAKPEA

SEQ ID NO: 6163 - protein, 104 aa, Homo sapiens
MYRWLVRILGTIFRFCDRSVPPARALLKRRRSDSTLFSTVDTDEIPAKRPRLDCFIHQVKNSLYNAASLFGFPFQLTTKPMVTSACNGTRNVAPSGEVINLLME

SEQ ID NO: 6164 - protein, 94 aa, Homo sapiens
MASVVLALRTRTAVTSLLSPTPATALAVRYASKKSGGSSKNLGGKSSGRRQGIKKMEGHYVHAGNIIATQRHFRWHPGAHVSCSVAAPLFPFLG

SEQ ID NO: 6165 - protein, 45 aa, Homo sapiens
MIHTNLKKKFSCCVLVFLLFAVICVWKEKKKGSYYDSFKLQTKEF

SEQ ID NO: 6166 - protein, 152 aa, Homo sapiens
MEYYLVKWKGWPDSTNTWEPLQNLKCPLLLQQFSNDKHNYLSQVITSEEAERRGQFYDNKGITYLFDLDYESDEFTVDAARYGNVSHFVNHSCDPNLQVFNVFIDNLDTRLPRIALFSTRTINAGEELTFDYQMKGSGDISSDSIDHSPAKK

SEQ ID NO: 6167 - protein, 950 aa, Homo sapiens
MLSLDPSGPEWDCPLGSKDLEEEGPWGGGSGLPPTGCFPGSWRQDVGLDCKGSPEGAEARAWTVYYYSLLQSCLQQAGLPETQDRGQVPRTGCPGAEVTLCVLGSPSTFLPVLLEGGVQSPGNMLLCLSPAWLMKVPAPGQPGEAALLVSKAVSFHPGGLTFLDDFVPPRRATYFLAGLGLGPGRGREAAELARDLTCPTGASAELARLLEDRLLTRQLLAQQGGVAVPATLAFTYKPPGLLRGGDASLGLRLVELSGKEGQETLVKEEVEAFLRSEALGDILQVAVKLSGWRWRGRQAWRLHPRAELGAVVDTVLALLEKLEEEESVLVEAVYPPAQLPCSDGPSPGPGLAVRICAVVCRTQGDRPLLSKVVCGVGRGDRPLRHHNSLPRTLEVALAQCGLGEEAQVAAVRQRVKAAAEAALAAVLALEAGLSAEQRGGRRAHTDFLGVDFALTAAGGVLTPVALELNGGLCLEACGALEGLWAAPRLGPAADEAVAAPLVETMLRRSARCLMEGKQLLVVGAGGVSKKFVWEAARDYGLQLHLVESDPNHFASQLVQTFIHFDMTEHRRDEENARLLAELVRARGLKLDGCFSYWDDCLVLTALLCQELGLPCSSPAAMRLAKQKSLTQLHLLHHHGPPWPAPSLHAVPCCPLESEADVERAVHQVPLPGVMKLEFGAGAVGVRLVEDAPQCHEHFSRITRDLQGEADHPGIGLGWGNAMLLMEFVEGTEHDVDLVLFGGRLLAAFVSDNGPTRLPGFTETAACMPTGLAPEQEAQMVQAAFRCCLGCGLLDGVFNVELKLTGAGPRLIEINPRMGGFYLRDWILELYGVDLLLAAVMVACGLRPALPTRPRARGHLVGVMCLVSQHLQALSSTASRETLQALHDRGLLRLNLLEEALVPGEYEEPYCSVACAGPSPTEARLRLLGLCQGLGIDGPSYPVAHFLSHFK

SEQ ID NO: 6168 - protein, 275 aa, Homo sapiens
MAKERCLKKSFQDSLEDIKKRMKEKRNKNLAEIGKRRSFIAAPCQIITNTSTLLKNYQDNNKMLVLALENEKSKVKEAQDIILQLRKECYYLTCQLYALKGKLTSQQTVEPAQNQEICSSGMDPNSDDSSRNLFVKDLPQIPLEETELPGQGESFQIEDQIPTIPQDTLGVDFDSATPPETQQSPHLSLKDITNVSLYPVVKIRRLSLSPKKNKASPAVALPKRRCTASVNYKEPTLASKLRRGDPFTDLCFLNSPIFKQKKDLRRSKKSMKQIQ

SEQ ID NO: 6169 - protein, 171 aa, Homo sapiens
MSSGNAKIGHPAPNFKATAVMPDGQFKDISLSDYKGKYVVFFFYPLDFTFVCPTEIIAFSDRAEEFKKLNCQVIGASVDSHFCHLAWVNTPKKQGGLGPMNIPLVSDPKRTIAQDYGVLKADEGISFRGLFIIDDKGILRQITVNDLPVGRSVDETLRLVQAFQFTDKHGE

SEQ ID NO: 6170 - protein, 467 aa, Homo sapiens
MEHRIVGPGPYRATRLWNETVELFRAKMPLRKHRCRFKSYEHCFTAAEAVDWLHELLRCSQNFGPEVTRKQTVQLLKKFLKNHVIEDIKGKWGEEDFEDNRHLYRFPPSSPLKPYPKKPPNQKDVIKFPEWNDLPPGTSQENIPVRPVVMNSEMWYKRHSIAIGEVPACRLVHRRQLTEANVEEIWKSMTLSYLQKILGLDSLEEVLDVKLVNSKFIIHNVYSVSKQGVVILDDKSKELPHWVLSAMKCLANWPNCSDLKQPMYLGFEKDVFKTIADYYGHLKEPLLTFHLFDAFVSVLGLLQKEKVAVEAFQICCLLLPPENRRKLQLLMRMMARICLNKEMPPLCDGFGTRTLMVQTFSRCILCSKDEVDLDELLAARLVTFLMDNYQEILKVPLALQTSIEERVAHLRRVQFQKSYPEVYQERFPTPESAALLFPEKPKPKPQLLMWALKKPFQPFQRTRSFRM

SEQ ID NO: 6171 - protein, 150 aa, Homo sapiens
MAENSVLTSTTGRTSLADSSIFDSKVTEISKENLLIGSTSYVEEEMPQIETRVILVQEAGKQEELIKALKTIKIMEVPVIKIKESCPGKSDEKLIKSVINMDIKVGFVKMESVEEFEGLDSPEFENVFVVTDFQDSVFNDLYKADCRVIG

SEQ ID NO: 6172 - protein, 207 aa, Homo sapiens
SSINNIHEMEIQLKDALEKNQQWLVYDQQREVYVKGLLAKIFELEKKTETAAHSLPQQTKKPESEGYLQEEKQKCYNDLLASAKKDLEVERQTITQLSFELSEFRRKYEETQKEVHNLNQLLYSQRRADVQHLEDDRHKTEKIQKLREENDIARGKLEEEKKRSEELLSQVQFLYTSLLKQQEEQTRVALLEQQVLIRVASKFNSAC

SEQ ID NO: 6173 - protein, 170 aa, Homo sapiens
MNKHQKPVLTGQRFKTRKRDEKEKFEPTVFRDTLVQGLNEAGDDLEAVAKFLDSTGSRLDYRRYADTLFDILVAGSMLAPGGTRIDDGDKTKMTNHCVFSANEDHETIRNYAQVFNKLIRRYKYLEKAFEDEMKKPFPKQSRQSWRCCRGFCWAMAPCPPPSSPVSSPTA

SEQ ID NO: 6174 - protein, 96 aa, Homo sapiens
KQPSDVSSECDREGRQLQPAERPPQLRPGAPTSLQTEPQDRSPAPMSCDKSTQTPSPPCQAFNHYLSAMDDSAGSSLRIALHREVQWPLKWLAKSS

SEQ ID NO: 6175 - protein, 530 aa, Homo sapiens
MQVVLDSKLDLPCELQFPQCLLLVVVMDKLPSQPKEVQTLWCTDSQVSETTTRISLLKAVFYSFEQCSGELSLPVHLQGLKSKGKAEVAVTLYQHVCVHLCTFITSFHPSLFAELDAALLNAVLSANMITSLLAMDAWCFLARYGTAELCAHHVTIVAHLIKSCPGECYQLINLSILLKRLFFFMAPPHQLEFIQKFSPKEAENLPLWQHISFQALPPELREQTVHEVTTVGTAECRKWLSRSRTLGELESLNTVLSALLAVCNSAGEALDTGKQTAIIEVVSQLWAFLNIKQVADQPYVQQTFSLLLPLLGFFIQTLDPKLILQAVTLQTSLLKLELPDYVRLAMLDFVSSLGKLFIPEAIQDRILPNLSCMFALLLADRSWLLEQHTLEAFTQFAEGTNHEEIVPQCLSSEETKNKVVSFLEKTGFVDETEAAKVERVKQEKGIFWEPFANVTVEEAKRSSLQPYAKRARQEFPWEEEYRSALHTIAGALEATESLLQKGPAPAWLSMEMEALQERMDKLKRYIHTLG

SEQ ID NO: 6176 - protein, 89 aa, Homo sapiens
MTLKASEGESGGSMHTALSDLYLEHLLQKRSRPELPLSNCLCPLNPAADVSSEGAFRAAGIATPALCLIKGQRLQNKGQTWSPGLYRIH

SEQ ID NO: 6177 - protein, 618 aa, Homo sapiens
MPAGLTEPAGAAPPAAVSASGTVTMAPAGALPVRVESTPVALGAVTKAPVSVCVEPTASQPLRSPVGTLVTKVAPVSAPPKVSSGPRLPAPQIVAVKAPNTTTIQFPANLQLPPGTVLIKSNSGPLMLVSPQQTVTRAETTSNITSRPAVPANPQTVKICTVPNSSSQLIKKVAVTPVKKLAQIGTTVVTTVPKPSSVQSVAVPTSVVTVTPGKPLNTVTTLKPSSLGASSTPSNEPNLKAENSAAVQINLSPTMLENVKKCKNFLAMLIKLACSGSQSPEMGQNVKKLVEQLLDAKIEAEEFTRKLYVELKSSPQPHLVPFLKKSVVALRQLLPNSQSFIQQCVQQTSSDMVIATCTTTVTTSPVVTTTVSSSQSEKSIIVSGATAPRTVSVQTLNPLAGPVGAKAGVVTLHSVGPTAATGGTTAGTGLLQTSKPLVTSVANTVTTVSLQPEKPVVSGTAVTLSLPAVTFGETSGAAICLPSVKPVVSSAGTTSDKPVIGTPVQIKLAQPGPVLSQPAGIPQAVQVKQLVVQQPSGGNEKQVTTISHSSTLTIQKCGQKTMPVNTIIPTSQFPPASILKQITLPGNKILSLQASPTQKNRIKENVTSCFRSTFICVY

SEQ ID NO: 6178 - protein, 217 aa, Homo sapiens
MNSGAMRIHSKGHFQGGIQVKNEKNRPSLKSLKTDNRPEKSKCKPLWGKVFYLDLPSVTISEKLQKDIKDLGGRVEEFLSKDISYLISNKKEAKFAQTLGRISPVPSPESAYTAETTSPHPSHDGSSFKSPDTVCLSRGKLLVEKAIKDHDFIPSNSILSNALSWGVKILHIDDIRYYIEQKKKELYLLKKSSTSVRDGGKRVGSGAQKTRKALQSI

SEQ ID NO: 6179 - protein, 219 aa, Homo sapiens
MAGQPGHMPHGGSSNNLCHTLGPVHPPDPQRHPNTLSFRCSLADFQIEKKIGRGQFSEVYKATCLLDRKTVALKKVQIFEMMDAKARQDCVKEIGLLKQLNHPNIIKYLDSFIEDNELNIVLELADAGDLSQMIKYFKKQKRLIPERTVWKYFVQLCSAVEHMHSRRVMHRDIKPANVFITATGVVKLGDLGLGRFFSSETTAAHSLVGTPYYMSPERI

SEQ ID NO: 6180 - protein, 399 aa, Homo sapiens
HPAGISDLLAEVSAEVDGPVPGYLSSPQSITDTCLYIFTSGTTGLPKAARISHLKILQCQGFYQLCGVHQEDVIYLALPLYHMSGSLLGIVGCMGIGATVVLKSKFSAGQFWEDCQQHRVTVFQYIGELCRYLVNQPPSKAERGHKVRLAVGSGLRPDTWERFVRRFGPLQVLETYGLTEGNVATINYTGQRGAVGRASWLYKHIFPFSLIRYDVTTGEPIRDPQGHCMATSPGEPGLLVAPVSQQSPFLGYAGGPELAQGKLLKDVFRPGDVFFNTGDLLVCDDQGFLRFHDRTGDTFRWKGENVATTEVAEVFEALDFLQEVNVYGVTVPGHEGRAGMAALVLRPPHALDLMQLYTHVSENLPPYARPRFLRLQAVGAYLPLTTARYSALLAGNLRI

SEQ ID NO: 6181 - protein, 463 aa, Homo sapiens
MGRKKIQITRIMDERNRQVTFTKRKFGLMKKAYELSVLCDCEIALIIFNSTNKLFQYASTDMDKVLLKYTEYNEPHESRTNSDIVEALNKKENKGCESPDPDSSYALTPRTEEKYKKINEEFDNMIKSHKIPAVPPPNFEMPVSIPVSSHNSLVYSNPVSSLGNPNLLPLAHPSLQRNSMSPGVTHRPPSAGNTGGLMGGDLTSGAGTSAGNGYGNPRNSPGLLVSPGNLNKNMQAKSPPPMNLGMNNRKPDLRVLIPPGSKNTMPSVNQRINNSQSAQSLATPVVSVATPTLPGQGMGGYPSAISTTYGTEYSLSSADLSSLSGFNTASALHLGSVTGWQQQHLHNMPPSALSQLGACTSTHLSQSSNLSLPSTQSLNIKSEPVSPPRDRTTTPSRYPQHTRHEAGRSPVDSLSSCSSSYDGSDREDHRNEFHSPIGLTRPSPDERESPSVKRMRLSEGWAT

SEQ ID NO: 6182 - protein, 373 aa, Homo sapiens
RVRRGPLPADRPRALGPARRCSRHPHPAPFRVCSEGAAHRLRRPERLPLPSRALRPRPAHTPILGPAPRACPGAPRASDSPTCAAAAATAWPRTRAVERKGCQVAAAAGVRGTGCPSRADLEKDSWNDTKEDVFVHQTAIKKNNPRKYLRSVGDGETVEFDVVEGEKGAEAANVTGPGGVPVQGSKYAADRNHYRRYPRRRGPPRNYQQNYQNSESGEKNEGSESAPEGQAQQRRPYRRRRFPPYYMRRPYGRRPQYSNPPVQGEVMEGADNQGAGEQGRPVRQNMYRGYRPRFRRGPPRQRQPREDGNEEDKENQGDETQGQQPPQRRYRRNFNYRRRRPENPKPQDGKETKAADPPAENSSAPEAEQGGAE

SEQ ID NO: 6183 - protein, 181 aa, Homo sapiens
MSQSNRELVVDFLSYKLSQKGYSWSQFSDVEENRTEAPEGTESEMETPSAINGNPSWHLADSPAVNGATGHSSSLDAREVIPMAAVKQALREAGDEFELRYRRAFSDLTSQLHITPGTAYQSFEQVVNELFRDGVNWGRIVAFFSFGGALCVESVDKEMQVLVSRIAAWMATYLNDHLEPW

SEQ ID NO: 6184 - protein, 296 aa, Homo sapiens
MAPEENAGTELLLQSFERRFLAARTLRSFPWQSLEAKLRDSSDSELLRDILHKTVKHPVCVKHPPSVKYARCFLSELIKKPSGGSVTLSESTAIISYGTTGLVTWDAALYLAEWAIENPAVFTNRTVLELGSGAGLTGLAICKMCRPRAYIFSDCHSRVLEQLRGNVLLNGLSLEADITAKLDSPRVTVAQLDWDVATVHQLSAFQPDVVIAADVLYCPEAIMSLVGVLRRLAACREHQRAPEVYVAFTVRNPETCQLFTTELGRAGIRWEVEPRHEQKLFPYEEHLEMAMLNLTL

SEQ ID NO: 6185 - protein, 374 aa, Homo sapiens
SAVDNILLKLAKFKIGFLRLGQIQKVHPAIQQFTEQEICRSKSIKSLALLEELYNSQLIVATTCMGINHPIFSRKIFDFCIVDEASQISQPICLGPLFFSRRFVLVGDHQQLPPLVLNREARALGMSESLFKRLEQNKSAVVQLTVQYRMNSKIMSLSNKLTYEGKLECGSDKVANAVINLRHFKDVKLELEFYADYSDNPWLMGVFEPNNPVCFLNTDKVPAPEQVEKGGVSNVTEAKLIVFLTSIFVKAGCSPSDIGIIAPYRQQLKIINDLLARSIGMVEVNTVDKYQGRDKSIVLVSFVRSNKDGTVGELLKDWRRLNVAITRAKHKLILLGCVPSLNCYPPLEKLLNHLNSEKLISFFFCIWSHLIALL

SEQ ID NO: 6186 - protein, 388 aa, Homo sapiens
MEPLASNIQVLLQAAEFLERREREAEHGYASLCPHRSPGPIHRRKKRPPQAPGAQDSGRSVHNELEKRRRAQLKRCLERLKQQMPLGADCARYTTLSLLRRARMHIQKLEDQEQRARQLKERLRSKQQSLQRQLEQLRGLAGAAERERLRADSLDSSGLSSERSDSDQGECPEAEGLCGPRGEPGLLTGPLPAQRSWRWMWRAWCLGVRPSCCGASSPARSTATRTAAAPGYDVPHPGRASALYSCQAHLPGRSPPQAFRAARSHLLEWTKRTLVWEQVLPKHPAAGCQAGPLEGKGQDSSGPPWTPAGQAAWARAQAFGSAAPKGTGSLLGLFPSWTRPPAFASHKLYSIFIKSLFHNFPSIVLPNENGGTPNHRPTGRGNNISSHH

SEQ ID NO: 6187 - protein, 220 aa, Homo sapiens
MFSEQAAQRAHTLLSPPSANNATFARVPVATYTNSSQPFRLGERSFSRQYAHIYATRLIQMRPFLENRAQQHWGSGVGVKKLCELQPEEKCCVVGTLFKAMPLQPSILREVSEEHNLLPQPPRSKYIHPDDELVLEDELQRIKLKGTIDVSKLVTGTVLAVFGSVRDDGKFLVEDYCFADLAPQKPAPPLDTDRFVLLVSGLGLGGGGGESLLGTQLLVD

SEQ ID NO: 6188 - protein, 715 aa, Homo sapiens
MFGRKRSVSFGGFGWIDKTMLASLKVKKQELANSSDATLPDRPLSPPLTAPPTMKSSEFFEMLEKMQDDYIPYPSIDEVVEKGGPYPQVILPQFGGYWIEDPENVGTPTSLGSSICEEEEEDNLSPNTFGYKLECKGEARAYRRHFLGKDHLNFYCTGSSLGNLILSVKCEEAEGIEYLRVILRSKLKTVHERIPLAGLSKLPSVPQIAKAFCDDAVGLRFNPVLYPKASQMIVSYDEHEVNNTFKFGVIYQKARQTLEEELFGNNEESPAFKEFLDLLGDTITLQDFKGFRGGLDVTHGQTGVESVYTTFRDREIMFHVSTKLPFTDGDAQQLQRKRHIGNDIVAIIFQEENTPFVPDMIASNFLHAYIVVQVETPGTETPSYKVSVTAREDVPTFGPPLPSPPVFQKGPEFREFLLTKLTNAENACCKSDKFAKLEDRTRAALLDNLHDELHAHTQAMLGLGPEEDKFENGGHGGFLESFKRAIRVRSHSMETMVGGQKKSHSGGIPGSLSGGISHNSMEVTKTTFSPPVVAATVKNQSRSPIKRRSGLFPRLHTGSEGQGDSRARCDSTSSTPKTPDGGHSSQEIKSETSSNPSSPEICPNKEKPFMKLKENGRAISRSSSSTSSVSSTAGEGEAMEEGDSGGSQPSTTSPFKQEVFVYSPSPSSESPSLGAAATPIIMSRSPTDAKSRNSPRSNLKFRFDKLSHASSGAGH

SEQ ID NO: 6189 - protein, 154 aa, Homo sapiens
AATTIAYGVIELYVKLDGQFEFCLLRGKQGGFENKKRIDSVYLDPLVFREFAFIDMPDAAHGISSQDGPLSVLKQATLLLERNFHPFAELPEPQQTALSDIFQAVLFDDELLMVLEPVKDILGRSSSLTLSCTNGESHTSCQPSSHPDSVSSLS

SEQ ID NO: 6190 - protein, 547 aa, Homo sapiens
VSTGADGTVCFWQWDLESLKFSPRPLKFTEKPRPGVQMLCSSFSVGGMFLATGSTDHVIRMYFLGFEAPEKIAELESHTDKVDSIQFCNNGDRFLSGSRDGTARIWRFEQLEWRSILLDMATRISGDLSSEEERFMKPKVTMIAWNQNDSIVVTAVNDHVLKVWNSYTGQLLHNLMGHADEVFVLETHPFDSRIMLSAGHDGSIFIWDITKGTKMKHYFNMIEGQGHGAVFDCKFSQDGQHFACTDSHGHLLIFGFGCSKPYEKIPDQMFFHTDYRPLIRDSNNYVLDEQTQQAPHLMPPPFLVDVDGNPHPTKYQRLVPGRENSADEHLIPQLGYVATSDGEVIEQIISLQTNDNDERSPESSILDGMIRQLQQQQDQRMGADQDTIPRGLSNGEETPRRGFRRLSLDIQSPPNIGLRRSGQVEGVRQMHQNAPRSQIATERDLQAWKRRVVVPEVPLGIFRKLEDFRLEKGEEERNLYIIGRKRKTLQLSHKETSCDQSEGSGSSEEDEWRSDRKSESYSESSSDSSSRYSDWTADAGINLQPPL

SEQ ID NO: 6191 - protein, 297 aa, Homo sapiens
MEVMNLMEQPIKVTEWQQTYTYDSGIHSGANTCVPSVSSKGIMEEDEACGRQYTLKKTTTYTQGVPPSQGDLEYQMSTTARAKRVREAMCPGVSGEDSSLLLATQVEGQATNLQRLAEPSQLLKSAIVHLINYQDDAELATRALPELTKLLNDEDPVVVTKAAMIVNQLSKKEASRRALMGSPQLVAAVVRTMQNTSDLDTARCTTSILHNLSHHREGLLAIFKSGGIPALVRMLSSPVESVLFYAITTLHNLLLYQEGAKMAVRLADGLQKMVPLLNKNNPKFLAITTDCLQLLAY

SEQ ID NO: 6192 - protein, 1023 aa, Homo sapiens
MAVVNEDTQGNVSQLQAEVKRLKEQLAELASGQTPPESFLTRDKKKTNYMEYFQEAMLFFKKSEQEKKSLIEKVTQLEDLTLKKEKFIQSNKMIVKFREDQIIRLEKLHKESRGGFLPEEQDRLLSELRNEIQTLREQIEHHPRVAKYAMENHSLREENRRLRLLEPVKRAQEMDAQTIAKLEKAFSEISGMEKSDKNQQGFSPKAQKEPCLFANTEKLKAQLLQIQTELNNSKQEYEEFKELTRKRQLELESELQSLQKANLNLENLLEATKACKRQEVSQLNKIHAETLKIITTPTKAYQLHSRPVPKLSPEMGSFGSLYTQNSSILDNDILNEPVPPEMNEQAFEAISEELRTVQEQMSALQAKLDEEEHKNLKLQQHVDKLEHHSTQMQELFSSERIDWTKQQEELLSQLNVLEKQLQETQTKNDFLKSEVHDLRVVLHSADKELSSVKLEYSSFKTNQEKEFNKLSERHMHVQLQLDNLRLENEKLLESKACLQDSYDNLQEIMKFEIDQLSRNLQNFKKENETLKSDLNNLMELLEAEKERNNKLSLQFEEDKENSSKEILKVLEAVRQEKQKETAKCEQQMAKVQKLEESLLATEKVISSLEKSRDSDKKVVADLMNQIQELRTSVCEKTETIDTLKQELKDINCKYNSALVDREESRVLIKKQEVDILDLKETLRLRILSEDIERDMLCEDLAHATEQLNMLTEASKKHSGLLQSAQEELTKKEALIQELQHKLNQKKEEVEQKKNEYNFKMRQLEHVMDSAAEDPQSPKTPPHFQTHLAKLLETQEQEIEDGRASKTSLEHLVTKLNEDREVKNAEILRMKEQLREMENLRLESQQLIEKNWLLQGQLDDIKRQKENSDQNHPDNQQLKNEQEESIKERLAKSKIVEEMLKMKADLEEVQSALYNKEMECLRMTDEVERTQTLESKAFQEKEQLRSKLEEMYEERERTSQEMEMLRKQVECLAEENGKLVGHQNLHQKIQYVVRLKKENVRLAEETEKLRAENVFLKEKKRSES

SEQ ID NO: 6193 - protein, 118 aa, Homo sapiens
MDYTLDLSVTTVTDYYYPDIFSSPCDAELIQTNDLLSAGPVGVWDCNVQSGVWLLLHWLLQQHVFHHPHECGQVPGCCPCRVCPKGEDDQDGHNAVPGSMANRHYGYHPIASVLPSGL

SEQ ID NO: 6194 - protein, 183 aa, Homo sapiens
MAVPPTYADLGKSARDVFTKGYGFGLIKLDLKTKSENGLEFTSSGSANTETTKVTGSLETKYRWTEYGLTFTEKWNTDNTLGTEITVEDQLARGLKLTFDSSFSPNTGKKNAKIKTGYKREHINLGCDMDFDIAGPSIRGALVLGYEGWLAGYQMNFETAKSRVTQSNFAVGYKTDEFQLHTN

SEQ ID NO: 6195 - protein, 679 aa, Homo sapiens
MIGYLGYCKGVEPKTECERLAGTESPVREEPGEDFPAARRLYWDDLKRKLSEKLDSTDFTGTIKLLNENSYVPREAGSQKDENLALYVENQFREFKLSKVWRDQHFVKIQVKDSAQNSVIIVDKNGRLVYLVENPGGYVAYSKAATVTGKLVHANFGTKKDFEDLYTPVNGSIVIVRAGKITFAEKVANAESLNAIGVLIYMDQTKFPIVNAELSFFGHAHLGTGDPYTPGFPSFNHTQFPPSRSSGLPNIPVQTISRAAAEKLFGNMEGDCPSDWKTDSTCRMVTSESKNVKLTVSNVLKEIKILNIFGVIKGFVEPDHYVVVGAQRDAWGPGAAKSGVGTALLLKLAQMFSDMVLKDGFQPSRSIIFASWSAGDFGSVGATEWLEGYLSSLHLKAFTYINLDKAVLGTSNFKVSASPLLYTLIEKTMQNVKHPVTGQFLYQDSNWASKVEKLTLDNAAFPFLAYSGIPAVSFCFCEDTDYPYLGTTMDTYKELIERIPELNKVARAAAEVAGQFVIKLTHDVELNLDYERYNSQLLSFVRDLNQYRADIKEMGLSLQWLYSARGDFFRATSRLTTDFGNAEKTDRFVMKKLNDRVMRVEYHFLSPYVSPKESPFRHVFWGSGSHTLPALLENLKLRKQNNGAFNETLFRNQLALATWTIQGAANALSGDVWDIDNEF

SEQ ID NO: 6196 - protein, 198 aa, Homo sapiens
VHHIVKQALQRYSEDRIGLADYALESGGASVISTRCSETYETKTALLSLFGIPLWYHSQSPRVILQPDVHPGNCWAFQGPQGFAVVRLSARIRPTAVTLEHVPKALSPNSTISSAPKDFAIFGFDEDLQQEGTLLGKFTYDQDGEPIQTFHFQVRDAAVLAEVAQTPHPGSRCSLGTYPARHGVQRGKPCSPFPQLKM

SEQ ID NO: 6197 - protein, 121 aa, Homo sapiens
MSKTLGSGACGEVKLAFERKTCKKVAIKIISKRKFAIGSAREADPALNVETEIEILKKLNHPCIIKIKNFFDAEDYYIVLELMEGGELFDKVVGNKRLKEATCKLYFYQMLLAVQYLHENG

SEQ ID NO: 6198 - protein, 105 aa, Homo sapiens
MDPGSRWRNLPSGPSLKHLTDPSYGIPREQQKAALQELTRAHVESFNYAVHEGLGLAVQGSLPLMELPTDHTVSATLSCWTVSWLAGWIRILLQASQILFVILRC

SEQ ID NO: 6199 - protein, 66 aa, Homo sapiens
MQIPQAPWPVVWAVLQLGWRPGWFLDSPDRPWNPPTFSPALLVVTEGDNATFTCSFSNTSESFVLN

SEQ ID NO: 6200 - protein, 142 aa, Homo sapiens
ESPSVSSTHRVSDPKFHPLHSKIIIIKKGHAKDSQRYKVDYESQSTDTQNFSSESKRETEYGPCRREMEDTLNHLKFLNVLSPRGVHIPNCDKKGFYKKKQCRPSKGRKRGFCWCVDKYGQPLPGYTTKGKEDVHCYSMQSK

SEQ ID NO: 6201 - protein, 225 aa, Homo sapiens
MEEEEMNDGSQMVRSQESLTFQDVAVDFTREEWDQLYPAQKNLYRDVMLENYRNLVALGYQLCKPEVIAQLELEEEWVIERDSLLDTHPGDQSHVMSVVRSSVHARWIVGKVIGTKMQKTAKVRVTRLVLDPYLLKYFNKRKTYFAHDALQQCTVGDIVLLRALPVPRAKHVKHELAEIVFKVGKVIDPVTGKPCAGTTYLESPLSSETTQLSKNLEELNISSAQ

SEQ ID NO: 6202 - protein, 25 aa, Homo sapiens
MSNQTDLLALGTAVGSILLYSTVKG

SEQ ID NO: 6203 - protein, 48 aa, Homo sapiens
MLRLPTVFRQMRPVSRVLAPHLTRAYAKDVKFGADARALMLQGKNSDY

SEQ ID NO: 6204 - protein, 277 aa, Homo sapiens
EDEKLKKLVEQNGTDDWKVIANYLPNRTDVQCQHRWQKVLNPELIKGPWTKEEDQRVIELVQKYGPKRWSVIAKHLKGRIGKQCRERWHNHLNPEVKKTSWTEEEDRIIYQAHKRLGNRWAEIAKLLPGRTDNAIKNHWNSTMRRKVEQEGYLQESSKASQPAVATSFQKNSHLMGFAQAPPTAQLPATGQPTVNNDYSYYHISEAQNVSSHVPYPVALHVNIVNVPQPAAAAIQRHYNDEDPEKEKRIKELELLLMSTENELKGQQVLPVRLSSCA

SEQ ID NO: 6205 - protein, 56 aa, Homo sapiens
MDARRVPQKDLRVKKNLKKFRYVKLISMETSSSSDDSCDSFASDNFANTKVRCKMY

SEQ ID NO: 6206 - protein, 182 aa, Homo sapiens
HLGKIEELLSGENRGPILLPYQFRMEEIEGFRYRCRDAMRSVTKQAIREARLKEIKEELLHSEKLKTYFEDNPRDLQLLRHDLPLHPAVVKPHLGHVPDYLVPPALRGLVRPHKKRKKLSSSCRKAKVRLLGTADSPRTPPNLLFCHHQNVEAPCPREGKRGCPREGKRGHPRTGPQKSGVG

SEQ ID NO: 6207 - protein, 88 aa, Homo sapiens
MNPAAEAEFNILLATDSYKVTHYKQYPPNTSKVYSYFECREKKTENSKLRKVKYEETVFYGLQYILNKYLKGKVVTKEKIQEAKDVYK

SEQ ID NO: 6208 - protein, 111 aa, Homo sapiens
HRFFRLYCHAPCMSGYLVDKFADRERKVALKAMIKTVFSLSLSSLHSGTRPGALAHPMPGGQWKEDRPSSPCPPAAGAPSKPAHRPLPHLLRHRLLFPAPWGLRVWGGGAA

SEQ ID NO: 6209 - protein, 216 aa, Homo sapiens
MELMKLTPEKVQNWNSEILAKQKPLIAKPSAKLLFVNRLKGKKYKTNSSTKVLQDASNSIDHRIPNSQRKISADTIGDEGFFDLLSRFQSNRMDDQRCCLQEKNCHTASTTTSSTPPKMMLKTSSVPVVSPNTDEFLDLLASSQSRRLDDQRASFSNLPGLRLTQNSQSVLSHLMTNDNKEADEDFFDILVKCQVCLYIFFVLHTAQIPLKTLVVL

SEQ ID NO: 6210 - protein, 234 aa, Homo sapiens
VSTGADGTVCFWQWDLESLKFSPRPLKFTEKPRPGVQMLCSSFSVGGMFLATGSTDHVIRMYFLGFEAPEKIAELESHTDKVDSIQFCNNGDRFLSGSRDGTARIWRFEQLEWRSILLDMATRISGDLSSEEERFMKPKVTMIAWNQNDSIVVTAVNDHVLKVWNSYTGQLLHNLMGHADEVFVLETHPFDSRIMLSAGHDGSIFIWDITKGTKMKHYFNMIEGQGHGAVFDYS

SEQ ID NO: 6211 - protein, 188 aa, Homo sapiens
MSQSNRELVVDFLSYKLSQKGYSWSQFSDVEENRTEAPEGTESEMETPSAINGNPSWHLADSPAVNGATGHSSSLDAREVIPMAAVKQALREAGDEFELRYRRAFSDLTSQLHITPGTAYQSFEQVVNELFRDGVNWGRIVAFFSFGGALCVESVDKEMQVLVSRIAAWMATYLNDHLEPWIQENGGW

SEQ ID NO: 6212 - protein, 155 aa, Homo sapiens
MLKAKILFVGPCESGKTVLANFLTESSDITEYSPTQGVRFESCWPALMKDAHGVVIVFNADIPSHRKEMEMWYSCFVQQPSLQDTQCMLIAHHKPGSGDDKGSLSLSPPLNKLKLVHSNLEDDPEEIRMEFIKYLKSIINSMSESRDREEMSIMT

SEQ ID NO: 6213 - protein, 262 aa, Homo sapiens
MPFLGQDWRSPGQNWVKTADGWKRFLDEKSGSFVSDLSSYCNKEVYNKENLFNSLNYDVAAKKRKKDMLNSKTKTQYFHQEKWIYVHKGSTKERHGYCTLGEAFNRLDFSTAILDSRRFNYVVRPAFKGLTFTDLPLCLQLNIMQRLSDGRDLVSLGQAAPDLHVLSEDRLLWKKLCQYHFSERQIRKRLILSDKGQLDWKKMYFKLVRCYPRKEQYGDTLQLCKHCHILSWKGTDHPCTANNPESCSVSLSPQDFINLFKF

SEQ ID NO: 6214 - protein, 98 aa, Homo sapiens
MIHTNLKKKFSCCVLVFLLFAVICVWKEKKKGSYYDSFKLQTKEFQVLKSLGKLAMGSDSQSVSSSSTQDPHRGRQTLGSLRGLAKAKPEASFQVWNK

SEQ ID NO: 6215 - protein, 188 aa, Homo sapiens
MAAIRKKLVIVGDGACGKTCLLIVFSKDQFPEVYVPTVFENYIADIEVDGKQVELALWDTAGQEDYDRLRPLSYPDTDVILMCFSIDSPDSLENIPEKWTPEVKHFCPNVPIILVGNKKDLRQDEHTRRELAKMKQEPVRSEEGRDMANRISAFGYLECSAKTKEGVREVFEMATRAGLQVRKNKRRR

SEQ ID NO: 6216 - protein, 106 aa, Homo sapiens
VAKTTPFNTREPVMLACYVWGFYPAEVTITWRKNGKLVMPHSSAHKTAQPNGDWTYQTLSHLALTPSYGDTYTCVVEHTGAPEPILRDWSYTPLPGSNYSEGWHIS

SEQ ID NO: 6217 - protein, 510 aa, Homo sapiens
ELIDSREIGASRLSRVESLAPEVKQNTTASGCELMHTEMQALRADWKQWEDSVFQTQSCLENLVSQMALSEQEFSGQVAQLEQALEQFSALLKTWAQQLTLLEGKNTDEEIVECWHKGQEILDALQKAEPRTEDLKSQLNELCRFSRDLSTYSGKVSGLIKEYNCLCLQASKGCQNKEQILQQRFRKAFRDFQQWLVNAKITTAKCFDIPQNISEVSTSLQKIQEFLSESENGQHKLNMMLSKGELLSTLLTKEKAKGIQAKVTAAKEDWKNFHSNLHQKESALENLKIQMKDFEVSAEPIQDWLSKTEKMVHESSNRLYDLPAKRREQQKLQSVLEEIHCYEPQLNRLKEKAQQLWEGQAASKSFRHRVSQLSSQYLALSNLTKEKVSRLDRIVAEHNQFSLGIKELQDWMTDAIHMLDSYCHPTSDKSVLDSRTLKLEVCIFTQKYLQPTEFVFLKISRLHPPGVMMSHSLHDKSQMLCECNAVCLGCTCQRIPESSDPGCFPKNKIK

SEQ ID NO: 6218 - protein, 47 aa, Homo sapiens
MAKYGEHEASPDNGQNEFSDIIKSRSDEHNDVQKKTFTKWINARFSK

SEQ ID NO: 6219 - protein, 60 aa, Homo sapiens
MNPAAEAEFNILLATDSYKVTHYKQYPPNTSKVYSYFECREKKTENSKLRKVKYEETVFY

SEQ ID NO: 6220 - protein, 92 aa, Homo sapiens
MDPGSRWRNLPSGPSLKHLTDPSYGIPREQQKAALQELTRAHVESFNYAVHEGLGLAVQSTYSSKRDHLQRGQCLSSRMPGPKEYLPWEVDS

SEQ ID NO: 6221 - protein, 380 aa, Homo sapiens
MQEKVKTNGKLVKQELKDREMVETQINSVKCWVQETKEYLGNPTIEIDAQLEELQILLTEATNHRQNIEKMAEEQKEKYLGLYTILPSELSLQLAEVALDLKIRDQTLEDLLGRMTWQVHGLFIFLRQSLALSPRLECSETISAYCNLLGLSSSRASASQVAGIPGMHHHTRLIFCIFSKKRQGFAMLASLVSNSWPQVSCLPQPPKVLGLQIQDKIKEVEQSKATSQELSRQIQKLAKDLTTILTKLKAKTDNVVQAKTDQKVLGEELDGCNSKLMELDAAVQKFLEQNGQLGKPLAKKIGKLTELHQQTIRQAENRLSKLNQAASHLEEYNEMLELILKWIEKAKVLAHGTIAWNSASQLREQYILHQVTLGKIIFKK

SEQ ID NO: 6222 - protein, 92 aa, Homo sapiens
VYGAKDIELSPEAQAKIDRYTQQGFGNLPICMAKTHLSLSHQPDKKGVPRDFILPISDVRASIGAGFIYPLVGTRSSPLALVGESQPKQVHP

SEQ ID NO: 6223 - protein, 64 aa, Homo sapiens
MSAEVIHQVEEALDTDEKEMLLFLCRDVAIDVVPPNVRDLLDILRERGKLSVGDLAELLYRVRR

SEQ ID NO: 6224 - protein, 157 aa, Homo sapiens
MSKKISGGSVVEMQGDEMTRIIWELIKEKLIFPYVELDLHSYDLGIENRDATNDQVTKDAAEAIKKHNVGVKCATITPDEKRVEEFKLKQMWKSPNGTIRNILGGTVFREAIICKNIPRLVSGWVKPIIIGRHAYGDQYRATDFVVPGPGKVEITYT

SEQ ID NO: 6225 - protein, 492 aa, Homo sapiens
MRSAVLKSLQPGSLPDCKAALGGSGNISTSPFWSRRHSEGQDTGTRAVLLYGAGARVCGSVTPSSFGGKSAAFGFLQWWAKDSPPRCSVESWQCPLWKTGTWCKPWEKVPMEKPDIGMPEPDAQRFFHQLMAGVVYLHGIGITHRDIKPENLLLDERDNLKISDFGLATVFRYNNRERLLNKMCGTLPYVAPELLKRREFHAEPVDVWSCGIVLTAMLAGELPWDQPSDSCQEYSDWKEKKTYLNPWKKIDSAPLALLHKILVENPSARITIPDIKKDRWYNKPLKKGAKRPRVTSGGVSESPSGFSKHIQSNLDFSPVNSASSEENVKYSSSQPEPRTGLSLWDTSPSYIDKLVQGISFSQPTCPDHMLLNSQLLGTPGSSQNPWQRLVKRMTRFFTKLDADKSYQCLKETCEKLGYQWKKSCMNQVTISTTDRRNNKLIFKVNLLEMDDKILVDFRLSKGDGLEFKRHFLKIKGKLIDIVSSQKIWLPAT

SEQ ID NO: 6226 - protein, 193 aa, Homo sapiens
EQLREMENLRLESQQLIEKNWLLQGQLDDIKRQKENSDQNHPDNQQLKNEQEESIKERLAKSKIVEEMLKMKADLEEVQSALYNKEMECLRMTDEVERTQTLESKAFQEKEQLRSKLEEMYEERERTSQEMEMLRKQVECLAEENGKLVGHQNLHQKIQYVVRLKKENVRLAEETEKLRAENVFLKEKKRSES

SEQ ID NO: 6227 - protein, 47 aa, Homo sapiens
MNSLLIGELSPEQPSFEPTKNKELTDEFRELRATVERMGLMKANHVF

SEQ ID NO: 6228 - protein, 286 aa, Homo sapiens
MAAPEAPPLDRVFRTTWLSTECDSHPLPPSYRKFLFETQAADLAGGTTVAAGNLLNESEKDCGQDRRAPGVQPCRLVTMTSVVKTVYSLQPPSALSGGQPADTQTRATSKSLLPVRSKEVDVSKQLHSGGPENDVTKITKLRRENGQMKATDTATRRNVRKGYKPLSKQKSEEELKDKNQLLEAVNKQLHQKLTETQGELKDLTQKVELLEKFRDNCLAILESKGLDPALGSETLASRQESTTDHMDSMLLLETLQEELKLFNETAKKQMEELQIAWMNHGILHQM

SEQ ID NO: 6229 - protein, 557 aa, Homo sapiens
MDDLDALLADLESTTSHISKRPVFLSEETPYSYPTGNHTYQEIAVPPPVPPPPSSEALNGTILDPLDQWQPSSSRFIHQQPQSSSPVYGSSAKTSSVSNPQDSVGSPCSRVGEEEHVYSFPNKQKSAEPSPTVMSTSLGSNLSELDRLLLELNAVQHNPPGFPADEANSSPPLPGALSPLYGVPETNSPLGGKAGPLTKEKPKRNGGRGLEDVRPSVESLLDELESSVPSPVPAITVNQGEMSSPQRVTSTQQQTRISASSATRELDELMASLSDFKFMAQGKTGSSSPPGGPPKPGSQLDSMLGSLQSDLNKLGVATVAKGVCGACKKPIAGQVVTAMGKTWHPEHFVCTHCQEEIGSRNFFERDGQPYCEKDYHNLFSPRCYYCNGPILDKVVTALDRTWHPEHFFCAQCGAFFGPEGFHEKDGKAYCRKDYFDMFAPKCGGCARAILENYISALNTLWHPECFVCRECFTPFVNGSFFEHDGQPYCEVHYHERRGSLCSGCQKPITGRCITAMAKKFHPEHFVCAFCLKQLNKGTFKEQNDKPYCQNCFLKLFC

SEQ ID NO: 6230 - protein, 82 aa, Homo sapiens
MAKQPSDVSSECDREGRQLQPAERPPQLRPGAPTSLQTEPQASMRQAEPADMRPEIWIAQELRRIGDEFNAYYARRMPLPPD

SEQ ID NO: 6231 - protein, 191 aa, Homo sapiens
CRVQPLCEQLQFMASHGNDAARARFESKVPSFYYRPTPSDCQLLREQWIRAKYERQEFIYPEKQEPYSAGYREGFLWKRGRDNGQFLSRKFVLTEREGALKYFNRNDAKEPKAVMKIEHLNATFQPAKIGHPHGLQVTYLKDNSTRNIFIYHEDGKEIVDWFNALRAARFHYLQVAFPGAGDADLVPKLSR

SEQ ID NO: 6232 - protein, 185 aa, Homo sapiens
MFFTCGPNEAMVVSGFCRSPPVMVAGGRVFVLPCIQQIQRISLNTLTLNVKSEKVYTRHGVPISVTGIAQVKIQGQNKEMLAAACQMFLGKTEAEIAHIALETLEGHQRAIMAHMTVEEIYKDRQKFSEQVFKVASSDLVNMGISVVSYTLKDIHDDQDYLHSLGKARTAQVQKDARIGEAEAKR

SEQ ID NO: 6233 - protein, 262 aa, Homo sapiens
MRGGPRCLRRRGGPYKTEPATDLGRWRLNCERGRQTWTYLQDERAGREQTGLEAYALGLDTKNYFKDLPKAHTAFEGALNGMTFYVGLQAEDGHWTGDYGGPLFLLPGLLITCHVARIPLPAGYREEIVRYLRSVQLPDGGWGLHIEDKSTVFGTALNYVSLRILGVGPDDPDLVRARNILHKKGGAVAIPSWGKFWLAVLNVYSWEGLNTLFPEMWLFPDWAPAHPSTLWCHCRQVYLPMSYCYAVRLSAAEDPLVQSLRQ

SEQ ID NO: 6234 - protein, 61 aa, Homo sapiens
MDPNCSCAAGVSCTCASSCKCKECKCTSCKKSCCSCCPVGCAKCAQGCICKGASEKCSCCA

SEQ ID NO: 6235 - protein, 124 aa, Homo sapiens
MVFRRFVEVGRVAYVSFGPHAGKLVAIVDVIDQNRALVDGPCTQVRRQAMPFKCMQLTDFILKFPHSAHQKYVRQAWQKADINTKWAATRWAKKIEARERKAKMTDFDRFKVMKAKKMEQNNQE

SEQ ID NO: 6236 - protein, 631 aa, Homo sapiens
MESYHKPDQQKLQALKDTANRLRISSIQATTAAGSGHPTSCCSAAEIMAVLFFHTMRYKSQDPRNPHNDRFVLSKGHAAPILYAVWAEAGFLAEAELLNLRKISSDLDGHPVPKQAFTDVATGSLGQGLGAACGMAYTGKYFDKASLPSSWDYSYRVYCLLGDGELSEGSVWEAMAFASIYKLDNLVAILDINRLGQSDPAPLQHQMDIYQKRCEAFGWHAIIVDGHSVEELCKAFGQAKHQPTAIIAKTFKGRGITGVEDKESWHGKPLPKNMAEQIIQEIYSQIQSKKKILATPPQEDAPSVDIANIRMPSLPSYKVGDKIATRKAYGQALAKLGHASDRIIALDGDTKNSTFSEIFKKEHPDRFIECYIAEQNMVSIAVGCATRNRTVPFCSTFAAFFTRAFDQIRMAAISESNINLCGSHCGVSIGEDGPSQMALEDLAMFRSVPTSTVFYPSDGVATEKAVELAANTKGICFIRTSRPENAIIYNNNEDFQVGQAKVVLKSKDDQVTVIGAGVTLHEALAAAELLKKEKINIRVLDPFTIKPLDRKLILDSARATKGRILTVEDHYYEGGIGEAVSSAVVGEPGITVTHLAVNRVPRSGKPAELLKMFGIDRDAIAQAVRGLITKA

SEQ ID NO: 6237 - protein, 454 aa, Homo sapiens
ILSQSEAKNPRINQLSARWQQVWLLALERQRKLNDALDRLEELKEFANFDFDVWRKKYMRWMNHKKSRVMDFFRRIDKDQDGKITRQEFIDGILASKFPTTKLEMTAVADIFDRDGDGYIDYYEFVAALHPNKDAYRPTTDADKIEDEVTRQVAQCKCAKRFQVEQIGENKYRFFLGNQFGDSQQLRLVRILRSTVMVRVGGGWMALDEFLVKNDPCRARGRTNIELREKFILPEGASQGMTPFRSRGRRSKPSSRAASPTRSSSSASQSNHSCTSMPSSPATPASGTKTSLQFSRCYDKPWLVNSKAGTPIRDSHSPDLQLPTPEVIPSSGSKLKRPTPTFHSSRTSLAGDTSNSSSPASTGAKTNRADPKKSASRPGSRAGSRAGSRASSRRGSDASDFDLLETQSACSDTSESSAAGGQGNSRRGLNKPSKIPTMSKKTTTASPRTPGPKR

SEQ ID NO: 6238 - protein, 197 aa, Homo sapiens
MEAKGNGDMKEESAAQLGCCHRPMALGGTGGSLSPSLDFQLFRGDQVFSACRPLPDMVDAHGPSCASWLCPLPLAPGRSALLACLQDLDLNLCTPQPAPLGTDLQGLQEDALSMKHEPPGLQASSTDDKKFTVKYPQNKDKLGKQPERAGEGAPCPAFSSHNSSSPPPLQNRKSPSPLAFCPCPPVNSISKELPFLL

SEQ ID NO: 6239 - protein, 526 aa, Homo sapiens
MPPKKKPQLPPKPAHLTQSHPPQRLPKPLPLSPSFSSEVGQREHQRGERDTAIPQPAKVPTTVDQGHIPLARCPSGHSQPSLQHGLSTTAPRPTKNQATGSNAQSSEPPKLNALNHDPTSPQWGPGPSGEQPMEGSHQGAPESPDSLQRNQKELQGLLNQVQALEKEAASSVDVQALRRLFEAVPQLGGAAPQAPAAHQKPEASVEQAFGELTRVSTEVAQLKEQTLARLLDIEEAVHKALSSMSSLQPEASARGHFQGPPKDHSAHKISVTVSSSARPSGSGQEVGGQTAVKNQAKVECHTEAQSQVKIRNHTEARGHTASTAPSTRRQETSREYLCPPRVLPSSRDSPSSPTFISIQSATRKPLETPSFKGNPDVSVKSTQLAQDIGQALLHQKGVQDKTGKKDITQCSVQPEPAPPSASPLPRGWQKSVLELQTGPGSSQHYGAMRTVTEQYEEVDQFGNTVLMSSTTVTEQAEPPRNPGSHLGLHASPLLRQFLHSPAGFSSDLTEAETVQVSCSYSQPAAQ

SEQ ID NO: 6240 - protein, 69 aa, Homo sapiens
MSAHLQWMVVRNCSSFLIKRNKQTYSTEPNNLKARNSFRYNGLIHRKTVGVEPAADGKGVVVVIKRRSE

SEQ ID NO: 6241 - protein, 18 aa, Homo sapiens
MAENSVLTSTTGRTSLAD

SEQ ID NO: 6242 - protein, 156 aa, Homo sapiens
MTLKASEGESGGSMHTALSDLYLEHLLQKRSRPEKETKGMISLKVIPNQQSRLPALQMFMRAQFDYDPKKDNLIPCKEAGLKFATGDIIQIINKDDSNWWQGRVEGSSKESAGLIPSPELQEWRVASMAQSAPSEAPSCSPFGKKKKYKDKYLAKH

SEQ ID NO: 6243 - protein, 353 aa, Homo sapiens
MNGDQNSDVYAQEKQDFVQHFSQIVRVLTEDEMGHPEIGDAIARLKEVLEYNAIGGKYNRGLTVVVAFRELVEPRKQDADSLQRAWTVGWCVELLQAFFLVADDIMDSSLTRRGQICWYQKPGVGLDAINDANLLEACIYRLLKLYCREQPYYLNLIELFLQSSYQTEIGQTLDLLTAPQGNVDLVRFTEKRYKSIVKYKTAFYSFYLPIAAAMYMAGIDGEKEHANAKKILLEMGEFFQIQDDYLDLFGDPSVTGKIGTDIQDNKCSWLVVQCLQRATPEQYQILKENYGQKEAEKVARVKALYEELDLPAVFLQYEEDSYSHIMALIEQYAAPLPPAVFLGLARKIYKRRK

SEQ ID NO: 6244 - protein, 308 aa, Homo sapiens
VVAENGLSEEKPHLLVFPPDLVAEQFTLMDAECRILKNFSSLYAILSALQSNSIHRLKKTWEDVSRDSFRIFQKLSEIFSDENNYSLSRELLIKEGTSKFATLEMNPKRAQKRPKETGIIQGTVPYLGTFLTDLVMLDTAMKDYLYGRLINFEKRRKEFEVIAQIKLLQSACNNYSIAPDEQFGAWFRAVERLSETESYNLSCELEPPSESASNTLRTKKNTAIVKRWSDRQAPSTELSTSGSSHSKSCDQLRCGPYLSSGDIADALSVHSAGSSSSDVEEINISFVPESPDGQEKKFWESASQSSPE

SEQ ID NO: 6245 - protein, 253 aa, Homo sapiens
MYTAIPQSGSPFPGSVQDPGLHVWRVEKLKPVPVAQENQGVFFSGDSYLVLHNGPEEVSHLHLWIGQQSSRDEQGACAVLAVHLNTLLGERPVQHREVQGNESDLFMSYFPRGLKYQEGGVESAFHKTSTGAPAAIKKLYQVKGKKNIRATERALNWDSFNTGDCFILDLGQNIFAWCGGKSNILERNKARDLALAIRDSERQGKAQVEIVTDGEEPAEMIQVLGPKPALKEGNPEEDLTADKANAQAAALYK

SEQ ID NO: 6246 - protein, 647 aa, Homo sapiens
MRSGKASCTLETVWEDKHKYEEAERRFYEHEATQAAASAQQLPAEGPAMNGPGQDDPEDADEAEAPDGGSRRDPRKSQDSRKPLQKKRKRSPKSGLGPADLALLGLSAERVWLDKSLFDQAESSYRQKLADVAAQAAWPPALAPWGLCTHGNQVACHHVTWGIWVNKSSFDQAERAFVEWSQALLLAPDGSRRQGTPNTGQQVAVPDLAHQPSPPVNGQPPLGSLQALVREVWLEKPRYDAAERGFYEALFDGHPPGKVRLQERAGLAEGARRGRRDRRGRNILGNKRAGLRRADGEAPSALPYCYFLQKDAEAPWLSKPAYDSAECRHHAAEALRVAWCLEAASLSHRPGPRSGLSVSSLRPNRKMATNFLAHEKIWFDKFKYDDAERRFYEQMNGPVAGASRQENGASVILRDIARARENIQKSLAGSSGPGASSGTSGDHGELVVRIASLEVENQSLRGVVQELQQAISKLEARLNVLEKSSPGHRATAPQTQHVSPMRQVEPPAKKPATPAEDDEDDDIDLFGSDNEEEDKEAAQLREERLRQYAEKKAKKPALVAKSSILLDVKPWDDETDMAQLEACVRSIQLDGLVWGASKLVPVGYGIRKLQIQCVVEDDKVGTDLLEEEITKFEEHVQSVDIAAFNKI

SEQ ID NO: 6247 - protein, 93 aa, Homo sapiens
MEREMVLCLAQTIHTQEEDLPRPSISAEPGTVIPLGSHVTFVCRGPVGVQTFRLERDSRSTYNDTEDVSQASPSESEARFRIDSVREGNAGLY

SEQ ID NO: 6248 - protein, 135 aa, Homo sapiens
MLVDGPSERPALCFLLLAVAMSFFGSALSIDETRAHLLLKEKMMRLGGRLVLNTKEELANERLMTLKIAEMKEAMRTLIFPPSMHFFQAKHLIERSQVFNILRMMPKGAALHLHDIGIVTMDWLVRNVTYRPHCH

SEQ ID NO: 6249 - protein, 52 aa, Homo sapiens
MEENLISMREDHSFHVRYRMEASCLELALEGERLCKSGDCRAGVSFFEAAVQ

SEQ ID NO: 6250 - protein, 1020 aa, Homo sapiens
MEELIWEQYTVTLQKDSKRGFGIAVSGGRDNPHFENGETSIVISDVLPGGPADGLLQENDRVVMVNGTPMEDVLHSFAVQQLRKSGKVAAIVVKRPRKVQVAALQASPPLDQDDRAFEVMDEFDGRSFRSGYSERSRLNSHGGRSRSWEDSPERGRPHERARSRERDLSRDRSRGRSLERGLDQDHARTRDRSRGRSLERGLDHDFGPSRDRDRDRSRGRSIDQDYERAYHRAYDPDYERAYSPEYRRGARHDARSRGPRSRSREHPHSRSPSPEPRGRPGPIGVLLMKSRANEEYGLRLGSQIFVKEMTRTGLATKDGNLHEGDIILKINGTVTENMSLTDARKLIEKSRGKLQLVVLRDSQQTLINIPSLNDSDSEIEDISEIESNRSFSPEERRHQYSDYDYHSSSEKLKERPSSREDTPSRLSRMGATPTPFKSTGDIAGTVVPETNKEPRYQEDPPAPQPKAAPRTFLRPSPEDEAIYGPNTKMVRFKKGDSVGLRLAGGNDVGIFVAGIQEGTSAEQEGLQEGDQILKVNTQDFRGLVREDAVLYLLEIPKGEMVTILAQSRADVYRDILACGRGDSFFIRSHFECEKETPQSLAFTRGEVFRVVDTLYDGKLGNWLAVRIGNELEKGLIPNKSRAEQMASVQNAQRDNAGDRADFWRMRGQRSGVKKNLRKSREDLTAVVSVSTKFPAYERVLLREAGFKRPVVLFGPIADIAMEKLANELPDWFQTAKTEPKDAGSEKSTGVVRLNTVRQIIEQDKHALLDVTPKAVDLLNYTQWFPIVIFFNPDSRQGVKTMRQRLNPTSNKSSRKLFDQANKLKKTCAHLFTATINLNSANDSWFGSLKDTIQHQQGEAVWVSEGKMEGMDDDPEDRMSYLTAMGADYLSCDSRLISDFEDTDGEGGAYTDNELDEPAEEPLVSSITRSSEPVQHEEIEIAQKHPDIYAVPIKTHKPDPGTPQHTSSRPPEPQKAPSRPYQDTRGSYGSDAEEEEYRQQLSEHSKRGYYGQSARYRDTEL

SEQ ID NO: 6251 - protein, 64 aa, Homo sapiens
MAAAPLKVCIVGSGNWLPCQILARLCRMQTCWCLSFPTSSFTESVMRSLGECPRKRWESPSSRA

SEQ ID NO: 6252 - protein, 220 aa, Homo sapiens
MEYYLVKWKGWPDSTNTWEPLQNLKCPLLLQQFSNDKHNYLSQVKKGKAITPKDNNKTLKPAIAEYIVKKAKQRIALQRWQDELNRRKNHKGMIFVENTVDLEGPPSDFYYINEYKPAPGISLVNEATFGCSCTDCFFQKCCPAEAGVLLAYNKNQQIKIPPGTPIYECNSRCQCGPDCPNRIVQKGTQYSLCIFRTSNGRGWGVKTLVKIKRMSFVMEY

SEQ ID NO: 6253 - protein, 56 aa, Homo sapiens
MLEAHMQSYKGNDPLGEWERYIQWVEENFPENKEYLITLLEHLMKEFLDKKKYHND

SEQ ID NO: 6254 - protein, 442 aa, Homo sapiens
MPRARKGNTLRKGGQRRGGGARSSAQADSGSSDDEAASEARSTASECPSLLSTTAEDSLGGDVVDEQGQQEDLEEKLKEYVDCLTDKSAKTRQGALESLRLALASRLLPDFLLERRLTLADALEKCLKKGKGEEQALAAAVLGLLCVQLGPGPKGEELFHSLQPLLVSVLSDSTASPAARLHCASALGLGCYVAAADIQDLVSCLACLESVFSRFYGLGGSSTSPVVPASLHGLLSAALQAWALLLTICPSTQISHILDRQLPRLPQLLSSESVNLRIAAGETIALLFELARDLEEEFVYEDMEALCSVLRTLATDSNKYRAKADRRRQRSTFRAVLHSVEGGECEEEIVRFGFEVLYMDSWARHRIYAAFKEVLGSGMHHHLQNNELLRDIFGLGPVLLLDATALKACKVPRFEKHLYNAAAFKARTKARSRVRDKRADIL

SEQ ID NO: 6255 - protein, 216 aa, Homo sapiens
GSTSRELSRERDPQAGHPAAQMEAEPAEPLAAAVEAANGAEQTRVNKAPEGRSPLSAEELMTIEDEGVLDKMLDQSTDFEERKLIRAALRELRQRKRDGSGSTMMQTKTFSSSSSSKKMGSIFDREDQASPRAGSLAALEKRQAEKKKELMKAQSLPKTSASQARKAMIEKLEKEGAAGSPGGPRAAVQRSTSFGVPNANSIKQMLLDWCRAKTRG

SEQ ID NO: 6256 - protein, 106 aa, Homo sapiens
MGKEKTHINIVVIGHVDSGKSTTTGHLIYKCGGIDKRTIEKFEKEAAEMGKGSFKYAWVLDKLKAERERGITIDISLWKFETSKYYVTIIDAPGHRDFIKNMITGT

SEQ ID NO: 6257 - protein, 758 aa, Homo sapiens
MEDPAAPGTGGPPANGNGNGGGKGKQAAPKGREAFRSQRRESEGSVDCPTLEFEYGDADGHAAELSELYSYTENLEFTNNRRCFEEDFKTQVQGKEWLELEEDAQKAYIMGLLDRLEVVSRERRLKVARAVLYLAQGTFGECDSEVDVLHWSRYNCFLLYQMGTFSTFLELLHMEIDNSQACSSALRKPAVSIADSTELRVLLSVMYLMVENIRLERETDPCGWRTARETFRTELSFSMHNEEPFALLLFSMVTKFCSGLAPHFPIKKVLLLLWKVVMFTLGGFEHLQTLKVQKRAELGLPPLAEDSIQVVKSMRAASPPSYTLDLGESQLAPPPSKLRGRRGSRRQLLTKQDSLDIYNERDLFKTEEPATEEEEESAGDGERTLDGELDLLEQDPLVPPPPSQAPLSAERVAFPKGLPWAPKVRQKDIEHFLEMSRNKFIGFTLGQDTDTLVGLPRPIHESVKTLKQHKYISIADVQIKNEEELEKCPMSLGEEVVPETPCEILYQGMLYSLPQYMIALLKILLAAAPTSKAKTDSINILADVLPEEMPITVLQSMKLGIDVNRHKEIIVKSISTLLLLLLKHFKLNHIYQFEYVSQHLVFANCIPLILKFFNQNILSYITAKNSISVLDYPCCTIQDLPELTTESLEAGDNSQFCWRNLFSCINLLRLLNKLTKWKHSRTMMLVVFKSAPILKRALKVKQAMLQLYVLKLLKLQTKYLGRQWRKSNMKTMSAIYQKVRHRMNDDWAYGNGESSQSS

SEQ ID NO: 6258 - protein, 158 aa, Homo sapiens
FLDSNQENDLLWEEKFPERTTVTELPQTSHVSFSEPDIPSSKSTELPVDWSIKTRLLFTSSQPFTWADHLKAQEEAQGLVQHCRATEVTLPKSIQDPKLSSELRCTFQQSLIYWLHPALSWLPLFPRIGADRKMAGKTSPWSNDATLQHVLMSDWHGV

SEQ ID NO: 6259 - protein, 133 aa, Homo sapiens
MEPVPLQDFVRALDPASLPRVLRVCSGVYFEGYFTPLNTPQSYETLEELVSATTQSSKQLPTCFMSTHRIVTEGRVVTEDQLLMLEAVVMHLGIRSARCVLGMEGQQVILHLPLSQKGPFWTWEPSAPRTLLQ

SEQ ID NO: 6260 - protein, 224 aa, Homo sapiens
MHPGLPSTLTCSCSLMSDLPTPQAIEPQAIVQQVPAPSRMQMPQGNPLLLSHTLQELLARDTVQVELIPEKKGLFLKHVEYEVSSQRFKSSVYRRYNDFVVFQEMLLHKFPYRMVPALPPKRMLGADREFIEARRRALKRFVNLVARHPLFSEDVVLKLFLSFSGSDVQNKLKESAQCVGDEFLNCKLATRAKDFLPADIQAQFAISRELIRNIYNSFHKLRDR

SEQ ID NO: 6261 - protein, 48 aa, Homo sapiens
MPMYQVKPYHGGGAPLRVELPTCMYRLPNVHGRSYGPAPGAGHVQPLQ

SEQ ID NO: 6262 - protein, 915 aa, Homo sapiens
MQGPDAPLLLSARELGPGRRGSASWYRQEGGAVCNWLRKPQPLEPRTSFPSARRSEFRPPRRLPWAGPASAQSEEGHAGGRCQAGSPAPARRLSGAFKTLVPGTHAQGASDTHPLGPPHTPVLDPSPQDGFPVLWRGSSKASHMNRLRNAKIYVERAVKQKKIFTIQGCYPVIRCLLRRRGWVEKKMVHRSGPTLLPPQKDLDSSAMGDSDTTEDEDEDEDEEFQPSQLFDFDDLLKFDDLDGTHALMVGLCLNLRNLPWFDEVDANSFFPRCYCLGAEDDKKAFIEDFWLTAARNVLKLVVKSEWKSYPIQAVEEEASGDKQPKKQEKNPVLVSPEFVDEALCACEEYLSNLAHMDIDKDLEAPLYLTPEGWSLFLQRYYQVVHEGAELRHLDTQVQRCEDILQQLQAVVPQIDMEGDRNIWIVKPGAKSRGRGIMCMDHLEEMLKLVNGNPVVMKDGKWVVQKYIERPLLIFGTKFDLRQWFLVTDWNPLTVWFYRDSYIRFSTQPFSLKNLDNSVHLCNNSIQKHLENSCHRHPLLPPDNMWSSQRFQAHLQEMGAPNAWSTIIVPGMKDAVIHALQTSQDTVQCRKASFELYGADFVFGEDFQPWLIEINASPTMAPSTAVTARLCAGVQADTLRVVIDRMLDRNCDTGAFELIYKQPAVEVPQYVGIRLLVEGFTIKKPMAMCHRRMGVRPAVPLLTQRGSGEARHHFPSLHTKAQLPSPHVLRHQGQVLRRQHSKLVGTKALSTTGKALRTLPTAKVFISLPPNLDFKVAPSILKPRKAPALLCLRGPQLEVPCCLCPLKSEQFLAPVGRSRPKANSRPDCDKPRAEACPMKRLSPLKPLPLVGTFQRRRGLGDMKLGKPLLRFPTALVLDPTPNKKKQVKYLGLDSIAVGGSRVDGARPCTPGSTARA

SEQ ID NO: 6263 - protein, 38 aa, Homo sapiens
MSFVAGVIRRLDETVVNRIAAGEVIQRPANAIKEMIEN

SEQ ID NO: 6264 - protein, 202 aa, Homo sapiens
METLSFPRYNVAEIVIHIRNKILTGADGKNLTKNDLYPNPKPEVLHMIYMRALQIVYGIRLEHFYMMPVNSEVMYPHLMEGFLPFSNLVTHLDSFLPICRVNDFETADILCPKAKRTSRFLSGIINFIHFREACRETYMEFLWQYKSSADKMQQLNAAHQEALMKLERLDSVPVEEQEEFKQLSDGIQELQQSLNQDFHQKT

SEQ ID NO: 6265 - protein, 79 aa, Homo sapiens
MPSPRPVLLRGARAALLLLLPPRLLARPSLLLRRSLSAASCPPISLPAAASRSSMDGAGAEEVLAPLRLAVRQQAVWNQ

SEQ ID NO: 6266 - protein, 166 aa, Homo sapiens [sequence omitted]

SEQ ID NO: 6267 - protein, 568 aa, Homo sapiens
MLERPPALAMPMPTEGTPPPLSGTPIPVPAYFRHAEPGFSLKRPRGLSRSLPPPPPAKGSIPISRLFPPRTPGWHQLQPRRVSFRGEASETLQSPGYDPSRPESFFQQSFQRLSRLGHGSYGEVFKVRSKEDGRLYAVKRSMSPFRGPKDRARKLAEVGSHEKVGQHPCCVRLEQAWEEGGILYLQTELCGPSLQQHCEAWGASLPEAQVWGYLRDTLLALAHLHSQGLVHLDVKPANIFLGPRGRCKLGDFGLLVELGTAGAGEVQEGDPRYMAPELLQGSYGTAADVFSLGLTILEVACNMELPHGGEGWQQLRQGYLPPEFTAGLSSELRSVLVMMLEPDPKLRATAEALLALPVLRQPRAWGVLWCMAAEALSRGWALWQALLALLCWLWHGLAHPASWLQPLGPPATPPGSPPCSLLLDSSLSSNWDDDSLGPSLSPEAVLARTVGSTSTPRSRCTPRVLTPLRLSPAAEPSAPGLGPAAEAPCCVEQRGFLSRHIPRSFSAFQAAPPKSACNALHLHGHTQPSAFVWSLTCSSHHGRTFEARTKVDPLFKICGGFLTVFADL

SEQ ID NO: 6268 - protein, 150 aa, Homo sapiens
MAGILFEDIFDVKDIDPEGKKFDRVSRLHCESESFKMDLILDVNIQIYPVDLGDKFRLVIASTLYEDGTLDDGEYNPTDDRPSRADQFEYVMYGKVYRIEGDETSTEAATRLSAYVSYGGLLMRLQGDANNLHGFEVDSRVYLLMKKLAF

SEQ ID NO: 6269 - protein, 173 aa, Homo sapiens
MALTVDVAGPAPWGFRITGGRDFHTPIMVTKVAERGKAKDADLRPGDIIVAINGESAEGMLHAEAQSKIRQSPSPLRLQLDRSQATSPGQTNGDSSLEVLATRFQGSVRTYTESQSSLRSSYSSPTSLSPRAGSPFSPPPSSSSLTGEAAISRSFQSLACSPGLPAADRLSYS

SEQ ID NO: 6270 - protein, 267 aa, Homo sapiens
MAEQDVENDLLDYDEEEEPQAPQESTPAPPKKDIKGSYVSIHSSGFRDFLLKPELLRAIVDCGFEHPSEVQHECIPQAILGMDVLCQAKSGMGKTAVFVLATLQQIEPVNGQVTVLVMCHTRELAFQISKEYERFSKYMPSVKVSVFFGGLSIKKDEEVLKKNCPHVVVGTPGRILALVRNRSFSLKNVKHFVLDECDKMLEQLDMRRDVQEIFRLTPHEKQCMMFSATLSKDIRPVCRKFMQDVLWEVSHKGVAHWKVLGRRDAQR

SEQ ID NO: 6271 - protein, 721 aa, Homo sapiens
MTAKDSSKELTASEPEVCIKTFKEQMHLELELPRLPGNRPTSPKISPRSSPRNSPCFFRKLLVNKSIRQRRRFTVAHTCFDVENGPSPGRSPLDPQASSSAGLVLHATFPGHSQRRESFLYRSDSDYDLSPKAMSRNSSLPSEQHGDDLIVTPFAQVLASLRSVRNNFTILTNLHGTSNKRSPAASQPPVSRVNPQEESYQKLAMETLEELDWCLDQLETIQTYRSVSEMASNKFKRMLNRELTHLSEMSRSGNQVSEYISNTFLDKQNDVEIPSPTQKDREKKKKQQLMTQISGVKKLMHSSSLNNTSISRFGVNTENEDHLAKELEDLNKWGLNIFNVAGYSHNRPLTCIMYAIFQERDLLKTFRISSDTFITYMMTLEDHYHSDVAYHNSLHAADVAQSTHVLLSTPALDAVFTDLEILAAIFAAAIHDVDHPGVSNQFLINTNSELALMYNDESVLENHHLAVGFKLLQEEHCDIFMNLTKKQRQTLRKMVIDMVLATDMSKHMSLLADLKTMVETKKVTSSGVLLLDNYTDRIQVLRNMVHCADLSNPTKSLELYRQWTDRIMEEFFQQGDKERERGMEISPMCDKHTASVEKSQVGFIDYIVHPLWETWADLVQPDAQDILDTLEDNRNWYQSMIPQSPSPPLDEQNRDCQGLMEKFQFELTLDEEDSEGPEKEGEGHSYFSSTKTLCVIDPENRDSLGETDIDIATEDKSPVDT

SEQ ID NO: 6272 - protein, 241 aa, Homo sapiens
MAAPEAPPLDRVFRTTWLSTECDSHPLPPSYRKFLFETQAADLAGGTTVAAGNLLNESEKDCGQDRRAPGVQPCRLVTMTSVVKTVYSLQPPSALSGGQPADTQTRATSKSLLPVRSKEVDVSKQLHSGGPENDVTKITKLRRENGQMKATDTATRRNVRKGYKPLSKQKSEEELKDKNQLLEAVNKQLHQKLTETQGELKDLTQKVELLEKFRDNCLAILESKGLDPVAVRNFARGAEAF

SEQ ID NO: 6273 - protein, 175 aa, Homo sapiens
MTNCPTLIVMVGLPARGKTYISKKLTRYLNWIGVPTREFNVGQYRRDVVKTYKSFEFFLPDNEEGLKIRKQCALAALRDVRRFLSEEGGHVAVFDATNTTRERRATIFNFGEQNGYKTFFVESICVDPEVIAANIVQVKLGSPDYVNRDSDEATEDFMRRIECYENSYESLDEDL

SEQ ID NO: 6274 - protein, 154 aa, Homo sapiens
WASGMSTVPGGSRHSLGIQVRGGWGVTGGEEESLTVPVADTWQAGSFKVATQERNPQRVQMRLRRQKKGVVPFLGDFLTELQRLDSAIPDDLDGNTNKRSKEVRVLQEMQLLQVAAMNYRLRPLEKFVTYFTRMEQLSDKESYKLSCQLEPENP

SEQ ID NO: 6275 - protein, 53 aa, Homo sapiens
MMLGSPTSPKPGVNAQFLPGFLMGDLPAPVTPQPRSISGPSVGVMEMRSPLLA

SEQ ID NO: 6276 - protein, 222 aa, Homo sapiens
MDTLPDNRTRVVEDNHSYYVSRLYGPSEPHSRELWVDVAEANRSQVKIHTILSNTHRQASRVVLSFDFPFYGHPLRQITIATGGFIFMGDVIHRMLTATQYVAPLMANFNPGYSDNSTVVYFDNGTVFVVQWDHVYLQGWEDKGSFTFQAALHHDGRIVFAYKEIPMSVPEISSSQHPVKTGLSDAFMILNPSPDVPESRRRSIFEYHRIELDPSKVTSMSA

SEQ ID NO: 6277 - protein, 259 aa, Homo sapiens
DSKIMISDFGLSKMEDPGSVLSTACGTPGYVAPEVLAQKPYSKAVDCWSIGVIAYILLCGYPPFYDENDAKLFEQILKAEYEFDSPYWDDISDSAKDFIRHLMEKDPEKRFTCEQALQHPWIAGDTALDKNIHQSVSEQIKKNFAKSKWKQAFNATAVVRHMRKLQLGTSQEGQGQTASHGELLTPVAGGEERALQKGMGGPQRCTRAGVEGLPLRPPLFCLPMQGRQLAVAVETAAWSRAQNCPPHCPTSSRALDLGS

SEQ ID NO: 6278 - protein, 152 aa, Homo sapiens [sequence omitted]

SEQ ID NO: 6279 - protein, 570 aa, Homo sapiens
MLGTLRAMEGEDVEDDQLLQKLRASRRRFQRRMQRLIEKYNQPFEDTPVVQMATLTYETPQGLRIWGGRLIKERNEGEIQCAGNRAGRDVRVTPLPSLASPAVPAPGYCSRISRKSPGDPAKPASSPREWDPLHPSSTDMALVPRNDSLSLQETSSSSFLSSQPFEDDDICNVTISDLYAGMLHSMSRLLSTKPSSIISTKTFIMQNWNSRRRHRYKSRMNKTYCKGARRSQRSSKENFIPCSEPVKGTGALRDCKNVLDVSCRKTGLKLEKAFLEVNRPQIHKLDPSWKERKVTPSKYSSLIYFDSSATYNLDEENRFRTLKWLISPVKIVSRPTIRQGHGENRQREIEIRFDQLHREYCLSPRNQPRRMCLPDSWAMNMYRGGPASPGGLQGLETRRLSLPSSKAKAKSLSEAFENLGKRSLEAGRCLPKSDSSSSLPKTNPTHSATRPQQTSDLHVQGNSSGIFRKSVSPSKTLSVPDKEVPGHGRNRYDEIKEEFDKLHQKYCLKSPGQMTVPLCIGVSTDKASMEVRYQTEGFLGKLNPDPHFQGFQKLPSSPLGCRKSLLGSTA

SEQ ID NO: 6280 - protein, 2080 aa, Homo sapiens
MSSSPSRSAADIYIREYFHSHVSGGHPEATPLRVMYTDRPLSQTDPVTLQYCCLTDDRQAFRPPTRAELARHRVVVTTTSQARELRVPVGFFSHILIDEAAQMLECEALTPLAYASHGTRLVLAGDHMQVTPRLFSVARARAAEHTLLHRLFLCYQQETHEVARQSRLVFHENYRCTDAIVSFISRHFYVAKGNPIHARGKVPPHPRHYPLMFCHVAGSPDRDMSMASWLNLAEIAQVVEKVQEAYNTWPSCWGGREQRCICVVSHGAQVSALRQELRRRDLGQVSVGSFEILPGRQFRVVVLSTVHTCQSLLSPGALAPEFFTDARVLNTVLTRAQSQLVVVGDAVALCSFGACGKLWESFIRECVERHSVCPEGLSMEQVEQGVAQRRRWPPRGTQAGAAGNWEAAPEPVGDLAEEQAAVVTAMVKAEPGDEALSPASRDITATTAQTEAAAAPAGDAVKEDVVPGACAAGAAAAAGVESTEAEDAEADFWPWDGELNADDAILRELLDESQKVMVTVGEDGLLDTVARPESLQQARLYENLPPAALRKLLHAEPERYRHCSFVPETFERASAIPLDDASSGPIQVRGRLDCGMAFAGDEVLVQLLSGDKAPEGRLRGRVLGVLKRKRHELAFVCRMDTWDPRIMVPINGSVTKIFVAELKDPSQVPIYSLRKGRLQRVGLERLTAEARHSRLFWVQIVLWRQGFYYPLGIVREVLPEASTWEQGLRILGLEYSLRVPPSDQATITKVLQKYHTELGRVAGRREDCRAFLTFTVDPQGACNLDDALSVRDLGPRCEVAVHITDVASFVPRDGVLDVEARRQGAAFYAPGREPVPMLPASLCQDVLSLLPGRDRLAISLFLTMEKASGQLKSLRFAPSVVQSDRQLSYEEAEEVIRQHPGAGRELPARLDSVDACVVAACYFSRLLRRHRLRSDCFYEQPDEDGTLGFRAAHIMVKEYMIQFNRLVAEFLVGSECTRTVTPLRWQPAPRSQQLKALCEKHGDRVPLSLHLGHHLHGGGGSPPDTRLHLLASLWKQVQFAARTQDYEQMVDLVTTDDMHPFLAPAGRDLRKALERSAFGRCARGHQQQGGHYSLQVDWYTWATSPIRRYLDVVLQRQILLALGHGGSAYSARDIDGLCQAFSLQHALAQSYQRRARSLHLAVQLKAQPLDKLGFVVDVEAGSRCFRLLFPSNRETLPDPCPVPYGSLQLAEHPHALAGRPGLRLLWRRRVYSAQGSSPPLPLPGTVPDPHTLAVETALWKQLLELVELQRWPEAAALIQEKGEASQRRELVQVQRSHCGHFLEVARELGSGDTLQVQLGTSLQHGFLVPSPQLWTVAPGFSLCLEHVERPGDCFSGRVYRAPRDRYRDVDEYACVWEPFCALESATGAVAENDSVTLQHLSVSWEASRTPQGQLQGAFRLEAAFLEENCADINFSCCYLCIRLEGLPAPTASPRPGPSSLGPGLNVDPGTYTWVAHGQTQDWDQERRADRQEAPRRVHLFVHHMGMEKVPEEVLRPGTLFTVELLPKQLPDLRKEEAVRGLEEASPLVTSIALGRPVPQPLCRVIPSRFLERQTYNIPGGRHKLNPSQNVAVREALEKPFTVIQGPPGTGKTIVGLHIVFWFHKSNQEQVQPGGPPRGEKRLGGPCILYCGPSNKSVDVLAGLLLRRMELKPLRVYSEQAEASEFPVPRVGSRKLLRKSPREGRPNQSLRSITLHHRIRQAPNPYSSEIKAFDTRLQRGELFSREDLVWYKKVLWEARKFELDRHEVILCTCSCAASASLKILDVRQILVDEAGMATEPETLIPLVQFPQAEKVVLLGDHKQLRPVVKNERLQNLGLDRSLFERYHEDAHMLDTQYRMHEGICAFPSVAFYKSKLKTWQGLRRPPSVLGHAGKESCPVIFGHVQGHERSLLVSTDEGNENSKANLEEVAEVVRITKQLTLGRTVEPQDIAVLTPYNAQASEISKALRREGIAGVAVSSITKSQGSEWRYVLVSTVRTCAKSDLDQRPTKSWLKKFLGFVVDPNQVNVAVTRAQEGLCLIGDHLLLRCCPLWRSLLDFCEAQQTLVPAGQVRVCRRPTMPS

SEQ ID NO: 6281 - protein, 100 aa, Homo sapiens
MSRRSQRLTRYSQGDDDGSSSSGGSSVAGSQSTLFKDSPLRTLKRKSSNMKRLSPAPQLGPSSDAHTSYYSESLVHESWFPPRSSLEELHGDANWGEDLR

SEQ ID NO: 6282 - protein, 169 aa, Homo sapiens
MFRDFGEPGPSSGNGGGYGGPAQPPAAAQAAQQETDKLEDEKSGLQREIEELQKQKERLELVLEAHRPICKIPEGAKEGDTGSTSGTSSPPAPCRPVPCISLSPGPVLEPEALHTPTLMTTPSLTPFTPSLVFTYPSTPEPCASAHRKSSSSSGDPSSDPLGSPTLLAL

SEQ ID NO: 6283 - protein, 115 aa, Homo sapiens
MVEDELALFDKSINEFWNKFKSTDTSCQMAGLRDTYKDSIKAFAEKLSVKLKEEERMVEMFLEYQNQISRQNKLIQEKKDNLLKLIAEVKGKKQELEVLTANIQDLKEEYSRKKE

SEQ ID NO: 6284 - protein, 87 aa, Homo sapiens
MECPVMETGSLFTSGIKRHLKDKRISKTTKLNVSLASKIKTKILNNSSIFKISLKHNNRALAQALSREKENSRRITTEKMLLQKEVE

SEQ ID NO: 6285 - protein, 39 aa, Homo sapiens
MAASLRLLGAASGLRYWSRRLRPAAGSFAAGSIFPSRCC

SEQ ID NO: 6286 - protein, 110 aa, Homo sapiens [sequence omitted]

SEQ ID NO: 6287 - protein, 104 aa, Homo sapiens
MEAPLVSLDEEFEDLRPSCSEDPEEKPQCFYGSSPHHLEDPSLSELENFSSEIISFKSMEDLVNEFDEKLNVCFRNYNAKTENLAPVKNQLQIQEEEETLQDEE

SEQ ID NO: 6288 - protein, 271 aa, Homo sapiens
MDRSKENCISGPVKATAPVGGPKRVLVTQQFPCQNPLPVNSGQAQRVLCPSNSSQRIPLQAQKLVSSHKPVQNQKQKQLQATSVPHPVSRPLNNTQKSKQPLPSAPENNPEEELASKQKNEESKKRQWALEDFEIGRPLGKGKFGNVYLAREKQSKFILALKVLFKAQLEKAGVEHQLRREVEIQSHLRHPNILRLYGYFHDATRVYLILEYAPLGTVYRELQKLSKFDEQRTATYITELANALSYCHSKRVIHRDIKPENLLLGSAGELK

SEQ ID NO: 6289 - protein, 68 aa, Homo sapiens
MGFGDLKSPAGLQVLNDYLADKSYIEGYVPSQADVAVFEAVSSPPPADLCHALRWYNHIKSYEKEKAR

SEQ ID NO: 6290 - protein, 50 aa, Homo sapiens
MASGTTTTAVKIGIIGGTGLDDPEILEGRTEKYVDTPFGKVNIQLVETSI

SEQ ID NO: 6291 - protein, 154 aa, Homo sapiens
MALLTAETFRLQFNNKRRLRRPYYPRKALLCYQLTPQNGSTPTRGYFENKKKCHAEICFINEIKSMGLDETQCYQVTCYLTWSPCSSCAWELVDFIKAHDHLNLGIFASRLYYHWCKPQQKGLRLLCGSQVPVEVMGFPDSRGTCAGSLHGYIV

SEQ ID NO: 6292 - protein, 469 aa, Homo sapiens
MDTVTEAGMAIAMALTGGIGFIHHNCTPEFQANEVRKVKKYEQGFITDPVVLSPKDRVRDVFEAKARHGFCGIPITDTGRMGSRLVGIISSRDIDFLKEEEHDCFLEEIMTKREDLVVAPAGITLKEANEILQRSKKGKLPIVNEDDELVAIIARTDLKKNRDYPLASKDAKKQLLCGAAIGTHEDDKYRLDLLAQAGVDVVVLDSSQGNSIFQINMIKYIKDKYPNLQVIGGNVVTAAQAKNLIDAGVDALRVGMGSGSICITQEVAPKIPPDIKSHSPKCPSTVTGCYMLACGRPQATAVYKVSEYARRFGVPVIADGGIQNVGHIAKALALGASTVMMGSLLAATTEAPGEYFFSDGIRLKKYRGMGSLDAMDKHLSSQNRYFSEADKIKVAQGVSGAVQDKGSIHKFVPYLIAGIQHSCQDIGAKSLTQVRAMMYSGELKFEKRTSSAQVEGGVHSLHSYEKRLF

SEQ ID NO: 6293 - protein, 463 aa, Homo sapiens
MKKKLVVLGLLAVVLVLVIVGLCLWLPSASKEPDNHVYTRAAVAADAKQCSKIGRDALRDGGSAVDAAIAALLCVGLMNAHSMGIGGGLFLTIYNSTTRKAEVINAREVAPRLAFATMFNSSEQSQKGGLSVAVPGEIRGYELAHQRHGRLPWARLFQPSIQLARQGFPVGKGLAAALENKRTVIEQQPVLCEVFCRDRKVLREGERLTLPQLADTYETLAIEGAQAFYNGSLTAQIVKDIQAAGGIVTAEDLNNYRAELIEHPLNISLGDVVLYMPSAPLSGPVLALILNILKGYNFSRESVESPEQKGLTYHRIVEAFRFAYAKRTLLGDPKFVDVTEVVRNMTSEFFAAQLRAQISDDTTHPISYYKPEFYTPDDGGTAHLSVVAEDGSAVSATSTINLYFGSKVRSPVSGILFNNEMDDFSSPSITNEFGVPPSPANFIQPGKQPLSSMCPTIMVGQDG

SEQ ID NO: 6294 - protein, 25 aa, Homo sapiens
MAEQVLPQALYLSNMRKAVKIRERT

SEQ ID NO: 6295 - protein, 473 aa, Homo sapiens
MLRPVIEEEISMLGEITHLQTISEDLKSLTMDPHKLPSSSEQVILDLKGSDYSWSYQTPPSSPSTTMSRKSSVCSSLNSVNSSDSRSSGSHSHSPSSHYRYRSSNLAQQAPVRLSSVSSHDSGFISQDAFQSKSPSPMPPEAPNQRRKEKREPDPNGGGPTTASGPPAAAEEAQRPRSMTVSAATRPGEEMEACEELALALSRGLQLDTQRSSRDSLQCSSGYSTQTTTPCCSEDTIPSQVSDYDYFSVSGDQEADQQEFDKSSTIPRNSDISQSYRRMFQAKRPASTAGLPTTLGPAMVTPGVATIRRTPSTKPSVRRGTIGAGPIPIKTPVIPVKTPTVPDLPGVLPAPPDGPEERGEHSPESPSVGEGPQGVTSMPSSMWSGQASVNPPLPGPKPSIPEEHRQAIPESEAEDQEREPPSATVSPGQIPESDPADLSPRDTPQGEDMLNAIRRGVKLKKTTTNDRSAPRFS

SEQ ID NO: 6296 - protein, 728 aa, Homo sapiens
MEVNCLTLKDLISPRQPRLDFAVEDGENAQKENIFVDRSRMAPKTPIKNEPIDLSKQKKFTPERNPITPVKFVDRQQAEPWTPTANLKMLISAASPDIRDREKKKGLFRPIENKDDAFTDSLQLDVVGDSAVDEFEKQRPSRKQKSLGLLCQKFLARYPSYPLSTEKTTISLDEVAVSLGVERRRIYDIVNVLESLHLVSRVAKNQYGWHGRHSLPKTLRNLQRLGEEQKYEEQMAYLQQKELDLIDYKFGERKKDGDPDSQEQQLLDFSEPDCPSSSANSRKDKSLRIMSQKFVMLFLVSKTKIVTLDVAAKILIEESQDAPDHSKFKTKVRRLYDIANVLTSLALIKKVHVTEERGRKPAFKWIGPVDFSSSDEELVDVSASVLPELKRETYGQIQVCAKQKLARHGSFNTVQASERIQRKVNSEPSSPYREEQGSGGYSLEIGSLAAVYRQKIEDNSQGKAFASKRVVPPSSSLDPVAPFPVLSVDPEYCVNPLAHPVFSVAQTDLQAFSMQNGLNGQVDVSLASAASAVESLKPALLAGQPLVYVPSASLFMLYGSLQEGPASGSGSERDDRSSEAPATVELSSAPSAQKRLCEERKPQEEDEPATKRQSREYEDGPLSLVMPKKPSDSTDLASPKTMGNRASIPLKDIHVNGQLPAAEEISGKATANSLVSSEWGNPSRNTDVEKPSKENESTKEPSLLQYLCVQSPAVTSSSDPQEHPTHTS

SEQ ID NO: 6297 - protein, 234 aa, Homo sapiens [sequence omitted]

SEQ ID NO: 6298 - protein, 316 aa, Homo sapiens
DPAAYPDMESDIRSWELFLSNVTKEIEKAKVHPELLPESSGDDGQGLVTSASDVTGNHAALHRDPSVFSAGDSPGEAPSALLPGPPPGQPEATQLTGPKRAGQAALSERSPVADRKQPVPPGRAARSSQSPKKPFNSIIEHLSVVFPCYNSTELAGFIKKVRSKNKNSLSGLSIDEIVQRVTEHILDEQKKKKPNPGKDKRTYEPSSATPVTRSSQGSPSVVVAPSPKTKGQKAEDVPVRIALGASSCEICHEVFKSKNVRVLKCGHKYHKGCFKQWLKGQSACPACQGRDLLTEESPSGRGWPSQNQELPSCSSR

SEQ ID NO: 6299 - protein, 265 aa, Homo sapiens
VSTGADGTVCFWQWDLESLKFSPRPLKFTEKPRPGVQMLCSSFSVGGMFLATGSTDHVIRMYFLGFEAPEKIAELESHTDKVDSIQFCNNGDRFLSGSRDGTARIWRFEQLEWRSILLDMATRISGDLSSEEERFMKPKVTMIAWNQNDSIVVTAVNDHVLKVWNSYTGQLLHNLMGHADEVFVLETHPFDSRIMLSAGHDGSIFIWDITKGTKMKHYFNMIEGQGHGAVFDCKFSQDGQHFACTDSHGHLLIFGFGCSKPYEKM

SEQ ID NO: 6300 - protein, 724 aa, Homo sapiens
MATMLEGRCQTQPRSSPSGREASLWSSGFGMKLEAVTPFLGKYRPFVGRCCQTCTPKSWESLFHRSITDLGFCNVILVKEENTRFRGWLVRRLCYFLWSLEQHIPPCQDVPQKIMESTGVQNLLSGRVPGGTGEGQVPDLVKKEVQRILGHIQAPPRPFLVRLFSWALLRFLNCLFLNVQLHKGQMKMVQKAAQAGLPLVLLSTHKTLLDGILLPFMLLSQGLGVLRVAWDSRACSPALRALLRKLGGLFLPPEASLSLDSSEGLLARAVVQAASAPLGLWTGALAVLRSLWSRWGCSHRICSRVHLAQPFSLQEYIVSARSCWGGRQTLEQLLQPIVLGQCTAVPDTEKEQEWTPITGPLLALKEEDQLLVRRLSCHVLSASVGSSAVMSTAIMATLLLFKHQKLLGEFSWLTEEILLRGFDVGFSGQLRSLLQHSLSLLRAHVALLRIRQGDLLVVPQPGPGLTHLAQLSAELLPVFLSEAVGACAVRGLLAGRVPPQGPWELQGILLLSQNELYRQILLLMHLLPQDLLLLKPCQSSYCYCQEVLDRLIQCGLLVAEETPGSRPACDTGRQRLSRKLLWKPSGDFTDSDSDDFGEADGRYFRLSQQSHCPDFFLFLCRLLSPLLKAFAQAAAFLRQGQLPDTELGYTEQLFQFLQATAQEEGIFECADPKLAISAVWTFRDLGVLQQTPSPAGPRLHLSPTFASLDNQEKLEQFIRQFICS

SEQ ID NO: 6301 - protein, 86 aa, Homo sapiens
MDLILDVNIQIYPVDLGDKFRLVIASTLYEDGTLDDGEYNPTDDRPSSSAYVSYGGLLMRLQGDANNLHGFEVDSRVYLLMKKLAF

SEQ ID NO: 6302 - protein, 80 aa, Homo sapiens
MAKQPSDVSSECDREGRQLQPAERPPQLRPGAPTSLQTEPQDRSPAPMSCDKSTQTPSPPCQAFNHYLSAMVREIEEVVV

SEQ ID NO: 6303 - protein, 187 aa, Homo sapiens
MPGERPTDATVIPSAKRERKAITLDLKLEVLRRFEAGEKLSQIAKALDLAISTVATIRDSKEKIKASSQIATPLRASRLTRHRSAVMESMEQLLSLWLEDQSQPNATLSAAIVQEKAEFDDLQREHGEGSQTERFHASQGWLVRFKECHCLPHFKMNSAAPSNKDMYTEMLKSIIEEGEYTPQVSLT

SEQ ID NO: 6304 - protein, 704 aa, Homo sapiens
MKQTHADTPVDHCLSGIRKCSSTFKLKSEVNKHETALEMQNPNLNNKECCFTFTLNGNSRKLDRSVFTAYGKPSESIYSALSANDYFSERIKNQFNKNIIVYEEKTIDGHINLGMPLKCLPSDSHFKITFGQRKSSKEDGHILRQCENPNMECILFHVVAIGRTRKKIVKINELHEKGSKLCIYALKGETIEGALCKDGRFRSDIGEFEWKLKEGHKKIYGKQSMVDEVSGKVLEMDISKKKALQQKDIHKKIKQNESATDEINHQSLIQSKKKVHKPKKDGETKDVEHSREQILPPQDLSHYIKDKTRQTIPRIRNYYFCSLPRKYRQINSQVRRRPHLGRRYAINLDVQKEAINLLKNYQTLNEAIMHQYPNFKEEAQWVRKYFREEQKRMNLSPAKQFNIYKKDFGKMTANSVSVATCEQLTYYSKSVGFMQWDNNGNTGNATCFVFNGGYIFTCRHVVHLMVGKNTHPSLWPDIISKCAKVTFTYTEFCPTPDNWFSIEPWLKVSNENLDYAILKLKENGNAFPPGLWRQISPQPSTGLIYLIGHPEGQIKKIDGCTVIPLNERLKKYPNDCQDGLVDLYDTTSNVYCMFTQRSFLSEVWNTHTLSYDTCFSDGSSGSPVFNASGKLVALHTFGLFYQRGFNVHALIEFGYSMDSILCDIKKTNESLYKSLNDEKLETYDEEKGKQESSLQDHQIEPMEC

SEQ ID NO: 6305 - protein, 127 aa, Homo sapiens
MWVFEETVNGRKLTDIINNDHENVKYLPGHKLPENVVAMSNLSEAVQDADLLVFVIPHQFIHRICDEITGRVPKKALGITLIKGIDEGPEGLKLISDIIREKMGIDISVLMGANIANEVAAEKFCET

SEQ ID NO: 6306 - protein, 264 aa, Homo sapiens
ADSMLLALQLSMAENNKQHSGEFTVSLSDVLLTWKYLLHEKLNLPVENMDVTDHYEDVRKIYDDFLKNSNMLDLIDVYQKCRALTSNCENYNTVSPSQLLDFLSGKQYAVGDETDLSIPTSPTSKYNRDNEKVQLLARKIIFSYLNLLVNSKNDLAVAYILNIPDRGLGREAFTDLKHAAREKQMSIFLVATSFIRTIELGGKGYAPPPSDPLRTHVKGLSNFINFIDKLDEILGEIPNPRGCKSICWKINNWNEFWKCSSGQK

SEQ ID NO: 6307 - protein, 102 aa, Homo sapiens
MDDDIAALVVDNGSGMCKAGFAGDDAPRAVFPSIVGRPRHQGVMVGMGQKDSYVGDEAQSKRGILTLKYPIEHGIVTNWDDMEKIWHHTFYNELRVAPEEHP

SEQ ID NO: 6308 - protein, 673 aa, Homo sapiens
MDPQRSPLLEVKGNIELKRPLIKAPSQLPLSGSRLKRRPDQMEDGLEPEKKRTRGLGATTKITTSHPRVPSLTTVPQTQGQTTAQKVSKKTGPRCSTAIATGLKNQKPVPAVPVQKSGTSGVPPMAGGKKPSKRPAWDLKGQLCDLNAELKRCRERTQTLDQENQQLQDQLRDAQQQVKALGTERTTLEGHLAKVQAQAEQGQQELKNLRACVLELEERLSTQEGLVQELQKKQVELQEERRGLMSQLEEKERRLQTSEAALSSSQAEVASLRQETVAQAALLTEREERLHGLEMERRRLHNQLQELKGNIRVFCRVRPVLPGEPTPPPGLLLFPSGPGGPSDPPTRLSLSRSDERRGTLSGAPAPPTRHDFSFDRVFPPGSGQDEVFEEIAMLVQSALDGYPVCIFAYGQTGSGKTFTMEGGPGGDPQLEGLIPRALRHLFSVAQELSGQGWTYSFVASYVEIYNETVRDLLATGTRKGQGGECEIRRAGPGSEELTVTNARYVPVSCEKEVDALLHLARQNRAVARTAQNERSSRSHSVFQLQISGEHSSRGLQCGAPLSLVDLAGSERLDPGLALGPGERERLRETQAINSSLSTLGLVIMALSNKESHVPYRNSKLTYLLQNSLGGSAKMLMFVNISPLEENVSESLNSLRFASKVNQCVIGTAQANRK

SEQ ID NO: 6309 - protein, 230 aa, Homo sapiens
MSGFDDPGIFYSDSFGGDAQADEGQARKSQLQRRFKEFLRQYRVGTDRTGFTFKYSLAPSLIEHLLPARYCSGCWAAALKLDLAPASRDELKRHYNLGEYWIEVEMEDLASFDEDLADYLYKQPAEHLQLLEEAAKEVADEVTRPRPSGEEVLQDIQVMLKSDASPSSIRSLKSDMMSHLVKIPGIIIAASAVRAKATRISIQCRSCRNTLTNIAMRPGLEGYALPRKCN

SEQ ID NO: 6310 - protein, 143 aa, Homo sapiens
MEPSALRKAGSEQEEGFEGLPRRVTDLGMVSNLRRSNSSLFKSWRLQCPFGNNDKQESLSSWIPENIKKKECVYFVESSKLSDAGKVVCQCGYTHEQHLEEATKPHTFQGTQWDPKKHVQEMPTDAFGDIVFTGLSQKVKKYV

SEQ ID NO: 6311 - protein, 305 aa, Homo sapiens
MDETVAEFIKRTILKIPMNELTTILKAWDFLSENQLQTVNFRQRKESVVQHLIHLCEEKRASISDAALLDIIYMQFHQHQKVWEVFQMSKGPGEDVDLFDMKQFKNSFKKILQRALKNVTVSFRETEENAVWIRIAWGTQYTKPNQYKPTYVVYYSQTPYAFTSSSMLRRNTPLLGQTFETHNSTTPLQERSLGLDINMDSRIIHENIVEKERVQRITQETFGDYPQPQLEFAQYKLETKFKSGLNGSILAEREEPLRCLIKFSSPHLLEALKSLAPAGIADAPLSPLLTCIPNKRMNYFKIRDK

SEQ ID NO: 6312 - protein, 74 aa, Homo sapiens
MATEGDVELELETETSGPERPPEKPRKHDSGAADLERVTDYAEEKEIQSSNLETGERTGKSHYQEGRSGANSEW

SEQ ID NO: 6313 - protein, 128 aa, Homo sapiens
MLNHATQRVMEAEQTKTRSELVHKETAARYNAAMGRMRQLEKKLKRAINKSKPYFELKAKYYVQLEQLKKTVDDLQAKLTLAKGEYKMALKNLEMISDEIHERRRSSAMGPRGCGVGAEGSSTSVEDL

SEQ ID NO: 6314 - protein, 295 aa, Homo sapiens
MEVMNLMEQPIKVTEWQQTYTYDSGIHSGANTCVPSVSSKGIMEEDEACGRQYTLKKTTTYTQGVPPSQGDLEYQMSTTARAKRVREAMCPGVSGEDSSLLLATQVEGQATNLQRLAEPSQLLKSAIVHLINYQDDAELATRALPELTKLLNDEDPVVVTKAAMIVNQLSKKEASRRALMGSPQLVAAVVRTMQNTSDLDTARCTTSILHNLSHHREGLLAIFKSGGIPALVRMLSSPVESVLFYAITTLHNLLLYQEGAKMAVRLADGLQKMVPLLNKNNPKFLAITTDCLQLL

SEQ ID NO: 6315 - protein, 164 aa, Homo sapiens
MAEAVLIDLFGLKLNSQKNCHQTLLKTLNAVQYHHAAKAKFLCIMCCSNISYERDGEQDNCEIETSNGLSALLEEFEIVSCPSMAATLYTIKQKIDEKNLSSIKVIVPRHRKTLMKAFIDQLFTDVYNFEFEDLQVTFRGGLFKQSIEINVITAQELRGIQNEI

SEQ ID NO: 6316 - protein, 89 aa, Homo sapiens
MYVEGTLDLLELLIMHPFLKPDDQQKEVVNMAQKAIIRYFPVFEKILRGHGQSFLVGNQLSLADVILLQTILALEEKIPNILSAFPFLQ

SEQ ID NO: 6317 - protein, 162 aa, Homo sapiens
MCGIWALFGSDDCLSVQCLSAMKIAHRGPDAFRFENVNGYTNCCFGFHRLAVVDPLFGMQPIRVKKYPYLWLCYNGEIYNHKKMQQHFEFEYQTKVDGEIILHLYDKGGIEQTICMLDGVFAFVLLDTANKKVFLGRDTYGVRPLFKAMTEDGFLAVCSEAK

SEQ ID NO: 6318 - protein, 221 aa, Homo sapiens
RAHREIKDIFYKAIQKRRQSQEKIDDILQTLLDATYKDGRPLTDDEVAGMLIGLLLAGQHTSSTTSAWMGFFLARDKTLQKKCYLEQKTVCGENLPPLTYDQLKDLNLLDRCIKETLRLRPPIMIMMRMARTPQTVAGYTIPPGHQDNPASGEKFAYVPFGAGRHRCIGENFAYVQIKTIWSTMLRLYEFDLIDGYFPTVNYTTMIHTPENPVIRYKRRSK

SEQ ID NO: 6319 - protein, 508 aa, Homo sapiens
MALSVPGYSPGFRKPPEVVRLRRKRARSRGAAASPPRELTEPAARRAALVAGLPLRPFPAAGGRGGGSGGGPAAARRNPFARLDNRPRVAAEPPDGPAREQPEAPVPFLDSNQENDLLWEEKFPERTTVTELPQTSHVSFSEPDIPSSKSTELPVDWSIKTRLLFTSSQPFTWADHLKAQEEAQGLVQHCRATEVTLPKSIQDPKLSSELRCTFQQSLIYWLHPALSWLPLFPRIGADRKMAGKTSPWSNDATLQHVLMSDWSVSFTSLYNLLKTKLCPYFYVCTYQFTVLFRAAGLAGSDLITALISPTTRGLREAMRNEGIEFSLPLIKESGHKKETASGTSLGYGEEQAISDEDEEESFSWLEEMGVQDKIKKPDILSIKLRKEKHEVQMDHRPESVVLVKGINTFTLLNFLINSKSLVATSGPQAGLPPTLLSPVAFRGATMQMLKYCIHTSQLLYLTSACKWTKYLIWRLFIRSLLTVVCTLTLWSNLVKYRYLGNHLYGMWC

SEQ ID NO: 6320 - protein, 142 aa, Homo sapiens
MGCTVSAEDKAAAERSKMIDKNLREDGEKAAREVKLLLLGSSTRMATPRRNAGSTGRLSTATPSSPSWPLSKPWATCRSTLPTPPERTTPGSYLHCPAPPRSKACSLMTCPASSGGSGLTMVCRPALAAQGNTSSTTQLPTT

SEQ ID NO: 6321 - protein, 143 aa, Homo sapiens
IISKRKFAIGSAREADPALNVETEIEILKKLNHPCIIKIKNFFDAEDYYIVLELMEGGELFDKVVGNKRLKEATCKLYFYQMLLAVQDEDMKRKFQDLLSEENESTALPQVLAQPSTSRKRPREGEAEGAETTKRPAVCAAVL

SEQ ID NO: 6322 - protein, 527 aa, Homo sapiens
MYGPGSQLGKSGNNSWAKERGCSIACQGSLTSARLHAPSIGERPLSHMRWKDTMRRVVRQSKFRHVFGQAVKNDQCYDDIRVSRVTWDSSFCAVNPRFVAIIIEASGGGAFLVLPLHKTGRIDKSYPTVCGHTGPVLDIDWCPHNDQVIASGSEDCTVMVWQIPENGLTLSLTEPVVILEGHSKRVGIVAWHPTARNVLLSAGCDNAIIIWNVGTGEALINLDDMHSDMIYNVSWNRNGSLICTASKDKKVRVIDPRKQEIVAEKEKAHEGARPMRAIFLADGNVFTTGFSRMSERQLALWNPKNMQEPIALHEMDTSNGVLLPFYDPDTSIIYLCGKGDSSIRYFEITDESPYVHYLNTFSSKEPQRGMGYMPKRGLDVNKCEIARFFKLHERKCEPIIMTVPRKSDLFQDDLYPDTAGPEAALEAEEWFEGKNADPILISLKHGYIPGKNRDLKVVKKNILDSKPTANKKCDLISIPKKTTDTASVQNEAKLDEILKEIKSIKDTICNQDERISKLEQQMAKIAA

SEQ ID NO: 6323 - protein, 193 aa, Homo sapiens
MSQWYELQQLDSKFLEQVHQLYDDSFPMEIRQYLAQWLEKQDWEHAANDVSFATIRFHDLLSQLDDQYSRFSLENNFLLQHNIRKSKRNLQDNFQEDPIQMSMIIYSCLKEERKILENAQRFNQAQSGNIQSTVMLDKQKELDSKVRNVKDKVMCIEHEIKSLEDLQDEYDFKCKTLQNRGSSSQNNRVAECH

SEQ ID NO: 6324 - protein, 53 aa, Homo sapiens
MPAAPARPCNGERSSWGWCSSGLASMEYCGSSSGWGPAWASTSAFRSASASSV

SEQ ID NO: 6325 - protein, 309 aa, Homo sapiens
MAKERCLKKSFQDSLEDIKKRMKEKRNKNLAEIGKRRSFIAAPCQIITNTSTLLKNYQDNNKMLVLALENEKSKVKEAQDIILQLRKECYYLTCQLYALKGKLTSQQTVEPAQNQEICSSGMDPNSDDSSRNLFVKDLPQIPLEETELPGQGESFQIEDQIPTIPQDTLGVDFDSATPPETQQSPHLSLKDITNVSLYPVVKIRRLSLSPKKNKASPAVALPKRRCTASVNYKEPTLASKLRRGDPFTDLCFLNSPIFKQKKDLRRSKKRALEVSPAKEAIFILYYVREFVSRFPDCRKCKLETHICLR

SEQ ID NO: 6326 - protein, 158 aa, Homo sapiens
MTCLSHPLQLEVTADLAERRRIRSAIRELQRQELEREEEALASKRFRAERQDNKENWLHSQQREAEQRAALARLAGQLESMNDVEELTALLRSAGEYEERKLIRAAIRRVRAQEIEAATLAGRLYSGRPNSGSREDSKGLAAHRLEQCEVPEREEQEQ

SEQ ID NO: 6327 - protein, 135 aa, Homo sapiens
MAKQPSDVSSECDREGRQLQPAERPPQLRPGAPTSLQTEPQGNPEGNHGGEGDSCPHGSPQGPLAPPASPGPFATRSPLFIFMRRSSLLSRSSSGYFSFDTDRSPAPMSCDKSTQTPSPPCQAFNHYLSAMANWD

SEQ ID NO: 6328 - protein, 283 aa, Homo sapiens
MSPKRIAKRRSPPADAIPKSKKVKVSHRSHSTEPGLVLTLGQGDVGQLGLGENVMERKKPALVSIPEDVVQAEAGGMHTVCLSKSGQVYSFGCNDEGALGRDTSVEGSEMVPGKVELQEKVVQVSAGDSHTAALTDDGRVFLWGSFRDNNGVIGLLEPMKKSMVPVQVQLDVPVVKVASGNDHLVMLTADGDLYTLGCGEQGQLGRVPELFANRGGRQGLERLLVPKCVMLKSRGSRGHVRFQDAFCGAYFTFAISHEGHVYGFGLSNYHQLGTPGTESCFIP

SEQ ID NO: 6329 - protein, 55 aa, Homo sapiens
GRGLMGISSTLCKAGADSLLRNVEDETPQDLTEESLVLLPFDDLKISGKLLLCTD

SEQ ID NO: 6330 - protein, 392 aa, Homo sapiens
MDNYSTGYDVKPPCLYQMPLSGQQSSIKVEDIQMHNYQQHSHLPPQSEEMMPHSGSVYYKPSSPPTPTTPGFQVQHSPMWDDPGSLHNFHQNYVATTHMIEQRKTPVSRLSLFSFKQSPPGTPVSSCQMRFDGPLHVPMNPEPAGSHHVVDGQTFAVPNPIRKPASMGFPGLQIGHASQLLDTQVPSPPSRGSPSNEGLCAVCGDNAACQHYGVRTCEGCKGFFKRTVQKNAKYVCLANKNCPVDKRRRNRCQYCRFQKCLAVGMVKEVVRTDSLKGRRGRLPSKPKSPQEPSPPSPPVSLISALVRAHVDSNPAMTSLDYSRFQANPDYQMSGDDTQHIQQFYDLLTGSMEIIRGWAEKIPGFADLPKADQDLLFESAFLELFVLRLAYRI

SEQ ID NO: 6331 - protein, 218 aa, Homo sapiens
SIINQYIACQGPLPHTCTDFWQMTWEQGSSMVVMLTTQVERGRVKCHQYWPEPTGSSSYGCYQVTCHSEEGNTAYIFRKMTLFNQEKNESRPLTQIQYIAWPDHGVPDDSSDFLDFVCHVRNKRAGKEEPVVVHCSAGIGRTGVLITMETAMCLIECNQPVYPLDIVRTMRDQRAMMIQTPFCFLYFIFQSQYRFVCEAILKVYEEGFVKPLTTSTNK

SEQ ID NO: 6332 - protein, 1163 aa, Homo sapiens
MDRNREAEMELRRGPSPTRAGRGHEVDGDKATCHTCCICGKSFPFQSSLSQHMRKHTGEKPYKCPYCDHRASQKGNLKIHIRSHRTGTLIQGHEPEAGEAPLGEMRASEGLDACASPTKSASACNRLLNGASQADGARVLNGASQADSGRVLLRSSKKGAEGSACAPGEAKAAVQCSFCKSQFERKKDLELHVHQAHKPFKCRLCSYATLREESLLSHIERDHITAQGPGSGEACVENGKPELSPGEFPCEVCGQAFSQTWFLKAHMKKHRGSFDHGCHICGRRFKEPWFLKNHMKAHGPKTGSKNRPKSELDPIATINNVVQEEVIVAGLSLYEVCAKCGNLFTNLDSLNAHNAIHRRVEASRTRAPAEEGAEGPSDTKQFFLQCLNLRPSAAGDSCPGTQAGRRVAELDPVNSYQAWQLATRGKVAEPAEYLKYGAWDEALAGDVAFDKDRREYVLVSQEKRKREQDAPAAQGPPRKRASGPGDPAPAGHLDPRSAARPNRRAAATTGQGKSSECFECGKIFRTYHQMVLHSRVHRRARRERDSDGDRAARARCGSLSEGDSASQPSSPGSACAAADSPGSGLADEAAEDSGEEGAPEPAPGGQPRRCCFSEEVTSTELSSGDQSHKMGDNASERDTGESKAGIAASVSILENSSRETSRRQEQHRFSMDLKMPAFHPKQEVPVPGDGVEFPSSTGAEGQTGHPAEKLSDLHNKEHSGGGKRALAPDLMPLDLSARSTRDDPSNKETASSLQAALVVHPCPYCSHKTYYPEVLWMHKRIWHRVSCNSVAPPWIQPNGYKSIRSNLVFLSRSGRTGPPPALGGKECQPLLLARFTRTQVPGGMPGSKSGSSPLGVVTKAASMPKNKESHSGGPCALWAPGPDGYRQTKPCHGQEPHGAATQGPLAKPRQEASSKPVPAPGGGGFSRSATPTPTVIARAGAQPSANSKPVEKFGVPPAGAGFAPTNKHSAPDSLKAKFSAQPQGPPPAKGEGGAPPLPPREPPSKAAQELRTLATCAAGSRGDAALQAQPGVAGAPPVLHSIKQEPVAEGHEKRLDILNIFKTYIPKDFATLYQGWGVSGPGLEHRGTLRTQARPGEFVCIECGKSFHQPGHLRAHMRAHSVVFESDGPRGSEVHTTSADAPKQGRDHSNTGTVQTVPLRKGT

SEQ ID NO: 6333 - protein, 220 aa, Homo sapiens
MKQPIMADGPRCKRRKQANPRRKNVVNYDNVVDTGSETDEEDKLHIAEDDGIANPLDQETSPASVPNHESSPHVSQALLPREEEEDEIREGGVEHPWHNNEILQASVDGPDLPPGTPDAFAQLLTCPYCDRGYKRLTSLKEHIKYRHEKNEENFSCPLCSYTFAYRTQLERHMVTHKPGTDQHQMLTQGAGNRKFKCTECGKAFKYKHHLKEHLRIHSGT

SEQ ID NO: 6334 - protein, 133 aa, Homo sapiens
MASEDIAKLAETLAKTQVAGGQLSFKGKSLKLNTAEDAKDVIKEIEDFDSLEALRLEGNTVGVEAARVIAKALEKKSELKRCHWSDMFTGRLRTEIPPALISLGEGLITAGAQLVELDLSDNAFGPDGVQGFE

SEQ ID NO: 6335 - protein, 64 aa, Homo sapiens
SGDPELSCSCTLRTQSRFPLRMSRRGMVRKSRAWVLEKKERHRRQGREVRPDTQYTGRKRKPRF

SEQ ID NO: 6336 - protein, 97 aa, Homo sapiens
MQAFLKGTSISTKPPLTKDRGVAASAGSSGENKKAKPVPWVEKYRPKCVDEVAFQEEVVAVLKKSLEGADLPNLLFYGPPGTGKTSTILAAARELFG

SEQ ID NO: 6337 - protein, 258 aa, Homo sapiens
MAKERCLKKSFQDSLEDIKKRMKEKRNKNLAEIGKRRSFIAAPCQIITNTSTLLKNYQDNNKMLVLALENEKSKVKEAQDIILQLRKECYYLTCQLYALKGKLTSQQTVEPAQNQEICSSGMDPNSDDSSRNLFVKDLPQIPLEETELPGQGESFQIEATPPETQQSPHLSLKDITNVSLYPVVKIRRLSLSPKKNKASPAVALPKRRCTASVNYKEPTLASKLRRGDPFTDLCFLNSPIFKQKKDLRRSKKSMKQIQ

SEQ ID NO: 6338 - protein, 181 aa, Homo sapiens
MGRRPARCYRYCKNKPYPKSRFCRGVPDAKIRIFDLGRKKAKVDEFPLCGHMVSDEYEQLSSEALEAARICANKYMVKSCGKDGFHIRVRLHPFHVIRINKMLSCAGADRSTSQRSGASPSSMLMNLKTWWLKSGSSQMAVGSSTSPVVALWTSGGPCTHEGFQCAAPLLILTNKFYFLST

SEQ ID NO: 6339 - protein, 287 aa, Homo sapiens
MVRSGVPRSRGLVSGLIHSANVRTVNLEKSCVSVEWAEGGATKGKEIDFDDVAAINPELLQLLPLHPKDNLPLQENVTIQKQKRRSVNSKIPAPKESLRSRSTRMSTVSELRITAQENDMEVELPAAANSRKQFSVPPAPTRPSCPAVAEIPLRMVSEEMEEQVHSIRGSSSANPVNSVRRKSCLVKEVEKMKNKREEKKAQNSEMRMKRAQEYDSSFPNWEFARMIKEFRATLECHPLTMTDPIEEHRICVCVRKRPLNKQELAKKEIDVISIPSKCLLLVHEPKL

SEQ ID NO: 6340 - protein, 95 aa, Homo sapiens
MSELKDCPLQFHDFKSVDHLKVCPRYTAVLARSEDDGIGIEELDTLQLELETLLSSASRRLRVLEAETQILTDWQDKKGDRRFLKLGRDHELGAP

SEQ ID NO: 6341 - protein, 84 aa, Homo sapiens
MLKAIPSFLNSFNRLVFSVMREGRQKDKGSIDDLPTVLKCARLVERMYSHIAARAEEFAVFSPFMVAQYVLEVQKVTLYPAVKS

SEQ ID NO: 6342 - protein, 96 aa, Homo sapiens
NIQLVADGCCNLQKQIQITQLFGVPVVVALNVFKTDTRAEIDLVCELAKRAGAFDAVPCYHWSVGGKGSVDLARAVREAASKRSRFQFLYDVQPFS

SEQ ID NO: 6343 - protein, 139 aa, Homo sapiens
MDSVEKTTNRSEQKSRKFLKSLIRKQPQELLLVIGTGVSAAVAPGIPALCSWRSCIEAVIEAAEQLEVLHPGDVAEFRRKVTKDRDLLVVAHDLIRKMSPRTGDAKPSFFQDCLMEVFDDLEQHIRSPVVLQSILSLMD

SEQ ID NO: 6344 - protein, 160 aa, Homo sapiens
MAGGAADCSFWERLLARQCRIYELRNKERISVAAASKLLANMVYQYKGMGLSMGTMICGWDKRGPGLYYVDSEGNRISGATFSVGSGSVYAYGVMDRGYSYDLEVEQAYDLARRAIYQATYRDAYSGGAVNLYHVREDGWIRVSSDNVADLHEKYSGSTP

SEQ ID NO: 6345 - protein, 67 aa, Homo sapiens
RPRLSEPQGSGRQGNSLGASDGVDNTVRPGDQGSSSQPNSEERGENTSYRMEEKSDFMLEKLETKSV

SEQ ID NO: 6346 - protein, 105 aa, Homo sapiens
AVLVYTPSRKVHGKRLVCYDDRYIVKVAYEQDGVIVSNDNYRDLQSENPEWKWFIEQRLLMFSFVNDRFMPPDDPLGRHGPSLSNFLSRKPKPPEPSWQHCPYGG

SEQ ID NO: 6347 - protein, 385 aa, Homo sapiens
MSLILNILREMLEYFGVPVEQVLLIWENKDYGSTRSIVRIIGKMLPLEPCRRPNFELIPLLNSVDSDNCGSMVPSFADILYVANDEEASYLRFRNSIWKNEEEKVEIFHPLRLVRDPLSPAVRQKETVKNDLPVNEAAIRKIAALENELTFLRSQIAAIVEMQELKNSTNSSSFGLSDERISLGQLSSSRAAHLSVDPDQLPGSVLSPPPPPPLPPQFSSLQPPCFPPVQPGSNNICDSDNPATEMSKQNPAANKTNYSHHSKSQRNKDIPNMLDVLKDMNKVKLRAIERSPGGRPIHKRKRQNSHWDPVSLISHALKQKFAFQEDDSFEKENRSWESSPFSSPETSRFGHHISQSEGQRTKEEMVNTKAVDQGISNTSLLNSRI

SEQ ID NO: 6348 - protein, 238 aa, Homo sapiens
MRPWWSPVKIQGQNKEMLAAACQMFLGKTEAEIAHIALETLEGHQRAIMAHMTVEEIYKDRQKFSEQVFKVASSDLVNMGISVVSYTLKDIHDDQDYLHSLGKARTAQVQKDARIGEAEAKRDAGIREAKAKQEKVSAQYLSEIEMAKAQRDYELKKAAYDIEVNTRRAQADLAYQLQVAKTKQQIEEQRVQVQVVERAQQVAVQEQEIARREKELEARVRKPAEAERYKLERLAEAE

SEQ ID NO: 6349 - protein, 124 aa, Homo sapiens
MDENSLEFDMVGIDAAIANAFRRILLAEVPTMAVEKVLVYNNTSIVQDEILAHRLGLIPIHADPRLFEYRNQGDEEGTEIDTLQFRLQVRCTRNPHAAKDSSDPNELYVNHKVYTRHMTWIPLG

SEQ ID NO: 6350 - protein, 177 aa, Homo sapiens
MKQESAAPNTPPTSQSPTPSAQFPRNDGDPQALWIFGYGSLVWRPDFAYSDSRVGFVRGYSRRFWQGDTFHRGSDKMPGRVVTLLEDHEGCTWGVAYQVQGEQNPGYLGPAPEEAIATQILACRGFSGHNLEYLLRLADFMQLCGPQAQDEHLAAIVDAVGTMLPCFCPTEQALALV

SEQ ID NO: 6351 - protein, 163 aa, Homo sapiens
MAAAKDTHEDHDTSTENTDESNHDPQFEPIVSLPEQEIKTLEEDEEELFKMRAKLFRFASENDLPEWKERGTGDVKLLKHKEKGAIRLLMRRDKTLKICANHYITPMMELKPNAGSDRAWVWNTHADFADECPKPELLAIRFLNAESEPRALGTCLTWGSPAW

SEQ ID NO: 6352 - protein, 1114 aa, Homo sapiens
MEAAVGVPDGGDQGGAGPREDATPMDAYLRKLGLYRKLVAKDGSCLFRAVAEQVLHSQSRHVEVRMACIHYLRENREKFEAFIEGSFEEYLKRLENPQEWVGQVEISALSLMYRKDFIIYREPNVSPSQVTENNFPEKVLLCFSNGNHYDIVYPIKYKESSAMCQSLLYELLYEKVFKTDVSKIVMELDTLEVADEDNSEISDSEDDSCKSKTAAAAADVNGFKPLSGNEQLKNNGNSTSLPLSRKVLKSLNPAVYRNVEYEIWLKSKQAQQKRDYSIAAGLQYEVGDKCQVRLDHNGKFLNADVQGIHSENGPVLVEELGKKHTSKNLKAPPPESWNTVSGKKMKKPSTSGQNFHSDVDYRGPKNPSKPIKAPSALPPRLQHPSGVRQHAFSSHSSGSQSQKFSSEHKNLSRTPSQIIRKPDRERVEDFDHTSRESNYFGLSPEERREKQAIEESRLLYEIQNRDEQAFPALSSSSVNQSASQSSNPCVQRKSSHVGDRKGSRRRMDTEERKDKDSIHGHSQLDKRPEPSTLENITDDKYATVSSPSKSKKLECPSPAEQKPAEHVSLSNPAPLLVSPEVHLTPAVPSLPATVPAWPSEPTTFGPTGVPAPIPVLSVTQTLTTGPDSAVSQAHLTPSPVPVSIQAVNQPLMPLPQTLSLYQDPLYPGFPCNEKGDRAIVPPYSLCQTGEDLPKDKNILRFFFNLGVKAYSCPMWAPHSYLYPLHQAYLAACRMYPKVPVPVYPHNPWFQEAPAAQNESDCTCTDAHFPMQTEASVNGQMPQPEIGPPTFSSPLVIPPSQVSESHGQLSYQADLESETPGQLLHADYEESLSGKNMFPQPSFGPNPFLGPVPIAPPFFPHVWYGYPFQGFIENPVMRQNIVLPSDEKGELDLSLENLDLSKDCGSVSTVDEFPEARGEHVHSLPEASVSSKPDEGRTEQSSQTRKADTALASIPPVAEGKAHPPTQILNRERETVPVELEPKRTIQSLKEKTEKVKDPKTAADVVSPGANSVDSRVQRPKEESSEDENEVSNILRSGRSKQFYNQTYGSRKYKSDWGYSGRGGYQHVRSEESWKGQPSRSRDEGYQYHRNVRGRPFRGDRRRSGMGDGHRGQHT

SEQ ID NO: 6353 - protein, 731 aa, Homo sapiens
MTHFEDIEPACCRSRAPSPCELPSDPLLSMKQPIMADGPRCKRRKQANPRRKNVVNYDNVVDTGSETDEEDKLHIAEDDGIANPLDQETSPASVPNHESSPHVSQALLPREEEEDEIREGGVEHPWHNNEILQASVDGPEEMKEDYDTMGPEATIQTAINNGTVKNANCTSDFEEYFAKRKLEERDGHAVSIEEYLQRSDTAIIYPEAPEELSRLGTPEANGQEENDLPPGTPDAFAQLLTCPYCDRGYKRLTSLKEHIKYRHEKNEENFSCPLCSYTFAYRTQLERHMVTHKPGTDQHQMLTQGAGNRKFKCTECGKAFKYKHHLKEHLRIHSGEKPYECPNCKKRFSHSGSYSSHISSKKCIGLISVNGRMRNNIKTGSSPNSVSSSPTNSAITQLRNKLENGKPLSMSEQTGLLKIKTEPLDFNDYKVLMATHGFSGTSPFMNGGLGATSPLGVHPSAQSPMQHLGVGMEAPLLGFPTMNSNLSEVQKVLQIVDNTVSRQKMDCKAEEISKLKGYHMKDPCSQPEEQGVTSPNIPPVGLPVVSHNGATKSIIDYTLEKVNEAKACLQSLTTDSRRQISNIKKEKLRTLIDLVTDDKMIENHNISTPFSCQFCKESFPGPIPLHQHERYLCKMNEEIKAVLQPHENIVPNKAGVFVDNKALLLSSVLSEKGMTSPINPYKDHMSVLKAYYAMNMEPNSDELLKISIAVGLPQEFVKEWFEQRKVYQYSN

SEQ ID NO: 6354 - protein, 157 aa, Homo sapiens
MASWAKGRSYLAPGLLQGQVAIVTGGATGIGKAIVKELLELGSNVVIASRKLERLKSAADELQANLPPTKQARVIPIQCNIRNEEEVNNLVKSTLDTFGKINFLVNNGGGQFLSPAEHISSKGWHAVLETNLTGTFYMCKAGILELQEQVFTTSPNL

SEQ ID NO: 6355 - protein, 424 aa, Homo sapiens
MSTSLGSNLSELDRLLLELNAVQHNPPGFPADEANSSPPLPGALSPLYGVPETNSPLGGKAGPLTKEKPKRNGGRGLEDVRPSVESLLDELESSVPSPVPAITVNQGEMSSPQRVTSTQQQTRISASSATRELDELMASLSDFKFMAQGKTGSSSPPGGPPKPGSQLDSMLGSLQSDLNKLGVATVAKGVCGACKKPIAGQVVTAMGKTWHPEHFVCTHCQEEIGSRNFFERDGQPYCEKDYHNLFSPRCYYCNGPILDKVVTALDRTWHPEHFFCAQCGAFFGPEGFHEKDGKAYCRKDYFDMFAPKCGGCARAILENYISALNTLWHPECFVCRECFTPFVNGSFFEHDGQPYCEVHYHERRGSLCSGCQKPITGRCITAMAKKFHPEHFVCAFCLKQLNKGTFKEQNDKPYCQNCFLKLFC

SEQ ID NO: 6356 - protein, 408 aa, Homo sapiens
VSTGADGTVCFWQWDLESLKFSPRPLKFTEKPRPGVQMLCSSFSVGGMFLATGSTDHVIRMYFLGFEAPEKIAELESHTDKVDSIQFCNNGDRFLSGSRDGTARIWRFEQLEWRSILLDMATRISGDLSSEEERFMKPKVTMIAWNQNDSIVVTAVNDHVLKVWNSYTGQLLHNLMGHADEVFVLETHPFDSRIMLSAGHDGSIFIWDITKGTKMKHYFNMIEGQGHGAVFDCKFSQDGQHFACTDSHGHLLIFGFGCSKPYEKIPDQMFFHTDYRPLIRDSNNYVLDEQTQQAPHLMPPPFLVDVDGNPHPTKYQRLVPGRENSADEHLIPQLGYVATSDGEVIEQIISLQTNDNDERSPESSILDGMIRQLQQQQDQRMGADQDTIPRGLSNGEETPRRGSWKTSD

SEQ ID NO: 6357 - protein, 574 aa, Homo sapiens
MGNSEGCNTKKEGDLIAAQARLKDLEALLNSKEAALSTALSEKRTLEGELHDLRGQVAKLEAALGEAKKQLQDEMLRRVDAENRLQTMKEELDFQKNIYSEELRETKRRHETRLVEIDNGKQREFESRLADALQELRAQHEDQVEQYKKELEKTYSAKLDNARQSAERNSNLVGAAHEELQQSRIRIDSLSAQLSQLQKQLAAKEAKLRDLEDSLARERDTSRRLLAEKEREMAEMRARMQQQLDEYQELLDIKLALDMEIHAYRKLLEGEEERLRLSPSPTSQRSRGRASSHSSQTQGGGSVTKKRKLESTESRSSFSQHARTSGRVAVEEVDEEGKFVRLRNKSNEDQSMGNWQIKRQNGDDPLLTYRFPPKFTLKAGQVVTIWAAGAGATHSPPTDLVWKAQNTWGCGNSLRTALINSTGEEVAMRKLVRSVTVVEDDEDEDGDDLLHHHHGSHCSSSGDPAEYNLRSRTVLCGTCGQPADKASASGSGAQVGGPISSGSSASSVTVTRSYRSVGGSGGGSFGDNLVTRSYLLGNSSPRTQSPQNCSIIQEMGMRWEVEEGRRKVSLSCLP

SEQ ID NO: 6358 - protein, 134 aa, Homo sapiens
ELGDYDQSENLSGYLSDYSFIPNQPQDFEKEIAKLHQQHIGLSPAEAEFNYLNTARTLELYGVEFHYARDQSNNEIMIGVMSGGILIYKNRVRMNTFPWLKIVKISFKCKQFFIQLRKELVSTDLIIIDINEAF

SEQ ID NO: 6359 - protein, 546 aa, Homo sapiens
MHSMISSVDVKSEVPVGLEPISPLDLRTDLRMMMPVVDPVVREKQLQQELLLIQQQQQIQKQLLIAEFQKQHENLTRQHQAQLQEHIKELLAIKQQQELLEKEQKLEQQRQEQEVERHRREQQLPPLRGKDRGRERAVASTEVKQKLQEFLLSKSATKDTPTNGKNHSVSRHPKLWYTAAHHTSLDQSSPPLSGTSPSYKYTLPGAQDAKDDFPLRKTESSVSSSSPGSGPSSPNNGPTGSVTENETSVLPPTPHAEQMVSQQRILIHEDSMNLLSLYTSPSLPNITLGLPAVPSQLNASNSLKEKQKCETQTLRQGVPLPGQYGGSIPASSSHPHVTLEGKPPNSSHQALLQHLLLKEQMRQQKLLVAGGVPLHPQSPLATKERISPGIRGTHKLPRHRPLNRTQSAPLPQSTLAQLVIQQQHQQFLEKQKQYQQQIHMNKLLSKSIEQLKQPGSHLEEAEEELQGDQAMQEDRAPSSGNSTRSDSSACVDDTLGQVGAVKVKEEPVDSDEDAQIQEMESGEQAAFMQQVIGKDLAPGFVIKVII

SEQ ID NO: 6360 - protein, 141 aa, Homo sapiens
MKSYAGFLTVNKTYNSNLFFWFFPAQIQPEDAPVVLWLQGGPGGSSMFGLFVEHGPYVVTSNMTLRDRDFPWTTTLSMLYIDNPVGTGFSFTDDTHGYAVNEDDVARDLYSALIQFFQIFPEYKNNDFYVTGESYAGKYVP

SEQ ID NO: 6361 - protein, 250 aa, Homo sapiens
GNKGAKGDRGLPGPRGPQGALGEPGKQGSRGDPGDAGPRGDSGQPGPKGDPGRPGFSYPGPRGAPGEKGEPGPRGPEGGRGDFGLKGEPGRKGEKGEPADPGPPGEPGPRGPRGVPGPEGEPGPPGDPGLTECDVMTYVRETCGCCGSEVSPVPPDDPATPPDCEKRCGALDVVFVIDSSESIGYTNFTLEKNFVINVVNRLGAIAKDPKSETGTRVGVVQYSHEGTFEAIQLDDERIDSLSSFKEAVKN

SEQ ID NO: 6362 - protein, 240 aa, Homo sapiens
MPSDLAKKKAAKKKEAAKARQRPRKGHEENGDVVTEPQVAEKNEANGRETTEVDLLTKELEDFEMKKAAARAVTGVLASHPNSTDVHIINLSLTFHGQELLSDTKLELNSGRRYGLIGLNGIGKSMLLSAIGKREVPIPEHIDIYHLTREMPPSDKTPLHCVMEVDTERAMLEKEAERLAHEDAECEKLMELYERLEELDADKAEMRASRILHGLGFTPAMQRKKLKDFSGGWRMRVALA

SEQ ID NO: 6363 - protein, 91 aa, Homo sapiens
MAAIRKKLVIVGDGACGKTCLLIVFSKDQFPEVYVPTVFENYIADIEVDGKQVELALWDTAGQEDYDRLRPLSYPDTDVILMCFSIDSPDS

SEQ ID NO: 6364 - protein, 445 aa, Homo sapiens
MAALMTPGTGAPPAPGDFSGEGSQGLPDPSPEPKQLPELIRMKRDGGRLSEADIRGFVAAVVNGSAQGAQIGAMLMAIRLRGMDLEETSVLTQALAQSGQQLEWPEAWRQQLVDKHSTGGVGDKVSLVLAPALAACGCKMQVLLDQAGCCIVGQSEQLVPADGILYAARDVTATVDSLPLITASILSKKLVEGLSALVVDVKFGGAAVFPNQEQARELAKTLVGVGASLGLRVAAALTAMDKPLGRCVGHALEVEEALLCMDGAGPPDLRDLVTTLGGALLWLSGHAGTQAQGAARVAAALDDGSALGRFERMLAAQGVDPGLARALCSGSPAERRQLLPRAREQEELLAPADGTVELVRALPLALVLHELGAGRSRAGEPLRLGVGAELLVDVGQRLRRGTPWLRVHRDGPALSGPQSRALQEALVLSDRAPFAAPSPFAELVL

SEQ ID NO: 6365 - protein, 173 aa, Homo sapiens
MLQCYRCRQWFHEACTQCLNEPMMFGDRFYLFFCSVCNQGPEYIERLPLRWVDVVHLALYNLGVQSKKKYFDFEEILAFVNHHWELLQLGKLTSTPVTDRGPHLLNALNSYKSRFLCGKEIKKKKCIFRLRIRVPPNPPGKLLPDKGLLPNENSASSELRKRGKSKPGLLPHE

SEQ ID NO: 6366 - protein, 126 aa, Homo sapiens
MAGTLDLDKGCTVEELLRGCIEAFDDSGKVRDPQLVRMFLMMHPWYIPSSQLAAKLLHIYQQSRKDNSNSLQVKTCHLVRYWISAFPAEFDLNPELAEQIKELKALLDQEGNRRHSSLIDIDSVRL

SEQ ID NO: 6367 - protein, 432 aa, Homo sapiens
MILLRASEVRQLLHNKFVVILGDSVHRAVYKDLVLLLQKDRLLTPGQLRARGELNFEQDELVDGGQRGHMHNGLNYREVREFRSDHHLVRFYFLTRVYSDYLQTILKELQSGEHAPDLVIMNSCLWDISRYGPNSWRSYLENLENLFQCLGQVLPESCLLVWNTAMPVGEEVTGGFLPPKLRRQKATFLKNEVVKANFHSATEARKHNFDVLDLHFHFRHARENLHWDGVHWNGRVHRCLSQLLLAHVADAWGVELPHRHPVGEWIKKKKPGPRVEGPPQANRNHPALPLSPPLPSPTYRPLLGFPPQRLPLLPLLSPQPPPPILHHQGMPRFPQGPPDACFSSDHTFQSDQFYCHSDVPSSAHAGFFVEDNFMVGPQLPMPFFPTPRYQRPAPVVHRGFGRYRPRGPYTPWGQRPRPSKRRAPANPEPRPQ

SEQ ID NO: 6368 - protein, 149 aa, Homo sapiens
GGIYFYHGRKGVTHNIALLREVIINSRFVKGDISTKFLSDVYPDGFKGHMLTKSEKNQLLAIASSLFVAFQLRAQHFQENSRMPVIKPDIANWELSVKLHDKVHTVVASNNGSVFSVEVDGSKLNVTSTWNLASPLLSVSVDGTQRTVQ

SEQ ID NO: 6369 - protein, 153 aa, Homo sapiens
MGNACWELYCLEHGIQPDGQMPSDKTIGGGDDSFTTFFCETGAGKHVPRAVFVDLEPTVIDEIRNGPYRQLFHPEQLITGKEDAANNYARGHYTIGKEIIDPVLDRIRKLSDQCTGLQGFLVFHSFGGGTGSGFTSLLMERLSVDYGKKSKLE

SEQ ID NO: 6370 - protein, 782 aa, Homo sapiens
MATAAVLRGPAAHWVESFQKAREEGSGSGTWRGRWRRRSVISFGSKNRTIGVAAKNQQITHANNTVSNFKRFHGRAFNDPFIQKEKENLSYDLVPLKNGGVGIKVMYMGEEHLFSVEQITAMLLTKLKETAENSLKKPVTDCVISVLGTAFDPFLGGKNFDEKLVEHFCAEFKTKYKLDAKSKIRALLRLYQECEKLKKLMSSNSTDLPLNIECFMNDKDVSGKMNRSQFEELCAELLQKIEVPLYSLLEQTHLKVEDVSAVEIVGGATRIPAVKERIAKFFGKDISTTLNADEAVARGCALQCAILSPAFKVREFSVTDAVPFPISLIWNHDSEDTEGVHEVFSRNHAAPFSKVLTFLRRGPFELEAFYSDPQGVPYPEAKIGRFVVQNVSAQKDGEKSRVKVKVRVNTHGIFTISTASMVEKVPTEENEMSSEADMECLNQRPPENPDTDKNVQQDNSEAGTQPQVQTDAQQTSQSPPSPELTSEENKIPDADKANEKKVDQPPEAKKPKIKVVNVELPIEANLVWQLGKDLLNMYIETEGKMIMQDKLEKERNDAKNAVEEYVYEFRDKLCGPYEKFICEQDHQNFLRLLTETEDWLYEEGEDQAKQAYVDKLEELMKIGTPVKVRFQEAEERPKMFEELGQRLQHYAKIAADFRNKDEKYNHIDESEMKKVEKSVNEVMEWMNNVMNAQAKKSLDQDPVVRAQEIKTKIKELNNTCEPVVTQPKPKIESPKLERTPNGPNIDKKEEDLEDKNNFGAEPPHQNGECYPNEKNSVNMDLD

SEQ ID NO: 6371 - protein, 234 aa, Homo sapiens
RRRRLRLRRLNCASAIFPASVGRARRRFWKLVLVGDGGTGKTTFVKRHLTGEFEKKYVATLGVEVHPLVFHTNRGPIKFNVWDTAGQEKFGGLRDGYYIQAQCAIIMFDVTSRVTYKNVPNWHRDLVRVCENIPIVLCGNKVDIKDRKVKAKSIVFHRKKNLQYYDISAKSNYNFEKPFLWLARKLIGDPNLEFVAMPALAPPEVVMDPALAAQYEHDLEVAQTTALPDEDDDL

SEQ ID NO: 6372 - protein, 473 aa, Homo sapiens
MGRKKIQITRIMDERNRQVTFTKRKFGLMKKAYELSVLCDCEIALIIFNSTNKLFQYASTDMDKVLLKYTEYNEPHESRTNSDIVETLRKKGLNGCDSPDPDADDSVGHSPESEDKYRKINEDIDLMISRQRLCAVPPPNFEMPVSIPVSSHNSLVYSNPVSSLGNPNLLPLAHPSLQRNSMSPGVTHRPPSAGNTGGLMGGDLTSGAGTSAGNGYGNPRNSPGLLVSPGNLNKNMQAKSPPPMNLGMNNRKPDLRVLIPPGSKNTMPSVSEDVDLLLNQRINNSQSAQSLATPVVSVATPTLPGQGMGGYPSAISTTYGTEYSLSSADLSSLSGFNTASALHLGSVTGWQQQHLHNMPPSALSQLGACTSTHLSQSSNLSLPSTQSLNIKSEPVSPPRDRTTTPSRYPQHTRHEAGRSPVDSLSSCSSSYDGSDREDHRNEFHSPIGLTRPSPDERESPSVKRMRLSEGWAT

SEQ ID NO: 6373 - protein, 445 aa, Homo sapiens
MGEMQGALARARLESLLRPRHKKRAEAQKRSESFLLSGLAFMKQRRMGLNDFIQKIANNSYACKHPEVQSILKISQPQEPELMNANPSPPPSPSQQINLGPSSNPHAKPSDFHFLKVIGKGSFGKVLLARHKAEEVFYAVKVLQKKAILKKKEEKHIMSERNVLLKNVKHPFLVGLHFSFQTADKLYFVLDYINGGELFYHLQRERCFLEPRARFYAAEIASALGYLHSLNIVYRDLKPENILLDSQGHIVLTDFGLCKENIEHNSTTSTFCGTPEYLAPEVLHKQPYDRTVDWWCLGAVLYEMLYGLPPFYSRNTAEMYDNILNKPLQLKPNITNSARHLLEGLLQKDRTKRLGAKDDFMEIKSHVFFSLINWDDLINKKITPPFNPNVSGPNDLRHFDPEFTEEPVPNSIGKSPDSVLVTASVKEAAEAFLGFSYAPPTDSFL

SEQ ID NO: 6374 - protein, 336 aa, Homo sapiens
MPPKHSLSHRCILSVTASLMATRFSFPSGENEMVIMRPGNKYEYKFGFELPQGPLGTSFKGKYGCVDYWVKAFLDRPSQPTQETKKNFEVVDLVDVNTPDLMAPVSAKKEKKVSCMFIPDGRVSVSARIDRKGFCEGDEISIHADFENTCSRIVVPKAAIVARHTYLANGQTKVLTQKLSSVRGNHIISGTCASWRGKSLRVQKIRPSILGCNILRVEYSLLIYVSVPGSKKVILDLPLVIGSRSGLSSRTSSMASRTSSEMSWVDLNIPDTPEAPPCYMDVIPEDHRLESPTTPLLDDMDGSQDSPIFMYAPEFKFMPPPTYTEVDPCILNNNVQ

SEQ ID NO: 6375 - protein, 671 aa, Homo sapiens
MTIRHQGQQYRPRMAFLQKIEALVKDMQNPETGVRMQNQRVLVTSVPHAMTGSDVLQWIVQRLWISSLEAQNLGNFIVRYGYIYPLQDPKNLILKPDGSLYRFQTPYFWPTQQWPAEDTDYAIYLAKRNIKKKGILEEYEKENYNFLNQKMNYKWDFVIMQAKEQYRAGKERNKADRYALDCQEKAYWLVHRCPPGMDNVLDYGLDRVTNPNEVKKQTVVAVKKEIMYYQQALMRSTVKSSVSLGGIVKYSEQFSSNDAIMSGCLPSNPWITDDTQFWDLNAKLVEIPTKMRVERWAFNFSELIRDPKGRQSFQYFLKKEFSGENLGFWEACEDLKYGDQSKVKEKAEEIYKLFLAPGARRWINIDGKTMDITVKGLKHPHRYVLDAAQTHIYMLMKKDSYARYLKSPIYKDMLAKAIEPQETTKKSSTLPFMRRHLRSSPSPVILRQLEEEAKAREAANTVDITQPGQHMAPSPHLTVYTGTCMPPSPSSPFSSSCRSPRKPFASPSRFIRRPSTTICPSPIRVALESSSGLEQKGECSGSMAPRGPSVTESSEASLDTSWPRSRPRAPPKARMALSFSRFLRRGCLASPVFARLSPKCPAVSHGRVQPLGDVGQQLPRLKSKRVANFFQIKMDVPTGSGTCLMDSEDAGTGESGDRATEKEVICPWESL

SEQ ID NO: 6376 - protein, 164 aa, Homo sapiens
SSSSSSGNPLVYLDVDANGKPLGRVVLELKADVVPKTAENFRALCTGEKGFGYKGSTFHRVIPSFMCQAGDFTNHNGTGGKSIYGSRFPDENFTLKHVGPGVLSMANAGPNTNGSQFFICTIKTDWSMALDDIALHCCSPGSPVLTGWMASMLCSVTSKRAWTS

SEQ ID NO: 6377 - protein, 454 aa, Homo sapiens
MPNPRPGKPSAPSLALGPSPGASPSWRAAPKASDLLGARGPGGTFQGRDLRGGAHASSSSLNPMPPSQLQLPTLPLVMVAPSGARLGPLPHLQALLQDRPHFMHQLSTVDAHARTPVLQVHPLESPAMISLTPPTTATGVFSLKARPGLPPGINVASLEWVSREPALLCTFPNPSAPRKDRSVDRAGKDPRPPIPSPDTLCPPSTLSAVPQSSYPLLANGVCKWPGCEKVFEEPEDFLKHCQADHLLDEKGRAQCLLQREMVQSLEQQLVLEKEKLSAMQAHLAGKMALTKASSVASSDKGSCCIVAAGSQGPVVPAWSGPREAPDSLFAVRRHLWGSHGNSTFPEFLHNMDYFKFHNMRPPFTYATLIRWAILEAPEKQRTLNEIYHWFTRMFAFFRNHPATWKNAIRHNLSLHKCFVRVESEKGAVWTVDELEFRKKRSQRPSRCSNPTPGP

SEQ ID NO: 6378 - protein, 375 aa, Homo sapiens
MFPRSGPSNDEVKSRGMKFAEEQLLKHGWTQGKGLGRKENGITQALRVTLKQDTHGVGHDPAKEFTNHWWNELFNKTAANLVVETGQDGVQIRSLSKETTRYNHPKPNLLYQKFVKMATLTSGGEKPNKDLESCSDDDNQGSKSPKILTDEMLLQACEGRTAHKAARLGITMKAKLARLEAQEQAFLARLKGQDPGAPQLQSESKPPKKKKKKRRQKEEEEATASERNDADEKHPEHAEQNIRKSKKKKRRHQEGKVSDEREGTTKGNEKEDAAGTSGLGELNSREQTNQSLRKGKKKKRWHHEEEKMGVLEEGGKGKEAAGSVRTEEVESRAYADPCSRRKKRQQQEEEDLNLEDRGEETFRWWNQGSREQSMQ

SEQ ID NO: 6379 - protein, 211 aa, Homo sapiens
MKPPSSIQTSEFDSSDEEPIEDEQTPIHISWLSLSRVNCSQFLGLCALPGCKFKDVRRNVQKDTEELKSCGIQDIFVFCTRGELSKYRVPNLLDLYQQCGIITHHHPIADGGTPDIASCCEIMEELTTCLKNYRKTLIHCYGGLGRSCLAACLLLYLSDTISPEQAIDSLRDLRGSGAIQTIKQYNYLHEFRDKLAAHLSSRDSQSRSVSR

SEQ ID NO: 6380 - protein, 94 aa, Homo sapiens
MLRLPTVFRQMRPVSRVLAPHLTRAYAKDVKFGADARALMLQGVDLLADAVAVTMGPKGRTVIIEQSWGSPKVTKDGVTVAKSIDLKDKYKNIG

SEQ ID NO: 6381 - protein, 91 aa, Homo sapiens
MILLEVNNRIIEETLALKFENAAAGNKPEAVEVTFADFDGVLYHISNPNGDKTKVMVSISLKFYKELQAHGADELLKRVYGSFLVNPESVF

SEQ ID NO: 6382 - protein, 163 aa, Homo sapiens
MEPSQCVEELEDDVFQPEDGEPVTQPGSLLSADLFAQSLLDCPLSRLQLFPLTHCCGPGLRPTSQEDKATQTLSPASPSQGVMLPCGVTEEPQRLFYGNAGYRLPLPASFPAVLPIGEQPPEGQWQHQAEHQQNQNRVWWQILLFLHNLALNGEENRNGAGPR

SEQ ID NO: 6383 - protein, 162 aa, Homo sapiens
GPQDASTCFPLGEAVLRPGLDAEPELSPEEQRVLERKLKKERKKEERQRLREAGLVAQHPPARRSGAELALDYLCRWAQKHKNWRFQKTRQTWLLLHMYDSDKVPDEHFSTLLAYLEGLQGRARELTVQKAEALMRELDEEGSDPPLPGRAQRIRQVLQLLS

SEQ ID NO: 6384 - protein, 477 aa, Homo sapiens
MADGQVAELLLRRLEASDGGLDSAELAAELGMEHQAVVGAVKSLQALGEVIEAELRSTKHWELTAEGEEIAREGSHEARVFRSIPPEGLAQSELMRLPSGKVGFSKAMSNKWIRVDKSAADGPRVFRVVDSMEDEVQRRLQLVRGGQAEKLGEKERSELRKRKLLAEVGSWRDRPFKPYNFLAHGVLPDSGHLHPLLKVRSQFRQIFLEMGFTEMPTDNFIESSFWNFDALFQPQQHPARDQHDTFFLRDPAEALQLPMDYVQRVKRTHSQGGYGSQGYKYNWKLDEARKNLLRTHTTSASARALYRLAQKKPFTPVKYFSIDRVFRNETLDATHLAEFHQIEGVVADHGLTLGHLMGVLREFFTKLGITQLRFKPAYNPYTEPSMEVFSYHQGLKKWVEVGNSGVFRPEMLLPMGLPENVSVIAWGLSLERPTMIKYGINNIRELVGHKVNLQMVYDSPLCRLDAEPRPPPTQEAA

SEQ ID NO: 6385 - protein, 653 aa, Homo sapiens
MKSPPLLSPCLSWKRMAGIFFLPFISSGFAPRFKQEENFMLGRAHPSQPRFNWSHLTPLELKNRSVGLGTESTGRGKPHFTLEGHKFLIFGGSIHYFRVPREYWRDRLLKLKACGFNTVTTYVPWNLHEPERGKFDFSGNLDLEAFVLMAAEIGLWVILRPGRYICSEMDLGGLPSWLLQDPRLLLRTTNKSFIEAVEKYFDHLIPRVIPLQYRQAGPVIAVQVENEYGSFNKDKTYMPYLHKALLRRGIVELLLTSDGEKHVLSGHTKGVLAAINLQKLHQDTFNQLHKVQRDKPLLIMEYWVGWFDRWGDKHHVKDAKEVEHAVSEFIKYEISFNVYMFHGGTNFGFMNGATYFGKHSGIVTSYDYDAVLTEAGDYTEKYLKLQKLFQSVSATPLPRVPKLPPKAVYPPVRPSLYLPLWDALSYLNEPVRSRQPVNMENLPINNGSGQSYGLVLYEKSICSGGRLRAHAHDVAQVFLDETMIGILNENNKDLHIPELRDCRYLRILVENQGRVNFSWQIQNEQKGITGSVSINNSSLEGFTIYSLEMKMSFFERLRSATWKPVPDSHQGPAFYCGTLKAGPSPKDTFLSLLNWNYGFVFINGRNLGRYWNIGPQKTLYLPGVWLHPEDNEVILFEKMMSGSDIKSTDKPTL

SEQ ID NO: 6386 - protein, 116 aa, Homo sapiens
MSGALDVLQMKEEDVLKFLAAGTHLGGTNLDFQMEQYIYKRKSDGIYIINLKRTWEKLLLAARAIVAIENPADVSVISSRNTGQRAVLKFAAATGATPIAGRFTPGTFTNQIQAAF

SEQ ID NO: 6387 - protein, 40 aa, Homo sapiens
MNHDFQALALESRGMGETIQCPSLLWYREDLDRVFMETVK

SEQ ID NO: 6388 - protein, 62 aa, Homo sapiens
MSKKISGGSVVEMQGDEMTRIIWELIKEKLIFPYVELDLHSYDLGIENRDATNDQVTKDAAE

SEQ ID NO: 6389 - protein, 142 aa, Homo sapiens
MASPGKDNYRMKSYKNKALNPQEMRRRREEEGIQLRKQKREEQLFKRRNVYLPRNDESMLESPIQDPDISSTVPIPEEEVVTTDMVQMIFSNNADQQLTATQKFRKLLSKEPNPPIDQVIQKPGVVQRFVKFLERNENCTLQ

SEQ ID NO: 6390 - protein, 574 aa, Homo sapiens
MARSSPYLRQLQGPLLPPRDLVEEDDDYLNDDVEEDEESVFIDAEELCSGGVKAGSLPGCLRVSICDENTQETCKVFGRFPITGAWWRVKVQVKPVVGSRSYQYQVQGFPSYFLQSDMSPPNQKHICALFLKECEVSSDDVNKFLTWVKEVSNYKNLNFENLRETLRTFHKETGRKDQKQPTQNGQEELFLDNEMSLPLENTIPFRNVMTALQFPKIMEFLPVLLPRHFKWIIGSGSKEMLKEIEEILGTHPWKLGFSKITYREWKLLRCEASWIAFCQCESLLQLMTDLEKNALIMYSRLKQICREDGHTYVEVNDLTLTLSNHMSFHAASESLKFLKDIGVVTYEKSCVFPYDLYHAERAIAFSICDLMKKPPWHLCVDVEKVLASIHTTKPENSSDDALNESKPDEVRLENPVDVVDTQDNGDHIWTNGENEINAEISEVQLDQDQVEVPLDRDQVAALEMICSNPVTVISGKGGCGKTTIVSRLFKHIEQLEEREVKKACEDFEQDQNASEEWITFTEQSQLEADKAIEVLLTAPTGKAAGLLRQKTGLHAYTLCQVTLDSYPVLNLVTC

SEQ ID NO: 6391 - protein, 108 aa, Homo sapiens
VAIGRREALNVFGNDYDTEDGTGVRDYIHVVDLAKGHIAALRKLKEQCGCRIPYKVVARREGDVAACYANPSLAQEELGWTAALGLDRMCEDLWRWQKQNPSGFGTQA

SEQ ID NO: 6392 - protein, 76 aa, Homo sapiens
MAGGKAGKDSGKAKAKAVSRSQRAGLQVLELAGNASKDLKVKRITPRHLQLAIRGDEELDSLIKATIAGGEKRRCS

SEQ ID NO: 6393 - protein, 134 aa, Homo sapiens
MAAFRDIEEVSQGLLSLLGANRAEAQQRRLLGRHEQVVERLLETQDGAEKQLRGLQTRGMFLASGGKWNHLLSALLGEGQTLGSLLLSTLQRSSPWRRKWPRAFSMRRSRCTREAWSCSSWKLGFRRLGRRTPV

SEQ ID NO: 6394 - protein, 436 aa, Homo sapiens
LDSAKKAACEFSETDVTNTEHHQPSNNDLNTTEKRAAERHPEKYQGSSVSNLHVEPCGTNTHASSLQHENSSLLLTKDRMNVEKAEFCNKSKQPGLARSQHNRWAGSKETCNDRRTPSTEKKVDLNADPLCERKEWNKQKLPCSENPRDTEDVPWITLNSSIQKVNEWFSRSDELLGSDDSHDGESESNAKVADVLDVLNEVDEYSGSSEKIDLLASDPHEALICKSERVHSKSVESNIEDKIFGKTYRKKASLPNLSHVTENLIIGAFVTEPQIIQERPLTNKLKRKRRPTSGLHPEDFIKKADLAVQKTPEMINQGTNQTEQNGQVMNITNSGHENKTKGDSIQNEKNPNPIESLEKESAFKTKAEPISSSISNMELELNIHNSKAPKKNRLRRKSSTRHIHALELVVSRNLSPPNCTELQIDSCSSSEEIKKK

SEQ ID NO: 6395 - protein, 164 aa, Homo sapiens
MIHFILLFSRQGKLRLQKWYITLPDKERKKITREIVQIILSRGHRTSSFVDWKELKLVYKRYASLYFCCAIENQDNELLTLEIVHRYVELLDKYFGNVCELDIIFNFEKAYFILDEFIIGGEIQETSKKIAVKAIEDSDMLQENRLSPRGRDCSEPRSCHCTLA

SEQ ID NO: 6396 - protein, 155 aa, Homo sapiens
MIATPLKHSRIYLPPEASSQRRNLPMDAIFFDSIPSGTLTPVKDLVKYQNSSLKLNDHKKNQFLKMTTFNNKNIFQSTMLTEATTSNSSLDISAIKPNKDGLKNKANYESPGKIFLRMKEKVLRDKQEQPSRNSSLLEPQKSGNNETFTPNRVEK

SEQ ID NO: 6397 - protein, 209 aa, Homo sapiens
MASSDLEQLCSHVNEKIGNIKKTLSLRNCGQEPTLKTVLNKIGDEIIVINELLNKLELEIQYQEQTNNSLKELCESLEEDYKDIEHLKENVPSHLPQVTVTQSWYMKSRLTYNQINDVIKEINKAVISKYKILHQPKKSMNSVTRNLYHRFIDEETKDTKGRYFIVEADIKEFTTLKADKKFHVLLNILRHCRRLSEVRGGGLTRYVIT

SEQ ID NO: 6398 - protein, 75 aa, Homo sapiens
MAAHGGSAASSALKGLIQQFTTITEKKFVPQFLKSRKYWWNQNHYLVLLKDDGLHVQFLMVSGIFRLKLFGKNKN

SEQ ID NO: 6399 - protein, 21 aa, Homo sapiens
MNSQLVTTEKRFLKDSLYNEG

SEQ ID NO: 6400 - protein, 1067 aa, Homo sapiens
MAEKGASRGTLRRLWSLPRRRRGTAGRSRPDEIMHQDIVPLCAADIQDQLKKRFAYLSGGRGQDGSPVITFPDYPAFSEIPDKEFQNVMTYLTSIPSLQDAGIGFILVIDRRRDKWTSVKASVLRIAASFPANLQLVLVLRPTGFFQRTLSDIAFKFNRDDFKMKVPVIMLSSVPDLHGYIDKSQLTEDLGGTLDYCHSRWLCQRTAIESFALMVKQTAQMLQSFGTELAETELPNDVQSTSSVLCAHTEKKDKAKEDLRLALKEGHSVLESLRELQAEGSEPSVNQDQLDNQATVQRLLAQLNETEAAFDEFWAKHQQKLEQCLQLRHFEQGFREVKAILDAASQKIATFTDIGNSLAHVEHLLRDLASFEEKSGVAVERARALSLDGEQLIGNKHYAVDSIRPKCQELRHLCDQFSAEIARRRGLLSKSLELHRRLETSMKWCDEGIYLLASQPVDKCQSQDGAEAALQEIEKFLETGAENKIQELNAIYKEYESILNQDLMEHVRKVFQKQASMEEVFHRRQASLKKLAARQTRPVQPVAPRPEALAKSPCPSPGIRRGSENSSSEGGALRRGPYRRAKSEMSESRQGRGSAGEEEESLAILRRHVMSELLDTERAYVEELLCVLEGYAAEMDNPLMAHLLSTGLHNKKDVLFGNMEEIYHFHNRIFLRELENYTDCPELVGRCFLERMEDFQIYEKYCQNKPRSESLWRQCSDCPFFQECQRKLDHKLSLDSYLLKPVQRITKYQLLLKEMLKYSRNCEGAEDLQEALSSILGILKAVNDSMHLIAITGYDGNLGDLGKLLMQGSFSVWTDHKRGHTKVKELARFKPMQRHLFLHEKAVLFCKKREENGEGYEKAPSYSYKQSLNMAAVGITENVKGDAKKFEIWYNAREEVYIVQAPTPEIKAAWVNEIRKVLTSQLQACREASQHRALEQSQSLPLPAPTSTSPSRGNSRNIKKLEERKTDPLSLEGYVSSAPLTKPPEKGKGWSKTSHSLEAPEDDGGWSSAEEQINSSDAEEDGGLGPKKLVPGKYTVVADHEKGGPDALRVRSGDVVELVQEGDEGLW

SEQ ID NO: 6401 - protein, 148 aa, Homo sapiens
MPKNKKRNTPHRGSSAGGGGSGAAAATAATAGGQHRNVQPFSDEDASIETMSHCSGYSDPSSFAEDGPEVLDEEGTQEDLEYKLKGLIDLTLDKSAKTRQAALEGIKNALASKMLYEFILERRMTLTDSIERCLKKGNALIFESQTYN

SEQ ID NO: 6402 - protein, 179 aa, Homo sapiens
KYFQKQCHECIEHIRKQNWFEAFEEPEDQLYYVKFLSLPEVRQAIHVGNQTFNDGTIVEKYLREDTVQSVKPWLTEIMNNYKVLIYNGQLDIIVAAALTERSLMGMDWKGSQEYKKAEKKVWKIFKSDSEVAGYIRQAGDFHQVIIRGGGHILPYDQPLRAFDMINRFIYGKGWDPYVG

SEQ ID NO: 6403 - protein, 225 aa, Homo sapiens
MAAGMYLEHYLDNLKAEIDKLATEYMSSARSLSSEEKLALLKQIQEAYGKCKEFGDDKVQLAMQTYEMVDKHIRRLDTDLARFEADLKEKQIESSDYDSSSSKGKKKGRTQKEKKAARARSKGKNSDEEAPKTAQKKLKLVRTSPEYGMPSVTFGSVHPSDVLDMPVDPNEPTYCLCHQVSYGEMIGCDNPDCSIEWFHFACVGLTTKPRGKWFCPRCSQERKKK

SEQ ID NO: 6404 - protein, 103 aa, Homo sapiens
LTADKANAQAAALYKMNLTKVADSSPFALELLISDDCFVLDNGLCGKIYIWKGRKANEKERQAALQVAEGFISRMQYAPNTQVEILPQGHESPIFKQFFKDWK

SEQ ID NO: 6405 - protein, 73 aa, Homo sapiens
MFVSDFRKEFYEVVQSQRVLLFVASDVDALCACKILQALGSGTFQKAWKLNRHFSPMFYFGNLQNSQNGLVPV

SEQ ID NO: 6406 - protein, 1073 aa, Homo sapiens
MHQPPESTAAAAAAADISARKMAHPAMFPRRGSGSGSASALNAAGTGVGSNATSSEDFPPPSLLQPPPPAASSTSGPQPPPPQSLNLLSQAQLQAQPLAPGGTQMKKKSGFQITSVTPAQISASISSNNSIAEDTESYDDLDESHTEDLSSSEILDVSLSRATDLGEPERSSSEETLNNFQEAETPGAVSPNQPHLPQPHLPHLPQQNVVINGNAHPHHLHHHHQIHHGHHLQHGHHHPSHVAVASASITGGPPSSPVSRKLSTTGSSDSITPVAPTSAVSSSGSPASVMTNMRAPSTTGGIGINSVTGTSTVNNVNITAVGSFNPNVTSSMLGNVNISTSNIPSAAGVSVGPGVTSGVNVNILSGMGNGTISSSAAVSSVPNAAAGMTGGSVSSQQQQPTVNTSRFRVVKLDSSSEPFKKGRWTCTEFYEKENAVPATEGVLINKVVETVKQNPIEVTSERESTSGSSVSSSVSTLSHYTESVGSGEMGAPTVVVQQQQQQQQQQQQQPALQGVTLQQMDFGSTGPQSIPAVSIPQSISQSQISQVQLQSQELSYQQKQGLQPVPLQATMSAATGIQPSPVNVVGVTSALGQQPSISSLAQPQLPYSQAAPPVQTPLPGAPPPQQLQYGQQQPMVSTQMAPGHVKSVTQNPASEYVQQQPILQTAMSSGQPSSAGVGAGTTVIPVAQPQGIQLPVQPTAVPAQPAGASVQPVGQAPAAVSAVPTGSQIANIGQQANIPTAVQQPSTQVPPSVIQQGAPPSSQVVPPAQTGIIHQGVQTSAPSLPQQLVIASQSSLLTVPPQPQGVEPVAQGIVSQQLPAVSSLPSASSISVTSQVSSTGPSGMPSAPTNLVPPQNIAQTPATQNGNLVQSVSQPPLIATNTNLPLAQQIPLSSTQFSAQSLAQAIGSQIEDARRAAEPSLVGLPQTISGDSGGMSAVSDGSSSSLAASASLFPLKVLPLTTPLVDGEDESSSGASVVAIDNKIEQAMDLVKSHLMYAVREEVEVLKEQIKELIEKNSQLEQENNLLKTLASPEQLAQFQAQLQTGSPPATTQPQGTTQPPAQPASQGSGPTA

SEQ ID NO: 6407 - protein, 155 aa, Homo sapiens
MFSEQAAQRAHTLLSPPSANNATFARVPVATYTNSSQPFRLGERSFSRQYAHIYATRLIQMRPFLENRAQQHWGSGVGVKKLCELQPEEKCCVVGTLFKAMPLQPSILREVSEEHNLLPQPPRSKYIHPDDELVLEDELQRIKLKGTIDVSKLVT

SEQ ID NO: 6408 - protein, 68 aa, Homo sapiens
FSSASGASARINSSSVKQEATFCSQRDGDASLNKALSSSADDASLVNASISSSVVKSYFSSEIYYIYH

SEQ ID NO: 6409 - protein, 298 aa, Homo sapiens
MSRESDVEAQQSHGSSACSQPHGSVTQSQGSSSQSQGISSSSTSTMPNSSQSSHSSSGTLSSLETVSTQELYSIPEDQEPEDQEPEEPTPAPWARLWALQDGFANLECVNDNYWFGRDKSCEYCFDEPLLKRTDKYRTYSKKHFRIFREENLSCPYRIWFNGACGEVKLAFERKTCKKVAIKIISKRKFAIGSAREADPALNVETEIEILKKLNHPCIIKIKNFFDAEDYYIVLELMEGGELFDKVVGNKRLKEATCKLYFYQMLLAVQYLHENGIIHRDLKPENVLLSSQEEDCLIK

SEQ ID NO: 6410 - protein, 147 aa, Homo sapiens
MSFDVENGPSPGRSPLDPQASSSAGLVLHATFPGHSQRRESFLYRSDSDYDLSPKAMSRNSSLPSEQHGDDLIVTPFAQVLASLRSVRNNFTILTNLHGTSNKRSPAASQPPVSRVNPQEESYQKLAMETLEELDWCLDQLETIQTY

SEQ ID NO: 6411 - protein, 84 aa, Homo sapiens
MAKERCLKKSFQDSLEDIKKRMKEKRNKNLAEIGKRRSFIAAPCQIITNTSTLLKNYQDNNKITRKYVPLEWTPIVMTAPEIYL

SEQ ID NO: 6412 - protein, 153 aa, Homo sapiens
MALTVDVAGPAPWGFRITGGRDFHTPIMVTKVAERGKAKDADLRPGDIIVAINGESAEGMLHAEAQSKIRQSPSPLRLQLDRSQATSPGQTNGDSSLEVLATRFQGSVRTYTESQSSLRSSYSSPTSLSPRAGSPFSPPPSSSSLTGEAAISR

SEQ ID NO: 6413 - protein, 153 aa, Homo sapiens
MNLAEICDNAKKGREYALLGNYDSSMVYYQGVMQQIQRHCQSVRDPAIKGKWQQVRQELLEEYEQVKSIVSTLESFKIDKPPDFPVSCQDEPFRDPAVWPPPVPAEHRAPPQIRRPNREVRPLRKEMAGVGARGPVGRAHPISKSEKPSTSRD

SEQ ID NO: 6414 - protein, 297 aa, Homo sapiens
PANLLSSHRSLVQRVETISLGEHPCDRGEQVTLFLFNDCLEIARKRHKVIGTFRSPHGQTRPPASLKHIHLMPLSQIKKVLDIRETEDCHNAFALLVRPPTEQANVLLSFQMTSDELPKENWLKMLCRHVANTICKADAENLIYTADPESFEVNTKDMDSTLSRASRAIKKTSKKVTRAFSFSKTPKRALRRALMTSHGSVEGRSPSSNDKHVMSRLSSTSSLAITHSVSTSNVIGFTKHVYVQRLNSTGGRSQYSWFQSVRHSAFRASFSEILEGNTDFSNFKKVLSKSSLTFVKN

SEQ ID NO: 6415 - protein, 32 aa, Homo sapiens
MCGIWALFGSDDCLSVQCLSAMKIAHRGPDAF

SEQ ID NO: 6416 - protein, 358 aa, Homo sapiens
MERLQKAKMDNQVLGYKDLAAIPKDKAILDIERPDLMIYEPHFTYSLLEHVELPRSRERSLSPKSTSPPPSPEVWADSRSPGIISQASAPRTTGTPRTSLPHFHHPETSRPDSNIYKKPPIYKQRESVGGSPQTKHLIEDLIIESSKFPAAQPPDPNQPAKIETDYWPCPPSLAVVETEWRKRKASRRGAEEEEEEEDDDSGEEMKALRERQREELSKVTSNLGKMILKEEMEKSLPIRRKTRSLPDRTPFHTSLHQGTSKSSSLPAYGRTTLSRLQSTEFSPSGSETGSPGLQIYPYEMLVVTNKGRTKLPPGVDRMRLERHLSAEDFSRVFAMSPEEFGKLALWKRNELKKKASLF

SEQ ID NO: 6417 - protein, 90 aa, Homo sapiens
MAEPDYIEDDNPELIRPQKLINPVKTSRNHQDLHRELLMNQKRGLAPQNKPELQKVMEKRKRDQVIKQKEEEAQKKKSDLEIELLKRQQK

SEQ ID NO: 6418 - protein, 297 aa, Homo sapiens
MEDYTKIEKIGEGTYGVVYKGRHKTTGQVVAMKKIRLESEEEGVPSTAIREISLLKELRHPNIVSLQDVLMQDSRLYLIFEFLSMDLKKYLDSIPPGQYMDSSLVKSYLYQILQGIVFCHSRRVLHRDLKPQNLLIDDKGTIKLADFGLARAFGIPIRVYTHEAITLWYRSPEVLLGSARYSTPVDIWSIGTIFAELATKKPLFHGDSEIDQLFRIFRALGTPNNEVWPEVESLQDYKNTFPKWKPGSLASHVKNLDENGLDLLSKMLIYDPAKRISGKMALNHPYFNDLDNQIKKM

SEQ ID NO: 6419 - protein, 390 aa, Homo sapiens
TCFMSTHRIVTEGRVVTEDQLLMLEAVVMHLGIRSARCVLGMEGQQVILHLPLSQKGPFWTWEPSAPRTLLQVLQDPALKDLVLTCPTLPWHSLILRPQYEIQAIMHMRRTIVKIPSTLEVDVEDVTASSRHVHFIKPLLLSERLSDQAGEDEEEECKEEAESPERVLLPFHFPGSFVEEMSDSRRYSLADLTAQFSLPCEVKVVAKDTSHPTDPLTSFLGLRLEEKITEPFLVVSLDSEPGMCFEIPPRWLDLTVVKAKGQPDLPEGSLPIATVEELTDTFYYRLRKLPACEIQAPPPRPPKNQGLSKQRRHSSEGGVKSSQVLGLQQHARLPKPKAKTLPEFIKDGSSTYSKIPAHRKGHRPAKPQRQDLDDDEHDYEEILEQFQKTI

SEQ ID NO: 6420 - protein, 55 aa, Homo sapiens
MSGRLWSKAIFAGYKRGLRNQREHTALLKIEGVYARDETEFYLGKRCAYVYKAKK

SEQ ID NO: 6421 - protein, 619 aa, Homo sapiens
SRMVQNEIPYFIWTTRRDVLDCRFLSKDQMINHYARAGSFTTKVGLCLNLRNLPWFDEVDANSFFPRCYCLGAEDDKKAFIEDFWLTAARNVLKLVVKSEWKSYPIQAVEEEASGDKQPKKQEKNPVLVSPEFVDEALCACEEYLSNLAHMDIDKDLEAPLYLTPEGWSLFLQRYYQVVHEGAELRHLDTQVQRCEDILQQLQAVVPQIDMEGDRNIWIVKPGAKSRGRGIMCMDHLEEMLKLVNGNPVVMKDGKWVVQKYIERPLLIFGTKFDLRQWFLVTDWNPLTVWFYRDSYIRFSTQPFSLKNLDNSVHLCNNSIQKHLENSCHRHPLLPPDNMWSSQRFQAHLQEMGAPNAWSTIIVPGMKDAVIHALQTSQDTVQCRKASFELYGADFVFGEDFQPWLIEINASPTMAPSTAVTARLCAGVQADTLRVVIDRMLDRNCDTGAFELIYKQPAVEVPQYVGIRLLVEGFTIKKPMAMCHRRMGVRPAVPLLTQRGSGEGKDSGTPTHSRGIRKFKEVAQGCTAQKGHSWDADPARHHFPSLHTKAQLPSPHVLRHQGQVLRRQHSKLVGTKALSTTGKALRTLPTAKVFISLPPNLDFKVAPSILKPRKVGLDL

SEQ ID NO: 6422 - protein, 575 aa, Homo sapiens
MPRRRVPGANCKPTGKMSEETVPEAASPPPPQGQPYFDRFSEDDPEYMRLRNRAADLRQDFNLMEQKKRVTMILQSPSFREELEGLIQEQMKKGNNSSNIWALRQIADFMASTSHAVFPTSSMNVSMMTPINDLHTADSLNLAKGERLMRCKISSVYRLLDLYGWAQLSDTYVTLRVSKEQDHFLISPKGVSCSEVTASSLIKVNILGEVVEKGSSCFPVDTTGFCLHSAIYAARPDVRCIIHLHTPATAAVSAMKWGLLPVSHNALLVGDMAYYDFNGEMEQEADRINLQKCLGPTCKILVLRNHGVVALGDTVEEAFYKIFHLQAACEIQVSALSSAGGVENLILLEQEKHRPHEVGSVQWAGSTFGPMQKSRLGEHEFEALMRMLDNLGYRTGYTYRHPFVQEKTKHKSEVEIPATVTAFVFEEDGAPVPALRQHAQKQQKEKTRWLNTPNTYLRVNVADEVQRSMGSPRPKTTWMKADEVEKSSSGMPIRIENPNQFVPLYTDPQEVLEMRNKIREQNRQDVKSAGPQSQLLASVIAEKSRSPVEQRLPLTGGETCLPSGSSVPGAGLQDP

SEQ ID NO: 6423 - protein, 40 aa, Homo sapiens
FPAVLASEAAMSYPADDYESEEIQSRTLLMNVSMNSKPIR

SEQ ID NO: 6424 - protein, 176 aa, Homo sapiens
MRWQLSEQLRCLELQGELRRELLQELAEFMRRRAEVELEYSRGLEKLAERFSSRGGRLGSSREHQSFRKEPSLLSPLHCWAVLLQHTRQQSRESAALSEVLAGPLAQRLSHIAEDVGRLVKKSRDLEQQLQDELLEVVSELQTAKKTYQAYHMESVNAEAKLREAERQEEKRAGRS

SEQ ID NO: 6425 - protein, 549 aa, Homo sapiens
NVFIKNLDKSIDNKALYDTFSAFGNILSCKVVCDENGSKGYAFVHFETQEAADKAIEKMNGMLLNDRKVFVGRFKSRKEREAELGAKAKEFTNVYIKNFGEEVDDESLKELFSQFGKTLSVKVMRDPNGKSKGFGFVSYEKHEDANKAVEEMNGKEISGKIIFVGRAQKKVERQAELKRKFEQLKQERISRYQGVNLYIKNLDDTIDDEKLRKEFSPFGSITSAKVMLEDGRSKGFGFVCFSSPEEATKAVTEMNGRIVGSKPLYVALAQRKEERKAHLTNQYMQRVAGMRALPANAILNQFQPAAGGYFVPAVPQAQGRPPYYTPNQLAQMRPNPRWQQGGRPQGFQGMPSAIRQSGPRPTLRHLAPTGNAPASRGLPTTTQRVGSECPDRLAMDFGGAGAAQQGLTDSCQSGGVPTAVQNLAPRAAVAAAAPRAVAPYKYASSVRSPHPAIQPLQPLTASMLAAAPPQEQKQMLGERLFPLIQTMHSNLAGKITGMLLEIDNSELLHMLESPESLRSKVDEAVAVLQAHHAKKEAAQKVGAVAAATS

SEQ ID NO: 6426 - protein, 684 aa, Homo sapiens
MQDDLLMDKSKTQPQPQQQQRQQQQPQPESSVSEAPSTPLSSETPKPEENSAVPALSPAAAPPAPNGPDKMQMESPLLPGLSFHQPPQQPPPPQEPAAPGASLSPSFGSTWSTGTTNAVEDSFFQGITPVNGTMLFQNFPHHVNPVFGGTFSPQIGLAQTQHHQQPPPPAPAPQPAQPAQPPQAQPPQQRRSPASPSQAPYAQRSAAAAYGHQPIMTSKPSSSSAVAAAAAAAAASSASSSWNTHQSVNAAWSAPSNPWGGLQAGRDPRRAVGVGVGVGVGVPSPLNPISPLKKPFSSNVIAPPKFPRAAPLTSKSWMEDNAFRTDNGNNLLPFQDRSRPYDTFNLHSLENSLMDMIRTDHEPLKGRMGINFHHPGTDNIMALNSRSSLFPFEDAFLDDSHGDQALSSGLSSPTRCQNGERVERYSRKVFVGGLPPDIDEDEITASFRRFGPLVVDWPHKAESKSYFPPKGYAFLLFQEESSVQALIDACLEEDGKLYLCVSSPTIKDKPVQIRPWNLSDSDFVMDGSQPLDPRKTIFVGGVPRPLRAVELAMIMDRLYGGVCYAGIDTDPELKYPKGAGRVAFSNQQSYIAAISARFVQLQHNDIDKRVEVKPYVLDDQMCDECQGTRCGGKFAPFFCANVTCLQYYCEYCWASIHSRAGREFHKPLVKEGGDRPRHVPFRWS

SEQ ID NO: 6427 - protein, 312 aa, Homo sapiens
MPALSTGSGSDTGLYELLAALPAQLQPHVDSQEDLTFLWDMFGEKSLHSLVKHFQERRLALRRPEILVQPLKVSNRKSSGFRKSFRLSRKDKKTNKSMYECKKSDQYDTADVPTYEEVTPYRRQTNEKYRLVVLVGPVGVGLNELKRKLLISDTQHYGVTVPHTTRARRSQESDGVEYIFISKHLFETDVQNNKFIEYGEYKNNYYGTSIDSVRSVLAKNKVCLLDVQPHTVKHLRTLEFKPYVIFIKPPSIERLRETRKNAKIISSRDDQGAAKPFTEEDFQEMIKSAQIMESQYGHLFDKIIINDDLTVA

SEQ ID NO: 6428 - protein, 495 aa, Homo sapiens
MALSVPGYSPGFRKPPEVVRLRRKRARSRGAAASPPRELTEPAARRAALVAGLPLRPFPAAGGRGGGSGGGPAAARRNPFARLDNRPRVAAEPPDGPAREQPEAPVPFLDSNQENDLLWEEKFPERTTVTELPQTSHVSFSEPDIPSSKSTELPVDWSIKTRLLFTSSQPFTWADHLKAQEEAQGLVQHCRATEVTLPKSIQDPKLSSELRCTFQQSLIYWLHPALSWLPLFPRIGADRKMAGKTSPWSNDATLQHVLMSDWSVSFTSLYNLLKTKLCPYFYVCTYQFTVLFRAAGLAGSDLITALISPTTRGLREAMRNEGIEFSLPLIKESGHKKETASGTSLGYGEEQAISDEDEEESFSWLEEMGVQDKIKKPDILSIKLRKEKHEVQMDHRPESVVLVKGINTFTLLNFLINSKSLVATSGPQAGLPPTLLSPVAFRGATMQMLKEVVHKELTNCGLHPNTLEQLSQIPLLGKSSLRNVVLRDYIYNWRS

SEQ ID NO: 6429 - protein, 202 aa, Homo sapiens
MVGRRALIVLAHSERTSFNYAMKEAAAAALKKKGWEVVESDLYAMNFNPIISRKDITGKLKDPANFQYPAESVLAYKEGHLSPDIVAEQKKLEAADLVIFQSGILHFCGFQVLEPQLTYSIGHTPADARIQILEGWKKRLENIWDETPLYFAPSSLFDLNFQAGFLMKKEVQDEEKNKKFGLSVGHHLGKSIPTDNQIKARK

SEQ ID NO: 6430 - protein, 132 aa, Homo sapiens
MSQPLMETCHSVGAAYLESLPLQDASPAGGPSSPRDLPEPRVSTEHTNNKIEKIYIMKADTVIVGTVKAELPEGRGLAGPAEPELEEELEADHTPHYPEQETEPPLGSCSDVMLSVEEEGKEDPLPTAASGK

SEQ ID NO: 6431 - protein, 191 aa, Homo sapiens
EEKCGGIVGIQTKTVQVSATEDGNVTKDSNVVLEIPAATTIAYGVIELYVKLDGQFEFCLLRGKQGGFENKKRIDSVYLDPLVFREFAFIDMPDAAHGISSQDGPLSVLKQATLLLERNFHPFAELPEPQQTALSDIFQAVLFDDELLMVLEPVQKDILGRSSSLTLSCTNGESHTSCQPSSHPDSVSSLS

SEQ ID NO: 6432 - protein, 1064 aa, Homo sapiens
MAAVKKEGGALSEAMSLEGDEWELSKENVQPLRQGRIMSTLQGALAQESACNNTLQQQKRAFEYEIRFYTGNDPLDVWDRWVFLFHKDNRNINRYISWTEQNYPQGGKESNMSTLLERAVEALQGEKRYYSDPRFLNLWLKLGRLCNEPLDMYSYLHNQGIGVSLAQFYISWAEEYEARENFRKADAIFQEGIQQKAEPLERLQSQHRQFQARVSRQTLLALEKEEEEEVFESSVPQRSTLAELKSKGKKTARAPIIRVGGALKAPSQNRGLQNPFPQQMQNNSRITVFDENADEASTAELSKPTVQPWIAPPMPRAKENELQAGPWNTGRSLEHRPRGNTASLIAVPAVLPSFTPYVEETARQPVMTPCKIEPSINHILSTRKPGKEEGDPLQRVQSHQQASEEKKEKMMYCKEKIYAGVGEFSFEEIRAEVFRKKLKEQREAELLTSAEKRAEMQKQIEEMEKKLKEIQTTQQERTGDQQEETMPTKETTKLQIASESQKIPGMTLSSSVCQVNCCARETSLAENIWQEQPHSKGPSVPFSIFDEFLLSEKKNKSPPADPPRVLAQRRPLAVLKTSESITSNEDVSPDVCDEFTGIEPLSEDAIITGFRNVTICPNPEDTCDFARAARFVSTPFHEIMSLKDLPSDPERLLPEEDLDVKTSEDQQTACGTIYSQTLSIKKLSPIIEDSREATHSSGFSGSSASVASTSSIKCLQIPEKLELTNETSENPTQSPWCSQYRRQLLKSLPELSASAELCIEDRPMPKLEIEKEIELGNEDYCIKREYLICEDYKLFWVAPRNSAELTVIKVSSQPVPWDFYINLKLKERLNEDFDHFCSCYQYQDGCIVWHQYINCFTLQDLLQHSEYITHEITVLIIYNLLTIVEMLHKAEIVHGDLSPRCLILRNRIHDPYDCNKNNQALKIVDFSYSVDLRVQLDVFTLSGFRTVQILEGQKILANCSSPYQVDLFGIADLAHLLLFKEHLQVFWDGSFWKLSQNISELKDGELWNKFFVRILNANDEATVSVLGELAAEMNGVFDTTFQSHLNKALWKVGKLTSPGALLFQ

SEQ ID NO: 6433 - protein, 68 aa, Homo sapiens
MECDLMETDILESLEDLGYKGPLLEDGALSQAVSAGASSPEFTKLCAWLVSELRVLCKLEENVQATNS

SEQ ID NO: 6434 - protein, 330 aa, Homo sapiens
MAPEENAGTELLLQSFERRFLAARTLRSFPWQSLEAKLRDSSDSELLRDILHKTVKHPVCVKHPPSVKYARCFLSELIKKHEAVHTEPLDELYEALAETLMAKESTQGHRSYLLPSGGSVTLSESTAIISYGTTGLVTWDAALYLAEWAIENPAVFTNRTVLELGSGAGLTGLAICKMCRPRAYIFSDCHSRVLEQLRGNVLLNGLSLEADITAKLDSPRVTVAQLDWDVATVHQLSAFQPDVVIAADVLYCPEAIMSLVGVLRRLAACREHQRAPEVYVAFTVRNPETCQLFTTELGRAGIRWEVEPRHEQKLFPYEEHLEMAMLNLTL

SEQ ID NO: 6435 - protein, 243 aa, Homo sapiens
MSAEVIHQVEEALDTDEKEMLLFLCRDVAIDVVPPNVRDLLDILRERGKLSVGDLAELLYRVRRFDLLKRILKMDRKAVETHLLRNPHLVSDYRVLMAEIGEDLDKSDVSSLIFLMKDYMGRGKISKEKSFLDLVVELEKLNLVAPDQLDLLEKCLKNIHRIDLKTKIQKYKQSVQGAGTSYRNVLQAAIQKSLKDPSNNFRAGVQWRDLGSPQPPPPGFKRFSHLSLPSSWDYRNVPPRPAP

SEQ ID NO: 6436 - protein, 1216 aa, Homo sapiens
MPRRAGSGQLPLPRGWEEARDYDGKVFYIDHNTRRTSWIDPRDRLTKPLSFADCVGDELPWGWEAGFDPQIGVYYIDHINKTTQIEDPRKQWRGEQEKMLKDYLSVAQDALRTQKELYHVKEQRLALALDEYVRLNDAYKEKSSSHTSLFSGSSSSTKYDPDILKAEISTTRLRVKKLKRELSQMKQELLYKEQGFETLQQIDKKMSGGQSGYELSEAKAILTELKSIRKAISSGEKEKQDLMQSLAKLQERFHLDQNIGRSEPDLRCSPVNSHLCLSRQTLDAGSQTSISGDIGVRSRSNLAEKVRLSLQYEEAKRSMANLKIELSKLDSEAWPGALDIEKEKLMLINEKEELLKELQFVTPQKRTQDELERLEAERQRLEEELLSVRGTPSRALAERLRLEERRKELLQKLEETTKLTTYLHSQLKSLSASTLSMSSGSSLGSLASSRGSLNTSSRGSLNSLSSTELYYSSQSDQIDVDYQYKLDFLLQEKSGYIPSGPITTIHENEVVKSPSQPGQSGLCGVAAAATGHTPPLAEAPKSVASLSSRSSLSSLSPPGSPLVLEGTFPMSSSHDASLHQFTADFEDCELSSHFADISLIENQILLDSDSGGASQSLSEDKDLNECAREPLYEGTADVEKSLPKRRVIHLLGEKTTCVSAAVSDESVAGDSGVYEAFVKQPSEMEDVTYSEEDVAIVETAQVQIGLRYNAKSSSFMVIIAQLRNLHAFLIPHTSKVYFRVAVLPSSTDVSCLFRTKVHPPTESILFNDVFRVAISQTALQQKTLRVDLCSVSKHRREECLAGTQISLADLPFSSEVFTLWYNLLPSKQMPCKKNEENEDSVFQPNQPLVDSIDLDAVSALLARTSAELLAVEQELAQEEEEESGQEEPRGPDGDWLNTYFLCCWELKDDVFTRLTVKPLLTMLREASDEIVAEKEAEVKLPEDSSCTEDLSSCTSVPEMNEDGNRKESNCAKDLRSQPPTRIPTLVDKETNTDEAANDNMAVRPKERSSLSSRQHPFVRSSVIVRSQTFSPGERNQYICRLNRSDSDSSTLAKKSLFVRNSTERRSLRVKRTVCQSVLRRTTQECPVRTSLDLELDLQASLTRQSRLNDELQALRDLRQKLEELKAQGETDLPPGVLEDERFQRLLKQAEKQAEQSKEEQKQGLNAEKLMRQVSKDVCRLREQSQKVPRQVQSFREKIAYFTRAKISIPSLPADDV

SEQ ID NO: 6437 - protein, 239 aa, Homo sapiens
MDILDQGALQRLFKKYSFMAVIHFAGLKAVGESVQKPLDYYRVNLTGTIQLLEIMKAHGVKNLVFSSSATVYGNPQYLPLDEAHPTGGCTNPYGKSKFFIEEMIRDLCQADKTWNAVLLRYFNPTGAHASGCIGEDPQGIPNNLMPYVSQVAIGRREALNVFGNDYDTEDGTGVRDYIHVVDLAKGHIAALRKLKEQCGCRIPYKVVARREGDVAACYANPSLAQEELGWTAALGLDRM

SEQ ID NO: 6438 - protein, 102 aa, Homo sapiens
MAYHSFLVEPISCHAWNKDRTQIAICPNNHEVHIYEKSGAKWTKVHELKEHNGQVTGIDWAPESNRIVTCGTDRNAYVWTLKGRTWKPTLVILRINRAARCV

SEQ ID NO: 6439 - protein, 114 aa, Homo sapiens
MDLILDVNIQIYPVDLGDKFRLVIASTLYEDGTLDDGEYNPTDDRPSRADQFEYVMYGKVYRIEGDETSTEAATRLSAYVSYGGLLMRLQGDANNLHGFEVDSRVYLLMKKLAF

SEQ ID NO: 6440 - protein, 231 aa, Homo sapiens
MAARVLIIGSGGREHTLAWKLAQSHHVKQVLVAPGNAGTACSEKISNTAISISDHTALAQFCKEKKIEFVVVGPEAPLAAGIVGNLRSAGVQCFGPTAEAAQLESSKRFAKEFMDRHGIPTAQWKAFTKPEEACSFILSADFPALVVKASGLAAGKGVIVAKSKEEACKAVQEIMQEKAFGAAGETIVIEELLDGEEVSCLCFTDGKTVAPMPPAQDHKRLLEGDGGPNTG

SEQ ID NO: 6441 - protein, 187 aa, Homo sapiens
MVSHSELRKLFYSADAVCFDVDSTVIREEGIDELAKICGVEDAVSEMTRRAMGGAVPFKAALTERLALIQPSREQVQRLIAEQPPHLTPGIRELVSRLQERNVQVFLISGGFRSIVEHVASKLNIPATNVFANRLKFYFNGEYAGFDETQPTAESGGKGKVIKLLKEKFHFKKIIMIGDGATDMEAC

SEQ ID NO: 6442 - protein, 1758 aa, Homo sapiens
RQVTVHRDPIYGFGFVAGSERPVVVRSVRPGGPSENKLLAGDQIVAINEEDVSEAPRERLIELIRSAKEFIVLTVLHTHQSPKSAFISAAKKAKLRSNPVKVRFSEQVAVGETDAKMMKKEALLLIPNVLKVFLENGQIKSFTFDGRTTVKDVMLTLQDRLSLRFIEHFALVLEYAGPEQNHKFLLLQDKQPLAYVVQRTHYHGMKCLFRISFFPKDPVELLRRDPAAFEYLYIQSRNDVIRERFGMDPKPEMLLGLAALHIYITVSATRPSQKISLKNVEKEWGLEPFLPPSLLQVIKEKNLRKSLSQQLKAHQTHPSCGTKGSAIQAKLQYLRILNELPTFTGVLFNTVGLDEKQSATTLLVGPRHGISHVIDLKTNLTTVLSEFSKISKIQLFRENQGVARVETSIMDAKPLVLLMEWPEATNFACLIAGYCRLLLDSRKMVFSRPASQPLPPPMIKADYMHSAHRPVTGGHLGKKESSYVGSVGTSPRKSSRCTPPPADSELVSFCYLHMREQRKEQESRTDVNENLIFFEETRPRTKSDPTSKSSGQGYEVVPDDFDAASLDHEPCASRARSYTLDNSLGAEALNFYCDSCKAKLQEQLGPRKGGKPGSSRDNIVDLMSLPPPGSEEEEEEEDETTSLLPAIAAPPPGFRDNSSDEDDPKRRAVQSQEQGRHLRGLLYDEIPVTLIDSVQTRTVRDHAQELDDALVSTLQALEALAASEDGPHPPPPQTAGLIVLATITPESSLDSGHETNSSELTDMSEMMSAMKQHQNTTYFLAQHLNKDSLLARKDLPFRIQSCAAQAVLTAPYSLGRPDPNPSLQPIATGQSPGPPGARRKLPQSEGQVQGERTYSLAVHPALSPQLSEQKNLSLLSPVPEDKGPGHTRAGLEMSLRAATSSLSEEQVSELRDNLPKEVRLSPKLILDPKSSVTPAIISAALQQVVHNKSLVTAGGALGNPPSRGERRLEASMGRPEVSMMSSSASKNLKFKISPSAPETSWNSQHQLGAEVSSSPRAPTGSRADSLHLSQQEDSLPVQNFPPKSYLLRTSRESVGKQATGEVAGKGGPVGGKPTLQKQGTISSQGEKAQLESTPKRSKLEETSLVPRATYPMALQSPSCQSRSHSPSCQPHGHSPSSQSRGQSPSCQPRGQSPLRSQAASRQVSTMPSRKLETTLNGAHSTSEGPAKPKSSRGPFRLRNLFSATFPTRQKKETDERQAQLQKVKQYELEFLEELLKPPSQGELPGTEYLQPPAPGRCSCQLRSSPVQQGPGMSREQRRSCDCKRICRGGRPQATQTPVPSLRGRERDRVLPSQRQPEAGPGVSLSSPINVQRIRSTSLESRECRSDPESGVSCLTTCASGGECLGAPNYRKLMRRYSISELDQGDRASLTSDVYPHPPLGMLPREAKEVEASLPIALGPKSRSLESPTLGDPSYVQVAPETKGPRQMAVFSLPEEVYRKPAELDEDSESSKCCSIRYCFYYRKCDMADDASDGKDELSYSIPMKILPGMKLDEQVVPVVSRTLQVLDAATCSSSSPEASRTQEIDLRVSTFEGSLAKINALRAHAYGLPDGFLAARLDTNELLTVLRQCVASPEARAPKPYVSQISEYKLELALKFKELRASCRRVANVDKSPTHMLAAITGSFQVLSSLIETFVRLVFIVRSEAQRQELLAKVEEVVRNYTFLLRAAEESTARNLNQQQQQQQQQQQQQQQQQQQQQQQQQQQVAAAAGAATEHPPGSPTSATVMSTFTHSLKTLIK

SEQ ID NO: 6443 - protein, 73 aa, Homo sapiens
KFSSASGASARINSSSVKQEATFCSQRDGDASLNKALSSSADDASLVNASISSSVCFHVSESYFSSEIYYIYH

SEQ ID NO: 6444 - protein, 121 aa, Homo sapiens
GREWSLAECACVVAASGAPRILVDLLKLNVAPLAVFQMLKSMCAGQRLASEPQDPAAVSLPTSSVPETRGRNKGSAALGGALALAERSSREGSSQRMPRQPSATRLPKGGGPGKSPTRGST

SEQ ID NO: 6445 - protein, 52 aa, Homo sapiens
MLADPRSFDSNAFTLLLRAAFQSLLDAQADEAVLGFFIKQKCIEQRESRSLS

SEQ ID NO: 6446 - protein, 145 aa, Homo sapiens
MGAYKYIQELWRKKQSDVMRFLLRVRCWQYRQLSALHRAPRPTRPDKARRLGYKAKQGYVIYRIRVRRGGRKRPVPKGATYGKPVHHGVNQLKFARSLQSVAEERAGRHCGALRVLNSYWMESHSHSGGSAVGQSRLTATSVSRV

SEQ ID NO: 6447 - protein, 54 aa, Homo sapiens
FTNHINVMVKFPSIVEEELQFDLSLVIEEQSEGIVKKGEDEKLDISQFCHRQAL

SEQ ID NO: 6448 - protein, 235 aa, Homo sapiens
MFFTCGPNEAMVVSGFCRSPPVMVAGGRVFVLPCIQQIQRISLNTLTLNVKSEKVYTRHGVPISVTGIAQVKIQGQNKEMLAAACQMFLGKTEAEIAHIALETLEGHQRAIMAHMTVEEIYKDRQKFSEQVFKVASSDLVNMGISVVSYTLKDIHDDQDYLHSLGKARTAQVQKDARIGEAEAKRDAGIREAKAKQEKVSAQYLSEIEMAKAQRDYELKKAAYDIEVNTRRAQAD

SEQ ID NO: 6449 - protein, 167 aa, Homo sapiens
MRELRIRKLCLNICVGESGDRLTRAAKVLEQLTGQTPVFSKARYTVRSFGIRRNEKIAVHCTVRGAKAEEILEKGLKVREYELRKNNFSDTGNFGFGIQEHIDLGIKYDPSIGIYGLDFYVVLGRPGFSIADKKRRTGCIGAKHRISKEEAMRWFQQKYDGIILPGK

SEQ ID NO: 6450 - protein, 466 aa, Homo sapiens
VSTGADGTVCFWQWDLESLKFSPRPLKFTEKPRPGVQMLCSSFSVGGMFLATGSTDHVIRMYFLGFEAPEKIAELESHTDKVDSIQFCNNGDRFLSGSRDGTARIWRFEQLEWRSILLDMATRISGDLSSEEERFMKPKVTMIAWNQNDSIVVTAVNDHVLKVWNSYTGQLLHNLMGHADEVFVLETHPFDSRIMLSAGHDGSIFIWDITKGTKMKHYFNMIEGQGHGAVFDCKFSQDGQHFACTDSHGHLLIFGFGCSKPYEKIPDQMFFHTDYRPLIRDSNNYVLDEQTQQAPHLMPPPFLVDVDGNPHPTKYQRLVPGRENSADEHLIPQLGYVATSDGEVIEQIISLQTNDNDERSPESSILDGMIRQLQQQQDQRMGADQDTIPRGLSNGEETPRRGFRRLSLDIQSPPNIGLRRSGQVEGVRQMHQNAPRSQIATERDLQAWKRRVVVPEEAGRLPIRER

SEQ ID NO: 6451 - protein, 180 aa, Homo sapiens
MHLEPQSMVWLPVLHRVAAAETAKHQAKCNICKECPIVGFRYRSLKHFNYDVCQSCFFSGRTAKGHKLHYPMVEYCIPTTSGEDVRDFTKVLKNKFRSKKYFAKHPRLGYLPVQTVLEGDNLETPITLISMWPEHYDPSQSPQLFHDDTHSRIEQYATRLAQMERTNGSFLTDSSSTTGS

SEQ ID NO: 6452 - protein, 149 aa, Homo sapiens
MPHSYPALSAEQKKELSDIALRIVAPGKGILAADESVGSMAKRLSQIGVENTEENRRLYRQVLFSADDRVKKCIGGVIFFHETLYQKDDNGVPFVRTIQDKGIVVGIKVDKGVVPLAGTDGETTTQGLDGLSERCAQYKKDGADFAKWR

SEQ ID NO: 6453 - protein, 125 aa, Homo sapiens
MAGTLDLDKGCTVEELLRGCIEAFDDSGKVRDPQLVRMFLMMHPWYIPSSQLAAKLLHIYQQSRKDNSNSLQVKTCHLVRYWISAFPAEFDLNPELAEQIKELKALLDQEGNRRHSSLIDIDSVL

SEQ ID NO: 6454 - protein, 456 aa, Homo sapiens
MEDYEQELCGVEDDFHNQFAAELEVLAELEAGASTPSPSGVPLFTAGRPPRTFEEALARGDAASSPAPAASVGSSQGGARKRQVDADLQPAGSLPHAPRIKRPRLQVVKRLNFRSEEMEEPPPPDSSPTDITPPPSPEDLAELWGHGVSEAAADVGLTRASPAARNPVLRRPPILEDYVHVTSTEGVRAYLVLRADPMAPGVQGSLLHVPWRGGGQLDLLGVSLASLKKQVDGERRERLLQEAQKLSDTLHSLRSGEEEAAQPLGAPEEEPTDGQDASSHCLWVDEFAPRHYTELLSDDFTNRCLLKWLKLWDLVVFGHERPSRKPRPSVEPARVSKEATAPGKWKSHEQVLEEMLEAGLDPSQRPKQKVALLCGPPGLGKTTLAHVIARHAGYSVVEMNASDDRSPEVFRTRIEAATQMESVLGAGGKPNCLVIDEIDGAPVVGSLMPGPPSTSS

SEQ ID NO: 6455 - protein, 232 aa, Homo sapiens
MAGTLDLDKGCTVEELLRGCIEAFDDSGKVRDPQLVRMFLMMHPWYIPSSQLAAKLLHIYQQSRKDNSNSLQVKTCHLVRYWISAFPAEFDLNPELAEQIKELKALLDQEGNRRHSSLIDIDSVPTYKWKRQVTQRNPVGQKKRKMSLLFDHLEPMELAEHLTYLEYRSFCKILFQDYHSFVTHGCTVDNPVLERFISLFNSVSQWVQLMILSKPTAPQRALVITHFVHVAE

SEQ ID NO: 6456 - protein, 152 aa, Homo sapiens
SEEDRSAGSVESPSVSSTHRVSDPKFHPLHSKIIIIKKGHAKDSQRYKVDYESQSTDTQNFSSESKRETEYGPCRREMEDTLNHLKFLNVLSPRGVHIPNCDKKGFYKKKQCRPSKGRKRGFCWCVDKYGQPLPGYTTKGKEDVHCYSMQSK

SEQ ID NO: 6457 - protein, 229 aa, Homo sapiens
MKQFLDFGSVNACEKTSFMFLRQELPVRLANIMKEISLLPDNLLRTPSVQLVQSCFTDTVIRIRNRHNDVIPTMAQGVIEYKESFGVDPVTSQNVQYFLDRFYMSRISIRMLLNQHSLLFGGKGKGSPSHRKHIGSINPNCNVLEVIKDGYENARRLCDLYYINSPELELEELNAKSPGQPIQVVYVPSHLYHMVFELFKNAMRATMEHHANRGVYPPIQVHVTLGNED

SEQ ID NO: 6458 - protein, 203 aa, Homo sapiens
GKITDTETMVGIRFENESRRGYQLEPDLSEEVSARLRLGSGSNGLLRRKVSIIETKEKNCSGKERDRRTDDLLELTEVINFYMNLLVERNKKQGYPALHVFSTFFYPKLKSGGYQAVKRWTKGVNLFEQEIILVPIHRKVHWSLVVIDLRKKCLKYLDSMGQKGHRICEILLQYLQDESKTKRNSDLNLLEWTHHSMKPHEIP

SEQ ID NO: 6459 - protein, 481 aa, Homo sapiens
MSLVEAISLWNEGVLAADKKDWKGALDAFSAVQDPHSRICFNIGCMYTILKNMTEAEKAFTRSINRDKHLAVAYFQRGMLYYQTEKYDLAIKDLKEALIQLRGNQLIDYKILGLQFKLFACEKQKLYEPVVIPVGKLFRPNERQVAQLAKKDYLGKATVVASVVDQDSFSGFAPLQPQAAEPPPRPKTPEIFRALEGEAHRVLFGFVPETKEELQVMPGNIVFVLKKGNDNWATVMFNGQKGLVPCNYLEPVELRIHPQQQPQEESSPQSDIPAPPSSKAPGRPQLSPGQKQKEEPKEVKLSVPMPYTLKVHYKYTVVMKTQPGLPYSQVRDMVSKKLELRLEHTKLSYRPRDSNELVPLSEDSMKDAWGQVKNYCLTLWCENTVGDQGFPDEPKESEKADANNQTTEPQLKKGSQVEALFSYEATQPEDLEFQEGDIILVLSKVNEEWLEGECKGKVGIFPKVFVEDCATTDLESTRREV

SEQ ID NO: 6460 - protein, 84 aa, Homo sapiens
MDRLLRLGGGMPGLGQGPPTDAPAVDTAEQVYISSLALLKMLKHGRAGVPMEVMGLMLGEFVDDYTVRVIDVFAMPQSGTGVSV

SEQ ID NO: 6461 - protein, 43 aa, Homo sapiens
MQAFLKGTSISTKPPLTKDRGVAASAGSSGENKKAKPVPWVEK

SEQ ID NO: 6462 - protein, 1006 aa, Homo sapiens
MDSSQQKTFRGHDAPVLSLSFDPKDIFLASASCDGSVRVWQISDQTCAISWPLLQKCNDVINAKSICRLAWQPKSGKLLAIPVEKSVKLYRRESWSHQFDLSDNFISQTLNIVTWSPCGQYLAAGSINGLIIVWNVETKDCMERVKHEKGYAICGLAWHPTCGRISYTDAEGNLGLLENVCDPSGKTSSSKVSSRVEKDYNDLFDGDDMSNAGDFLNDNAVEIPSFSKGIINDDEDDEDLMMASGRPRQRSHILEDDENSVDISMLKTGSSLLKEEEEDGQEGSIHNLPLVTSQRPFYDGPMPTPRQKPFQSGSTPLHLTHRFMVWNSIGIIRCYNDEQDNAIDVEFHDTSIHHATHLSNTLNYTIADLSHEAILLACESTDELASKLHCLHFSSWDSSKEWIIDLPQNEDIEAICLGQGWAAAATSALLLRLFTIGGVQKEVFSLAGPVVSMAGHGEQLFIVYHRGTGFDGDQCLGVQLLELGKKKKQILHGDPLPLTRKSYLAWIGFSAEGTPCYVDSEGIVRMLNRGLGNTWTPICNTREHCKGKSDHYWVVGIHENPQQLRCIPCKGSRFPPTLPRPAVAILSFKLPYCQIATEKGQMEEQFWRSVIFHNHLDYLAKNGYEYEESTKNQATKEQQELLMKMLALSCKLEREFRCVELADLMTQNAVNLAIKYASRSRKLILAQKLSELAVEKAAELTATQVEEEEEEEDFRKKLNAGYSNTATEWSQPRFRNQVEEDAEDSGEADDEEKPEIHKPGQNSFSKSTNSSDVSAKSGAVTFSSQGRVNPFKVSASSKEPAMSMNSARSTNILDNMGKSSKKSTALSRTTNNEKSPIIKPLIPKPKPKQASAASYFQKRNSQTNKTEEVKEENLKNVLSETPAICPPQNTENQRPKTGFQMWLEENRSNILSDNPDFSDEADIIKEGMIRFRVLSTEERKVWANKAKGETASEGTEAKKRKRVVDESDETENQEEKAKENLNLSKKQKPLDFSTNQKLSAFAFKQE

SEQ ID NO: 6463 - protein, 127 aa, Homo sapiens
MAAIRKKLVIVGDGACGKTCLLIVFSKDQFPEVYVPTVFENYIADIEVDGKQVELALWDTAGQEDYDRLRPLSYPDTDVILMCFSIDSPDSLENIPEKWTPEVKHFCPNVPIILVGNKKDLRQDEHT

SEQ ID NO: 6464 - protein, 83 aa, Homo sapiens
AKYLTKKTQAASVEAVKMLDEILLQLSQPLHPCMFPLATAYSTLQLVTNPYQATIDGVRFLGTSGQNVSDIFRYSSMEDHLEI

SEQ ID NO: 6465 - protein, 96 aa, Homo sapiens
MDDDIAALVVDNGSGMCKAGFAGDDAPRAVFPSIVGRPRHQGVMVGMGQKDSYVGDEAQSKRGILTLKYPIEHGIVTNWDDMEKIWHHTFYNELRV

SEQ ID NO: 6466 - protein, 95 aa, Homo sapiens
MAASAGAGAVIAAPDSRRWLWSVLAAALGLLTAGVSALEVYTPKEIFVANGTQGKLTCKFKSTSTTGGLTSVSWSFQPEGADTTVSRICLCFQFG

SEQ ID NO: 6467 - protein, 42 aa, Homo sapiens
MIHTNLKKKFSCCVLVFLLFAVICVWKEKKKGSYYDSFKLQT

SEQ ID NO: 6468 - protein, 536 aa, Homo sapiens
SVPGYSPGFRKPPEVVRLRRKRARSRGAAASPPRELTEPAARRAALVAGLPLRPFPAAGGRGGGSGGGPAAARRNPFARLDNRPRVAAEPPDGPAREQPEAPVPTSHVSFSEPDIPSSKSTELPVDWSIKTRLLFTSSQPFTWADHLKAQEEAQGLVQHCRATEVTLPKSIQDPKLSSELRCTFQQSLIYWLHPALSWLPLFPRIGADRKMAGKTSPWSNDATLQHVLMSDWSVSFTSLYNLLKTKLCPYFYVCTYQFTVLFRAAGLAGSDLITALISPTTRGLREAMRNEGIEFSLPLIKESGHKKETASGTSLGYGEEQAISDEDEEESFSWLEEMGVQDKIKKPDILSIKLRKEKHEVQMDHRPESVVLVKGINTFTLLNFLINSKSLVATSGPQAGLPPTLLSPVAFRGATMQMLKARSVNVKTQALSGYRDQFSLEITGPIMPHSLHSLTMLLKSSQSGSFSAVLYPHEPTAVFNICLQMDKVLDMEVVHKELTNCGLHPNTLEQLSQIPLLGKSSLRNVVLRDYIYNWRS

SEQ ID NO: 6469 - protein, 251 aa, Homo sapiens
MPSKGSVTLSEIRLPLKADFVCSTVQKPDAANYYYLIILKAGAENMVATPLASTSNSLNGDALTFTTTFTLQDVSNDFEINIEVYSLVQKKDPSGLDKKKKTSKSKAITPKRLLTSITTKSNIHSSVMASPGGLSAVRTSNFALVGSYTLSLSSVGNTKFVLDKINYDVRERELLGYLFQEKVPFLSSLEGHIYLKIKCQVNSSVEERGFLTIFEDVSGFGAWHRRWCVLSGNCISYWTYPDDEKRKNPIG

SEQ ID NO: 6470 - protein, 587 aa, Homo sapiens
MSAGDAVCTGWLVKSPPERKLQRYAWRKRWFVLRRGRMSGNPDVLEYYRNKHSSKPIRVIDLSECAVWKHVGPSFVRKEFQNNFVFIVKTTSRTFYLVAKTEQEMQVWVHSISQVCNLGHLEDGAADSMESLSYTPSSLQPSSASSLLTAHAASSSLPRDDPNTNAVATEETRSESELLFLPDYLVLSNCETGRLHHTSLPTRCDSWSNSDRSLEQASFDDVFVDCLQPLPSSHLVHPSCHGSGAQEVPSSRPQAALIWSREINGPPRDHLSSSPLLESSLSSTIQVDKNQGSLPCGAKELDIMSNTPPPRPPKPSHLSERRQEEWSTHSGSKKPECTLVPRRISLSGLDNMRTWKADVEGQSLRHRDKRLSLNLPCRFSPMYPTASASIEDSYVPMSPQAGASGLGPHCSPDDYIPMNSGSISSPLPELPANLEPPPVNRDLKPQRKSRPPPLDLRNLSIIREHASLTRTRTVPCSRTSFLSPERNGINSARFFANPVSREDEESYIEMEEHRTASSLSSGALTWTKKFSLDYLALDFNSASPAPMQQKLLLSEEQRVDYVQVDEQKTQALQSTKQEWTDERQSKV

SEQ ID NO: 6471 - protein, 77 aa, Homo sapiens
MPVARSWVCRKTYVTPRRPFEKSRLDQELKLIGEYGLRNKREVWRVKFTLAKIRKAARELLTLDEKDPRRLFEGGSL

SEQ ID NO: 6472 - protein, 148 aa, Homo sapiens
MPKRKAAGQGDMRQEPKRRSARLSAMLVPVTPEVKPKRTSSSRKMKTKSDMMEENIDTSAQAVAETKQEAVVEEDYNENAKNGEAKITEAPASEKEIVEVKEENIEDATEKGGEKKEAVAAEVKNEEEDQKEDEEDQNEEKGEAGKED

SEQ ID NO: 6473 - protein, 57 aa, Homo sapiens
NLPICMAKTHLSLSHQPDKKGVPRDFILPISDVRASIGAGFIYPLVGTGGREAPLWL

SEQ ID NO: 6474 - protein, 194 aa, Homo sapiens
MPRREVCWEAAHFRQEEQSLPRPRVRALVRLACRMAGQPGHMPHGGSSNNLCHTLGPVHPPDPQRHPNTLSFRCSLADFQIEKKIGRGQFSEVYKATCLLDRKTVALKKVQIFEMMDAKARQDCVKEIGLLKQLNHPNIIKYLDSFIEDNELNIVLELADAGDLSQMIKYFKKQKRLIPERTVWKYFVQLCSAV

SEQ ID NO: 6475 - protein, 70 aa, Homo sapiens
MVRPVRHKKPVNYSQFDHSDSDDDFVSATVPLNKKSRTAPKELKQDKPKPNLNNLRKEEIPVQEKTPKKR

SEQ ID NO: 6476 - protein, 29 aa, Homo sapiens
MGFGDLKSPAGLQVLNDYLADKSYIEGCV

SEQ ID NO: 6477 - protein, 48 aa, Homo sapiens
MASVLSYESLVHAVAGAVGSVTAMTVFFPLDTARLRLQAWHHIEGGFQ

SEQ ID NO: 6478 - protein, 672 aa, Homo sapiens
MEALEVDDISPALEVTEEFFSTLDSNLEKAVQQAEVYGIQEVPELVGHEVLSNITDNGAMRNVTSLGKGGMIWDHCKSRLLETKAQNVFPAKEQFMVQRGTTPDNLSWMEQKEASTFNFFNICQRRRDRPRSVNDLLDETSTFKPGHARSRSDITQVDWRVVLKTTPLQQQQQQQPLLQGPHVTRPSFLLPSPNKIEDAQGNTEHKQTFPNILKKGYLEIRKDHDSYWQSCYAELSPYNLYFYSLDSSGNQNLYATYQLSHFQSISVLGNLEARMVDTVLYDNTQLQLKAESPWEALDWGQKLWEVVHAAVPGYMGRQNELTISPGLGHHDDYTQNHSFQKKTSGLLPPSPVLDSSKQYQNILKSGTLYRLTVQNNWKAFTFVLSRAYLMAFQPGKLDEDPLLSYNVDVCLAVQMDNLDGCDSCFQVIFPQDVLRLRAETRQRAQEWMEALKIAANVARSSEQNLQVTLRNKPKDQMGGHELRKNKRQSVTTSFLSILTTLSLERGLTAQSFKCAGCQRSIGLSNGKAKVCNYSGWYYCSSCHVDDSFLIPARIVHNWDTSKYKVSKQAKEFLEYVYEEPLIDIQQENAMLYHHAEPLAAVLRLRQRLKSLRAYLFSCRAAVAEDLRRRNDQQHALVMLNVFGEFSPENTSFNRSTCIHLPTCSRPRHYSQI

SEQ ID NO: 6479 - protein, 436 aa, Homo sapiens
MESWAVSHPLNTVTEDMYTNGSPAPGSPAQVKGQEVRKVRLIQFEKVTEEPMGITLKLNEKQSCTVARILHGGMIHRQGSLHVGDEILEINGTNVTNHSVDQLQKAMKETKGMISLKVIPNQQSRLPALQMFMRAQFDYDPKKDNLIPCKEAGLKFATGDIIQIINKDDSNWWQGRVEGSSKESAGLIPSPELQEWRVASMAQSAPSEAPSCSPFGKKKKYKDKYLAKHSSIFDQLDVVSYEEVVRLPAFKRKTLVLIGASGVGRSHIKNALLSQNPEKFVYPVPYTTRPPRKSEEDGKEYHFISTEEMTRNISANEFLEFGSYQGNMFGTKFETVHQIHKQNKIAILDIEPQTLKIVRTAELSPFIVFIAPTDQGTQTEALQQLQKDSEAIRSQYAHYFDLSLVNNGVDETLKKLQEAFDQACSSPQWVPVSWVY

SEQ ID NO: 6480 - protein, 149 aa, Homo sapiens
IETAMEDLKGHVAETSGETIQGFWLLTKIDHWNNEKERILLVTDKTLLICKYDFIMLSCVQLQRIPLSAVYRICLGKFTFPGMSLDKRQGEGLRIYWGSPEEQSLLSRWNPWSTEVPYATFTEHPMKYTSEKFLEICKYAETTAGKDEY

SEQ ID NO: 6481 - protein, 74 aa, Homo sapiens
MSANGAVWGRVRSRLRAFPERLAACGAEAAAYGRCVQASTAPGGRLSKDFCAREFEALRSCFAAAAKKTLEGGC

SEQ ID NO: 6482 - protein, 466 aa, Homo sapiens
MEVAPEQPRWMAHPAVLNAQHPDSHHPGLAHNYMEPAQLLPPDEVDVFFNHLDSQGNPYYANPAHARARVSYSPAHARLTGGQMCRPHLLHSPGLPWLDGGKAALSAAAAHHHNPWTVSPFSKTPLHPSAAGGPGGPLSVYPGAGGGSGGGSGSSVASLTPTAAHSGSHLFGFPPTPPKEVSPDPSTTGAASPASSSAGGSAARGEDKDGVKYQVSLTESMKMESGSPLRPGLATMGTQPATHHPIPTYPSYVPAAAHDYSSGLFHPGGFLGGPASSFTPKQRSKARSCSEGRECVNCGATATPLWRRDGTGHYLCNACGLYHKMNGQNRPLIKPKRRLTTTTTLWRRNANGDPVCNACGLYYKLHNVNRPLTMKKEGIQTRNRKMSNKSKKSKKGAECFEELSKCMQEKSSPFSAAALAGHMAPVGHLPPFSHSGHILPTPTPIHPSSSLSFGHPHPSSMVTAMG

SEQ ID NO: 6483 - protein, 275 aa, Homo sapiens
MLEERSEARPTAQWSVEDEEEAVHEQCQHERDRQLQAQDEEGGGHVPERPKQEMLLSLKPSEAPELDEDEGFGDWSQRPEQRQQHEGAQGALDSGEPPQCRSPEGEQEDRPGLHAYEKEDSDEVHLEELSLSKEGPGPEDTVQDNLGAAGAEEEQEEHQKCQQPRTPSPLVLEGTIEQSSPPLSPTTKLIDRTESLNRSIEKSNSVKKSQPDLPISKIDQWLEQYTQAIETAGRTPKLARQASIELPSMAVASTKSRWETGEVQAQSAAKTPSCK

SEQ ID NO: 6484 - protein, 214 aa, Homo sapiens
MCGIWALFGSDDCLSVQCLSAMKIAHRGPDAFRFENVNGYTNCCFGFHRLAVVDPLFGMQPIRVKKYPYLWLCYNGEIYNHKKMQQHFEFEYQTKVDGEIILHLYDKGGIEQTICMLDGVFAFVLLDTANKKVFLGRDTYGVRPLFKAMTEDGFLAVCSEAKGLVTLKHSATPFLKVEPFLPGHYEVLDLKPNGKVASVEMVKYHHCRDVPLHA

SEQ ID NO: 6485 - protein, 25 aa, Homo sapiens
MIHTNLKKKFSCCVLVFLLFAVICV

SEQ ID NO: 6486 - protein, 57 aa, Homo sapiens
MALLRDVSLQDPRDRFELLQRVGAGTYGDVYKARDTVTSELAAVKIVKLDPGNHHPA

SEQ ID NO: 6487 - protein, 87 aa, Homo sapiens
MSAHLQWMVVRNCSSFLIKRNKQTYSTEPNNLKARNSFRYNGLIHRKTVGVEPAADGKGVVVVIKRRSGEFCLVWARERPLSRVWEL

SEQ ID NO: 6488 - protein, 252 aa, Homo sapiens
MFFTCGPNEAMVVSGFCRSPPVMVAGGRVFVLPCIQQIQRISLNTLTLNVKSEKVYTRHGVPISVTGIAQVKIQGQNKEMLAAACQMFLGKTEAEIAHIALETLEGHQRAIMAHMTVEEIYKDRQKFSEQVFKVASSDLVNMGISVVSYTLKDIHDDQDYLHSLGKARTAQVQKDARIGEAEAKRDAGIREAKAKQEKVSAQYLSEIEMAKAQRDYELKKAAYDIEVNTRRAQADLAYQLQVAKTKQQIEEQ

SEQ ID NO: 6489 - protein, 296 aa, Homo sapiens
MERLEEVPLEVLRQRESKWLDMLNNWDKWMAKKHKKIRLRCQKGIPPSLRGRAWQYLSGGKVKLQQNPGKFDELDMSPGDPKWLDVIERDLHRQFPFHEMFVSRGGHGQQDLFRVLKAYTLYRPEEGYCQAQAPIAAVLLMHMPAEQAFWCLVQICEKYLPGYYSEKLEAIQLDGEILFSLLQKVSPVAHKHLSRQKIDPLLYMTEWFMCAFSRTLPWSSVLRVWDMFFCEGVKIIFRVGLVLLKHALGSPEKVKACQGQYETIERLRSLSPKIMQEAFLVQEGQLGGTCVTSFYT

SEQ ID NO: 6490 - protein, 421 aa, Homo sapiens
MHCSNPKSGVVLATVARGPDACQILTRAPLGQDPPQRTVLGLLTANGQYRRTCGQGITRIRCYSGSENAFPPAGKKALPDCGVQEPPKQGFDIYMDELEQGDRDSCSVREGMAFEDVYEVDTGTLKSDLHFLLDFNTVSPMLVDSSLLSQSEDISSLGTDVINVTEYAEEIYQYLREAEIRHRPKAHYMKKQPDITEGMRTILVDWLVEVGEEYKLRAETLYLAVNFLDRFLSCMSVLRGKLQLVGTAAMLLASKYEEIYPPEVDEFVYITDDTYTKRQLLKMEHLLLKVLAFDLTVPTTNQFLLQYLRRQGVCVRTENLAKYVAELSLLEADPFLKYLPSLIAAAAFCLANYTVNKHFWPETLAAFTGYSLSEIVPCLSELHKAYLDIPHRPQQAIREKYKASKYLCVSLMEPPAVLLLQ

SEQ ID NO: 6491 - protein, 68 aa, Homo sapiens
MTLKASEGESGGSMHTALSDLYLEHLLQKRSRPEAGPLVLWCKEGGQCIFAGGTRNPDSRDGWLVNSY

SEQ ID NO: 6492 - protein, 97 aa, Homo sapiens
MVEEENIRVVRCGGSELNFRRAVFSADSKYIFCVSGDFVKVYSTVTEECVHILHGHRNLVTGIQLNPNNHLQSQPTWKLLIKDGFALPFTFIPKEIK

SEQ ID NO: 6493 - protein, 440 aa, Homo sapiens
MIIPSLEELDSLKYSDLQNLAKSLGLRANLRATKLLKALKGYIKHEARKGNENQDESQTSASSCDETEIQISNQEEAERQPLGHVTKTRRRCKTVRVDPDSQQNHSEIKISNPTEFQNHEKQESQDLRATAKVPSPPDEHQEAENAVSSGNRDSKVPSEGKKSLYTDESSKPGKNKRTAITTPNFKKLHEAHFKEMESIDQYIERKKKHFEEHNSMNELKQPINKGGVRTPVPPRGRLSVASTPISQRRSQGRSCGPASQSTLGLKGSLKRSAISAAKTGVRFSAATKDNEHKRSLTKTPARKSAHVTVSGGTPKGEAVLGTHKLKTITGNSAAVITPFKLTTEATQTPVSNKKPVFDLKASLSRPLNYEPHKGKLKPWGQSKENNYLNQHVNRINFYKKTYKQPHLQTKEEQRKKREQERKEKKAKVLGMRRGLILAED

SEQ ID NO: 6494 - protein, 124 aa, Homo sapiens
MVHQVLYRALVSTKWLAESIRTGKLGPGLRVLDASWYSPGTREARKEYLERHVPGASFFDIEECRDTASPYEMMLPSEAGFAEYVGRLGISNHTHVVVYDGEHLGSFYAPRVWWMFRVFGHRTV

SEQ ID NO: 6495 - protein, 605 aa, Homo sapiens
MSEILKQKDTEPTNFKVAAGTLDASTKIYAVRVDAVHADVYRVLGGLGKDAPSLEEVEGHVADGSATEMGTTKKAVKPKKKHLHRTIEQNINNLNVSEADRKCEIDPMFQKTAASFDECSTAGVFLSTLHCQDYRSELLFPSDVQTLSTGEPLELPELGCVEMTDLKAPLQQCAEDRQICPSLAGFQFTQWDSETHNESVSALVDKFKKNDQVFDINAEVDESDCGDFPDGSLGDDFDANDEPDHTAVGDHEEFRSWKEPCQVQSCQEEMISLGDGDIRTMCPLLSMKPGEYSYFSPRTMSMWAGPDHWRFRPRRKQDAPSQSENKKKSTKKDFEIDFEDDIDFDVYFRKTKAATILTKSTLENQNWRATTLPTDFNYNVDTLVQLHLKPGTRLLKMAQGHRVETEHYEEIEDYDYNNPNDTSNFCPGLQAADSDDEDLDDLFVGPVGNSDLSPYPCHPPKTAQQNGDTPEAQGLDITTYGESNLVAEPQKVNKIEIHYAKTAKKMDMKKLKQSMWSLLTALSGKEADAEANHREAGKEAALAEVADEKMLSGLTKDLQRSLPPVMAQNLSIPLAFACLLHLANEKNLKLEGTEDLSDVLVRQGD

SEQ ID NO: 6496 - protein, 114 aa, Homo sapiens
MQEINQNLAEEAGLNITHICLPPDSSEAEIIDEILKINEDTRVHGLALQISENLFSNKVLNALKPEKDVDGVTDINLGKLVRGDAHECFVSPVAKAVIELLEKSGVNLDGKKIL

SEQ ID NO: 6497 - protein, 275 aa, Homo sapiens
PKPGKFQRTRVPRAESGDSLGSEDRDLLYRSQRFKETERPSIKQVIVRKEDVTSKLDEKNNAFPCQVNIKQKMQELNNEINMQQTVIYQASQALNCCVDEEHGKGSLEEAEAERLLLIATGKRTLLIDELNKLKNEGPQRKNKASPQSEFMPSKGSVTLSEIRLPLKADFVCSTVQKPDAANYYYLIILKAGAENMVATPLASTSNSLNGDALTFTTTFTLQDVSNDFEINIEVYSLVQKKDPSGLDKKKKTSKSKAITPKRLLTSITTKSNIHS

SEQ ID NO: 6498 - protein, 232 aa, Homo sapiens
LSLLYKSSVHGGSIEDMVERCSRQGCTITMAYIDYNMIVAFMLGNYINLHESSTEPNDSLWFSLQKKNDTTEIETLLLNTAPKIIDEQLVCRLSKTDIFIICRDNKIYLDKMITRNLKLRFYGHRQYLECEVFRVEGIKDNLDDIKRIIKAREHRNRLLADIRDYRPYADLVSEIRILLVGPVGSGKSSFFNSVKSIFHGHVTGQAVVGSDITSITERGNPNIQLNAKSNGK

SEQ ID NO: 6499 - protein, 127 aa, Homo sapiens
SVKLEYSSFKTNQEKEFNKLSERHMHVQLQLDNLRLENEKLLESKACLQDSYDNLQEIMKFEIDQLSRNLQNFKKENETLKSDLNNLMELLEAEKERNNKLSLQFEEDKENSSKPWYTVVNVELTSS

SEQ ID NO: 6500 - protein, 111 aa, Homo sapiens
MAEVPELASEMMAYYSGNEDDLFFEADGPKQMKCSFQDLDLCPLDGGIQLRISDHHYSKGFRQAASVVVAMDKLRKMLVPCPQTFQENDLSTFFPFIFEEEPIFFDTWDNE

SEQ ID NO: 6501 - protein, 5497 aa, Homo sapiens
MAGYLSPAAYLYVEEQEYLQAYEDVLERYKDERDKVQKKTFTKWINQHLMKVRKHVNDLYEDLRDGHNLISLLEVLSGDTLPREKGRMRFHRLQNVQIALDYLKRRQVKLVNIRNDDITDGNPKLTLGLIWTIILHFQISDIHVTGESEDMSAKERLLLWTQQATEGYAGIRCENFTTCWRDGKLFNAIIHKYRPDLIDMNTVAVQSNLANLEHAFYVAEKIGVIRLLDPEDVDVSSPDEKSVITYVSSLYDAFPKVPEGGEGIGANDVEVKWIEYQNMVNYLIQWIRHHVTTMSERTFPNNPVELKALYNQYLQFKETEIPPKETEKSKIKRLYKLLEIWIEFGRIKLLQGYHPNDIEKEWGKLIIAMLEREKALRPEVERLEMLQQIANRVQRDSVICEDKLILAGNALQSDSKRLESGVQFQNEAEIAGYILECENLLRQHVIDVQILIDGKYYQADQLVQRVAKLRDEIMALRNECSSVYSKGRILTTEQTKLMISGITQSLNSGFAQTLHPSLTSGLTQSLTPSLTSSSMTSGLSSGMTSRLTPSVTPAYTPGFPSGLVPNFSSGVEPNSLQTLKLMQIRKPLLKSSLLDQNLTEEEINMKFVQDLLNWVDEMQVQLDRTEWGSDLPSVESHLENHKNVHRAIEEFESSLKEAKISEIQMTAPLKLTYAEKLHRLESQYAKLLNTSRNQERHLDTLHNFVSRATNELIWLNEKEEEEVAYDWSERNTNIARKKDYHAELMRELDQKEENIKSVQEIAEQLLLENHPARLTIEAYRAAMQTQWSWILQLCQCVEQHIKENTAYFEFFNDAKEATDYLRNLKDAIQRKYSCDRSSSIHKLEDLVQESMEEKEELLQYKSTIANLMGKAKTIIQLKPRNSDCPLKTSIPIKAICDYRQIEITIYKDDECVLANNSHRAKWKVISPTGNEAMVPSVCFTVPPPNKEAVDLANRIEQQYQNVLTLWHESHINMKSVVSWHYLINEIDRIRASNVASIKTMLPGEHQQVLSNLQSRFEDFLEDSQESQVFSGSDITQLEKEVNVCKQYYQELLKSAEREEQEESVYNLYISEVRNIRLRLENCEDRLIRQIRTPLERDDLHESVFRITEQEKLKKELERLKDDLGTITNKCEEFFSQAAASSSVPTLRSELNVVLQNMNQVYSMSSTYIDKLKTVNLVLKNTQAAEALVKLYETKLCEEEAVIADKNNIENLISTLKQWRSEVDEKRQVFHALEDELQKAKAISDEMFKTYKERDLDFDWHKEKADQLVERWQNVHVQIDNRLRDLEGIGKSLKYYRDTYHPLDDWIQQVETTQRKIQENQPENSKTLATQLNQQKMLVSEIEMKQSKMDECQKYAEQYSATVKDYELQTMTYRAMVDSQQKSPVKRRRMQSSADLIIQEFMDLRTRYTALVTLMTQYIKFAGDSLKRLEEEEKSLEEEKKEHVEKAKELQKWVSNISKTLKDAEKAGKPPFSKQKISSEEISTKKEQLSEALQTIQLFLAKHGDKMTDEERNELEKQVKTLQESYNLLFSESLKQLQESQTSGDVKVEEKIVAERQQEYKEKLQGICDLLTQTENRLIGHQEAFMIGDGTVELKKYQSKQEELQKDMQGSAQALAEVVKNTENFLKENGEKLSQEDKALIEQKLNEAKIKCEQLNLKAEQSKKELDKVVTTAIKEETEKVAAVKQLEESKTKIENLLDWLSNVDKDSERAGTKHKQVIEQNGTHFQEGDGKSAIGEEDEVNGNLLETDVDGQVGTTQENLNQQYQKVKAQHEKIISQHQAVIIATQSAQVLLEKQGQYLSPEEKEKLQKNMKELKVHYETALAESEKKMKLTHSLQEELEKFDADYTEFEHWLQQSEQELENLEAGADDINGLMTKLKRQKSFSEDVISHKGDLRYITISGNRVLEAAKSCSKRDGGKVDTSATHREVQRKLDHATDRFRSLYSKCNVLGNNLKDLVDKYQHYEDASCGLLAGLQACEATASKHLSEPIAVDPKNLQRQLEETKALQGQISSQQVAVEKLKKTAEVLLDARGSLLPAKNDIQKTLDDIVGRYEDLSKSVNERNEKLQITLTRSLSVQDGLDEMLDWMGNVESSLKEQGQVPLNSTALQDIISKNIMLEQDIAGRQSSINAMNEKVKKFMETTDPSTASSLQAKMKDLSARFSEASHKHKETLAKMEELKTKVELFENLSEKLQTFLETKTQALTEVDVPGKDVTELSQYMQESTSEFLEHKKHLEVLHSLLKEISSHGLPSDKALVLEKTNNLSKKFKEMEDTIKEKKEAVTSCQEQLDAFQVLVKSLKSWIKETTKKVPIVQPSFGAEDLGKSLEDTKKLQEKWSLKTPEIQKVNNSGISLCNLISAVTTPAKAIAAVKSGGAVLNGEGTATNTEEFWANKGLTSIKKDMTDISHGYEDLGLLLKDKIAELNTKLSKLQKAQEESSAMMQWLQKMNKTATKWQQTPAPTDTEAVKTQVEQNKSFEAELKQNVNKVQELKDKLTELLEENPDTPEAPRWKQMLTEIDSKWQELNQLTIDRQQKLEESSNNLTQFQTVEAQLKQWLVEKELMVSVLGPLSIDPNMLNTQRQQVQILLQEFATRKPQYEQLTAAGQGILSRPGEDPSLRGIVKEQLAAVTQKWDSLTGQLSDRCDWIDQAIVKSTQYQSLLRSLSDKLSDLDNKLSSSLAVSTHPDAMNQQLETAQKMKQEIQQEKKQIKVAQALCEDLSALVKEEYLKAELSRQLEGILKSFKDVEQKAENHVQHLQSACASSHQFQQMSRDFQAWLDTKKEEQNKSHPISAKLDVLESLIKDHKDFSKTLTAQSHMYEKTIAEGENLLLKTQGSEKAALQLQLNTIKTNWDTFNKQVKERENKLKESLEKALKYKEQVETLWPWIDKCQNNLEEIKFCLDPAEGENSIAKLKSLQKEMDQHFGMVELLNNTANSLLSVCEIDKEVVTDENKSLIQKVDMVTEQLHSKKFCLENMTQKFKEFQEVSKESKRQLQCAKEQLDIHDSLGSQAYSNKYLTMLQTQQKSLQALKHQVDLAKRLAQDLVVEASDSKGTSDVLLQVETIAQEHSTLSQQVDEKCSFLETKLQGIGHFQNTIREMFSQFAEFDDELDSMAPVGRDAETLQKQKETIKAFLKKLEALMASNDNANKTCKMMLATEETSPDLVGIKRDLEALSKQCNKLLDRAQAREEQVEGTIKRLEEFYSKLKEFSILLQKAEEHEESQGPVGMETETINQQLNMFKVFQKEEIEPLQGKQQDVNWLGQGLIQSAAKSTSTQGLEHDLDDVNARWKTLNKKVAQRAAQLQEALLHCGRFQDALESLLSWMVDTEELVANQKPPSAEFKVVKAQIQEQKLLQRLLDDRKSTVEVIKREGEKIATTAEPADKVKILKQLSLLDSRWEALLNKAETRNRQLEGISVVAQQFHETLEPLNEWLTTIEKRLVNCEPIGTQASKLEEQIAQHKALEDDIINHNKHLHQAVSIGQSLKVLSSREDKDMVQSKLDFSQVWYIEIQEKSHSRSELLQQALCNAKIFGEDEVELMNWLNEVHDKLSKLSVQDYSTEGLWKQQSELRVLQEDILLRKQNVDQALLNGLELLKQTTGDEVLIIQDKLEAIKARYKDITKLSTDVAKTLEQALQLARRLHSTHEELCTWLDKVEVELLSYETQVLKGEEASQAQMRPKELKKEAKNNKALLDSLNEVSSALLELVPWRAREGLEKMVAEDNERYRLVSDTITQKVEEIDAAILRSQQFDQAADAELSWITETEKKLMSLGDIRLEQDQTSAQLQVQKTFTMEILRHKDIIDDLVKSGHKIMTACSEEEKQSMKKKLDKVLKNYDTICQINSERYLQLERAQSLVNQFWETYEELWPWLTETQSIISQLPAPALEYETLRQQQEEHRQLRELIAEHKPHIDKMNKTGPQLLELSPGEGFSIQEKYVAADTLYSQIKEDVKKRAVALDEAISQSTQFHDKIDQILESLERIVERLRQPPSISAEVEKIKEQISENKNVSVDMEKLQPLYETLKQRGEEMIARSGGTDKDISAKAVQDKLDQMVFIWENIHTLVEEREAKLLDVMELAEKFWCDHMSLIVTIKDTQDFIRDLEDPGIDPSVVKQQQEAAETIREEIDGLQEELDIVINLGSELIAACGEPDKPIVKKSIDELNSAWDSLNKAWKDRIDKLEEAMQAAVQYQDGLQAVFDWVDIAGGKLASMSPIGTDLETVKQQIEELKQFKSEAYQQQIEMERLNHQAELLLKKVTEESDKHTVQDPLMELKLIWDSLEERIINRQHKLEGALLALGQFQHALDELLAWLTHTEGLLSEQKPVGGDPKAIEIELAKHHVLQNDVLAHQSTVEAVNKAGNDLIESSAGEEASNLQNKLEVLNQRWQNVLEKTEQRKQQLDGALRQAKGFHGEIEDLQQWLTDTERHLLASKPLGGLPETAKEQLNVHMEVCAAFEAKEETYKSLMQKGQQMLARCPKSAETNIDQDINNLKEKWESVETKLNERKTKLEEALNLAMEFHNSLQDFINWLTQAEQTLNVASRPSLILDTVLFQIDEHKVFANEVNSHREQIIELDKTGTHLKYFSQKQDVVLIKNLLISVQSRWEKVVQRLVERGRSLDDARKRAKQFHEAWSKLMEWLEESEKSLDSELEIANDPDKIKTQLAQHKEFQKSLGAKHSVYDTTNRTGRSLKEKTSLADDNLKLDDMLSELRDKWDTICGKSVERQNKLEEALLFSGQFTDALQALIDWLYRVEPQLAEDQPVHGDIDLVMNLIDNHKAFQKELGKRTSSVQALKRSARELIEGSRDDSSWVKVQMQELSTRWETVCALSISKQTRLEAALRQAEEFHSVVHALLEWLAEAEQTLRFHGVLPDDEDALRTLIDQHKEFMKKLEEKRAELNKATTMGDTVLAICHPDSITTIKHWITIIRARFEEVLAWAKQHQQRLASALAGLIAKQELLEALLAWLQWAETTLTDKDKEVIPQEIEEVKALIAEHQTFMEEMTRKQPDVDKVTKTYKRRAADPSSLQSHIPVLDKGRAGRKRFPASSLYPSGSQTQIETKNPRVNLLVSKWQQVWLLALERRRKLNDALDRLEELREFANFDFDIWRKKYMRWMNHKKSRVMDFFRRIDKDQDGKITRQEFIDGILSSKFPTSRLEMSAVADIFDRDGDGYIDYYEFVAALHPNKDAYKPITDADKIEDEVTRQVAKCKCAKRFQVEQIGDNKYRFFLGNQFGDSQQLRLVRILRSTVMVRVGGGWMALDEFLVKNDPCRAKGRTNMELREKFILADGASQGMAAFRPRGRRSRPSSRGASPNRSTSVSSQAAQAASPQVPATTTPKILHPLTRNYGKPWLTNSKMSTPCKAAECSDFPVPSAEGTPIQGSKLRLPGYLSGKGFHSGEDSGLITTAAARVRTQFADSKKTPSRPGSRAGSKAGSRASSRRGSDASDFDISEIQSVCSDVETVPQTHRPTPRAGSRPSTAKPSKIPTPQRKSPASKLDKSSKR

SEQ ID NO: 6502 - protein, 173 aa, Homo sapiens
MFTEGEEMYLQGSTVWHPDCKQSTKTEEKLRPTRTSSESIYSRPGSSIPGSPGHTIYAKVDNEILDYKDLAAIPKVKAIYDIERPDLITYEPFYTSGYDDKQERQSLGESPRTLSPTPSAEGYQDVRDRMIHRSTSQGSINSPVYSRHSYTPTTSRSPQHFHRPDQGINIYRK

SEQ ID NO: 6503 - protein, 127 aa, Homo sapiens
MDFNMKKLASDAGIFFTRAVQFTEEKFGQAEKTELDAHFENLLARADSTKNWTEKILRQTEVLLQPNPSARVEEFLYEKLDRKVPSRVTNGELLAQYMADAASELGPTTPYDRILLCHPDWSAVVQS

SEQ ID NO: 6504 - protein, 316 aa, Homo sapiens
MRAHAGHKRSECGGEWRETPRKQKQHGKASISPSSGARRTVTPTRKRPYECKVCGKAFNSPNLFQIHQRTHTGKRSYKCREIVRAFTVSSFFRKHGKMHTGEKRYECKYCGKPIDYPSLFQIHVRTHTGEKPYKCKQCGKAFISAGYLRTHEIRSHALEKSHQCQECGKKLSCSSSLHRHERTHSGGKLYECQKCAKVFRCPTSLQAHERAHTGERPYECNKCGKTFNYPSCFRRHKKTHSGEKPYECTRCGKAFGWCSSLRRHEMTHTGEKPFDCKQCGKVFTFSNYLRLHERTHLAGRSQCFGRRQGDHLSPGV

SEQ ID NO: 6505 - protein, 232 aa, Homo sapiens
QKGEQGTVACTWERGRDTHLYTEYTLQLSGPKNLTWQKQCKDIYCDYLDFGINLTPESPESNFTAKVTAVNSLGSSSSLPSTFTFLDIVRPLPPWDIRIKFQKASVSRCTLYWRDEGLVLLNRLRYRPSNSRLWNMVNVTKAKGRHDLLDLKPFTEYEFQISSKLHLYKGSWSDWSESLRAQTPEEEPTGMLDVWYMKRHIDYSRQQISLFWKVSFKRQLKTQGNKTEGRKR

SEQ ID NO: 6506 - protein, 133 aa, Homo sapiens
MAEKLITQTFSHHNQLAQKTRREKRARQEAERREKAERAARLAKEAKSETSGPQIKELTDEEAERLQLEIDQKKDAENHEAQLKNGSLDSPGKQDTEEDEEEDEKDKGKLKPNLGNGADLPNYRWTQTLSELD

SEQ ID NO: 6507 - protein, 378 aa, Homo sapiens
MIIPSLEELDSLKYSDLQNLAKSLGLRANLRDESQTSASSCDETEIQISNQEEAERQPLGHVTKTRRRCKTVRVDPDSQQNHSEIKISNPTEFQNHEKQESQDLRATAKVPSPPDEHQEAENAVSSGNRDSKVPSEGKKSLYTDESSKPGKNKRTAITTPNFKKLHEAHFKEMESIDQYIERKKKHFEEHNSMNELKQPINKGGVRTPVPPRGRLSVASTPISQRRSQGRSCGPASQSTLGLKGSLKRSAISAAKTGVRFSAATKDNEHKRSLTKTPARKSAHVTVSGGTPKGEAVLGTHKLKTITGNSAAGKLKPWGQSKENNYLNQHVNRINFYKKTYKQPHLQTKEEQRKKREQERKEKKAKVLGMRRGLILAED

SEQ ID NO: 6508 - protein, 255 aa, Homo sapiens
MSEAYFRVESGALGPEENFLSLDDILMSHEKLPVRTETAMPRLGAFFLERSAGAETDNAVPQGFALLPRLECSGVIWLTAALTSQAPEILPPQPPMWLVLQGSKLELPLWLAKGLFDNKRRILSVELPKIYQEGWRTVFSADPNVVDLHKMGPHFYGFGSQLLHFDSPENADISQSLLQTFIGRFRRIMDSSQNAYNEDTSALVARLDEMERGLFQTGQKGLNDFQCWEKGQASQITASNLVQNYKKRKFTDMED

SEQ ID NO: 6509 - protein, 80 aa, Homo sapiens
MDDDIAALVVDNGSGMCKAGFAGDDAPRAVFPSIVGRPRHQGVMVGMGQKDSYVGDEAQSKRGILTLKYPIEHGIVTNWD

SEQ ID NO: 6510 - protein, 1047 aa, Homo sapiens
EGIHANEIKNLKKELHDSEGQQLALNKEIMILKDKLEKTRRESQSEREEFESEFKQQYEREKVLLTEENKKLTSELDKLTTLYENLSIHNQQLEEEVKDLADKKESVAHWEAQITEIIQWVSDEKDARGYLQALASKMTEELEALRNSSLGTRATDMPWKMRRFAKLDMSARLELQSALDAEIRAKQAIQEELNKVKASNIITECKLKDSEKKNLELLSEIEQLIKDTEELRSEKGIEHQDSQHSFLAFLNTPTDALDQFETDPVENTYVWNPSVKFHIQSRSTSPSTSSEAEPVKTVDSTPLSVHTPTLRKKGCPGSTGFPPKRKTHQFFVKSFTTPTKCHQCTSLMVGLIRQGCSCEVCGFSCHITCVNKAPTTCPVPPEQTKGPLGIDPQKGIGTAYEGHVRIPKPAGVKKGWQRALAIVCDFKLFLYDIAEGKASQPSVVISQVIDMRDEEFSVSSVLASDVIHASRKDIPCIFRVTASQLSASNNKCSILMLADTENEKNKWVGVLSELHKILKKNKFRDRSVYVPKEAYDSTLPLIKTTQAAAIIDHERIALGNEEGLFVVHVTKDEIIRVGDNKKIHQIELIPNDQLVAVISGRNRHVRLFPMSALDGRETDFYKLSETKGCQTVTSGKVRHGALTCLCVAMKRQVLCYELFQSKTRHRKFKEIQVPYNVQWMAIFSEQLCVGFQSGFLRYPLNGEGNPYSMLHSNDHTLSFIAHQPMDAICAVEISSKEYLLCFNSIGIYTDCQGRRSRQQELMWPANPSSCCYNAPYLSVYSENAVDIFDVNSMEWIQTLPLKKVRPLNNEGSLNLLGLETIRLIYFKNKMAEGDELVVPETSDNSRKQMVRNINNKRRYSFRVPEEERMQQRREMLRDPEMRNKLISNPTNFNHIAHMGPGDGIQILKDLPMNPRPQESRTVFSGSVSIPSITKSRPEPGRSMSASSGLSARSSAQNGSALKREFSGGSYSAKRQPMPSPSEGSLSSGGMDQGSDAPARDFDGEDSDSPRHSTASNSSNLSSPPSPASPRKTKSLSLESTDRGSWDP

SEQ ID NO: 6511 - protein, 89 aa, Homo sapiens
MILLEVNNRIIEETLALKFENAAAGNKPEAVEVTFADFDGVLYHISNPNGDKTKVMVSISLKFYKELQAHGADELLKRVYGSFLVNPES

SEQ ID NO: 6512 - protein, 64 aa, Homo sapiens
MGRSGKLPSGVSAKLKRWKKGHSSDSNPAICRHRQAARSRFFSRPSGRSDLTVDAVKLHNELQS

SEQ ID NO: 6513 - protein, 48 aa, Homo sapiens
MSQSNRELVVDFLSYKLSQKGYSWSQFSDVEENRTEAPEGTESEMETP

SEQ ID NO: 6514 - protein, 216 aa, Homo sapiens
MGPPGPALPATMNNSSSETRGHPHSASSPSERVFPMPLPRKAPLNIPGTPVLEDFPQNDDEKERLQRRRSRVFDLQFSTDSPRLLASPSSRSIDISATIPKFTNTQITEHYSTCIKLSTENIDPMFQKTAASFDECSTAGVFLSTLHCQDYRSELLFPSDVQTLSTGEPLELPELGCVEMTDLKAPLQQCAEDRQICPSLAGFQFTQWDSETHNEV

SEQ ID NO: 6515 - protein, 83 aa, Homo sapiens
MAGTLDLDKGCTVEELLRGCIEAFDDSGKVRDPQLVRMFLMMHPWYIPSSQLAAKLLHIYQQSRKDNSNSLQVKTCHLVRYWI

SEQ ID NO: 6516 - protein, 141 aa, Homo sapiens [sequence omitted]

SEQ ID NO: 6517 - protein, 79 aa, Homo sapiens
MDRSKENCISGPVKATAPVGGPKRVLVTQQFPCQNPLPVNSGQAQRVLCPSNSSQRIPLQAQKLVSSHKPVQNQKQKQL

SEQ ID NO: 6518 - protein, 187 aa, Homo sapiens
FHGSLSSTHFTCKIGYYKALSTDATCAKCPPHSYSVWEGATSCTCDRGFFRADNDAASMPCTRPPSAPLNLISNVNETSVNLEWSSPQNTGGRQDISYNVVCKKCGAGDPSKCRPCGSGVHYTPQQNGLKTTKVSITDLLAHTNYTFEIWAVNGVSKYNPNPDQSVSVTVTTNQAAPSSIALVQAKE

SEQ ID NO: 6519 - protein, 208 aa, Homo sapiens
MFEFLSNHMRDAQGRLDSTRGLLCGLGAGVAEAVVVVCPMETIKVKFIHDQTSPNPKYRGFFHGVREIVREQGLKGTYQGLTATVLKQGSNQAIRFFVMTSLRNWYRGDNPNKPMNPLITGVFGAIAGAASVFGNTPLDVIKTRMQGLEAHKYRNTWDCGLQILKKEGLKAFYKGTVPRLGRVCLDVAIVFVIYDEVVKLLNKVWKTD

SEQ ID NO: 6520 - protein, 4265 aa, Homo sapiens
MEQPNSKGYSLGRTPQGPECSSAPAVQVGTHRGLEYNPGKILPGSDYGLGNPPALDPKLPHLPLPPAPPTLSDLGQPRKSPLTGTDKKYPLMKQRGFYSDILSPGTLDQLGEVCRGPRMSQNLLRQADLDKFTPRVGSFEVPEDFQERMEQQCIGSTTRLLAQTDFPLQAYEPKMQVPFQVLPGQHPRKIEIERRKQQYLSLDIEQLLFSQGIDSNKLMPRHLDHQHPQTIEQGHDPIFPIYLPLKVFDNEDFDCRTPREWINMGLEPGSLDRKPVPGKALLPTDDFLGHEDPKSQKLKYKWCEVGVLDYDEEKKLYLVHKTDEKGLVRDEMGRPILNAGVTTEGRPPLQVCQYWVPRIQLLFCAEDPCMFAQRVVQANALRKNTEALLLYNLYVDCMPSDGQHVISEQSLSKIKQWALSTPRMRKGPSVLEHLSSLAREVSLDYERSMNKINFDHVVSSKPETFSYVTLPKKEEEQVPERGLVSVPKYHFWEQKEDFTFVSLLTRPEVITALSKVRAECNKVTAMSLFHSSLSKYSHLEEFEQIQSQTFSQVQMFLKDSWISSLKVAMRSSLRDMSKGWYNLYETNWEVYLMSKLRKLMELVKYMLQDTLRFLVQDSLASFSQFISDTCCSVLNCTDDMVWGDDLINSPYRPRKNPLFIMDLVLDSSGVHYSTPLEQFEASLLNLFDKGILATHAVPQLEKLVMEDIFISGDPLLESVGLHEPLVEELRATIASAVSKAMIPLQAYAKEYRKYLELNNNDIASFLKTYQTQGLLAQEVREVVLTHLREKEILDSSLPSSIIIGPFYINTDNVKQSLSKKRKALATSVLDILAKNLHKEVDSICEEFRSISRKIYEKPNSIEELAELREWMKGIPERLVGLEERIVKVMDDYQVMDEFLYNLSSDDFNDKWIASNWPSKILGQIELVQQQHVEDEEKFRKIQIMDQNNFQEKLEGLQLVVAGFSIHVEISRAHEIANEVRRVKKQLKDCQQLAMLYNNRERIFSLPITNYDKLSRMVKEFQPYLDLWTTASDWLRWSESWMNDPLSAIDAEQLEKNVVEAFKTMHKCVKQFKDMPACQEVALDIRARIEEFKPYIPLIQGLRNPGMRIRHWETLSNQININVRPKANLTFARCLEMNLQDHIESISKVAEVAGKEYAIEQALDKMEKEWSTILFNVLPYKATDTYILKSPDEASQLLDDHIVMTQNMSFSPYKKPFEQRINSWENKLKLTQEVLEEWLNCQRSWLYLEPIFSSEDINQQLPVESKRYQTMERIWKKIMKNAYENREVINVCSDLRMLDSLRDCNKILDLVQKGLSEYLETKRSAFPRFYFLSDDELLEILSQTKDPTAVQPHLRKCFENIARLLFQEDLEITHMYSAEGEEVQLCFSIYPSSNVEDWLREVERSMKASVHDIIEKAIRAYPTMPRTQWVLNWPGQVTIAGCQTYWTMEVAEALEAGNLRSQLFPQLCQQLSDLVALVRGKLSRMQRAVLSALIVIEVHAKDVVSKLIQENVVSVNDFQWISQLRYYWTNNDLYIRAVNAEFIYGYEYLGNSGRLVITPLTDRCYLTLTGALHLKFGGAPAGPAGTGKTETTKDLGKALAIQTVVFNCSDQLDFMAMGKFFKGLASAGAWACFDEFNRIDIEVLSVVAQQITTIQKAQQQRVERFMFEGVEIPLVPSCAVFITMNPGYAGRTELPDNLKALFRPVAMMVPDYAMITEISLYSFGFNEASVLAKKITTTFKLSSEQLSSQDHYDFGMRAVKTVISAAGNLKRENPSMNEELICLRAIRDVNVPKFLQEDLKLFSGIVSDLFPTIKEEDTDYGILDEAIREACRNSNLKDVEGFLTKCIQLYETTVVRHGLMLVGPTGSGKSTCYRVLAAAMTSLKGQPSISGGMYEAVNYYVLNPKSITMGQLYGEFDLLTHEWTDGIFSSFIRAGAITSDTNKKWYMFDGPVDAIWIENMNTVLDDNKKLCLSSGEIIKLTEAMTMMFEVQDLAVASPATVSRCGMVYLEPSILGLMPFIECWLRKLPPLLKPYEEHFKALFVSFLEESISFVRSSVKEVIASTNCNLTMSLLKLLDCFFKPFLPREGLKKIPSEKLSRIVELIEPWFIFSLIWSVGATGDSSGRTSFSHWLRLKMENEQLTLLFPEEGLVFDYRLEDAGISGTNDSEDEEEEYKQVAWVKWMDSSAPFTMVPDTNYCNIIVPTMDTVQMSHLLDMLLTNKKPVLCIGPTGTGKTLTISDKLLKNLALDYISHFLTFSARTSANQTQDFIDSKLDKRRKGVFGPPLGRNFIFFIDDLNMPALETYGAQPPIELLRQWMDHGGWYDRKIIGAFKNLVDINFVCAMGPPGGGRNTVTPRLMRHFNYLSFAEMDEVSKKRIFSTILGNWLDGLLGEKSYRERVPGAPHIAHFTEPLVEATIMVYATITSQLLPTPAKSHYTFNLRDLSKVFQGMLMADPAKVEDQVQLLRLWYHENCRVFRDRLVNEEDRSWFDQLLKRCMEQWEVTFNKVCPFQPILYGDFMSPGSDVKSYELITSESKMMQVIEEYIEDYNQINTAKLKLVLFMDAMSHICRISRTLRQALGNALLLGVGGSGRSSLTRLASHMAEYECFQIELSKNYGMSEWRDDVKKVLLKAGLQNLPITFLFSDTQIKNESFLEDINNVLNSGDIPNLYTADEQDQIVSTMRPYIQEQGLQPTKANLMAAYTGRVRSNIHMVLCMSPIGEVFRARLRQFPSLVNCCTIDWFNEWPAEALKSVATVFLNEIPELESSQEEIQGLIQVCVYIHQSVSKKCIEYLAELTRHNYVTPKSYLELLHIFSILIGQKKLELKTAKNRMKSGLDKLLRTSEDVAKMQEDLESMHPLLEEAAKDTMLTMEQIKVDTAIAEETRNSVQTEEIKANEKAKKAQAIADDAQKDLDEALPALDAALASLRNLNKNDVTEVRAMQRPPPGVKLVIEAVCIMKGIKPKKVPGEKPGTKVDDYWEPGKGLLQDPGHFLESLFKFDKDNIGDVVIKAIQPYIDNEEFQPATIAKVSKACTSICQWVRAMHKYHFVAKAVEPKRQALLEAQDDLGVTQRILDEAKQRLREVEDGIATMQAKYRECITKKEELELKCEQCEQRLGRAGKLINGLSDEKVRWQETVENLQYMLNNISGDVLVAAGFVAYLGPFTGQYRTVLYDSWVKQLRSHNVPHTSEPTLIGTLGNPVKIRSWQIAGLPNDTLSVENGVINQFSQRWTHFIDPQSQANKWIKNMEKDNGLDVFKLSDRDFLRSMENAIRFGKPCLLENVGEELDPALEPVLLKQTYKQQGNTVLKLGDTVIPYHEDFRMYITTKLPNPHYTPEISTKLTLINFTLSPSGLEDQLLGQVVAEERPDLEEAKNQLIISNAKMRQELKDIEDQILYRLSSSEGNPVDDMELIKVLEASKMKAAEIQAKVRIAEQTEKDIDLTRMEYIPVAIRTQILFFCVSDLANVDPMYQYSLEWFLNIFLSGIANSERADNLKKRISNINRYLTYSLYSNVCRSLFEKHKLMFAFLLCVRIMMNEGKINQSEWRYLLSGGSISIMTENPAPDWLSDRAWRDILALSNLPTFSSFSSDFVKHLSEFRVIFDSLEPHREPLPGIWDQYLDQFQKLLVLRCLRGDKVTNAMQDFVATNLEPRFIEPQTANLSVVFKDSNSTTPLIFVLSPGTDPAADLYKFAEEMKFSKKLSAISLGQGQGPRAEAMMRSSIERGKWVFFQNCHLAPSWMPALERLIEHINPDKVHRDFRLWLTSLPSNKFPVSILQNGSKMTIEPPRGVRANLLKSYSSLGEDFLNSCHKVMEFKSLLLSLCLFHGNALERRKFGPLGFNIPYEFTDGDLRICISQLKMFLDEYDDIPYKVLKYTAGEINYGGRVTDDWDRRCIMNILEDFYNPDVLSPEHSYSASGIYHQIPPTYDLHGYLSYIKSLPLNDMPEIFGLHDNANITFAQNETFALLGTIIQLQPKSSSAGSQGREEIVEDVTQNILLKVPEPINLQWVMAKYPVLYEESMNTVLVQEVIRYNRLLQVITQTLQDLLKALKGLVVMSSQLELMAASLYNNTVPELWSAKAYPSLKPLSSWVMDLLQRLDFLQAWIQDGIPAVFWISGFFFPQAFLTGTLQNFARKFVISIDTISFDFKVMFEAPSELTQRPQVGCYIHGLFLEGARWDPEAFQLAESQPKELYTEMAVIWLLPTPNRKAQDQDFYLCPIYKTLTRAGTLSTTGHSTNYVIAVEIPTHQPQRHWIKRGVALICALDY

SEQ ID NO: 6521 - protein, 162 aa, Homo sapiens
MAEQVLPQALYLSNMRKAVKIRERTPEDIFKPTNGIIHHFKTMHRYTLEMFRTCQFCPQFREIIHKALIDRNIQATLESQKKLNWCREVRKLVALKTNGDGNCLMHATSQYMWGVQDTDLVLRKALFSTLKETDTRNFKFRWQLESLKSQEFVETGLCYDTR

SEQ ID NO: 6522 - protein, 278 aa, Homo sapiens
MGSALGRARRTLSGRPFQRAPCKTRRALSLSAALRNVTKAQGGCPKSLVLWGCRPKRPRKRRTSLKLAWRGTFCSSSLKISEDTHEDHDTSTENTDESNHDPQFEPIVSLPEQEIKTLEEDEEELFKMRAKLFRFASENDLPEWKERGTGDVKLLKHKEKGAIRLLMRRDKTLKICANHYITPMMELKPNAGSDRAWVWNTHADFADECPKPELLAIRFLNAENAQKFKTKFEECRKEIEEREKKAGSGKNDHAEKVAEKLEALSVKEETKEDAEEKQ

SEQ ID NO: 6523 - protein, 781 aa, Homo sapiens
MHDECTPQQTMSSIQDTKAADIAARGELNVIETATVSPTNGEESHYTNQVQLEKNKTHMSSALVEKENNTSLNGRVLGQEESQNKMFPDNAENEDDKQIEHMTVENINGNREETHGIIQTTETEIQETSESPREEMTTSSIICDISKKYINSTLPNDSENIKHKNNIMEKEYLDVLSDVTGPQVSCYITAPSYVLQQLECRIINHMSSLIVGDNEELVSNVITIECSDKEKRVPFPIGIAIPFTARYRGNYRDIMVKVCDINLQSSYLNPNSLEGMKGGYKGTCASVKVYKLGIFSVVSCLKKESFTVTKKGLALKSSMDSRISLNYPPGVFTSPVLVQLKIQPVDPALVAHLKAQQDTFYSVQSTSPLIHIQHPSTYPFQKPVTLFLPCSPYLDKNNLGSEIDHKRRASATINRITPSYFNRTKIASIRKPRKNASECLKLLGFRSQDSGWCGLDDVVKTIQSGLVSVELYEHLERFIVLHLSSTMDNSHLVTFVKSLEEAMLSTTACIVLSHQKDNPHRIAVLVVPSKDLSQVLKDLHLEGFGGPPEPSRHFQVREGEQLLLRFTGNIFASSNGKDYGKDYTLIFHLQRKPRLELQIKEVDEFGNYSCPHYKGTIVVYKVPKGKIVPNLNQSLVINENHSQLPICKLPLKLPKHKKLINRPQSTKRVSKDPVEALWDNLLHWLAEELSEENAESLSSTLPLRRSTIQLIKLKNPDDLTEQIHEFLCFWKKSLPTFTDKLRLLARHLRKIGRSDLAEELKFKWENKVFTEPQQCFDVAPE

SEQ ID NO: 6524 - protein, 170 aa, Homo sapiens [sequence omitted]

SEQ ID NO: 6525 - protein, 401 aa, Homo sapiens
MCGIWALFGSDDCLSVQCLSAMKIAHRGPDAFRFENVNGYTNCCFGFHRLAVVDPLFGMQPIRVKKYPYLWLCYNGEIYNHKKMQQHFEFEYQTKVDGEIILHLYDKGGIEQTICMLDGVFAFVLLDTANKKVFLGRDTYGVRPLFKAMTEDGFLAVCSEAKGLVTLKHSATPFLKVEPFLPGHYEVLDLKPNGKVASVEMVKYHHCRDVPLHALYDNVEKLFPGFEIETVKNNLRILFNNAVKKRLMTDRRIGCLLSGGLDSSLVAATLLKQLKEAQVQYPLQTFAIGMEDSPDLLAARKVADHIGSEHYEVLFNSEEGIQALDEVIFSLETYDITTVRASVGMYLISKYIRKNTDSVVIFSGEGSDELTQGYIYFHKDWRGRKKNCFVCQKQNSWCFCL

SEQ ID NO: 6526 - protein, 109 aa, Homo sapiens
MAKQPSDVSSECDREGRQLQPAERPPQLRPGAPTSLQTEPQDRSPAPMSCDKSTQTPSPPCQAFNHYLSAMASMRQAEPADMRPEIWIAQELRRIGDEFNAYYARRLEK

SEQ ID NO: 6527 - protein, 588 aa, Homo sapiens
MMSSPAQPDLMWNLVPWVLFCGCCRIFPDGVAGREQLLAQQRMHSMISSVDVKSEVPVGLEPISPLDLRTDLRMMMPVVDPVVREKQLQQELLLIQQQQQIQKQLLIAEFQKQHENLTRQHQAQLQEHIKELLAIKQQQELLEKEQKLEQQRQEQEVERHRREQQLPPLRGKDRGRERAVASTEVKQKLQEFLLSKSATKDTPTNGKNHSVSRHPKLWYTAAHHTSLDQSSPPLSGTSPSYKYTLPGAQDAKDDFPLRKTESSVSSSSPGSGPSSPNNGPTGSVTENETSVLPPTPHAEQMVSQQRILIHEDSMNLLSLYTSPSLPNITLGLPAVPSQLNASNSLKEKQKCETQTLRQGVPLPGQYGGSIPASSSHPHVTLEGKPPNSSHQALLQHLLLKEQMRQQKLLVAGGVPLHPQSPLATKERISPGIRGTHKLPRHRPLNRTQSAPLPQSTLAQLVIQQQHQQFLEKQKQYQQQIHMNKLLSKSIEQLKQPGSHLEEAEEELQGDQAMQEDRAPSSGNSTRSDSSACVDDTLGQVGAVKVKEEPVDSDEDAQIQEMESGEQAAFMQQVIGKDLAPGFVIKVII

SEQ ID NO: 6528 - protein, 104 aa, Homo sapiens
MIHFILLFSRQGKLRLQKWYITLPDKERKKITREIVQIILSRGHRTSSFVDWKELKLVYKRYASLYFCCAIENQDNELLTLEIVHRYVELLDKYFGNTWPFARA

SEQ ID NO: 6529 - protein, 205 aa, Homo sapiens
MAAARPSLGRVLPGSSVLFLCDMQEKFRHNIAYFPQIVSVAARMLKVARLLEVPVMLTEQYPQGLGPTVPELGTEGLRPLAKTCFSMVPALQQELDSRPQLRSVLLCGIEAQACILNTTLDLLDRGLQVHVVVDACSSRSQVDRLVALARMRQSGAFLSTSEGLILQLVGDAVHPQFKEIQKLIKEPAPDSGLLGLFQGQNSLLH

SEQ ID NO: 6530 - protein, 166 aa, Homo sapiens
MSTRESFNPESYELDKSFRLTRFTELKGTGCKVPQDVLQKLLESLQENHFQEDEQFLGAVMPRLGIGMDTCVIPLRHGGLSLVQTTDYIYPIVDDPYMMGRIACANVLSDLYAMGVTECDNMLMLLGVSNKMTDRERDKVMPLIIQGFKDAAEEAGTSVTGGQTVL

SEQ ID NO: 6531 - protein, 180 aa, Homo sapiens
MGLADASGPRDTQALLSATQAMDLRRRDYHMERPLLNQEHLEELGRWGSAPRTHQWRTWLQCSRARAYALLLQHLPVLVWLPRYPVRDWLLGDLLSGLSVAIMQLPQGLAYALLAGLPPVFGLYSSFYPVFIYFLFGTSRHISVGGAGPDPLRLRGHLPVRTSCPRLYHSCSCAGLRLTA

SEQ ID NO: 6532 - protein, 640 aa, Homo sapiens
MAVYVGMLRLGRLCAGSSGVLGARAALSRSWQEARLQGVRFLSARGGMEAGRQRISVPSSFTASAAAHSREVDRMVSTPIGGLSYVQGCTKKHLNSKTVGQCLETTAQRVPEREALVVLHEDVRLTFAQLKEEVDKAASGLLSIGLCKGDRLGMWGPNSYAWVLMQLATAQAGIILVSVNPAYQAMELEYVLKKVGCKALVFPKQFKTQQYYNVLKQICPEVENAQPGALKSQRLPDLTTVISVDAPLPGTLLLDEVVAAGSTRQHLDQLQYNQQFLSCHDPINIQFTSGTTGSPKGATLSHYNIVNNSNILGERLKLHEKTPEQLRMILPNPLYHCLGSVAGTMMCLMYGATLILASPIFNGKKALEAISRERGTFLYGTPTMFVDILNQPDFSSYDISTMCGGVIAGSPAPPELIRAIINKINMKDLVVAYGTTENSPVTFAHFPEDTVEQKAESVGRIMPHTEARIMNMEAGTLAKLNTPGELCIRGYCVMLGYWGEPQKTEEAVDQDKWYWTGDVATMNEQGFCKIVGRSKDMIIRGGENIYPAELEDFFHTHPKVQEVQVVGVKDDRMGEEICACIRLKDGEETTVEEIKAFCKGKISHFKIPKYIVFVTNYPLTISGKIQKFKLREQMERHLNL

SEQ ID NO: 6533 - protein, 271 aa, Homo sapiens
PTCETAQSPCDTKECQHGGQCQVENGSAVCVCQAGYTGAACEMDVDDCSPDPCLNGGSCVDLVGNYTCLCAEPFKGLRCETGDHPVPDACLSAPCHNGGTCVDADQGYVCECPEGFMGLDCRERVPDDCECRNGGRCLGANTTLCQCPLGFFGLLCEFEITAMPCNMNTQCPDGGYCMEHGGSYLCVCHTDHNASHSLPSPCDSDPCFNGGSCDAHDDSYTCECPRGFHGKHCEKGMAGRGVRAGVSTLESARGPPSCFSAVSLLVSRIAD

SEQ ID NO: 6534 - protein, 206 aa, Homo sapiens
MEPLASNIQVLLQAAEFLERREREAEHGYASLCPHRSPGPIHRRKKRPPQAPGAQDSGRSVHNELEKRRRAQLKRCLERLKQQMPLGADCARYTTLSLLRRARMHIQKLEDQEQRARQLKERLRSKQQSLQRQLEQLRGLAGAAERERLRADSLDSSGLSSERSDSDQEELEVDVESLVFGGEAELLRGFVAGQEHSYSHGGGAWL

SEQ ID NO: 6535 - protein, 601 aa, Homo sapiens
MAASADLSKSSPTPNGIPSSDPASDAMDPFHACSILKQLKTMYDEGQLTDIVVEVDHGKTFSCHRNVLAAISPYFRSMFTSGLTESTQKEVRIVGVEAESMDLVLNYAYTSRVILTEANVQALFTAASIFQIPSIQDQCAKYMISHLDPQNSIGVFIFADHYGHQELGDRSKEYIRKKFLCVTKEQEFLQLTKDQLISILDSDDLNVDREEHVYESIIRWFEHEQNEREVHLPEIFAKCIRFPLMEDTFIEKIPPQFAQAIAKSCVEKGPSNTNGCTQRLGMTASEMIICFDAAHKHSGKKQTVPCLDIVTGRVFKLCKPPNDLREVGILVSPDNDIYIAGGYRPSSSEVSIDHKAENDFWMYDHSTNRWLSKPSLLRARIGCKLVYCCGKMYAIGGRVYEGDGRNSLKSVECYDSRENCWTTVCAMPVAMEFHNAVEYKEKIYVLQGEFFLFYEPQKDYWGFLTPMTVPRIQGLAAVYKDSIYYIAGTCGNHQRMFTVEAYDIELNKWTRKKDFPCDQSINPYLKLVLFQNKLHLFVRATQVTVEEHVFRTSRKNSLYQYDDIADQWMKVYETPDRLWDLGRHFECAVAKLYPQCLQKVL

SEQ ID NO: 6536 - protein, 663 aa, Homo sapiens
MLGTLRAMEGEDVEDDQLLQKLRASRRRFQRRMQRLIEKYNQPFEDTPVVQMATLTYETPQGLRIWGGRLIKERNEGEIQCAGNRAGRDVRVTPLPSLASPAVPAPGYCSRISRKSPGDPAKPASSPREWDPLHPSSTDMALVPRNDSLSLQETSSSSFLSSQPFEDDDICNVTISDLYAGMLHSMSRLLSTKPSSIISTKTFIMQNWNSRRRHRYKSRMNKTYCKGARRSQRSSKENFIPCSEPVKGTGALRDCKNVLDVSCRKTGLKLEKAFLEVNRPQIHKLDPSWKERKVTPSKYSSLIYFDSSATYNLDEENRFRTLKWLISPVKIVSRPTIRQGHGENRQREIEIRFDQLHREYCLSPRNQPRRMCLPDSWAMNMYRGGPASPGGLQGLETRRLSLPSSKAKAKSLSEAFENLGKRSLEAGRCLPKSDSSSSLPKTNPTHSATRPQQTSDLHVQGNSSGIFRKSVSPSKTLSVPDKEVPGHGRNRYDEIKEEFDKLHQKYCLKSPGQMTVPLCIGVSTDKASMEVRYQTEGFLGKLNPDPHFQGFQKLPSSPLGCRKSLLGSTAIEAPSSTCVARAITRDGTRDHQFPAKRPRLSEPQGSGRQGNSLGASDGVDNTVRPGDQGSSSQPNSEERGENTSYRMEEKSDFMLEKLETKSV

SEQ ID NO: 6537 - protein, 1833 aa, Homo sapiens
MREKEQEREEQLMEDKKRKKEDKKKKEATQKVTEQKTKVPEVTKPSLSQPTAASPIGSSPSPPVNGGNNAKRVAVPNGQPPSAARYMPREVPPRFRCQQDHKVLLKRGQPPPPSCMLLGGGAGPPPCTAPGANPNNAQVTGALLQSESGTAPDSTLGGAAASNYANSTWGSGASSNNGTSPNPIHIWDKVIVDGSDMEEWPCIASKDTESSSENTTDNNSASNPGSEKSTLPGSTTSNKGKGSQCQSASSGNECNLGVWKSDPKAKSVQSSNSTTENNNGLGNWRNVSGQDRIGPGSGFSNFNPNSNPSAWPALVQEGTSRKGALETDNSNSSAQVSTVGQTSREQQSKMENAGVNFVVSGREQAQIHNTDGPKNGNTNSLNLSSPNPMENKGMPFGMGLGNTSRSTDAPSQSTGDRKTGSVGSWGAARGPSGTDTVSGQSNSGNNGNNGKEREDSWKGASVQKSTGSKNDSWDNNNRSTGGSWNFGPQDSNDNKWGEGNKMTSGVSQGEWKQPTGSDELKIGEWSGPNQPNSSTGAWDNQKGHPLPENQGNAQAPCWGRSSSSTGSEVGGQSTGSNHKAGSSDSHNSGRRSYRPTHPDCQAVLQTLLSRTDLDPRVLSNTGWGQTQIKQDTVWDIEEVPRPEGKSDKGTEGWESAATQTKNSGGWGDAPSQSNQMKSGWGELSASTEWKDPKNTGGWNDYKNNNSSNWGGGRPDEKTPSSWNENPSKDQGWGGGRQPNQGWSSGKNGWGEEVDQTKNSNWESSASKPVSGWGEGGQNEIGTWGNGGNASLASKGGWEDCKRSPAWNETGRQPNSWNKQHQQQQPPQQPPPPQPEASGSWGGPPPPPPGNVRPSNSSWSSGPQPATPKDEEPSGWEEPSPQSISRKMDIDDGTSAWGDPNSYNYKNVNLWDKNSQGGPAPREPNLPTPMTSKSASVWSKSTPPAPDNGTSAWGEPNESSPGWGEMDDTGASTTGWGNTPANAPNAMKPNSKSMQDGWGESDGPVTGARHPSWEEEEDGGVWNTTGSQGSASSHNSASWGQGGKKQMKCSLKGGNNDSWMNPLAKQFSNMGLLSQTEDNPSSKMDLSVGSLSDKKFDVDKRAMNLGDFNDIMRKDRSGFRPPNSKDMGTTDSGPYFEKLTLPFSNQDGCLGDEAPCSPFSPSPSYKLSPSGSTLPNVSLGAIGTGLNPQNFAARQGGSHGLFGNSTAQSRGLHTPVQPLNSSPSLRAQVPPQFISPQVSASMLKQFPNSGLSPGLFNVGPQLSPQQIAMLSQLPQIPQFQLACQLLLQQQQQQQLLQNQRKISQAVRQQQEQQLARMVSALQQQQQQQQRQPGMKHSPSHPVGPKPHLDNMVPNALNVGLPDLQTKGPIPGYGSGFSSGGMDYGMVGGKEAGTESRFKQWTSMMEGLPSVATQEANMHKNGAIVAPGKTRGGSPYNQFDIIPGDTLGGHTGPAGDSWLPAKSPPTNKIGSKSSNASWPPEFQPGVPWKGIQNIDPESDPYVTPGSVLGGTATSPIVDTDHQLLRDNTTGSNSSLNTSLPSPGAWPYSASDNSFTNVHSTSAKFPDYKSTWSPDPIGHNPTHLSNKMWKNHISSRNTTPLPRPPPGLTNPKPSSPWSSTAPRSVRGWGTQDSRLASASTWSDGGSVRPSYWLVLHNLTPQIDGSTLRTICMQHGPLLTFHLNLTQGTALIRYSTKQEAAKAQTALHMCVLGNTTILAEFATDDEVSRFLAQAQPPTPAATPSAPAAGWQSLETGQNQSDPVGPALNLFGGSTGLGQWSSSAGGSSGADLAGASLWGPPNYSSSLWGVPTVEDPHRMGSPAPLLPGDLLGGGSDSI

SEQ ID NO: 6538 - protein, 482 aa, Homo sapiens
MTMSKEAVTFKDVAVVFTEEELGLLDLAQRKLYRDVMLENFRNLLSVGHQPFHRDTFHFLREEKFWMMDIATQREGNSGGKIQPEMKTFPEAGPHEGWSCQQIWEEIASDLTRPQDSTIKSSQFFEQGDAHSQVEEGLSIMHTGQKPSNCGKCKQSFSDMSIFDLPQQIRSAEKSHSCDECGKSFCYISALHIHQRVHLGEKLFKCDVCGKEFSQSLHLQTHQRVHTGEKPFKCEQCGRGFRCRSALTVHCKLHMGEKHYNCEACGRAFIHDFQLQKHQRIHTGEKPFKCEICSVSFRLRSSLNRHCVVHTGKKPNSTGEYGKGFIRRLDLCKHQTIHTGEKPYNCKECGKSFRRSSYLLIHQRVHTGEKPYKCDKCGKSYITKSGLDLHHRAHTGERPYNCDDCGKSFRQASSILNHKRLHCRKKPFKCEDCGKKLVYRSYRKDQQKNHSGENPSKCEDCGKRYKRRLNLDIILSLFLNDT

SEQ ID NO: 6539 - protein, 75 aa, Homo sapiens
MEENLISMREDHSFHVRYRMEASCLELALEGERLCKSGDCRAGVSFFEAAVQVGTEDLKTLSAIYSQLGNAYFYL

SEQ ID NO: 6540 - protein, 188 aa, Homo sapiens
MKEESAAQLGCCHRPMALGGTGGSLSPSLDFQLFRGDQVFSACRPLPDMVDAHGPSCASWLCPLPLAPGRSALLACLQDLDLNLCTPQPAPLGTDLQGLQEDALSMKHEPPGLQASSTDDKKFTVKYPQNKDKLGKQPERAGEGAPCPAFSSHNSSSPPPLQNRKSPSPLAFCPCPPVNSISKELPFL

SEQ ID NO: 6541 - protein, 108 aa, Homo sapiens
IPHATFKAMAYKEGTMLNCECKRGFRRIKSGSLYMLCTGNSSHSSWDNQCQCTSSATRNTTKQVTPQPEEQKERKTTEMQSPMQPVDQASLPDFQIQTEMAATMETSI

SEQ ID NO: 6542 - protein, 646 aa, Homo sapiens
MSFLSRQQPPPPRRAGAACTLRQKLIFSPCSDCEEEEEEEEEEGSGHSTGEDSAFQEPDSPLPPARSPTEPGPERRRSPGPAPGSPGELEEDLLLPGACPGADEAGGGAEGDSWEEEGFGSSSPVKSPAAPYFLGSSFSPVRCGGPGDASPRGCGARRAGEGRRSPRPDHPGTPPHKTFRKLRLFDTPHTPKSLLSKARGIDSSSVKLRGSSLFMDTEKSGKREFDVRQTPQVNINPFTPDSLLLHSSGQCRRRKRTYWNDSCGEDMEASDYELEDETRPAKRITITESNMKSRYTTEFHELEKIGSGEFGSVFKCVKRLDGCIYAIKRSKKPLAGSVDEQNALREVYAHAVLGQHSHVVRYFSAWAEDDHMLIQNEYCNGGSLADAISENYRIMSYFKEAELKDLLLQVGRGLRYIHSMSLVHMDIKPSNIFISRTSIPNAASEEGDEDDWASNKVMFKIGDLGHVTRISSPQVEEGDSRFLANEVLQENYTHLPKADIFALALTVVCAAGAEPLPRNGDQWHEIRQGRLPRIPQVLSQEFTELLKVMIHPDPERRPSAMALVKHSVLLSASRKSAEQLRIELNAEKFKNSLLQKELKKAQMAKAAAEERALFTDRMATRSTTQSNRTSRLIGKKMNRSVSLTIY

SEQ ID NO: 6543 - protein, 544 aa, Homo sapiens
MRSSKLQSPSPSQEKQGVYLQETAMETWSVEQVCSWLVEKNLGELVHRFQEEEVSGAALLALNDRMVQQLVKKIGHQAVLMDLIKKYKQNTQGLKSPENPKKAALVMQTEAARDYRDEESSSPARHGEQMPSFYPAENLDNGLIDQRVLKQRRNVKQILARSKALQWTKSYVLPEFPYDVKCMLAEQKCPDHSMRIRIIEFLQADMTKYLEGSLYPSTQQYNDVVNALLQAHPFLDEDGCGFFLWKRALKDRFKYVRRPIEDDEQVIRNKCKFGHRRGQTRKSLADIRFDEIKLVQIKEEAVCFDSELDEHIKWFQQEYVKTEKDWREIDKRMSQTLEIRRKMIGSRTPLKDILKLFPFLKCPYQMFREFQLLTRTDIYKKTRHILESYSENILTSFSVVDNPINIVLQEKMKHYTDEDMLKYMKMTATCLLLPDVFGDDPSLFVIMNEQVQVSTPVLEVKNPFNMEVCEFSLYLERERLTKVDDCVTALAALVAAFHVFRIECPRRLSQTFNFLETLIFDMHSPYFPSLKEKENEVGFQHPLT

SEQ ID NO: 6544 - protein, 106 aa, Homo sapiens
KECIRALGQNKAHTPFRESKLTQVLRDSFIGENSRTCMIATISPGISSCEYTLNTLRYADRQGCHSIPLEPQASKPGRCHIPLLSKEEEELSSQMSSFNEAMTQIR

SEQ ID NO: 6545 - protein, 272 aa, Homo sapiens
MSPKRIAKRRSPPADAIPKSKKVKVSHRSHSTEPGLVLTLGQGDVGQLGLGENVMERKKPALVSIPEDVVQAEAGGMHTVCLSKSGQVYSFGCNDEGALGRDTSVEGSEMVPGKVELQEKVVQVSAGDSHTAALTDDGRVFLWGSFRDNNGVIGLLEPMKKSMVPVQVQLDVPVVKVASGNDHLVMLTADGDLYTLGCGEQGQLGRVPELFANRGGRQGLERLLVPKCVMLKSRGSRGHVRFQDAFCGAYFTFAISHEGHVYGFGLSNYHQL

SEQ ID NO: 6546 - protein, 204 aa, Homo sapiens
MPRIPGICHCKICKSQEKTLKIAKMLLSQNAFIFRSLNLVLMVYISLVFGISYDSPDYTDESCTFKISLRNFRSILSWELKNHSIVPTHYTLLYTIMSKPEDLKVVKNCANTTRSFCDLTDEWRSTHEAYVTVLEGFSGNTTLFSCSHNFWLAIDMSFEPPEFEIVGFTNHINVMVKFPSIVEEELQFDLSLVIEEQSEGIVKK

SEQ ID NO: 6547 - protein, 97 aa, Homo sapiens
MSGGSADYNSREHGGPEGMDPDGVIESNWNEIVDNFDDMNLKESLLRGIYAYGFEKPSAIQQRAIIPCIKDPKGNSGTWRLYGSHLSCLHWWNKCSK

SEQ ID NO: 6548 - protein, 306 aa, Homo sapiens
MDTLDRVVKPKTKRAKRFLEKREPKLNENIKNAMLIKGGNANATVTKVLKDVYALKKPYGVLYKKKNITRPFEDQTSLEFFSKKSDCSLFMFGSHNKKRPNNLVIGRMYDYHVLDMIELGIENFVSLKDIKNSKCPEGTKPMLIFAGDDFDVTEDYRRLKSLLIDFFRGPTVSNIRLAGLEYVLHFTALNGKIYFRSYKLLLKKSGCRTPRIELEEMGPSLDLVLRRTHLASDDLYKLSMKMPKALKPKKKKNISHDTFGTTYGRIHMQKQDLSKLQTRKMKGLKKRPAERITEDHEKKSKRIKKN

SEQ ID NO: 6549 - protein, 118 aa, Homo sapiens
MCGIWALFGSDDCLSVQCLSAMKIAHRGPDAFRFENVNGYTNCCFGFHRLAVVDPLFGMQPIRVKKYPYLWLCYNGEIYNHKKMQQHFEFEYQTKVDGEIILHLYDKGGIEQTICMLD

SEQ ID NO: 6550 - protein, 115 aa, Homo sapiens
MAYFPGTGRTDQETQLDLSLCGREPESLENLFLDPDMAQEKMKLGFKSLPSSTTADGNILRRVNSAPLINGLGFNSQVLQADMLRIRTNRTTFRNRRSLEITSPTSVEQKPKDLF

SEQ ID NO: 6551 - protein, 83 aa, Homo sapiens
MLRLPTVFRQMRPVSRVLAPHLTRAYAKDVKFGADARALMLQGVDLLADAVAVTMGPKGRTVIIEQSWGSPKVTKDGVTVAKS

SEQ ID NO: 6552 - protein, 246 aa, Homo sapiens
MSGPDVETPSAIQICRIMRPDDANVAGNVHGGTILKMIEEAGAIISTRHCNSQNGERCVAALARVERTDFLSPMCIGEVAHVSAEITYTSKHSVEVQVNVMSENILTGAKKLTNKATLWYVPLSLKNVDKVLEVPPVVYSRQEQEEEGRKRYEAQKLERMETKWRNGDIVQPVLNPEPNTVSYSQSSLIHLVGPSDCTLHGFVHGGVTMKLMDEVAGIVAARHCKTNIVTASVDAINFHDKIRKAP

SEQ ID NO: 6553 - protein, 377 aa, Homo sapiens
MSQWYELQQLDSKFLEQVHQLYDDSFPMEIRQYLAQWLEKQDWEHAANDVSFATIRFHDLLSQLDDQYSRFSLENNFLLQHNIRKSKRNLQDNFQEDPIQMSMIIYSCLKEERKILENAQRFNQCIEHEIKSLEDLQDEYDFKCKTLQNREHETNGVAKSDQKQEQLLLKKMYLMLDNKRKEVVHKIIELLNVTELTQNALINDELVEWKRRQQSACIGGPPNACLDQLQNWFTIVAESLQQVRQQLKKLEELEQKYTYEHDPITKNKQVLWDRTFSLFQQLIQSSFVVERQPCMPTHPQRPLVLKTGVQFTVKLRLLVKLQELNYNLKVKVLFDKDVNERNTVKGFRKFNILGTHTKVMNMEESTNGSLAAEFRHL

SEQ ID NO: 6554 - protein, 638 aa, Homo sapiens
MTLLIRVLLQERGAQDRRIQDLETELEKMEARLNAALREKTSLSANNATLEKQLIELTRTNELLKSKFSENGNQKNLRILSLELMKLRNKRETKMRGMMAKQEGMEMKLQVTQRSLEESQGKIAQLEGKLVSIEKEKIDEKSETEKLLEYIEEISCASDQVEKYKLDIAQLEENLKEKNDEILSLKQSLEENIVILSKQVEDLNVKCQLLEKEKEDHVNRNREHNENLNAEMQNLKQKFILEQQEREKLQQKELQIDSLLQQEKELSSSLHQKLCSFQEEMVKEKNLFEEELKQTLDELDKLQQKEEQAERLVKQLEEEAKSRAEELKLLEEKLKGKEAELEKSSAAHTQATLLLQEKYDSMVQSLEDVTAQFESYKALTASEIEDLKLENSSLQEKAAKAGKNAEDVQHQILATESSNQEYVRMLLDLQTKSALKETEIKEITVSFLQKITDLQNQLKQQEEDFRKQLEDEEGRKAEKENTTAELTEEINKWRLLYEELYNKTKPFQLQLDAFEVEKQALLNEHGAAQEQLNKIRDSYAKLLGHQNLKQKIKHVVKLKDENSQLKSEVSKLRCQLAKKKQSETKLQEELNKVLGIKHFDPSKAFHHESKENFALKTPLKEGNTNCYRAPMECQESWK

SEQ ID NO: 6555 - protein, 230 aa, Homo sapiens
MSPKRIAKRRSPPADAIPKSKKVKVSHRSHSTEPGLVLTLGQGDVGQLGLGENVMERKKPALVSIPEDVVQAEAGGMHTVCLSKSGQVYSFGCNDEGALGRDTSVEGSEMVPGKVELQEKVVQVSAGDSHTAALTDDGRVFLWGSFRDNNGVIGLLEPMKKSMVPVQVQLDVPVVKVASGNDHLVMLTADGDLYTLGCGEQGQLGRVPELFANRGGRQGLERLLVPKCVM

SEQ ID NO: 6556 - protein, 506 aa, Homo sapiens
MAWNSPSRRPVWQGGAPREDGGARGVWLPSSGQVSAQRTGRRLVGLEPTPTGSLTPRPPRPVPGMPRARKGNTLRKGGQRRGGGARSSAQADSGSSDDEAASEARSTASECPSLLSTTAEDSLGGDVVDEQGQQEDLEEKLKEYVDCLTDKSAKTRQGALESLRLALASRLLPDFLLERRLTLADALEKCLKKGKGEEQALAAAVLGLLCVQLGPGPKGEELFHSLQPLLVSVLSDSTASPAARLHCASALGLGCYVAAADIQDLVSCLACLESVFSRFYGLGGSSTSPVVPASLHGLLSAALQAWALLLTICPSTQISHILDRQLPRLPQLLSSESVNLRIAAGETIALLFELARDLEEEFVYEDMEALCSVLRTLATDSNKYRAKADRRRQRSTFRAVLHSVEGGECEEEIVRFGFEVLYMDSWARHRIYAAFKEVLGSGMHHHLQNNELLRDIFGLGPVLLLDATALKACKVPRFEKHLYNAAAFKARTKARSRVRDKRADIL

SEQ ID NO: 6557 - protein, 146 aa, Homo sapiens
MLEAHMQSYKGNDPLGEWERYIQWVEENFPENKEYLITLLEHLMKEFLDKKKYHNDPRFISYCLKFAEYNSDLHQFFEFLYNHGIGTLSSPLYIAWAGHLEAQGELQHASAVLQRGIQNQAEPREFLQQQYRLFQTRLTETHLPAQ

SEQ ID NO: 6558 - protein, 102 aa, Homo sapiens
MANDSPAKSLVDIDLSSLRDPAGIFELVEVVGNGTYGQVYKGRHVKTGQLAAIKVMDVTEDEEEEIKLEINMLKKYSHHRNIATYYGAFIKKSPPGHDDQLW

SEQ ID NO: 6559 - protein, 414 aa, Homo sapiens
MEDIQTNAELKSTQEQSVPAESAAVLNDYSLTKSHEMENVDSGEGPANEDEDIGDDSMKVKDEYSERDENVLKSEPMGNAEEPEIPYSYSREYNEYENIKLERHVVSFDSSRPTSGKMNCDVCGLSCISFNVLMVHKRSHTASAEARHIKAEMGSERALVLDRLASNVAKRKSSMPQKFIGEKRHCFDVNYNSSYMYEKESELIQTRMMDQAINNAISYLGAEALRPLVQTPPAPTSEMVPVISSMYPIALTRAEMSNGAPQELEKKSIHLPEKSVPSERGLSPNNSGHDSTDTDSNHEERQNHIYQQNHMVLSRARNGMPLLKEVPRSYELLKPPPICPRDSVKVINKEGEVMDVYRCDHCRVLFLDYVMFTIHMGCHGFRDPFECNMCGYRSHDRYEFSSHIARGEHRALLK

SEQ ID NO: 6560 - protein, 222 aa, Homo sapiens
MAGQPGHMPHGGSSNNLCHTLGPVHPPDPQRHPNTLSFRCSLADFQIEKKIGRGQFSEVYKATCLLDRKTVALKKVQIFEMMDAKARQDCVKEIGLLKQLNHPNIIKYLDSFIEDNELNIVLELADAGDLSQMIKYFKKQKRLIPERTVWKYFVQLCSAVEHMHSRRVMHRDIKPANVFITATGVVKLGDLGLGRFFSSETTAAHSLVGTPYYMSPERIHEN

SEQ ID NO: 6561 - protein, 160 aa, Homo sapiens
MVAHDETGGLLPIKRTIRVLDVNNQSFREQEELTHIFGDLDSYIPLHEDLLTRIGEATKPDGTVEQIGHILVSWLPRLNAYRGYCSNQLAAKALLDQKKQDPRVQDFLQRCLESPFSRKLDLWSFLDIPRSRLVKYPLLLKEILKHTPKEHPDVQLLEDA

SEQ ID NO: 6562 - protein, 175 aa, Homo sapiens
ALITCPVPACGNPTIHPGQCCPSCADDFVVQKPELSTPSICHAPGGEYFVEGETWNIDSCTQCTCHSGRVLCETEVCPPLLCQNPSRTQDSCCPQCTDQPFRPSLSRNNSVPNYCKNDEGDIFLAAESWKPDVCTSCICIDSVISCFSESCPSVSCERPVLRKGQCCPYCIGGQT

SEQ ID NO: 6563 - protein, 169 aa, Homo sapiens
MWPDDLQNHTFLHTVYCQDGSPSVGLSEAYDEDQLFFFDFSQNTRVPRLPEFADWAQEQGDAPAILFDKEFCEWMIQQIGPKLDGKIPVSRGFPIAEVFTLKPLEFGKPNTLVCFVSNLFPPMLTVNWQHHSVPVEGFGPTFVSAVDGLSFQAFSYLNFTPEPSDIFSC

SEQ ID NO: 6564 - protein, 59 aa, Homo sapiens
VEEFLYEKLDRKVPSRVTNGELLAQYMADAASELGPTTPYGSCCVTQTGVQWCNHSLLL

SEQ ID NO: 6565 - protein, 145 aa, Homo sapiens
METLSFPRYNVAEIVIHIRNKILTGADGKNLTKNDLYPNPKPEVLHMIYMRALQIVYGIRLEHFYMMPVNSEVMYPHLMEGFLPFSNLVTHLDSFLPICRVNDFETADILCPKAKRTSRFLSGIINFIHFREACRETYMEFLWQY

SEQ ID NO: 6566 - protein, 708 aa, Homo sapiens
MSFKDKDERISCLEAYVTLTSKSSRFTDETEILKMSQRHSGQAGTEAGNGADSPPIVNSKYSTFRDFCSTSSFQDSGYNELKSCSFDNIDKEYLGKKEKGPTLLYEHPETSGLGLTHPLESPTQKKKCILPRKEKDKTPELCETPKISGKKCLPRRRLNVSFALLKGDFESQNSSLESSISQVINLEKNIPSSASGFSRANNFSPLVTSTLKTEEVTSCSQKLRLNFSQQKTSTIDDSKDDCSLFEVECISPIQGNNFKDSITHDFSDSSLCINDENACPELLGSSVSGTTCGTDEDIFVTPISNLVANIRFNASQILSPSPEVRGSISTPEDSGFNSLSLEKSEDSLSDQEGSFQELLQKHKGTPKVGDTIRKTRHLGRSRRLSTLREQSSQSETEEEKQIVHPDSEKRAAAASAISEGQLSSDESGDLTFSLKNLSKTPALQLVHELFMKSKRKRLQENSGHEFLEQGDGEKIAVLQCILAGLIGKKMGIEKLDILTELKYRNLKHILAMVLESLTAESLCSVWKVSRNWREIVVQDKNANRRRKFYITQLKTDSEGAVLNVEDAATRLQLLNRSALRSVQAQARIPGSQREQGSTLSPWGEVLTPLASSSVTHLSSKQEEYVKVAKTLFTDEALKPCPRCQSPAKYQPYKKRGLCSRTACGFDFCVLCLCAYHGSEECSRGAAKPRNRKDALPGSAQSKRNLKRL

SEQ ID NO: 6567 - protein, 139 aa, Homo sapiens
PPGLEAARQKLALRRKKVLSTEEMELYELAQAAGGGIDPDVFKILVDLLKLNVAPLAVFQMLKSMCAGQRLASEPQDPAAVSLPTSSVPETRGLSDNLRTRRRLNKISHSSYGGQRSSTAWCGRRRRTCTSNWLKLQRH

SEQ ID NO: 6568 - protein, 516 aa, Homo sapiens
MSPEAQPQRTKGPQQPCRSPIVKPGLPSFRPSSCTQPWLTHSWSTCAAWTLIHHPSQPGTLASSVPLYHAETIKNVRTATESFASDPILYRPVAVALDTKGPEIRTGLIKGSGTAEVELKKGATLKITLDNAYMEKCDENILWLDYKNICKVVEVGSKIYVDDGLISLQVKQKGADFLVTEVENGGSLGSKKGVNLPGAAVDLPAVSEKDIQDLKFGVEQDVDMVFASFIRKASDVHEVRKVLGEKGKNIKIISKIENHEGVRRFDEILEASDGIMVARGDLGIEIPAEKVFLAQKMMIGRCNRAGKPVICATQMLESMIKKPRPTRAEGSDVANAVLDGADCIMLSGETAKGDYPLEAVRMQHLIAREAEAAIYHLQLFEELRRLAPITSDPTEATAVGAVEASFKCCSGAIIVLTKSGRSAHQVARYRPRAPIIAVTRNPQTARQAHLYRGIFPVLCKDPVQEAWAEDVDLRVNFAMNVGKARGFFKKGDVVIVLTGWRPGSGFTNTMRVVPVP

SEQ ID NO: 6569 - protein, 299 aa, Homo sapiens
MARRPRHSIYSSDEDDEDFEMCDHDYDGLLPKSGKRHLGKTRWTREENRTDVQCQHRWQKVLNPELIKGPWTKEEDQRVIELVQKYGPKRWSVIAKHLKGRIGKQCRERWHNHLNPEVKKTSWTEEEDRIIYQAHKRLGNRWAEIAKLLPGRTDNAIKNHWNSTMRRKVEQEGYLQESSKASQPAVATSFQKNSHLMGFAQAPPTAQLPATGQPTVNNDYSYYHISEAQNVSSHVPYPVALHVNIVNVPQPAAAAIQRHYNDEDPEKEKRIKELELLLMSTENELKGQQVLPVRLSSCA

SEQ ID NO: 6570 - protein, 171 aa, Homo sapiens
MAGQPGHMPHGGSSNNLCHTLGPVHPPDPQRHPNTLSFRCSLADFQIEKKIGRGQFSEVYKATCLLDRKTVALKKVQIFEMMDAKARQDCVKEIGLLKQLNHPNIIKYLDSFIEDNELNIVLELADAGDLSQMIKYFKKQKRLIPERTVWKYFVQLCSAVEHMHSRRVMHR

SEQ ID NO: 6571 - protein, 110 aa, Homo sapiens
MAENSVLTSTTGRTSLADSSIFDSKVTEISKENLLIGSTSYVEEEMPQIETRVILVQEAGKQEELIKALKTIKIMEVPVIKIKESCPGKSDEKLIKSVINMDIKVGFVKM

SEQ ID NO: 6572 - protein, 122 aa, Homo sapiens
MKASGRGRWPGRAPQSSTGRHGVGVSGRGPGCWVLRPTAQWSVEDEEEAVHEQCQHERDRQLQAQDEEGGGHVPERPKQEMLLSLKPSEAPELDEDEGFGDWSQRPEQRQQHEGAQGALDSG

SEQ ID NO: 6573 - protein, 205 aa, Homo sapiens
MTPPERLFLPRVCGTTLHLLLLGLLLVLLPGAQGLPGVGLTPSAAQTARQHPKMHLAHSTLKPAAHLIGDPSKQNSLLWRANTDRAFLQDGFSLSNNSLLVPTSGIYFVYSQVVFSGKAYSPKATSSPLYLAHEVQLFSSQYPFHVPLLSSQKMVYPGLQEPWLHSMYHGAAFQLTQGDQLSTHTDGIPHLVLSPSTVFFGAFAL

SEQ ID NO: 6574 - protein, 204 aa, Homo sapiens
MAENSVLTSTTGRTSLADSSIFDSKVTEISKENLLIGSTSYVEEMPQIETRVILVQEAGKQEELIKALKDIKVGFVKMESVEEFEGLDSPEFENVFVVTDFQDSVFNDLYKADCRVIGPPVVLNCSQKGEPLPFSCRPLYCTSMMNLVLCFTGFRKKEELVRLVTLVHHMGGVIRKDFNSKVTHLVANCTQGEKFRVAVSLGTP

SEQ ID NO: 6575 - protein, 279 aa, Homo sapiens [sequence omitted]

SEQ ID NO: 6576 - protein, 141 aa, Homo sapiens
IIGGYAEFLYQIGLLDEKQKKYFQKQCHECIEHIRKQNWFEAFEVLIYNGQLDIIVAAALTERSLMGMDWKGSQEYKKAEKKVWKIFKSDSEVAGYIRQAGDFHQVIIRGGGHILPYDQPLRAFDMINRFIYGKGWDPYVG

SEQ ID NO: 6577 - protein, 291 aa, Homo sapiens
MRKPRAAVGSGHRKQAASQEGRQKHAKNNSQAKPSACDGMIAECPGAPAGLARQPEEVVLQASVSSYHLFRDVAEVTAFRGSLLSWYDQEKRDLPWRRRAEDEMDLDRRAYAVWVSEVMLQQTQVATVINYYTGWMQKWPTLQDLASASLEEVNQLWAGLGYYSRGRRLQEGARKVVEELGGHMPRTAETLQQLLPGVGRYTAGAIASIAFGQATGVVDGNVARVLCRVRAIGADPSSTLVSQQLWGLAQQLVDPARPGDFNQAAMELGATVCTPQRPLCSQCPVESLCRA

SEQ ID NO: 6578 - protein, 161 aa, Homo sapiens
MSRESDVEAQQSHGSSACSQPHGSVTQSQGSSSQSQGISSSSTSTMPNSSQSSHSSSGTLSSLETVSTQELYSIPEDQEPEDQEPEEPTPAPWARLWALQDGFANLECVNDNYWFGRDKSCEYCFDEPLLKRTDKYRTYSKKHFRIFREENLSCPYRIWFK

SEQ ID NO: 6579 - protein, 122 aa, Homo sapiens
MLGTLRAMEGEDVEDDQLLQKLRASRRRFQRRMQRLIEKYNQPFEDTPVVQMATLTYETPQGLRIWGGRLIKERNEGEIQDSSMKPADRTDGSVQAAAWGPELPSHRTVLGAACSASKPFEK

SEQ ID NO: 6580 - protein, 140 aa, Homo sapiens
MAKQPSDVSSECDREGRQLQPAERPPQLRPGAPTSLQTEPQGNPEGNHGGEGDSCPHGSPQGPLAPPASPGPFATRSPLFIFMRRSSLLSRSSSGYFSFDTDRSPAPMSCDKSTQTPSPPCQAFNHYLSAMVREIEEVVV

SEQ ID NO: 6581 - protein, 168 aa, Homo sapiens
DFLGIAWSDAVLHHEDLIGKPGGVSLSKIERSTDQVIKPVNLEALSKWTGHIPGDVVRDMAQIAPMLAQLGYDPYANPPNYGNPDPFVINNTQRVSVHLYLWKCTLGDMGLLQMWKLQPPEEMFSLSIPGHLICSCLMDTVNYMIACISILLGLQGSSKPTGSLSLIL

SEQ ID NO: 6582 - protein, 436 aa, Homo sapiens
MEDIQTNAELKSTQEQSVPADDSMKVKDEYSERDENVLKSEPMGNAEEPEIPYSYSREYNEYENIKLERHVVSFDSSRPTSGKMNCDVCGLSCISFNVLMVHKRSHTGERPFQCNQCGASFTQKGNLLRHIKLHTGEKPFKCHLCNYACQRRDALTGHLRTHSASAEARHIKAEMGSERALVLDRLASNVAKRKSSMPQKFIGEKRHCFDVNYNSSYMYEKESELIQTRMMDQAINNAISYLGAEALRPLVQTPPAPTSEMVPVISSMYPIALTRAEMSNGAPQELEKKSIHLPEKSVPSERGLSPNNSGHDSTDTDSNHEERQNHIYQQNHMVLSRARNGMPLLKEVPRSYELLKPPPICPRDSVKVINKEGEVMDVYRCDHCRVLFLDYVMFTIHMGCHGFRDPFECNMCGYRSHDRYEFSSHIARGEHRALLK

SEQ ID NO: 6583 - protein, 76 aa, Homo sapiens
MMLGSPTSPKPGVNAQFLPGFLMGDLPAPVTPQPRSISGPSVGVMEMRSPLLAGGSPPQPVVPAHKDKSGAPPVRS

SEQ ID NO: 6584 - protein, 533 aa, Homo sapiens
MAAPASRQVRRRARAAPRPRSAEDWWWDRLAPRGSGYHLLQSDSMLLVLSEPGPARPRAQRRASRRTPRQPPRGPSAAAKPKAGLRSEAAAAPAPAPAPTPTPEEGPDAGWGDRIPLEILVQIFGLLVAADGPMPFLGRAARVCRRWQEAASQPALWHTVTLSSPLVGRPAKGGVKAEKKLLASLEWLMPNRFSQLQRLTLIHWKSQLVGECCPRLTFLKLSGCHGVTADALVMLAKACCQLHSLDLQHSMVESTAVVSFLEEAGSRMRKLWLTYSSQTTAILGALLGSCCPQLQVLEVSTGINRNSIPLQLPVEALQKGCPQLQVLRLLNLMWLPKPPGRGVAPGPGFPSLEELCLASSTCNFVSNEVLGRLLHGSPNLRLLDLRGCARITPAGLQDLPCRELEQLHLGLYGTSDRLTLAKEGSPFLTQKWCHTLRELDLSGQGFSEKDLEQALAAFLSTPGGSHPALCSLNLRGTRVTPSTVSSVISGCPGLLYLNLESCRCLPRGLKRAYRGLEEVQWCLEQLLTSPSPS

SEQ ID NO: 6585 - protein, 854 aa, Homo sapiens
MPGGGPQGAPAAAGGGGVSHRAGSRDCLPPAACFRRRRLARRPGYMRSSTGPGIGFLSPAVGTLFRFPGGVSGEESHHSESRARQCGLDSRGLLVRSPVSKSAAAPTVTSVRGTSAHFGIQLRGGTRLPDRLSWPCGPGSAGWQQEFAAMDSSETLDASWEAACSDGARRVRAAGSLPSAELSSNSCSPGCGPEVPPTPPGSHSAFTSSFSFIRLSLGSAGERGEAEGCPPSREAESHCQSPQEMGAKAASLDGPHEDPRCLSRPFSLLATRVSADLAQAARNSSRPERDMHSLPDMDPGSSSSLDPSLAGCGGDGSSGSGDAHSWDTLLRKWEPVLRDCLLRNRRQMEVISLRLKLQKLQEDAVENDDYDKAETLQQRLEDLEQEKISLHFQLPSRQPALSSFLGHLAAQVQAALRRGATQQASGDDTHTPLRMEPRLLEPTAQDSLHVSITRRDWLLQEKQQLQKEIEALQARMFVLEAKDQQLRREIEEQEQQLQWQGCDLTPLVGQLSLGQLQEVSKALQDTLASAGQIPFHAEPPETIRSLQERIKSLNLSLKEITTKVCMSEKFCSTLRKKVNDIETQLPALLEAKMHAISGNHFWTAKDLTEEIRSLTSEREGLEGLLSKLLVLSSRNVKKLGSVKEDYNRLRREVEHQETAYETSVKENTMKYMETLKNKLCSCKCPLLGKVWEADLEACRLLIQSLQLQEARGSLSVEDERQMDDLEGAAPPIPPRLHSEDKRKTPLKVLEEWKTHLIPSLHCAGGEQKEESYILSAELGEKCEDIGKKLLYLEDQLHTAIHSHDEDLIQSLRRELQMVKETLQAMILQLQPAKEAGEREAAASCMTAGVHEAQA

SEQ ID NO: 6586 - protein, 186 aa, Homo sapiens
MISNYRNGSELVCFNSGVGCFLIGCDWAFTVLVNTFFSFLRRKTDFFIGGEEGMAEKLITQTFSHHNQLAQKTRREKRARQEAERREKAERAARLAKEAKSETSGPQIKELTDEEAERLQLEIDQKKDAENHEAQLKNGSLDSPGKQDTEEDEEEDEKDKGKLKPNLGNGADLPNYRWTQTLSELD

SEQ ID NO: 6587 - protein, 184 aa, Homo sapiens
MHLEPQSMVWLPVLHRVAAAETAKHQAKCNICKECPIVGFRYRSLKHFNYDVCQSCFFSGRTAKGHKLHYPMVEYCIPTTSGEDVRDFTKVLKNKFRSKKYFAKHPRLGYLPVQTVLEGDNLETPSQSPQLFHDDTHSRIEQYATRLAQMERTNGSFLTDSSSTTGSVEDEHALIQQYCQTLGG

SEQ ID NO: 6588 - protein, 206 aa, Homo sapiens
NSLGVEKAGAAACAPGPCRACVWVVVSAMVLASLELLREQWIRAKYERQEFIYPEKQEPYSAGYREGFLWKRGRDNGQFLSRKFVLTEREGALKYFNRNDAKEPKAVMKIEHLNATFQPAKIGHPHGLQVTYLKDNSTRNIFIYHEDGKEIVDWFNALRAARFHYLQVAFPGAGDADLVPKLSRNYLKEGYMEKTGPKQTEGFRKR

SEQ ID NO: 6589 - protein, 749 aa, Homo sapiens
MALPLLPGNSFNRNVGKEKFHKSQHWGFCNNVMMLVSDEKPGIGGEPLLGQKIKPKCSIYPKGDGSDVPSWVAFDKQVLSFDAYLEEEVLDKSQTNYRIRYYKIYFYPEDDTIQVNEPEVKNSGLLQGTSIRRHRITLPPPDEDQFYTVYHFNVGTEVVFYGRTFKIYDCDAFTRNFLRKIGVKVNPPVQCPEDPYMKIRREVVEHVEPLRPYESLDTLKQFLQYHGKILCFFCLWDDSVSMFGDRRELILHYFLCDDTIEIKELLPHSSGRDALKMFLRRSKLPKNCPPRVYQPGQITDRAVLNSYGDFIKNQADGYLFDRYKLGKVDQEFYKDSDLSLGVTINVWGRKVLLYDCDEFTKSYYKSKYGIENFTSVSCKPPSPPPKIERKFPPYNGFGSEEDSLRNCIDLKPTPHRRNFKKFMEKDSYGSKSNILRFFAKLVTDKCVDLDRMFVISYYLGDDTISVFEPIERNSGIAGGMFLKRSRVKKPGQEVFKSELSEYIKAEELYIGVTVNVNGYLFRLLNADEYTLNYMEQNTDKYPFSNLKLALQKLKQEEGKSRELKQVFKAADSKHTNMVDYNTFRDILMSLTVGNLAEQEFVTIARHYRVPEGTCSDMDFLIALAHEKFKKNMFENFDTFIYSCVYEDREKKNVLPTKDIKRLCKSSRLPLSDDLLESLLSRFEDSEKQIDYKSFFSALNWRKNPVPELQPASYLKERCEDVWLGMPSPIPAKYIDYWTFLKDAFGLEEE

SEQ ID NO: 6590 - protein, 193 aa, Homo sapiens
PQWVFDSVNARLLLPVAEYFSGVQLPPHLSPFVTEKEGDYVPPEKLKLLALQRGEDPGNLNESEEEEEEDDNNEGDGDEEGENEEEEEDAEAGSEKEEEARLAALEEQRMEGKPRVMAGTLKLEDKQRLAQEEESEAKRLAIMMMKKREKYLYQKIMFGKRRKIREANKLAEKRKAHDEAVRSEKKAKKARPE

SEQ ID NO: 6591 - protein, 280 aa, Homo sapiens
GYIIGNYTSSLGSQVRYACREGFFSVPEDTVSSCTGLGTWESPKLHCQEINCGNPPEMRHAILVGNHSSRLGGVARYVCQEGFESPGGKITSVCTEKGTWRESTLTCTEILTKINDVSLFNDTCVRWQINSRRINPKISYVISIKGQRLDPMESVREETVNLTTDSRTPEVCLALYPGTNYTVNISTAPPRRSMPAVIGFQTAGSRNSHGRNTHIKEVDLLEDDGSFNISIFNETCLKLNRRSRKVGSEHMYQFTVLGQRWYLANFSHATSFNFTTREQV

SEQ ID NO: 6592 - protein, 145 aa, Homo sapiens
MGVEGTGRGGCRLGGPDGKGKGWAPVDATARLPHPQRLSLPLLQLQPEPCFSLVAQMRPWWSPDYLHSLGKARTAQVQKDARIGEAEAKRDAGIREAKAKQEKVSAQYLSEIEMAKAQRDYELKKAAYDIEVNTRRAQADLAYQL

SEQ ID NO: 6593 - protein, 64 aa, Homo sapiens
ADSMLLALQLSMAENNKQSQLLDFLSGKQYAVGDETDLSIPTSPTSKYNRDNEKVLINCGHVFY

SEQ ID NO: 6594 - protein, 493 aa, Homo sapiens
MSKGPAVGIDLGTTYSCVGVFQHGKVEIIANDQGNRTTPSYVAFTDTERLIGDAAKNQVAMNPTNTVFDAKRLIGRRFDDAVVQSDMKHWPFMVVNDAGRPKVQVEYKGETKSFYPEEVSSMVLTKMKEIAEAYLGKTVTNAVVTVPAYFNDSQRQATKDAGTIAGLNVLRIINEPTAAAIAYGLDKKVGAERNVLIFDLGGGTFDVSILTIEDGIFEVKSTAGDTHLGGEDFDNRMVNHFIAEFKRKHKKDISENKRAVRRLRTACERAKRTLSSSTQASIEIDSLYEGIDFYTSITRARFEELNADLFRGTLDPVEKALRDAKLDKSQIHDIVLVGGSTRIPKIQKLLQDFFNGKELNKSINPDEAVAYGAAVQAAILSGDKSENVQDLLLLDVTPLSLGIETAGGVMTVLIKRNTTIPTKQTQTFTTYSDNQPGVLIQVYEGERAMTKDNNLLGKFELTGMPGGMPGGFPGGGAPPSGGASSGPTIEEVD

SEQ ID NO: 6595 - protein, 289 aa, Homo sapiens
MSRESDVEAQQSHGSSACSQPHGSVTQSQGSSSQSQGISSSSTSTMPNSSQSSHSSSGTLSSLETVSTQELYSIPEDQEPEDQEPEEPTPAPWARLWALQDGFANLECVNDNYWFGRDKSCEYCFDEPLLKRTDKYRTYSKKHFRIFREVGPKNSYIAYIEDHSGNGTFVNTELVGKGKRRPLNNNSEIALSLSRNKVFVFFDLTVDDQSVYPKALRDEYIMSKTLGSGACGEVKLAFERKTCKKVAIKIISKRKFAIGSAREADPALNVETEIEILKKLNHDGRGRAV

SEQ ID NO: 6596 - protein, 69 aa, Homo sapiens
MACASPWLGQRMPGGNNPTPTPSHPRTLRAVEALSSNPAGPGLVCAGSGRQQPESQTWRVPSSARRGGS

SEQ ID NO: 6597 - protein, 151 aa, Homo sapiens
APAASQPSGCGKHNSPERKVYMDYNATTPLEPEVIQAMTKAMWEAWGNPSSPYSAGRKAKDIINAARESLAKMIGGKPQDIIFTSGGTESNNLVIHSVVKHFHANQTSKGHTGGHHSPVKGAKPHFITSSVEHDSIRLPLEHLVEEQVAGE

SEQ ID NO: 6598 - protein, 132 aa, Homo sapiens
MDLSANQDEETDQETFQLEIDRDTKKCAFRTHTGKYWTLTATGGVQSTASSKNASCYFDIEWRDRRITLRASNGKFVTSKKNGQLAASVETAGDSELFLMKLINRPIIVFRGEHGFIGCRKVTGTLDANRSS

SEQ ID NO: 6599 - protein, 58 aa, Homo sapiens
MALLRDVSLQDPRDRFELLQRVGAGTYGDVYKARDTVTSELAAVKIVKLDPAGNHHPA

SEQ ID NO: 6600 - protein, 165 aa, Homo sapiens
MSRESDVEAQQSHGSSACSQPHGSVTQSQGSSSQSQGISSSSTSTMPNSSQSSHSSSGTLSSLETVSTQELYSIPEDQEPEDQEPEEPTPAPWARLWALQDGFANLECVNDNYWFGRDKSCEYCFDEPLLKRTDKYRTYSKKHFRIFREENLSCPYRIWFNFCLF

SEQ ID NO: 6601 - protein, 122 aa, Homo sapiens
MLGAVEGPRWKQAEDIRDIYDFRDVLGTIKHPNIVALDDIYESGGHLYLIMQLVSGGELFDRIVEKGFYTERDASRLIFQVLDAVKYLHDLGIVHRDLKPENLLYYSLDEDSKIMISDFGLS

SEQ ID NO: 6602 - protein, 118 aa, Homo sapiens
CFLEDATIGNSNKMSISPGVAGPGGVAGSGEGEPGEDAVAAFTEVLNPSKSFMKFGINFFQTPVNVDSLTSSHESQMFLTACRLVIFSRRFSTYFAQIHLRNHSVLHLCPHKIYLLKN

SEQ ID NO: 6603 - protein, 120 aa, Homo sapiens
GSAAPPGLEAARQKLALRRKKVLSTEEMELYELAQAAGGAIDPDVFKEKQRQRCPRGSIGPGGTQQPRRIQPEDATPAQRYQAAQGGRAWEEPYTGQHLGWGRDLLHLCPQQRLHVTSFN

SEQ ID NO: 6604 - protein, 165 aa, Homo sapiens
MGSALGRARRTLSGRPFQRAPCKTRRALSLSAALRNVTKAQGGCPKSLVLWGCRPKRPRKRRTSLKLAWRGTFCSSSLKISEDTHEDHDTSTENTDESNHDPQFEPIVSLPEQEIKTLEEDEEELFKMRAKLFRFASENDLPEWKERGTGDVKLLKHKEKGAIRL

SEQ ID NO: 6605 - protein, 119 aa, Homo sapiens
MKVRECISVHVGQAGVQMGNACWELYCLEHGIQPDGQMPSDKTIGGGDDSFTTFFCETGAGKHVPRAVFVDLEPTVIDEIRNGPYRQLFHPEQLITGKEDAANNYARGHYTIGKEIIDP

SEQ ID NO: 6606 - protein, 120 aa, Homo sapiens
MELDLFLGLDDVFPRLLHGLLHRAFSVFLFNTENKLLLQQRSDAKITFPGCFTNTCCSHPLSNPAELEESDALGVRRAAQRRLKAELGIPLEEVTSSPTQPYKLKPKHTIKRFLIKFLNS

SEQ ID NO: 6607 - protein, 961 aa, Homo sapiens
MRWPQPGAAARLPPESPGPPESPGPPEREAAAARRWTGAEPQDCAPGSGRPEKPPQLSEDDIWLKSEGDNYSATLLEPAASSLSPDHKNMEIEVSVAECKSVPGITSTPHPMDHPSAFYSPPHNGLLTDHHESLDNDVAREIRYLDEVLEANCCDSAVDGTYNGTSSPEPGAVVLVGGLSPPVHEATQPEPTERTASRQAPPHIELSNSSPDPMAEAERTNGHSPSQPRDALGDSLQVPVSPSSTTSSRCSSRDGEFTLTTLKKEAKFELRAFHEDKKPSKLFEDDEHEKEQYCIRKVRPSEEMLELEKERRELIRSQAVKKNPGIAAKWWNPPQEKTIEEQLDEEHLESHKKYKERKERRAQQEQLLLQKQLQQQQQQPPSQLCTAPASSHERASMIDKAKEDIVTEQIDFSAARKQFQLMENSRQAVAKGQSTPRLFSIKPFYRPLGSVNSDKPLTNPRPPSVGGPPEDSGASAAKGQKSPGALETPSAAGSQGNTASQGKEGPYSEPSKRGPLSKLWAEDGEFTSARAVLTVVKDDDHGILDQFSRSVNVSLTQEELDSGLDELSVRSQDTTVLETLSNDFSMDNISDSGASNETTNALQENSLADFSLPQTPQTDNPSEGRGEGVSKSFSDHGFYSPSSTLGDSPLVDDPLEYQAGLLVQNAIQQAIAEQVDKAVSKTSRDGAEQQGPEATVEEAEAAAFGSEKPQSMFEPPQVSSPVQEKRDVLPKILPAEDRALRERGPPQPLPAVQPSGPINMEETRPEGSYFSKYSEAAELRSTASLLATQESDVMVGPFKLRSRKQRTLSMIEEEIRAAQEREEELKRQRQVLQSTQSPRTKNAPSLPSRTCYKTAPGKIEKVKPPPSPTTEGPSLQPDLAPEEAAGTQRPKNLMQTLMEDYETHKSKRRERMDDSSYTSKLLSCKVTSEVLEATRVNRRKSALALRWEAGIYANQEEEDNE

SEQ ID NO: 6608 - protein, 423 aa, Homo sapiens
MNYSITVSIVMGIPTVKREVKSYLIETLHSLIDNLYPEEKLDCVIVVFIGETDIDYVHGVVANLEKEFSKEISSGLVEVISPPESYYPDLTNLKETFGDSKERVRWRTKQNLDYCFLMMYAQEKGIYYIQLEDDIIVKQNYFNTIKNFALQLSSEEWMILEFSQLGFIGKMFQAPDLTLIVEFIFMFYKEKPIDWLLDHILWVKVCNPEKDAKHCDRQKANLRIRFRPSLFQHVGLHSSLSGKIQKLTDKDYMKPLLLKIHVNPPAEVSTSLKVYQGHTLEKTYMGEDFFWAITPIAGDYILFKFDKPVNVESYLFHSGNQEHPGDILLNTTVEVLPFKSEGLEISKETKDKRLEDGYFRIGKFENGVAEGMVDPSLNPISAFRLSVIQNSAVWAILNEQRVFSGWWQKSRDKAEGPQAPLLF

SEQ ID NO: 6609 - protein, 86 aa, Homo sapiens
MGPRRRSRKPEAPRRRSPSPTPTPGPSRRGPSLGASSHQHSRRRQGWLKEIRKLQKSTHLLIRKLPFSRLIPFPILGDCLSSPNYW

SEQ ID NO: 6610 - protein, 169 aa, Homo sapiens
MAERPTAAPRSMTHAKRARQPLSEASNQQPLSGGEEKSCTKPSPSKKRCSDNTEVEVSNLENKQPVESTSAKSCSPSPVSPQVQPQAADTISDSVAVPASLLGMRRGLNSRLEATAASSVKTRMQKLAEQRRRWDNDDMTDDIPESSLFSPMPSEEKAASPPRPLLSNA

SEQ ID NO: 6611 - protein, 146 aa, Homo sapiens
MDRSKENCISGPVKATAPVGGPKRVLVTQQFPCQNPLPVNSGQAQRVLCPSNSSQRIPLQAQKLVSSHKPVQNQKQKQLQATSVPHPVSRPLNNTQKSKQPLPSAPENNPEEELASKQKNEESKKRQWALEDFEIGRPLGKGKFGN

SEQ ID NO: 6612 - protein, 106 aa, Homo sapiens
MDRSKENCISGPVKATAPVGGPKRVLVTQQFPCQNPLPVNSGQAQRVLCPSNSSQRIPLQAQKLVSSHKPVQNQKQKQLQATSVPHPVSRPLNNTQKSKQPLPSAP

SEQ ID NO: 6613 - protein, 106 aa, Homo sapiens
MATSIGVSFSVGDGVPEAEKNAGEPENTYILRPVFQQRFRPSVVKDCIHAVLKEELANAEYSPEEMPQLTKHLSENIKDKLKEMGFDRYKMVVQVVIGEQRGEGVF

SEQ ID NO: 6614 - protein, 607 aa, Homo sapiens
MGPPGPETRGHPHSASSPSERVFPMPLPRKAPLNIPGTPVLEDFPQNDDEKERLQRRRSRVFDLQFSTDSPRLLASPSSRSIDISATIPKFTNTQITEHYSTCIKLSTENKITTKNAFGLHLIDFMSEILKQKDTEPTNFKVAAGTLDASTKIYAVRVDAVHADVYRVLGGLGKDAPSLEEVEGHVADGSATEMGTTKKAVKPKKKHLHRTIEQNINNLNVSEADRKCEIDPMFQKTAASFDECSTAGVFLSTLHCQDYRSELLFPSDVQTLSTGEPLELPELGCVEMTDLKAPLQQCAEDRQICPSLAGFQFTQWDSETHNESVSALVDKFKKNDQVFDINAEVDESDCGDFPDGSLGDDFDANDEPDHTAVGDHEEFRSWKEPCQVQSCQEEMISLGDGDIRTMCPLLSMKPGEYSYFSPRTMSMWAGPDHWRFRPRRKQDAPSQSENKKKSTKKDFEIDFEDDIDFDVYFRKTKAATILTKSTLENQNWRATTLPTDFNYNVDTLVQLHLKPGTRLLKMAQGHRVETEHYEEIEDYDYNNPNDTSNFCPGLQAADSDDEDLDDLFVGPVGNSDLSPYPCHPPKTAQQNGDTPEAQGLDITTYGE

SEQ ID NO: 6615 - protein, 348 aa, Homo sapiens
MERPEAGGINSNECENVSRKKKMSEEFEANTMDSLVDMPFATVDIQDDCGITDEPQINLKRSQENEWVKSDQVKKRKKKRKDYQPNYFLSIPITNKEIIKGIKILQNAIIQQDERLAKAMVSDGSFHITLLVMQLLNEDEVNIGIDALLELKPFIEELLQGKHLTLPFQGIGTFGNQVGFVKLAEGDHVNSLLEIAETANRTFQEKGILVGESRSFKPHLTFMKLSKSPWLRKNGVKKIDPDLYEKFISHRFGEEILYRIDLCSMLKKKQSNGYYHCESSIVIGEKNGGEPDDAELVRLSKRLVENAVLKAVQQYLEETQNKNKPGEGSSVKTEAADQNGNDNENNRK

SEQ ID NO: 6616 - protein, 264 aa, Homo sapiens
MSPKRIAKRRSPPADAIPKSKKVKVSHRSHSTEPGLVLTLGQGDVGQLGLGENVMERKKPALVSIPEDVVQAEAGGMHTVCLSKSGQVYSFGCNDEGALGRDTSVEGSEMVPGKVELQEKVVQVSAGDSHTAALTDDGRVFLWGSFRHCLFHTSQRLGWGKEVWRQGLSHLRVSKDNNGVIGLLEPMKKSMVPVQVQLDVPVVKVASGNDHLVMLTADGDLYTLGCGEQGQLGRVPELFANRGGRQGLERLLVPKCVMLKSRGS

SEQ ID NO: 6617 - protein, 623 aa, Homo sapiens
MESYHKPDQQKLQALKDTANRLRISSIQATTAAGSGHPTSCCSAAEIMAVLFFHTMRYKSQDPRNPHNDRFVLSKGHAAPILYAVWAEAGFLAEAELLNLRKISSDLDGHPVPKQAFTDVATGSLGQGLGAACGMAYTGKYFDKASYRVYCLLGDGELSEGSVWEAMAFASIYKLDNLVAILDINRLGQSDPAPLQHQMDIYQKRCEAFGWHAIIVDGHSVEELCKAFGQAKHQPTAIIAKTFKGRGITGVEDKESWHGKPLPKNMAEQIIQEIYSQIQSKKKILATPPQEDAPSVDIANIRMPSLPSYKVGDKIATRKAYGQALAKLGHASDRIIALDGDTKNSTFSEIFKKEHPDRFIECYIAEQNMVSIAVGCATRNRTVPFCSTFAAFFTRAFDQIRMAAISESNINLCGSHCGVSIGEDGPSQMALEDLAMFRSVPTSTVFYPSDGVATEKAVELAANTKGICFIRTSRPENAIIYNNNEDFQVGQAKVVLKSKDDQVTVIGAGVTLHEALAAAELLKKEKINIRVLDPFTIKPLDRKLILDSARATKGRILTVEDHYYEGGIGEAVSSAVVGEPGITVTHLAVNRVPRSGKPAELLKMFGIDRDAIAQAVRGLITKA

SEQ ID NO: 6618 - protein, 50 aa, Homo sapiens
MLATRLSRPLSRLPGKTLSACDRENGARRPLLLGSTSFIPIGRRTYASAA

SEQ ID NO: 6619 - protein, 174 aa, Homo sapiens
MGAYKYIQELWRKKQSDVMRFLLRVRCWQYRQLSALHRAPRPTRPDKARRLGYKAKQGYVIYRIRVRRGGRKRPVPKGATYGKPVHHGVNQLKFARSLQSVAEERAGRHCGALRVLNSYWVGEDSTYKFFEVILIDPFHKAIRRNPDTQWITKPVHKHREMRGLTSAGRKSRGL

SEQ ID NO: 6620 - protein, 193 aa, Homo sapiens
MAKGDPKKPKGKMSAYAFFVQTCREEHKKKNPEVPVNFAEFSKKCSERWKTMSGKEKSKFDEMAKADKVRYDREMKDYGPAKGGKKKKDPNAPKRPPSGFFLFCSEFRPKIKSTNPGISIGDVAKKLGEMWNNLNDSEKQPYITKAAKLKEKYEKDVADYKSKGKFDGAKGPAKVARKKVEEEDEEEEEEEEE

SEQ ID NO: 6621 - protein, 107 aa, Homo sapiens
MAPPWVPAMGFTLAPSLGCFVGSRFVHGEGLRWYAGLQKPSWHPPHWVLGPVWGTLYSAMGYGSYLVWKELGGFTEKAVVPLGLYTGQLALNWAWPPIFFGARQMGW

SEQ ID NO: 6622 - protein, 598 aa, Homo sapiens
MFVSDFRKEFYEVVQSQRVLLFVASDVDALCACKILQALFQCDHVQYTLVPVSGWQELETAFLEHKEQFHYFILINCGANVDLLDILQPDEDTIFFVCDTHRPVNVVNVYNDTQIKLLIKQDDDLEVPAYEDIFRDEEEDEEHSGNDSDGSEPSEKRTRLEEEIVEQTMRRRQRREWEARSGSGSEPVAAALEKSSRLFAGPMSDRTAPRSPRRDILFDYEQYEYHGTSSAMVMFELAWMLSKDLNDMLWWAIVGLTDQWVQDKITQMKYVTDVGVLQRHVSRHNHRNEDEENTLSVDCTRISFEYDLRLVLYQHWSLHDSLCNTSYTAARFKLWSVHGQKRLQEFLADMGLPLKQVKQKFQAMDISLKENLREMIEESANKFGMKDMRVQTFSIHFGFKHKFLASDVVFATMSLMESPEKDGSGTDHFIQALDSLSRSNLDKLYHGLELAKKQLRATQQTIASCLCTNLVISQGPFLYCSLMEGTPDVMLFSRPASLSLLSKHLLKSFVCSTKNRRCKLLPLVMAAPLSMEHGTVTVVGIPPETDSSDRKNFFGRAFEKAAESTSSRMLHNHFDLSVIELKAEDRSKFLDALISLLS

SEQ ID NO: 6623 - protein, 628 aa, Homo sapiens
MTIRHQGQQYRPRMAFLQKIEALVKDMQNPETGVRMQNQRVLVTSVPHAMTGSDVLQWIVQRLWISSLEAQNLGNFIVRYGYIYPLQDPKNLILKPDGSLYRFQTPYFWPTQQWPAEDTDYAIYLAKRNIKKKGILEEYEKENYNFLNQKMNYKWDFVIMQAKEQYRAGKERNKADRYALDCQEKAYWLVHRCPPGMDNVLDYGLDRVTNPNEVKKQTVVAVKKEIMYYQQALMRSTVKSSVSLGGIVKYSEQFSSNDAIMSGCLPSNPWITDDTQFWDLNAKLVEIPTKMRVERWAFNFSELIRDPKGRQSFQYFLKKEFSGENLGFWEACEDLKYGDQSKVKEKAEEIYKLFLAPGARRWINIDGKTMDITVKGLKHPHRYVLDAAQTHIYMLMKKDSYARYLKSPIYKDMLAKAIEPQETTKKSSTLPFMRRHLRSSPSPVILRQLEEEAKAREAANTVDITQPGQHMAPSPHLTVYTGTCMPPSPSSPFSSSCRSPRKPFASPSRFIRRPSTTICPSPIRVALESSSGLEQKGECSGSMAPRGPSVTESSEASLDTSWPRSRPRAPPKARMALSFSRFLRRGCLASPVFARLSPKCPAVSHGRVQPLGDVGQQLPRLKSKRVAK

SEQ ID NO: 6624 - protein, 137 aa, Homo sapiens
MGSRTPESPLHAVQLRWGPRRRPPLLPLLLLLLPPPPRVGGFNLDAEAPAVLSGPPGSFFGFSVEFYRPGTDGLSAPGVLTVQLRGRGACGVQVLAVVRGNSSSPWLLHLGMRSTVQLAHREGATERPRGHLLPLHR

SEQ ID NO: 6625 - protein, 169 aa, Homo sapiens
MGLADASGPRDTQALLSATQAMDLRRRDYHMERPLLNQEHLEELGRWGSAPRTHQWRTWLQCSRARAYALLLQHLPVLVWLPRYPVRDWLLGDLLSGLSVAIMQLPQGLAYALLAGLPPVFGLYSSFYPVFIYFLFGTSRHISVATPGPLPLLTAPGRPTGGAGPDPLR

SEQ ID NO: 6626 - protein, 156 aa, Homo sapiens
PPGGVPGTQPLLPNSMDPTRQQGHPNMGGSMQRMNPPRGMGPMGPGPQNYGSGMRPPPNSLGPAMPGINMGPGAGRPWPNPNSANSIPYSSSSPGTYVGPPGGGGPPGTPIMPSPADSTNSSDNIYTMINPVPPGGSRSNVSLLSNNLHIRHHNKS

SEQ ID NO: 6627 - protein, 136 aa, Homo sapiens
MESEMETQSARAEEGFTQVTRKGGRRAKKRQAEQLSAAGEGGDAGRMDTEEARPAKRPVFPPLCGDGLLSGKEETRKIPVPANRYTPLKENWMKIFTPIVEHLGLQIRFNLKSRNVEIRCMQVVRPGAVGLRNISI

SEQ ID NO: 6628 - protein, 58 aa, Homo sapiens
GYLPSSCTRMLHRPWGSSAWMWRTWAWTSLQSWGTRTENTPMIAGLGKVSPGELEEMS

SEQ ID NO: 6629 - protein, 216 aa, Homo sapiens
MSSEAETQQPPAAPPAAPALSAADTKPGTTGSGAGSGGPGGLTSAAPAGGDKKVIATKVLGTVKWFNVRNGYGFINRNDTKEDVFVHQGAEAANVTGPGGVPVQGSKYAADRNHYRRYPRRRGPPRNYQQNYQNSESGEKNEGSESAPEGQAQQRRPYRRRRFPPYYMRRPYGRRPQYSNPPVQGEVMEGADNQGAGEQGRPVRQNMYRGYRPRFR

SEQ ID NO: 6630 - protein, 566 aa, Homo sapiens
MEVPQPEPAPGSALSPAGVCGGAQRPGHLPGLLLGSHGLLGSPVRAAASSPVTTLTQTMHDLAGLGSRSRLTHLSLSRRASESSLSSESSESSDAGLCMDSPSPMDPHMAEQTFEQAIQAASRIIRNEQFAIRRFQSMPVRLLGHSPVLRNITNSQAPDGRRKSEAGSGAASSSGEDKENDGFVFKMPWKPTHPSSTHALAEWASRREAFAQRPSSAPDLMCLSPDRKMEVEELSPLALGRFSLTPAEGDTEEDDGFVDILESDLKDDDAVPPGMESLISAPLVKTLEKEEEKDLVMYSKCQRLFRSPSMPCSVIRPILKRLERPQDRDTPVQNKRRRSVTPPEEQQEAEEPKARVLRSKSLCHDEIENLLDSDHRELIGDYSKAFLLQTVDGKHQDLKYISPETMVALLTGKFSNIVDKFVIVDCRYPYEYEGGHIKTAVNLPLERDAESFLLKSPIAPCSLDKRVILIFHCEFSSERGPRMCRFIRERDRAVNDYPSLYYPEMYILKGGYKEFFPQHPNFCEPQDYRPMNHEAFKDELKTFRLKTRSWAGERSRRELCSRLQDQ

SEQ ID NO: 6631 - protein, 153 aa, Homo sapiens
MVQAHGGRSRAQPLTLSLGAAMTQPPPEKTPAKKHVRLQESGGLCLQAGLQCGSDAGRSVPGGRRTHLLCEHTPGGHPTLSAHCWTPPYPLGPSAPATQPQATGRRILEDPFKLCQPRRPGHPWPRLQGPIQDHLAKSPEPCLSRPGTEPGGR

SEQ ID NO: 6632 - protein, 146 aa, Homo sapiens
MTEGVKTLGWTKQKGGCHWGRSEGPWLLRLSVGRRRAATLLDGVCRASSCQLCPGHHIGMHQLHRCWGVREEHHRQADEDHPRGWLLRGGMPAVPGGCLQQHHPVHHGHCQSHGQPADRLCRPLQSGRRQAAICTVLHRRGARRAP

SEQ ID NO: 6633 - protein, 108 aa, Homo sapiens
PKSRFCRGVPDAKIRIFDLGRKKAKVDEFPLCGHMVSDEYEQLSSEALEAARICANKYMVKSCGKDGFHIRVRLHPFHVIRINKMLSCAGADRPTLLCQCWETSRNTS

SEQ ID NO: 6634 - protein, 396 aa, Homo sapiens
MGTALVYHEDMTATRLLWDDPECEIERPERLTAALDRLRQRGLEQRCLRLSAREASEEELGLVHSPEYVSLVRETQVLGKEELQALSGQFDAIYFHPSTFHCARLAAGAGLQLVDAVLTGAVQNGLALVRPPGHHGQRAAANGFCVFNNVAIAAAHAKQKHGLHRILVVDWDVHHGQGIQYLFEDDPSVLYFSWHRYEHGRFWPFLRESDADAVGRGQGLGFTVNLPWNQVGMGNADYVAAFLHLLLPLAFEGGYHLESLAESVCMTVQTLLGDPAPPLSGPMAPCQSALESIQSARAAQAPHWKSLQQQDVTAVPMSPSSHSPEGRPPPLLPGGPVCKAAASAPSSLLDQPCLCPAPSVRTAVALTTPDITLVLPPDVIQQEASALREETEAWAR

SEQ ID NO: 6635 - protein, 371 aa, Homo sapiens
MAAAEAANCIMENFVATLANGMSLQPPLEEVSCGQAESSEKPNAEDMTSKDYYFDSYAHFGIHEEMLKDEVRTLTYRNSMFHNRHLFKDKVVLDVGSGTGILCMFAAKAGARKVIGIECSSISDYAVKIVKANKLDHVVTIIKGKVEEVELPVEKVDIIISEWMGYCLFYESMLNTVLYARDKWLAPDGLIFPDRATLYVTAIEDRQYKDYKIHWWENVYGFDMSCIKDVAIKEPLVDVVDPKQLVTNACLIKEVDIYTVKVEDLTFTSPFCLQVKRNDYVHALVAYFNIEFTRCHKRTGFSTSPESPYTHWKQTVFYMEDYLTVKTGEEIFGTIGMRPNAKNNRDLDFTIDLDFKGQLCELSCSTDYRMR

SEQ ID NO: 6636 - protein, 274 aa, Homo sapiens
MATLKDQLIYNLLKEEQTPQNKITVVGVGAVGMACAISILMKDLADELALVDVIEDKLKGEMMDLQHGSLFLRTPKIVSGKVDILTYVAWKISGFPKNRVIGSGCNLDSARFRYLMGERLGVHPLSCHGWVLGEHGDSSVPVWSGMNVAGVSLKTLHPDLGTDKDKEQWKEVHKQVVESAYEVIKLKGYTSWAIGLSVADLAESIMKNLRRVHPVSTMIKGLYGIKDDVFLSVPCILGQNGISDLVKVTLTSEEEARLKKSADTLWGIQKELQF

SEQ ID NO: 6637 - protein, 143 aa, Homo sapiens
MPGNIVFVLKKGNDNWATVMFNGQKGLVPCNYLEPVELRIHPQQQPQEESSPQSDIPAPPSSKAPGRPQLSPGQKQKEEPKEVKLSVPMPYTLKVHYKYTVVMKTQPGLPYSQVRDMVSKKLELRLEHTKLSYRPRDSNELVP

SEQ ID NO: 6638 - protein, 205 aa, Homo sapiens
MSQSNRELVVDFLSYKLSQKGYSWSQFSDVEENRTEAPEGTESEMETPSAINGNPSWHLADSPAVNGATGHSSSLDAREVIPMAAVKQALREAGDEFELRYRRAFSDLTSQLHITPGTAYQSFEQVVNELFRDGVNWGRIVAFFSFGGALCVESVDKEMQVLVSRIAAWMATYLNDHLEPWIQENGGWDTFVELYGNNAAAESRK

SEQ ID NO: 6639 - protein, 160 aa, Homo sapiens
MQMPQGNPLLLSHTLQELLARDTVQVELIPEKKGLFLKHVEYEVSSQRFKSSVYRRYNDFVVFQEMLLHKFPYRMVPALPPKRMLGADREFIEARRRALKRFVNLVARHPLFSEDVVLKLFLSFSGSDVQNKLKESAQCVGDEFLNCKLATRAKDFLPAD

SEQ ID NO: 6640 - protein, 1003 aa, Homo sapiens
MEDYEQELCGVEDDFHNQFAAELEVLAELEGASTPSPSGVPLFTAGRPPRTFEEALARGDAASSPAPAASVGSSQGGARKRQVDADLQPAGSLPHGRLAALPQGLRSGREAEEASGSLHVSPPAPRIKRPRLQVVKRLNFRSEEMEEPPPPDSSPTDITPPPSPEDLAELWGHGVSEAAADVGLTRASPAARNPVLRRPPILEDYVHVTSTEGVRAYLVLRADPMAPGVQGSLLHVPWRGGGQLDLLGVSLASLKKQVDGERRERLLQEAQKLSDTLHSLRSGEEEAAQPLGAPEEEPTDGQDASSHCLWVDEFAPRHYTELLSDDFTNRCLLKWLKLWDLVVFGHERPSRKPRPSVEPARVSKEATAPGKWKSHEQVLEEMLEAGLDPSQRPKQKVALLCGPPGLGKTTLAHVIARHAGYSVVEMNASDDRSPEVFRTRIEAATQMESVLGAGGKPNCLVIDEIDGAPVAAINVLLSILNRKGPQEVGPQGPAVPSGGGRRRRAEGGLLMRPIICICNDQFAPSLRQLKQQAFLLHFPPTLPSRLVQRLQEVSLRQGMRADPGVLAALCEKTDNDIRACINTLQFLYSRGQRELSVRDVQATRVGLKDQRRGLFSVWQEVFQLPRAQRRRVGQDPALPADTLLLGDGDAGSLTSASQRFYRVLHAAASAGEHEKVVQGLFDNFLRLRLRDSSLGAVCVALDWLAFDDLLAGAAHHSQSFQLLRYPPFLPVAFHVLFASSHTPRITFPSSQQEAQNRMSQMRNLIQTLVSGIAPATRSRATPQALLLDALCLLLDILAPKLRPVSTQLYSTREKQQLASLVGTMLAYSLTYRQERTPDGQYIYRLEPNVEELCRFPELPARKPLTYQTKQLIAREIEVEKMRRAEASARVENSPQVDGSPPGLEGLLGGIGEKGVHRPAPRNHEQRLEHIMRRAAREEQPEKDFFGRVVVRSTAVPSAGDTAPEQDSVERRMGTAVGRSEVWFRFNEGVSNAVRRSLYIRDLL

SEQ ID NO: 6641 - protein, 53 aa, Homo sapiens
MKDQSLRKLQQEMDSLTFRNLQLAKRVELLQDELALSEPRGKKNKDCLRMVNT

SEQ ID NO: 6642 - protein, 637 aa, Homo sapiens
MASLGANPRRTPQGPRPGAASSGFPSPAPVPGPREAEEEEVEEEEELAEIHLCVLWNSGYLGIAYYDTSDSTIHFMPDAPDHESLKLLQRVLDEINPQSVVTSAKQDENMTRFLGKLASQEHREPKRPEIIFLPSVDFGLEISKQRLLSGNYSFIPDAMTATEKILFLSSIIPFDCLLTVRALGGLLKFLGRRRIGVELEDYNVSVPILGFKKFMLTHLVNIDQDTYSVLQIFKSESHPSVYKVASGLKEGLSLFGILNRCHCKWGEKLLRLWFTRPTHDLGELSSRLDVIQFFLLPQNLDMAQMLHRLLGHIKNVPLILKRMKLSHTKVSDWQVLYKTVYSALGLRDACRSLPQSIQLFRDIAQEFSDDLHHIASLIGKVVDFEGSLAENRFTVLPNIDPEIDEKKRRLMGLPSFLTEVARKELENLDSRIPSCSVIYIPLIGFLLSIPRLPSMVEASDFEINGLDFMFLSEEKLHYRSARTKELDALLGDLHCEIRDQETLLMYQLQCQVLARAAVLTRVLDLASRLDVLLALASAARDYGYSRPRYSPQVLGVRIQNGRHPLMELCARTFVPNSTECGGDKGRVKVITGPNSSGKSIYLKQLRIHLPWPLHLHDRPQPGGESSEQCHCTVAGPY

SEQ ID NO: 6643 - protein, 135 aa, Homo sapiens
MAAARPSLGRVLPGSSVLFLCDMQEKFRHNIAYFPQIVSVAARMLKNTTLDLLDRGLQVHVVVDACSSRSQVDRLVALARMRQSGAFLSTSEGLILQLVGDAVHPQFKEIQKLIKEPAPDSGLLGLFQGQNSLLH

SEQ ID NO: 6644 - protein, 161 aa, Homo sapiens
MNKHQKPVLTGQRFKTRKRDEKEKFEPTVFRDTLVQGLNEAGDDLEAVAKFLDSTGSRLDYRRYADTLFDILVAGSMLAPGGTRIDDGDKTKMTNHCVFSANEDHETIRNYAQVFNKLIRRYKYLEKAFEDEMKKALRPHLLSSFSKHGWQKKMPTLLPRL

SEQ ID NO: 6645 - protein, 141 aa, Homo sapiens
MCAINGRRSGADAWPRGPRCAAPRACAVPRRRLPGLTPNEAPRRRPQGMEKINFSGGEPFLQDRGEYLGKLVRFCKVELRLPSVSIVSNGSLIRERWFQNYGEYLDILAISCDSFDEEVNVLIGRGQGKKNHVENLQKLRR

SEQ ID NO: 6646 - protein, 469 aa, Homo sapiens
MMRLGGRLVLNTKEELANERLMTLKIAEMKEAMRTLIFPPSMHFFQAKHLIERSQVFNILRMMPKGAALHLHDIGIVTMDWLVRNVTYRPHCHICFTPRGIMQFRFAHPTPRPSEKCSKWILLEDYRKRVQNVTEFDDSLLRNFTLVTQHPEVIYTNQNVVWSKFETIFFTISGLIHYAPVFRDYVFRSMQEFYEDNVLYMEIRARLLPVYELSGEHHDEEWSVKTYQEVAQKFVETHPEFIGIKIIYSDHRSKDVAVIAESIRMAMGLRIKFPTVVAGFDLVGHEDTGHSLHDYKEALMIPAKDGVKLPYFFHAGETDWQGTSIDRNILDALMLNTTRIGHGFALSKHPAVRTYSWKKDIPIEVCPISNQVLKLVSDLRNHPVATLMATGHPMVISSDDPAMFGAKGLSYDFYEVFMGIGGMKADLRTLKQLAMNSIKYSTLLESEKNTFMEIWKKRWDKFIADVATK

SEQ ID NO: 6647 - protein, 178 aa, Homo sapiens
MASFLVWPLRTALRGGKSWAGPGVGCGGDGARGGGELSLSNLDLPGAGEAGLEHHPLLGHLFISAVPRWPHLSSQSGVEPPDRWTGTPGWPSRDQEAPGSMMPPAAAQPSAHGALVPPATAHEPVDHPALHWLACCCCLSLPGQLPLAIRLGWDLDLEAGPSSGKLCPRARRWQPLPS

SEQ ID NO: 6648 - protein, 36 aa, Homo sapiens
MAERPTAAPRSMTHAKRARQPLSEASNQQPLSGGEG

SEQ ID NO: 6649 - protein, 280 aa, Homo sapiens
MAMQMQLEANADTSVEEESFGPQPISRLEQCGINANDVKKLEEAGFHTVEAVAYAPKKELINIKGISEAKADKILAEAAKLVPMGFTTATEFHQRRSEIIQITTGSKELDKLLQGGIETGSITEMFGEFRTGKTQICHTLAVTCQLPIDRGGGEGKAMYIDTEGTFRPERLLAVAERYGLSGSDVLDNVAYARAFNTDHQTQLLYQASAMMVESRYALLIVDSATALYRTDYSGRGELSARQMHLARFLRMLLRLADEIVSEERKRGNQNLQNLRLSLSS

SEQ ID NO: 6650 - protein, 62 aa, Homo sapiens
MFLRQELPVRLANIMKEISLLPDNLLRTPSVQLVQSWYIQSLQELLDFKDKSAEDAKAIYEE

SEQ ID NO: 6651 - protein, 135 aa, Homo sapiens
MGIQGLLQFIKEASEPIHVRKYKGQVVAVDTYCWLHKGAIACAEKLAKGEPTDRYVGFCMKFVNMLLSHGIKPILVFDGCTLPSKKEVERSRRERRQANLLKGKQLLREGKVSEARECFTRSINITHAMAHKVIK

SEQ ID NO: 6652 - protein, 129 aa, Homo sapiens
MNAAASSYPMASLYVGDLHSDVTEAMLYEKFSPAGPVLSIRVCRDMITRRSLGYAYVNFQQPADAERALDTMNFDVIKGKPIRIMWSQRDPSLRKSGVGNVFIKNLDKSIDNKALYDTFSAFGNILSCK

SEQ ID NO: 6653 - protein, 148 aa, Homo sapiens
MFSEQAAQRAHTLLSPPSANNATFARVPVATYTNSSQPFRLGERSFSRQYAHIYATRLIQMRPFLENRAQQHWGSGVGVKKLCELQPEEKCCVVGTLFKAMPLQPSILREVSEEHNLLPQPPRSKYIHPDDELVLEDELQRIKLKGTI

SEQ ID NO: 6654 - protein, 122 aa, Homo sapiens
MKEESAAQLGCCHRPMALGGTGGSLSPSLDFQLFRGDQSTSHQGCRPAPPMTRNSQSSTHRTRTSWENSQKELARGPPAQPSPLITALPHHRCRTERAPAPWLSAPVPLSTPSPRSSHFSST

SEQ ID NO: 6655 - protein, 404 aa, Homo sapiens
MVGKTFTYLLGSDAAALLFNSKNEDLNAEDVYSRLTTPVFGKGVAYDVPNPVFLEQKKMLKSGLNIAHFKQHVSIIEKETKEYFESWGESGEKNVFEALSELIILTASHCLHGKEIRSQLNEKVAQLYADLDGGFSHAAWLLPGWLPLPSFRRRDRAHREIKDIFYKAIQKRRQSQEKIDDILQTLLDATYKDGRPLTDDEVAGMLIGLLLAGQHTSSTTSAWMGFFLARDKTLQKKCYLEQKTVCGENLPPLTYDQLKDLNLLDRCIKETLRLRPPIMIMMRMARTPQTVAGYTIPPGHQVCVSPTVNQRLKDSWVERLDFNPDRYLQDNPASGEKFAYVPFGAGRHRCIGENFAYVQIKTIWSTMLRLYEFDLIDGYFPTVNYTTMIHTPENPVIRYKRRSK

SEQ ID NO: 6656 - protein, 103 aa, Homo sapiens
PNRIIEIANKTPKISQLYKQASGTMVYGLFMLQKKSVHKKNTIYEIQDNTGSMDVVGSGKWHNIKCEKGDKLRLFCLQLRTVDRKLKLVIKAKKNKEGPMNVN

SEQ ID NO: 6657 - protein, 258 aa, Homo sapiens
MPCVQAQYGSSPQGASPASQSYSYHSSGEYSSDFLTPEFVKFSMDLTNTEITATTSLPSFSTFMDNYSTGYDVKPPCLYQMPLSGQQSSIKVEDIQMHNYQQHSHLPPQSEEMMPHSGSVYYKPSSPPTPTTPGFQVQHSPMWDDPGSLHNFHQNYVATTHMIEQRKTPVSRLSLFSFKQSPPGTPVSSCQMRFDGPLHVPMNPEPAGSHHVVDGQTFAVPNPIRKPASMGFPGLQIGHASQLLDTQVPSPPSRGSPS

SEQ ID NO: 6658 - protein, 483 aa, Homo sapiens
MAIRAQHSNAAQTQTGEANRGWTGQESLSDSDPEMWELLQREKDRQCRGLELIASENFCSRAALEALGSCLNNKYSEGYPGKRYYGGAEVVDEIELLCQRRALEAFDLDPAQWGVNVQPYSGSPANLAVYTALLQPHDRIMGLDLPDGGHLTHGYMSDVKRISATSIFFESMPYKLNPKTGLIDYNQLALTARLFRPRLIIAGTSAYARLIDYARMREVCDEVKAHLLADMAHISGLVAAKVIPSPFKHADIVTTTTHKTLRGARSGLIFYRKGVKAVDPKTGREIPYTFEDRINFAVFPSLQGGPHNHAIAAVAVALKQACTPMFREYSLQVLKNARAMADALLERGYSLVSGGTDNHLVLVDLRPKGLDGARAERVLELVSITANKNTCPGDRSAITPGGLRLGAPALTSRQFREDDFRRVVDFIDEGVNIGLEVKSKTAKLQDFKSFLLKDSETSQRLANLRQRVEQFARAFPMPGFDEH

SEQ ID NO: 6659 - protein, 122 aa, Homo sapiens
MAGGKAGKDSGKAKAKAVSRSQRAGLQFPVGRIHRHLKTRTTSHGRVGATAAVYSAAILEYLTAEVLELAGNASKDLKVKRITPRHLQLAIRGDEELDSLIKATIAGGGMYYYLSLDSYWSF

SEQ ID NO: 6660 - protein, 557 aa, Homo sapiens
MAGAGLRAAARRWLLCGGHGGPRAASSSPSCPGCGPPGPGAHCPGVPRSAPAQAPTSGADLSAHLWARYQDMRRLVHDLLPPEVCSLLNPAAIYANNEISLRDVEVYGFDYDYTLAQYADALHPEIFSTARDILIEHYKYPEGIRKYDYNPSFAIRGLHYDIQKSLLMKIDAFHYVQLGTAYRGLQPVPDEEVIELYGGTQHIPLYQMSGFYGKGPSIKQFMDIFSLPEMALLSCVVDYFLGHSLEFDQAHLYKDVTDAIRDVHVKGLMYQWIEQDMEKYILRGDETFAVLSRLVAHGKQLFLITNSPFSFVDKGMRHMVGPDWRQLFDVVIVQADKPSFFTDRRKPFRKLDEKGSLQWDRITRLEKGKIYRQGNLFDFLRLTEWRGPRVLYFGDHLYSDLADLMLRHGWRTGAIIPELEREIRIINTEQYMHSLTWQQALTGLLERMQTYQDAESRQVLAAWMKERQELRCITKALFNAQFGSIFRTFHNPTYFSRRLVRFSDLYMASLSCLLNYRVDFTFYPRRTPLQHEAPLWMDQLCTGCMKTPFLGDMAHIR

SEQ ID NO: 6661 - protein, 83 aa, Homo sapiens
MAPGCKIMKVMPSKFLCEFVLLQKDLGQLMESRTYAYLCCPPRVSGCTPTLSPRPSRLIMLQMWIPLRNLYSQLWLKALWSLA

SEQ ID NO: 6662 - protein, 63 aa, Homo sapiens
MAGKKVLIVYAHQEPKSFNGSLKNVAVDELSRQGCTVTVSDLYAMNLEPRATDKDITGTLSNP

SEQ ID NO: 6663 - protein, 176 aa, Homo sapiens
MQMPQGNPLLLSHTLQELLARDTVQVELIPEKKGLFLKHVEYEVSSQRFKSSVYRRYNDFVVFQEMLLHKFPYRMVPALPPKRMLGADREFIEARRRALKRFVNLVARHPLFSEDVVLKLFLSFSGSDVQNKLKESAQCVGDEFLNCKLATRAKDFLPADIQAQFAISRELIRNIY

SEQ ID NO: 6664 - protein, 540 aa, Homo sapiens
MKIAHRGPDAFRFENVNGYTNCCFGFHRLAVVDPLFGMQPIRVKKYPYLWLCYNGEIYNHKKMQQHFEFEYQTKVDGEIILHLYDKGGIEQTICMLDGVFAFVLLDTANKKVFLGRDTYGVRPLFKAMTEDGFLAVCSEAKGLVTLKHSATPFLKVEPFLPGHYEVLDLKPNGKVASVEMVKYHHCRDVPLHALYDNVEKLFPGFEIETVKNNLRILFNNAVKKRLMTDRRIGCLLSGGLDSSLVAATLLKQLKEAQVQYPLQTFAIGMEDSPDLLAARKVADHIGSEHYEVLFNSEEGIQALDEVIFSLETYDITTVRASVGMYLISKYIRKNTDSVVIFSGEGSDELTQGYIYFHKAPSPEKAEEESERLLRELYLFDVLRADRTTAAHGLELRVPFLDHRFSSYYLSLPPEMRIPKNGIEKHLLRETFEDSNLIPKEILWRPKEAFSDGITSVKNSWFKILQEYVEHQVDDAMMANAAQKFPFNTPKTKEGYYYRQVFERHYPGRADWLSHYWMPKWINATDPSARTLTHYKSAVKA

SEQ ID NO: 6665 - protein, 108 aa, Homo sapiens
MQEINQNLAEEAGLNITHICLPPDSSEAEIIDEILKINEDTRVHGLALQISENLFSNKVLNALKPEKDVDGVTDINLGKLVRGDAHECFVSPVAKAVIELLEKSASRG

SEQ ID NO: 6666 - protein, 226 aa, Homo sapiens
MDSSQIHSKDPRYGASPLHWAKNAEMARMLLKRGCNVNSTSSAGNTALHVAVMRNRFDCAIVLLTHGANADARGEHGNTPLHLAMSKDNVEMIKALIVFGAEVDTPNDFGETPTFLASKIGRLVTRKAILTLLRTVGAEYCFPPIHGVPAEQGSAAPHHPFSLERAQPPPISLNNLGSHPSQAGWWAWGAASDGTTGSHAHLTGPEASVHPGLHEGREADMQNLSP

SEQ ID NO: 6667 - protein, 1013 aa, Homo sapiens
MDLFRMRCYLASLQGGELPNPKSLLAAASRPSKLALGRLGILSVSSFHALVCSRDDSALRKRTLSLTQRGRNKKGIFSSLKGLDTLARKGKEKRPSITQVDELLHIYGSTVDGVPRDNAWEIQTYVHFQDNHGVTVGIKPEHRVEDILTLACKMRQLEPSHYGLQLRKLVDDNVEYCIPAPYEYMQQQVYDEIEVFPLNVYDVQLTKTGSVCDFGFAVTAQVDERQHLSRIFISDVLPDGLAYGEGLRKGNEIMTLNGEAVSDLDLKQMEALFSEKSVGLTLIARPPDTKATLCTSWSDSDLFSRDQKSLLPPPNQSQLLEEFLDNFKKNTANDFSNVPDITTGLKRSQTDGTLDQVSHREKMEQTFRSAEQITALCRSFNDSQANGMEGPRENQDPPPRSLARHLSDADRLRKVIQELVDTEKSYVKDLSCLFELYLEPLQNETFLTQDEMESLFGSLPEMLEFQKVFLETLEDGISASSDFNTLETPSQFRKLLFSLGGSFLYYADHFKLYSGFCANHIKVQKVLERAKTDKAFKAFLDARNPTKQHSSTLESYLIKPVQRVLKYPLLLKELVSLTDQESEEHYHLTEALKAMEKVASHINEMQKIYEDYGTVFDQLVAEQSGTEKEVTELSMGELLMHSTVSWLNPFLSLGKARKDLELTVFVFKRAVILVYKENCKLKKKLPSNSRPAHNSTDLDPFKFRWLIPISALQVRLGNPAGTENNSIWELIHTKSEIEGRPETIFQLCCSDSESKTNIVKVIRSILRENFRRHIKCELPLEKTCKDRLVPLKNRVPVSAKLASSRSLKVLKNSSSNEWTGETGKGTLLDSDEGSLSSGTQSSGCPTAEGRQDSKSTSPGKYPHPGLADFADNLIKESDILSDEDDDHRQTVKQGSPTKDIEIQFQRLRISEDPDVHPEAEQQPGPESGEGQKGGEQPKLVRGHFCPIKRKANSTKRDRGTLLKAQIRHQSLDSQSENATIDLNSVLEREFSVQSLTSVVSEECFYETESHGKS

SEQ ID NO: 6668 - protein, 302 aa, Homo sapiens
MFQAFPGDYDSGSRCSSSPSAESQYLSSVDSFGSPPTAAASQECAGLGEMPGSFVPTVTAITTSQDLQWLVQPTLISSMAQSQGQPLASQPPVVDPYDMPGTSYSTPGMSGYSSGGASGSGGPSTSGTTSGPGPARPARARPRRPREETETDQLEEEKAELESEIAELQKEKERLEFVLVAHKPGCKIPYEEGPGPGPLAEVRDLPGSAPAKEDGFSWLLPPPPPPPLPFQTSQDAPPNLTASLFTHSEVQVLGDPFPVVNPSYTSSFVLTCPEVSAFAGAQRTSGSDQPSDPLNSPSLLAL

SEQ ID NO: 6669 - protein, 694 aa, Homo sapiens
MLGTLRAMEGEDVEDDQLLQKLRASRRRFQRRMQRLIEKYNQPFEDTPVVQMATLTYETPQGLRIWGGRLIKERNEGEIQPAVPQSPLKNELRRKYLTQVDILLQGAEYFECAGNRAGRDVRVTPLPSLASPAVPAPGYCSRISRKSPGDPAKPASSPREWDPLHPSSTDMALVPRNDSLSLQETSSSSFLSSQPFEDDDICNVTISDLYAGMLHSMSRLLSTKPSSIISTKTFIMQNWNSRRRHRYKSRMNKTYCKGARRSQRSSKENFIPCSEPVKGTGALRDCKNVLDVSCRKTGLKLEKAFLEVNRPQIHKLDPSWKERKVTPSKYSSLIYFDSSATYNLDEENRFRTLKWLISPVKIVSRPTIRQGHGENRQREIEIRFDQLHREYCLSPRNQPRRMCLPDSWAMNMYRGGPASPGGLQGLETRRLSLPSSKAKAKSLSEAFENLGKRSLEAGRCLPKSDSSSSLPKTNPTHSATRPQQTSDLHVQGNSSGIFRKSVSPSKTLSVPDKEVPGHGRNRYDEIKEEFDKLHQKYCLKSPGQMTVPLCIGVSTDKASMEVRYQTEGFLGKLNPDPHFQGFQKLPSSPLGCRKSLLGSTAIEAPSSTCVARAITRDGTRDHQFPAKRPRLSEPQGSGRQGNSLGASDGVDNTVRPGDQGSSSQPNSEERGENTSYRMEEKSDFMLEKLETKSV

SEQ ID NO: 6670 - protein, 830 aa, Homo sapiens
MTPSLSAEENRMYNKMWHQTQEALGALLDKEPQKMIEPQRNQVFIFQTLATFYVKYVQIFRNLENVYDQFVHPQKRILIRKVLDGVMGRILELKNEMVELELTEFHYFDDILQDLKLAPQQLDIPIPKYFLKEKLEVIKGREKILAQILADSGIDTSDMKYPVKSIPFDEAVKLIQIAERARQGRLRALFMKQIYLQEYRAKQSKMLGKKVTDTWAAALRIQKVWRRFHQRKETEKLREEEMIFLGMNPPPLFNEVSATVIQAEKVDRLRNEVQIKHEEDYREALVTIKNDLKLIEGVDIKENLQDQIRHWFIECRNLTGTFPDYPDVEEGGSAIIFSDKTIQQVIEDIIANQEEEEKNKKKKKKKEKQPKKAKKQKKGTKEKNKEEDEKWKMSPSLFLPAMKEGCNAYKEIWMKKDESWNFSQDYDPELIKEEKRKELQSEIRIQVDELMRQELKNLKLAVDRERERPVKAGKKKDKKKGKKGKKKEKKAKKDKDLTADRTIESLYKELVEEGLLIQALKVNLSDYIGEYSYLGTTLRQVSIEPMPSLLDVRQLITLYGIWPLGSAAVHEKAPLVKSLLLAGPSGVGKKMLVHAICTETGANLFNLSSSNIAGKYPGKNGLQMMLHAVFKVARQLQPSVVWIEDTEKTFYKKVPNAEKMNEPKRLKKHLPQILKLLKPDDRILIVGTTRRPFDAELQSFCKVYQKIILVPRPDYASRYVLWKQIIERNGGVLTSALNVSCLAKVTDGFTQGHIVEVVKGVLTDQRIRRQIHKPLTAVEFITAITSMNPVYKEEEESFKNWYAKTPLGKKRALAITGGSTEKAKDKGKRK

SEQ ID NO: 6671 - protein, 445 aa, Homo sapiens
MSLVEAISLWNEGVLAADKKDWKGALDAFSAVQDPHSRICFNIGCMYTILKNMTEAEKAFTRSINRDKHLAVAYFQRGMLYYQTEKYDLAIKDLKEALIQLRGNQLIDYKILGLQFKLFACEVVASVVDQDSFSGFAPLQPQAAEPPPRPKTPEIFRALEGEAHRVLFGFVPETKEELQVMPGNIVFVLKKGNDNWATVMFNGQKGLVPCNYLEPVELRIHPQQQPQEESSPQSDIPAPPSSKAPGRPQLSPGQKQKEEPKEVKLSVPMPYTLKVHYKYTVVMKTQPGLPYSQVRDMVSKKLELRLEHTKLSYRPRDSNELVPLSEDSMKDAWGQVKNYCLTLWCENTVGDQGFPDEPKESEKADANNQTTEPQLKKGSQVEALFSYEATQPEDLEFQEGDIILVLSKVNEEWLEGECKGKVGIFPKVFVEDCATTDLESTRREV

SEQ ID NO: 6672 - protein, 143 aa, Homo sapiens
MAEVPELASEMMAYYSGNEDDLFFEADGPKQMKCSFQDLDLCPLDGGIQLRISDHHYSKGFRQAASVVVAMDKLRKMLVPCPQTFQENDLSTFFPFIFEEEPIFFDTWDNEAYVHDAPVRSLNCTLRDSQQKSLVMSGPYELK

SEQ ID NO: 6673 - protein, 101 aa, Homo sapiens
CQPCHRFCATCAGAGADGCINCTEGYFMEDGRCVQSCSISYYFDHSSENGYKSCKKCDISCLTCNGPGFKNCTSCPSGYLLDLGMCQMGAICKDVSLFRGA

SEQ ID NO: 6674 - protein, 1152 aa, Homo sapiens
MSTLLDIKSSVLRQVQVCPSFRRRTEQDPGSASADPQEPATGAWKPGDGVEFFAHMRLMLKKGEGRQGLPCLEVPLRSGSPAPPEPVDPSLGLRALAPEEVEMLYEEALYTVLYRAGTMGPDQVDDEEALLSYLQQVFGTSLEEHTEAIERVRKAKAPTYALKVSVMRAKNLLAKDPNGFSDPYCMLGILPASDATREPRAQKEQRFGFRKGSKRGGPLPAKCIQVTEVKSSTLNPVWKEHFLFEIEDVSTDQLHLDIWDHDDDVSLVEACRKLNEVIGLKGMGRYFKQIVKSARANGTAGPTEDHTDDFLGCLNIPVREVPVAGVDRWFKLEPRSSASRVQGHCHLVLKLITTQRDTAMSQRGRSGFLSHLLLLSHLLRLEHSAEEPNSSSWRGELSTPAATILCLHGAQSNLSPLQLAVLHWQVSSRHHQTCTLDYSYLLGLLEDMQAHWEEAPSLPQEQEESLADSLSAFSEFGLQLLRQLRDYFPATNSTAVHRLELLLKCLGKLQLFQPSFEICPFESELNMDIAAALKRGNREWYDRILNDKSPREQPGPQRLPGLVVLADAVYDDLQFCYSVYASLFHSILNVDVFTLTFRQLERLVAEEAWVLTEELSPKMTLEVASGLFELYLTLADLQRFWDSIPGRDSRSLALAGIHAPFLPAVKLWFQVLRDQAKWRLQGAVDMDTLEPVDASSRHSSSAATAGLCLSHIQELWVRLAWPDPAQAQGLGTQLGQDVCEATLFYTELLRKKVDTQPGAAGEAVSEALCVVLNNVELVRKAAGQALKGLAWPEGATGPEGVLPRPLLSCTQALDDDLQREAHTVTAHLTSKMVGDIRKYVQHISLSPDSIQNDEAVAPLMKYLDEKLALLNASLVKGNLSRVLEALWELLLQAILQALGANRDVSADFYSRFHFTLEALVSFFHAEGQGLPLESLRDGSYKRLKEELRLHKCSTRECIEQFYLDKLKQRTLEQNRFGRLSVRCHYEAAEQRLAVEVLHAADLLPLDANGLSDPFVIVELGPPHLFPLVRSQRTQVKTRTLHPVYDELFYFSVPAEACRRRAACVLFTVMDHDWLSTNDFAGEAALGLGGVTGVARPQVGGGARAGQPVTLHLCRPRAQVRSALRRLEGRTSKEAQEFVKKLKELEKCMEADP

SEQ ID NO: 6675 - protein, 302 aa, Homo sapiens
MASHGNDAARARFESKVPSFYYRPTPSDCQLLREQWIRAKYERQEFIYPEKQEPYSAGYREGFLWKRGRDNGQFLSRKFVLTEREGALKYFNRNDAKEPKAVMKIEHLNATFQPAKIGHPHGLQVTYLKDNSTRNIFIYHEDGKEIVDWFNALRAARFHYLQVAFPGAGDADLVPKLSRNYLKEGYMEKTGPKQTEGFRKRWFTMDDRRLMYFKDPLDAFARGEVFIGSKESGYTVLHGFPPSTQGHHWPHGITIVTPDRKFLFACETESDQREWVAAFQKAVDRPMLPQEYAVEAHFKHKP

SEQ ID NO: 6676 - protein, 730 aa, Homo sapiens
MNNSSSETRGHPHSASSPSERVFPMPLPRKAPLNIPGTPVLEDFPQNDDEKERLQRRRSRVFDLQFSTDSPRLLASPSSRSIDISATIPKFTNTQITEHYSTCIKLSTENKITTKNAFGLHLIDFMSEILKQKDTEPTNFKVAAGTLDASTKIYAVRVDAVHADVYRVLGGLGKDAPSLEEVEGHVADGSATEMGTTKKAVKPKKKHLHRTIEQNINNLNVSEADRKCEIDPMFQKTAASFDECSTAGVFLSTLHCQDYRSELLFPSDVQTLSTGEPLELPELGCVEMTDLKAPLQQCAEDRQICPSLAGFQFTQWDSETHNESVSALVDKFKKNDQVFDINAEVDESDCGDFPDGSLGDDFDANDEPDHTAVGDHEEFRSWKEPCQVQSCQEEMISLGDGDIRTMCPLLSMKPGEYSYFSPRTMSMWAGPDHWRFRPRRKQDAPSQSENKKKSTKKDFEIDFEDDIDFDVYFRKTKAATILTKSTLENQNWRATTLPTDFNYNVDTLVQLHLKPGTRLLKMAQGHRVETEHYEEIEDYDYNNPNDTSNFCPGLQAADSDDEDLDDLFVGPVGNSDLSPYPCHPPKTAQQNGDTPEAQGLDITTYGESNLVAEPQKVNKIEIHYAKTAKKMDMKKLKQSMWSLLTALSGKEADAEANHREAGKEAALAEVADEKMLSGLTKDLQRSLPPVMAQNLSIPLAFACLLHLANEKNLKLEGTEDLSDVLVRQGD

SEQ ID NO: 6677 - protein, 361 aa, Homo sapiens
MYPEALPVGILSNPDTFKRRSGSYSNDKPEVWFAAGSGSPNQKLSSSCVGRACGEMDTPPLSDSESESDESLVTDRELQDAFSRGLLKPGLNVVLEGPKKAVNDVNGLKQCLAEFKRDLEWVERLDVTLGPVPEIGGSEAPAPQNKDQKAVDPEDDFQREMSFYRQAQAAVLAVLPRLHQLKVPTKRPTDYFAEMAKSDLQMQKIRQKLQTKQAAMERSEKAKQLRALRKYGKKVQTEVLQKRQQEKAHMMNAIKKYQKGFSDKLDFLEGDQKPLAQRKKAGAKGQQMRKGPSAKRRYKNQKFGFGGKKKGSKWNTRESYDDVSSFRAKTAHGRGLKRPGKKGSNKRPGKRTREKMKNRTH

SEQ ID NO: 6678 - protein, 310 aa, Homo sapiens
GGRAEAALLLAPRSVPAAARGLQGQSRVPAGRAALPGPGRPPALPRGLAAFALPLGESPGCRARADPPWDEGCRDCGGARRDPRGEPGLGACAERGCPRDLFLFLQAADGETILKGLQSIFQEQGMAESVHTWQDHGYLATYTNKNGSFANLRIYPHGLVLLDLQSYDGDAQGKEEIDSILNKVEERMKELSQDSTGRVKRLPPIVRGGAIDRYWPTADGRLVEYDIDEVVYDEDSPYQNIKILHSKQFGNILILSGDVNLAESDLAYTRAIMGSGKEDYTGKDVLILGGGDGGILCEIVKLKPKMVTMV

SEQ ID NO: 6679 - protein, 178 aa, Homo sapiens
AGRAVRTAGASLPRRRPCPRDLTAGSEGEAVLRPGLDAEPELSPEEQRVLERKLKKERKKEERQRLREAGLVAQHPPARRSGAELALDYLCRWAQKHKNWRFQKTRQTWLLLHMYDSDKVPDEHFSTLLAYLEGLQGRARELTVQKAEALMRELDEEGSDPPLPGRAQRIRQVLQLLS

SEQ ID NO: 6680 - protein, 1153 aa, Homo sapiens
MAVPARTCGASRPGPARTARPWPGCGPHPGPGTRRPTSGPPRPLWLLLPLLPLLAAPGASAYSFPQQHTMQHWARRLEQEVDGVMRIFGGVQQLREIYKDNRNLFEVQENEPQKLVEKVAGDIESLLDRKVQALKRLADAAENFQKAHRWQDNIKEEDIVYYDAKADAELDDPESEDVERGSKASTLRLDFIEDPNFKNKVNYSYAAVQIPTDIYKGSTVILNELNWTEALENVFMENRRQDPTLLWQVFGSATGVTRYYPATPWRAPKKIDLYDVRRRPWYIQGASSPKDMVIIVDVSGSVSGLTLKLMKTSVCEMLDTLSDDDYVNVASFNEKAQPVSCFTHLVQANVRNKKVFKEAVQGMVAKGTTGYKAGFEYAFDQLQNSNITRANCNKMIMMFTDGGEDRVQDVFEKYNWPNRTVRVFTFSVGQHNYDVTPLQWMACANKGYYFEIPSIGAIRINTQEYLDVLGRPMVLAGKEAKQVQWTNVYEDALGLGLVVTGTLPVFNLTQDGPGEKKNQLILGVMGIDVALNDIKRLTPNYTLGANGYVFAIDLNGYVLLHPNLKPQTTNFREPVTLDFLDAELEDENKEEIRRSMIDGNKGHKQIRTLVKSLDERYIDEVTRNYTWVPIRSTNYSLGLVLPPYSTFYLQANLSDQILQVKLPISKLKDFEFLLPSSFESEGHVFIAPREYCKDLNASDNNTEFLKNFIELMEKVTPDSKQCNNFLLHNLILDTGITQQLVERVWRDQDLNTYSLLAVFAATDGGITRVFPNKAAEDWTENPEPFNASFYRRSLDNHGYVFKPPHQDALLRPLELENDTVGILVSTAVELSLGRRTLRPAVVGVKLDLEAWAEKFKVLASNRTHQDQPQKQCGPNSHCEMDCEVNNEDLLCVLIDDGGFLVLSNQNHQWDQVGRFFSEVDANLMLALYNNSFYTRKESYDYQAACAPQPPGNLGAAPRGVFVPTVADFLNLAWWTSAAAWSLFQQLLYGLIYHSWFQADPAEAEGSPETRESSCVMKQTQYYFGSVNASYNAIIDCGNCSRLFHAQRLTNTNLLFVVAEKPLCSQCEAGRLLQKETHCPADGPEQCELVQRPRYRRGPHICFDYNATEDTSDCGRGASFPPSLGVLVSLQLLLLLGLPPRPQPQVLVHASRRL

SEQ ID NO: 6681 - protein, 653 aa, Homo sapiens
SGSPLNLNSMVSNINQPLEITAISSPETSLKSSPVPYQDHDQPPVLKKERPLSQTNGAHYSPLTSDEEPGSEDEPSSARIERKIATISLESKSPPKTLENGGGLAGRKPAPAGEPVNSSKWKSTFSPISDIGLAKSADSPLQASSALSQNSLFTFRPALEEPSADAKLAAHPRKGFPGSLSGADGLSPGTNPANGCTFGGGLAADLSLHSFSDGASLPHKGPEAAGLSSPLSFPSQRGKEGSDANPFLSKRQLDGLAGLKGEGSRGKEAGEGGLPLCGPTDKTPLLSGKAAKARDREVDLKNGHNLFISAAAVPPGSLLSGPGLAPAASSAGGAASSAQTHRSFLGPFPPGPQFALGPMSLQANLGSVAGSSVLQSLFSSVPAAAGLVHVSSAATRLTNSHAMGSFSGVAGGTVGEGHRAQGHQSITFSRGGHLLGVAARALARLWELVLGVFNHAVPSASAHPFGARVGRGAACGSATLGPSPLQAAASASASSFQAPASVETRPPPPPPPPPPPLPPPAHLGRSPAGPPVLHAPPPPNAALPPPPTLLASNPEPALLQSLASLPPNQAFLPPTSAASLPPANASLSIKLTSLPHKGARPSFTVHHQPLPRLALAQAAPGIPQASATGPSAVWVSLGMPPPYAAHLSGVKPR

SEQ ID NO: 6682 - protein, 57 aa, Homo sapiens
MSGGSADYNREHGGPEGMDPDGVIESNWNEIVDNFDDMNLKESLLRGIYAYGFEKPS

SEQ ID NO: 6683 - protein, 85 aa, Homo sapiens
MASSDIQVKELEKRASGQAFELILSPRSKESVPEFPLSPPKKKDLSLEEIQKKLEAAEERRKSHEAEVLKQLAEKREHEKEVLQK

SEQ ID NO: 6684 - protein, 104 aa, Homo sapiens
NGSPSLERMDARQAEHPKPSACRNLFGPVDHEELTRDLEKHCRDMEEASQRKWNFDFQNHKPLEDSSTQNKRANRTEENVSDGSPNAGSVEQTPKKPGLRRRQT

SEQ ID NO: 6685 - protein, 113 aa, Homo sapiens
MIHTNLKKKFSCCVLVFLLFAVICVWKEKKKGSYYDSFKLQTKEFQVLKSLGKLAMGSDSQSVSSSSTQDPHRGRQTLGSLRGLAKAKPEASFQVWNKDSSSKNLIPRLQKIW

SEQ ID NO: 6686 - protein, 180 aa, Homo sapiens
MALTVDVAGPAPWGFRITGGRDFHTPIMVTKVAERGKAKDADLRPGDIIVAINGESAEGMLHAEAQSKIRQSPSPLRLQLDRSQATSPGQTNGDSSLEVLATRFQGSVRTYTESQSSLRSSYSSPTSLSPRAGSPFSPPPSSSSLTGEAAISRSFQSLACSPGLPAADRLSYSGRPGSRQ

SEQ ID NO: 6687 - protein, 318 aa, Homo sapiens
MDRGSLGGSSLTDLGPGSSRRVCMTNCPTLIVMVGLPARGKTYISKKLTRYLNWIGVPTREFNVGQYRRDVVKTYKSFEFFLPDNEEGLKIRKQCALAALRDVRRFLSEEGGHVAVFDATNTTRERRATIFNFGEQNGYKTFFVESICVDPEVIAANIVQVKLGSPDYVNRDSDEATEDFMRRIECYENSYESLDEDLDRDLSYIKIMDVGQSYVVNRVADHIQSRIVYYLMNIHVTPRSIYLCRHGESELNLKGRIGGDPGLSPRGREFAKSLAQFISDQNIKDLKVWTSQMKRTIQTAEALGVPYEQWKVLNEIDA

SEQ ID NO: 6688 - protein, 312 aa, Homo sapiens
MGCVFCKKLEPVATAKEDAGLEGDFRSYGAADHYGPDPTKARPASSFAHIPNYSNFSSQAINPGFLDSGTIRGVSGIGVTLFIALYDYEARTEDDLTFTKGEKFHILNNTEGDWWEARSLSSGKTGCIPSNYVAPVDSIQAEEWYFGKIGRKDAERQLLSPGNPQGAFLIRESETTKGAYSLSIRDWDQTRGDHVKHYKIRKLDMGGYYITTRVQFNSVQELVQHYMEVNDGLCNLLIAPCTIMKPQTLGLAKDAWEISRSSITLERRLGTGCFGDVWLGTWNGSTKVAVKTLKPGTMSPKAFLEEAQVMKL

SEQ ID NO: 6689 - protein, 123 aa, Homo sapiens
MGFGDLKSPAGLQVLNDYLADKSYIEGYVPSQADVAVFEAVSSPPPADLCHALRWYNHIKSYEKEKASLPGVKKALGKYGPADVEDTTGSGATDSKDDDDIDLFGSDDEEESEEAKRLREERL

SEQ ID NO: 6690 - protein, 367 aa, Homo sapiens
GKITRQEFIDGILASKFPTTKLEMTAVADIFDRDGDGYIDYYEFVAALHPNKDAYRPTTDADKIEDEVTRQVAQCKCAKRFQVEQIGENKYRFGDSQQLRLVRILRSTVMVRVGGGWMALDEFLVKNDPCRARGRTNIELREKFILPEGASQGMTPFRSRGRRSKPSSRAASPTRSSSSASQSNHSCTSMPSSPATPASGTKTSLQFSRCYDKPWLVNSKAGTPIRDSHSPDLQLPTPEVIPSSGSKLKRPTPTFHSSRTSLAGDTSNSSSPASTGAKTNRADPKKSASRPGSRAGSRAGSRASSRRGSDASDFDLLETQSACSDTSESSAAGGQGNSRRGLNKPSKIPTMSKKTTTASPRTPGPKR

SEQ ID NO: 6691 - protein, 59 aa, Homo sapiens
RRRSRSRDRRRRRSRSTSRERRKLSRSRSRDRHRRHRSRSRSHSRGHRRASRDRSAKYK

SEQ ID NO: 6692 - protein, 136 aa, Homo sapiens
MAARVLIIGSGGREHTLAWKLAQSHHVKQVLVAPGNAGTACSEKISNTAISISDHTALAQFCKEKKIEFVVVGPEAPLAAGIVGNLRSAGVQCFGPTAEAAQLESSKRFAKEFMDRHGIPTAQWKAFTKPEEACSF

SEQ ID NO: 6693 - protein, 150 aa, Homo sapiens
MNLAEICDNAKKGREYALLGNYDSSMVYYQGVMQQIQRHCQSVRDPAIKGKWQQVRQELLEEYEQVKSIVSTLESFKIDKPPDFPVSCQDEPFRDPAVWPPPVPAEHRAPPQIRRPNREVRPLRKEMAGVGARGPVGRAHPISKSEKPST

SEQ ID NO: 6694 - protein, 123 aa, Homo sapiens
MQAFLKGTSISTKPPLTKDRGVAASAGSSGENKKAKPVPWVEKYRPKCVDEVAFQEEVVAVLKKSLEGADLPNLLFYGPPGTGKTSTILAAARELFGPELFRLRVLELNASDERGIQVVREKV

SEQ ID NO: 6695 - protein, 295 aa, Homo sapiens
MSRESDVEAQQSHGSSACSQPHGSVTQSQGSSSQSQGISSSSTSTMPNSSQSSHSSSGTLSSLETVSTQELYSIPEDQEPEDQEPEEPTPAPWARLWALQDGFANLETESGHVTQSDLELLLSSDPPASASQSAGIRECVNDNYWFGRDKSCEYCFDEPLLKRTDKYRTYSKKHFRIFREVGPKNSYIAYIEDHSGNGTFVNTELVGKGKRRPLNNNSEIALSLSRNKVFVFFDLTVDDQSVYPKALRDEYIMSKTLGSGACGEVKLAFERKTCKKVAIKIISKRKFAIGSAREA

SEQ ID NO: 6696 - protein, 897 aa, Homo sapiens
LEESGEIKDMLLECFININYIKKEEGRRFLSCLFNWNINFIKMIHGTIKNQLQGLQKSLMVYIAEIYFRAWKKASGKILEAIENDCIQDFMFHGIHLPRRSPVHSKVREVLSYFHHQKKVRQGVEEMLYRLYKPILWRGLKARNSEVRSNAALLFVEAFPIRDPNLHAIEMDSEIQKQFEELYSLLEDPYPMVRSTGILGVCKITSKYWEMMPPTILIDLLKKVTGELAFDTSSADVRCSVFKCLPMILDNKLSHPLLEQLLPALRYSLHDNSEKVRVAFVDMLLKIKAVRAAKFWKICPMEHILVRLETDSRPVSRRLVSLIFNSFLPVNQPEEVWCERCVTLVQMNHAAARRFYQYAHEHTACTNIAKLIHVIRHCLNACIQRAVREPPEDEEEEDGREKENVTVLDKTLSVNDVACMAGLLEIIVILWKSIDRSMENNKEAKLYTINKFASVLPEYLKVFKDDRCKIPLFMLMSFMPASAVPPFSCGVISTLRSREEGAVDKSYCTLLDCLCSWGQVGHILELVDNWLPTEHAQAKSNTASKGRVQIHDTRPVKPELALVYIEYLLTHPKNRECLLSAPRKKLNHLLKALETSKADLESLLQTPGGKPRGFSEAAAPRAFGLHCRLSIHLQHKFCSEGKVYLSMLEDTGFWLESKILSFIQDQEEDYLKLHRVIYQQIIQTYLTVCKDVVMVGLGDHQFQMQLLQRSLGIMQTVKGFFYVSLLLDILKEITGSSLIQKTDSDEEVAMLLDTVQKVFQKMLECIARSFRKQPEEGLRVSDVEELTPPEHLSDLPPFSRCLIGIIIKSSNVVRSFLDELKACVASNDIEGIVCLTAAVHIILVINAGKHKSSKVREVAATVHRKLKTFMEITLEEDSIERFLYESSSRTLGELLNS

SEQ ID NO: 6697 - protein, 107 aa, Homo sapiens
RSAINEVVTREYTINIHKRIHGVGFKKRAPRALKEIRKFAMKEMGTPDVRIDTRLNKAVWAKGIRNVPYRIRVRLSRKRNEDEDSPNKLYTLVTYVPVTTFKIFFLR

SEQ ID NO: 6698 - protein, 180 aa, Homo sapiens
MGNACWELYCLEHGIQPDGQMPSDKTIGGGDDSFTTFFCETGAGKHVPRAVFVDLEPTVIDEIRNGPYRQLFHPEQLITGKEDAANNYARGHYTIGKEIIDPVLDRIRKLSDQCTGLQGFLVFHSFGGGTGSGFTSLLMERLSVDYGKKSKLEFSIYPAPQVSTAVVEPYNSILTTHTTL

SEQ ID NO: 6699 - protein, 187 aa, Homo sapiens
MAQRTGLEDPERYLFVDRAVIYNPATQADWTAKKLVWIPSERHGFEAASIKEERGDEVMVELAENGKKAMVNKDDIQKMNPPKFSKVEDMAELTCLNEASVLHNLKDRYYSGLIYTYSGLFCVVINPYKNLPIYSENIIEMYRGKKRHEMPPHIYAISESAYRCMLQDREDQSILCTGESGAGKTEN

SEQ ID NO: 6700 - protein, 44 aa, Homo sapiens [sequence omitted]

SEQ ID NO: 6701 - protein, 39 aa, Homo sapiens
MGDREQLLQRARLAEQAERYDDMASAMKAVRRICVSLHS

SEQ ID NO: 6702 - protein, 478 aa, Homo sapiens
MQQHFEFEYQTKVDGEIILHLYDKGGIEQTICMLDGVFAFVLLDTANKKVFLGRDTYGVRPLFKAMTEDGFLAVCSEAKGLVTLKHSATPFLKVEPFLPGHYEVLDLKPNGKVASVEMVKYHHCRDVPLHALYDNVEKLFPGFEIETVKNNLRILFNNAVKKRLMTDRRIGCLLSGGLDSSLVAATLLKQLKEAQVQYPLQTFAIGMEDSPDLLAARKVADHIGSEHYEVLFNSEEGIQALDEVIFSLETYDITTVRASVGMYLISKYIRKNTDSVVIFSGEGSDELTQGYIYFHKAPSPEKAEEESERLLRELYLFDVLRADRTTAAHGLELRVPFLDHRFSSYYLSLPPEMRIPKNGIEKHLLRETFEDSNLIPKEILWRPKEAFSDGITSVKNSWFKILQEYVEHQVDDAMMANAAQKFPFNTPKTKEGYYYRQVFERHYPGRADWLSHYWMPKWINATDPSARTLTHYKSAVKA

SEQ ID NO: 6703 - protein, 32 aa, Homo sapiens
MAYHSFLVEPISCHAWNKDRTRQPVPGEDRVA

SEQ ID NO: 6704 - protein, 39 aa, Homo sapiens
MHSEAEESKEGLGLNTGIYGENSCHSTQRLSRHPKNCSS

SEQ ID NO: 6705 - protein, 71 aa, Homo sapiens
RIYAAFKEVLGSGMHHHLQNNELLRDIFGLGPVLLLDATALKACKHLYNAAAFKARTKARSRVRDKRADIL

SEQ ID NO: 6706 - protein, 194 aa, Homo sapiens
RHLAPTGNAPASRGLPTTTQRVGSECPDRLAMDFGGAGAAQQGLTDSCQSGGVPTAVQNLAPRAAVAAAAPRAVAPYKYASSVRSPHPAIQPLQAPQPAVHVQGQEPLTASMLAAAPPQEQKQMLGERLFPLIQTMHSNLAGKITGMLLEIDNSELLHMLESPESLRSKVDEAVAVLQAHHAKKEAAQKDSKAK

SEQ ID NO: 6707 - protein, 522 aa, Homo sapiens
MASRCWRWWGWSAWPRTRLPPAGSTPTFGGSDEVRDPANAKALRNKRRRMQVRVKLGKFQLLLDIQEKTPQICVVGSGPAGFYTAQHLLKHPQAHVDIYEKQPVPFGLVRFGVAPDHPEVKNVINTFTQTAHSGRCAFWGNVEVGRDVTVPELQEAYHAVVLSYGAEDHRALEIPGEELPGVCSARAFVGWYNGLPENQELEPDLSCDTAVILGQGNVALDVARILLTPPEHLERTDITKAALGVLRQSRVKTVWLVGRRGPLQVAFTIKELREMIQLPGARPILDPVDFLGLQDKIKEVPRPRKRLTELLLRTATEKPGPAEAARQASASRAWGLRFFRSPQQVLPSPDGRRAAGVRLAVTRLEGVDEATRAVPTGDMEDLPCGLVLSSIGYKSRPVDPSVPFDSKLGVIPNVEGRVMDVPGLYCSGWVKRGPTGVIATTMTDSFLTGQMLLQDLKAGLLPSGPRPGYAAIQALLSSRGVRPVSFSDWEKLDAEEVARGQGTGKPREKLVDPQEMLRLLGH

SEQ ID NO: 6708 - protein, 213 aa, Homo sapiens
MEENLISMREDHSFHVRYRMEASCLELALEGERLCKSGDCRAGVSFFEAAVQVGTEDLKTLSAIYSQLGNAYFYLHDYAKALEYHHHDLTLARTIGDQLGEAKASGNLGNTLKVLGNFDEAIVCCQRHLDISRELNDKVGEARALYNLGNVYHAKGKSFGCPGPQDVGEFPEEVRDALQAAVDFYEENLSLVTALGDRAAQGRAFGNLGNTHY

SEQ ID NO: 6709 - protein, 150 aa, Homo sapiens
MMSHLVKIPGIIIAASAVRAKATRISIQCRSCRNTLTNIAMRPGLEGYALPRKCNTDQAGRPKCPLDPYFIMPDKCKCVDFQTLKLQELPDAVPHGEMPRHMQLYCDRYLCDKVVPGNRVTIMGIYSIKKFGLTTSRGRDRVGVGIRSSY

SEQ ID NO: 6710 - protein, 223 aa, Homo sapiens
MPKKFQGENTKSAAARARRAEAKAAADAKKQKELEDAYWKDDDKHVMRKEQRKEEKEKRRLDQLERKKETQRLLEEEDSKLKGGKAPRVATSSKVTRAQIEDTLRRDHQLREAPDTAEKAKSHLEVPLEENVNRRVLEEGSVEARTIEDAIAVLSVAEEAADRHPERRMRAAFTAFEEAQLPRLKQENPNMRLSQLKQLLKKEWLRSPDNPMNQRAVPFNAPK

SEQ ID NO: 6711 - protein, 100 aa, Homo sapiens
MASEDIAKLAETLAKTQVAGGQLSFKGKSLKLNTAEDAKDVIKEIEDFDSLEALRLEGNTVGVEAARVIAKALEKKSELKRCHWSDMFTGRLRTEIPPAL

SEQ ID NO: 6712 - protein, 156 aa, Homo sapiens
FLDSNQENDLLWEEKFPERTTVTELPQTSHVSFSEPDIPSSKSTELPVDWSIKTRLLFTSSQPFTWADHLKAQEEAQGLVQHCRATEVTLPKSIQDPKLSSELRCTFQQSLIYWLHPALSWLPLFPRIGADRKMAGKTSPWSNDATLQHVLMSDWY

SEQ ID NO: 6713 - protein, 63 aa, Homo sapiens
MKIAHRGPDAFRFENVNGYTNCCFGFHRLAVVDPLFGMQPIRVKKYPYLWLCYNGEIYNHKKV

SEQ ID NO: 6714 - protein, 45 aa, Homo sapiens
MADSSGQQGKGRRVQPQWSPPAGTQPCRLHLYNSLTRNKCFLHFL

SEQ ID NO: 6715 - protein, 127 aa, Homo sapiens
MSRRSQRLTRYSQGDDDGSSSSGGSSVAGSQSTLFKDSPLRTLKRKSSNMKRLSPAPQLGPSSDAHTSYYSESLVHESWFPPRSSLEELHGDANWGYSDVDQQSSSSRLRSAVSRAGSLLWMVATSP

SEQ ID NO: 6716 - protein, 88 aa, Homo sapiens
MAAAAAEQQQFYLLLGNLLSPDNVVRKQAEETYENIPGQSKITFLLQAIRNTTAAEEARQMAAVLLRRLLSSAFDEVYPALPSDVQTA

SEQ ID NO: 6717 - protein, 503 aa, Homo sapiens
MGFKAHFRKAQALATLGKVEEALREFLYCVSLDGKNKRARCEAQRLLLSFFSPSVPGDSQEHSPDILKLLAPHPRLKENVESMTTEVTSHNLPRLLQDNLELPHCSSQEEAAARGDGSSLMDPAKVKGDGQQHHMKDQEEEEEKWDATSPKAASSKTGKCQEKKRKHCQIESQEETGMPNKASKQDPPTDQGDKPALSLPLASFDASDLECALCMRLFYEPVTTPCGHTFCLKCLERCLDHNAKCPLCKDGLSQCLASRKYSKNVIMEELIAKFLPEELKERRKLYEEEMEELSNLNKNVPIFVCTMAYPTVPCPLHIFEPCYRLMIRRCIETGTRQFGMCLGDPVKGFAEYGCILEIRNVQFFADGRSVVDSIGKRRFRVLHQSQRDGYNTADIEYIEDQKVQGEDCAELMGLHNCVYQQASLWFHSLKLSLKNRILNHFGPMPEKDADPQMNPNGPAWCWWMLAVLPLESRAQLPFLAMRSLKDRLNGIRRVLAFISRNQN

SEQ ID NO: 6718 - protein, 115 aa, Homo sapiens
DEKYNHIDESEMKKVEKSVNEVMEWMNNVMNAQAKKSLDQDPVVRAQEIKTKIKELNNTCEPVVTQPKPKIESPKLERTPNGPNIDKKEEDLEDKNNFGAEPPHQNDSCGIVNSY

SEQ ID NO: 6719 - protein, 244 aa, Homo sapiens
MKSYAGFLTVNKTYNSNLFFWFFPAQIQPEDAPVVLWLQGGPGGSSMFGLFVEHGPYVVTSNMTLRDRDFPWTTTLSMLYIDNPVGTGFSFTDDTHGYAVNEDDVARDLYSALIQFFQIFPEYKNNDFYVTGESYAGKYVPAIAHLIHSLNPVREVKINLNGIAIGDGYSDPESIIGGYAEFLYQIGLLDEKQKKYFQKQCHECIEHIRKQNWFEAFEILDKLLDGDLTSDPSYFQNVTGCSNY

SEQ ID NO: 6720 - protein, 73 aa, Homo sapiens
MSKKISGGSVVEMQGDEMTRIIWELIKEKLIFPYVELDLHSYDLGIENRDATNDQVTKDAAEAIKKHNVGVKC

SEQ ID NO: 6721 - protein, 148 aa, Homo sapiens
MAGILFEDIFDVKDIDPEGKKFDRVSRLHCESESFKMDLILDVNIQIYPVDLGDKFRLVIASTLYEDGTLDDGEYNPTDDRPSRADQFEYVMYGKVYRIEGDETSTEAATRLSAYVSYGGLLMRLQGDANNLHGFEVDSRVYLLMKKL

SEQ ID NO: 6722 - protein, 210 aa, Homo sapiens
QLYDEKHSPEVEAGEPSLRGIPNQLNQDKPALLRHCKPCTVCMHTPKTESDNGMMGLSPDAYRFLTEQDRQLRLLQAQIQRLLEAQSLMPCSPKTTAVEDTVQAGRQMELVSVEAQSSPGLHMRKGVSIAVSTGASLFWNAAGEDQEPDSQMKQDDTKISSEDMNFSVDINNEVTSLPGSASSLKAVDIPSFEESNIAVEEEFNQPLSVS

SEQ ID NO: 6723 - protein, 18 aa, Homo sapiens
MLSRLFRMHGLFVASHPW

SEQ ID NO: 6724 - protein, 245 aa, Homo sapiens
YFNRNDAKEPKAVMKIEHLNATFQPAKIGHPHGLQVTYLKDNSTRNIFIYHEDGKTCLSYKIRIFIKIAPSERKASWPRPQQHQGHREIVDWFNALRAARFHYLQVAFPGAGDADLVPKLSRNYLKEGYMEKTGPKQTEGFRKRWFTMDDRRLMYFKDPLDAFARGEVFIGSKESGYTVLHGFPPSTQGHHWPHGITIVTPDRKFLFACETESDQREWVAAFQKAVDRPMLPQEYAVEAHFKHKP

SEQ ID NO: 6725 - protein, 45 aa, Homo sapiens
MSPQKRVKNVQAQNRTSQGSSSFQTTLSAWKVKQDPSNSKNISKH

SEQ ID NO: 6726 - protein, 652 aa, Homo sapiens
MTFYVGLQAEDGHWTGDYGGPLFLLPGLLITCHVARIPLPAGYREEIVRYLRSVQLPDGGWGLHIEDKSTVFGTALNYVSLRILGVGPDDPDLVRARNILHKKGGAVAIPSWGKFWLAVLNVYSWEGLNTLFPEMWLFPDWAPAHPSTLWCHCRQVYLPMSYCYAVRLSAAEDPLVQSLRQELYVEDFASIDWLAQRNNVAPDELYTPHSWLLRVVYALLNLYEHHHSAHLRQRAVQKLYEHIVADDRFTKSISIGPISKTINMLVRWYVDGPASTAFQEHVSRIPDYLWMGLDGMKMQGTNGSQIWDTAFAIQALLEAGGHHRPEFSSCLQKAHEFLRLSQVPDNPPDYQKYYRQMRKGGFSFSTLDCGWIVSDCTAEALKAVLLLQEKCPHVTEHIPRERLCDAVAVLLNMRNPDGGFATYETKRGGHLLELLNPSEVFGDIMIDYTYVECTSAVMQALKYFHKRFPEHRAAEIRETLTQGLEFCRRQQRADGSWEGSWGVCFTYGTWFGLEAFACMGQTYRDGTACAEVSRACDFLLSRQMADGGWGEDFESCEERRYLQSAQSQIHNTCWAMMGLMAVRHPDIEAQERGVRCLLEKQLPNGDWPQENIAGVFNKSCAISYTSYRNIFPIWALGRFSQLYPERALAGHP

SEQ ID NO: 6727 - protein, 125 aa, Homo sapiens
MDDDIAALVVDNGSGMCKAGFAGDDAPRAVFPSIVGRPRHQGVMVGMGQKDSYVGDEAQSKRGILTLKYPIEHGIVTNWDDMEKIWHHTFYNELRVAPEEHPVLLTEAPLNPKANREKMTQDSLL

SEQ ID NO: 6728 - protein, 1049 aa, Homo sapiens
MACIHYLRENREKFEAFIEGSFEEYLKRLENPQEWVGQVEISALSLMYRKDFIIYREPNVSPSQVTENNFPEKVLLCFSNGNHYDIVYPIKYKESSAMCQSLLYELLYEKVFKTDVSKIVMELDTLEVADEDNSEISDSEDDSCKSKTAAAAADVNGFKPLSGNEQLKNNGNSTSLPLSRKVLKSLNPAVYRNVEYEIWLKSKQAQQKRDYSIAAGLQYEVGDKCQVRLDHNGKFLNADVQGIHSENGPVLVEELGKKHTSKNLKAPPPESWNTVSGKKMKKPSTSGQNFHSDVDYRGPKNPSKPIKAPSALPPRLQHPSGVRQHAFSSHSSGSQSQKFSSEHKNLSRTPSQIIRKPDRERVEDFDHTSRESNYFGLSPEERREKQAIEESRLLYEIQNRDEQAFPALSSSSVNQSASQSSNPCVQRKSSHVGDRKGSRRRMDTEERKDKDSIHGHSQLDKRPEPSTLENITDDKYATVSSPSKSKKLECPSPAEQKPAEHVSLSNPAPLLVSPEVHLTPAVPSLPATVPAWPSEPTTFGPTGVPAPIPVLSVTQTLTTGPDSAVSQAHLTPSPVPVSIQAVNQPLMPLPQTLSLYQDPLYPGFPCNEKGDRAIVPPYSLCQTGEDLPKDKNILRFFFNLGVKAYSCPMWAPHSYLYPLHQAYLAACRMYPKVPVPVYPHNPWFQEAPAAQNESDCTCTDAHFPMQTEASVNGQMPQPEIGPPTFSSPLVIPPSQVSESHGQLSYQADLESETPGQLLHADYEESLSGKNMFPQPSFGPNPFLGPVPIAPPFFPHVWYGYPFQGFIENPVMRQNIVLPSDEKGELDLSLENLDLSKDCGSVSTVDEFPEARGEHVHSLPEASVSSKPDEGRTEQSSQTRKADTALASIPPVAEGKAHPPTQILNRERETVPVELEPKRTIQSLKEKTEKVKDPKTAADVVSPGANSVDSRVQRPKEESSEDENEVSNILRSGRSKQFYNQTYGSRKYKSDWGYSGRGGYQHVRSEESWKGQPSRSRDEGYQYHRNVRGRPFRGDRRRSGMGDGHRGQHT

SEQ ID NO: 6729 - protein, 737 aa, Homo sapiens
MAHRKLESVGSGMLDHRVRPGPVPHSQEPESEDMELPLEGYVPEGLELAALRPESPAPEEQECHNHSPDGDSSSDYVNNTSEEEDYDEGLPEEEEGITYYIRYCPEDDSYLEGMDCNGEEYLAHSAHPVDTDECQEAVEEWTDSAGPHPHGHEAEGSQDYPDGQLPIPEDEPSVLEAHDQEEDGHYCASKEGYQDYYPEEANGNTGASPYRLRRGDGDLEDQEEDIDQIVAEIKMSLSMTSITSASEASPEHGPEPGPEDSVEACPPIKASCSPSRHEARPKSLNLLPEAKHPGDPQRGFKPKTRTPEERLKWPHEQVCNGLEQPRKQQRSDLNGPVDNNNIPETKKVASFPSFVAVPGPCEPEDLIDGIIFAANYLGSTQLLSERNPSKNIRMMQAQEAVSRVKNSEGDAQTLTEVDLFISTQRIKVLNADTQETMMDHALRTISYIADIGNIVVLMARRRMPRSASQDCIETTPGAQEGKKQYKMICHVFESEDAQLIAQSIGQAFSVAYQEFLRANGINPEDLSQKEYSDIINTQEMYNDDLIHFSNSENCKELQLEKHKGEILGVVVVESGWGSILPTVILANMMNGGPAARSGKLSIGDQIMSINGTSLVGLPLATCQGIIKGLKNQTQVKLNIVSCPPVTTVLIKRPDLKYQLGFSVQNGIICSLMRGGIAERGGVRVGHRIIEINGQSVVATAHEKIVQALSNSVGEIHMKTMPAAMFRLLTGQETPLYI

SEQ ID NO: 6730 - protein, 1390 aa, Homo sapiens
WKSDPKAKSVQSSNSTTENNNGLGNWRNVSGQDRIGPGSGFSNFNPNSNPSAWPALVQEGTSRKGALETDNSNSSAQVSTVGQTSREQQSKMENAGVNFVVSGREQAQIHNTDGPKNGNTNSLNLSSPNPMENKGMPFGMGLGNTSRSTDAPSQSTGDRKTGSVGSWGAARGPSGTDTVSGQSNSGNNGNNGKEREDSWKGASVQKSTGSKNDSWDNNNRSTGGSWNFGPQDSNDNKWGEGNKMTSGVSQGEWKQPTGSDELKIGEWSGPNQPNSSTGAWDNQKGHPLPENQGNAQAPCWGRSSSSTGSEVGGQSTGSNHKAGSSDSHNSGRRSYRPTHPDCQAVLQTLLSRTDLDPRVLSNTGWGQTQIKQDTVWDIEEVPRPEGKSDKGTEGWESAATQTKNSGGWGDAPSQSNQMKSGWGELSASTEWKDPKNTGGWNDYKNNNSSNWGGGRPDEKTPSSWNENPSKDQGWGGGRQPNQGWSSGKNGWGEEVDQTKNSNWESSASKPVSGWGEGGQNEIGTWGNGGNASLASKGGWEDCKRSPAWNETGRQPNSWNKQHQQQQPPQQPPPPQPEASGSWGGPPPPPPGNVRPSNSSWSSGPQPATPKDEEPSGWEEPSPQSISRKMDIDDGTSAWGDPNSYNYKNVNLWDKNSQGGPAPREPNLPTPMTSKSASVWSKSTPPAPDNGTSAWGEPNESSPGWGEMDDTGASTTGWGNTPANAPNAMKPNSKSMQDGWGESDGPVTGARHPSWEEEEDGGVWNTTGSQGSASSHNSASWGQGGKKQMKCSLKGGNNDSWMNPLAKQFSNMGLLSQTEDNPSSKMDLSVGSLSDKKFDVDKRAMNLGDFNDIMRKDRSGFRPPNSKDMGTTDSGPYFEKGGSHGLFGNSTAQSRGLHTPVQPLNSSPSLRAQVPPQFISPQVSASMLKQFPNSGLSPGLFNVGPQLSPQQIAMLSQLPQIPQFQLACQLLLQQQQQQQLLQNQRKISQAVRQQQEQQLARMVSALQQQQQQQQRQPGMKHSPSHPVGPKPHLDNMVPNALNVGLPDLQTKGPIPGYGSGFSSGGMDYGMVGGKEAGTESRFKQWTSMMEGLPSVATQEANMHKNGAIVAPGKTRGGSPYNQFDIIPGDTLGGHTGPAGDSWLPAKSPPTNKIGSKSSNASWPPEFQPGVPWKGIQNIDPESDPYVTPGSVLGGTATSPIVDTDHQLLRDNTTGSNSSLNTSLPSPGAWPYSASDNSFTNVHSTSAKFPDYKSTWSPDPIGHNPTHLSNKMWKNHISSRNTTPLPRPPPGLTNPKPSSPWSSTAPRSVRGWGTQDSRLASASTWSDGGSVRPSYWLVLHNLTPQIDGSTLRTICMQHGPLLTFHLNLTQGTALIRYSTKQEAAKAQTALHM

SEQ ID NO: 6731 - protein, 186 aa, Homo sapiens
MAAMAVGGAGGSRVSSGRDLNCVPEIADTLGAVAKQGFDFLCMPVFHPRFKREFIQEPAKNRPGPQTRSDLLLSGRVFVFLGWGSADWNTLIVGKLSPWIRPDSKVEKIRRNSEAAMLQELNFGAYLGLPAFLLPLNQEDNTNLARVLTNHIHTGHHSSMFWMRVPLVAPEDLRDDIIENAPTTHT

SEQ ID NO: 6732 - protein, 559 aa, Homo sapiens
MLVCGQPPFQEANDSETLTMIMDCKYTVPSHVSKECKDLITRMLQRDPKRRASLEEIENHPWLQGVDPSPATKYNIPLVSYKNLSEEEHNSIIQRMVLGDIADRDAIVEALETNRYNHITATYFLLAERILREKQEKEIQTRSASPSNIKAQFRQSWPTKIDVPQDLEDDLTATPLSHATVPQSPARAADSVLNGHRSKGLCDSAKKDDLPELAGPALSTVPPASLKPTASGRKCLFRVEEDEEEDEEDKKPMSLSTQVVLRRKPSVTNRLTSRKSAPVLNQIFEEGESDDEFDMDENLPPKLSRLKMNIASPGTVHKRYHRRKSQGRGSSCSSSETSDDDSESRRRLDKDSGFTYSWHRRDSSEGPPGSEGDGGGQSKPSNASGGVDKASPSENNAGGGSPSSGSGGNPTNTSGTTRRCAGPSNSMQLASRSAGELVESLKLMSLCLGSQLHGSTKYIIDPQNGLSFSSVKVQEKSTWKMCISSTGNAGQVPAVGGIKFFSDHMADTTTELERIKSKNLKNNVLQLPLCEKTISVNIQRNPKEGLLCASSPASCCHVI

SEQ ID NO: 6733 - protein, 1116 aa, Homo sapiens
MSTLLDIKSSVLRQVQVCPSFRRRTEQDPGSASADPQEPATGAWKPGDGVEFFAHMRLMLKKGEGRQGLPCLEVPLRSGSPAPPEPVDPSLGLRALAPEEVEMLYEEALYTVLYRAGTMGPDQVDDEEALLSYLQQVFGTSLEEHTEAIERVRKAKAPTYALKVSVMRAKNLLAKDPNGFSDPYCMLGILPASDATREPRAQKEQRFGFRKGSKRGGPLPAKCIQVTEVKSSTLNPVWKEHFLFEIEDVSTDQLHLDIWDHDDDVSLVEACRKLNEVIGLKGMGRYFKQIVKSARANGTAGPTEDHTDDFLGCLNIPVRRDTAMSQRGRSGFLSHLLLLSHLLRLEHSAEEPNSSSWRGELSTPAATILCLHGAQSNLSPLQLAVLHWQVSSRHHQTCTLDYSYLLGLLEDMQAHWEEAPSLPQEQEESLADSLSAFSEFGLQLLRQLRDYFPATNSTAVHRLELLLKCLGKLQLFQPSFEICPFESELNMDIAAALKRGNREWYDRILNDKSPREQPGPQRLPGLVVLADAVYDDLQFCYSVYASLFHSILNVDVFTLTFRQLERLVAEEAWVLTEELSPKMTLEVASGLFELYLTLADLQRFWDSIPGRDSRSLALAGIHAPFLPAVKLWFQVLRDQAKWRLQGAVDMDTLEPVDASSRHSSSAATAGLCLSHIQELWVRLAWPDPAQAQGLGTQLGQDVCEATLFYTELLRKKVDTQPGAAGEAVSEALCVVLNNVELVRKAAGQALKGLAWPEGATGPEGVLPRPLLSCTQALDDDLQREAHTVTAHLTSKMVGDIRKYVQHISLSPDSIQNDEAVAPLMKYLDEKLALLNASLVKGNLSRVLEALWELLLQAILQALGANRDVSADFYSRFHFTLEALVSFFHAEGQGLPLESLRDGSYKRLKEELRLHKCSTRECIEQFYLDKLKQRTLEQNRFGRLSVRCHYEAAEQRLAVEVLHAADLLPLDANGLSDPFVIVELGPPHLFPLVRSQRTQVKTRTLHPVYDELFYFSVPAEACRRRAACVLFTVMDHDWLSTNDFAGEAALGLGGVTGVARPQVGGGARAGQPVTLHLCRPRAQVRSALRRLEGRTSKEAQEFVKKLKELEKCMEADP

SEQ ID NO: 6734 - protein, 139 aa, Homo sapiens
AASQAVEEMRSRVVLGEFGVRNVHTTDFPGNYSGYDDAWDQDRFEKNFRVDVVHMDENSLEFDMVGIDAAIANAFRRILLAEVPTMAVEKVLVYNNTSIVQDEILAHRLGLIPIHADPRLFEYRNQVYTRHMTWIPLGN

SEQ ID NO: 6735 - protein, 203 aa, Homo sapiens
MDPQRSPLLEVKGNIELKRPLIKAPSQLPLSGSRLKRRPDQMEDGLEPEKKRTRGLGATTKITTSHPRVPSLTTVPQTQGQTTGPSSHPLPWQCHHQPFLETDPGGRSWGPGQKWHRLHLWCTSAQKVSKKTGPRCSTAIATGLKNQKPVPAVPVQKSGTSGVPPMAGGKKPSKRPAWDLKGQLCDLNAELKRCRERTQTLDQ

SEQ ID NO: 6736 - protein, 525 aa, Homo sapiens
MRRSEVLAEESIVCLQKALNHLREIWELIGIPEDQRLQRTEVVKKHIKEEGETTILQLEKDLRTQVELMRKQKKERKQELKLLQEQDQELCEILCMPHYDIDSASVPSLEELNQFRQHVTTLRETKASRREEFVSIKRQIILCMEALDHTPDTSFERDVVCEDEDAFCLSLENIATLQKLLRQLEMQKSQNEAVCEGLRTQIRELWDRLQIPEEEREAVATIMSGSKAKVRKALQLEVDRLEELKMQNMKKVIEAIRVELVQYWDQCFYSQEQRQAFAPFCAEDYTESLLQLHDAEIVRLKNYYEVHKELFEGVQKWEETWRLFLEFERKASDPNRFTNRGGNLLKEEKQRAKLQKMLPKLEEELKARIELWEQEHSKAFMVNGQKFMEYVAEQWEMHRLEKERAKQERQLKNKKQTETEMLYGSAPRTPSKRRGLAPNTPGKARKLNTTTMSNATANSSIRPIFGGTVYHSPVSRLPPSGSKPVAASTCSGKKTPRTGRHGANKENLELNGSILSARTFKGFQI

SEQ ID NO: 6737 - protein, 62 aa, Homo sapiens
MSAEVIHQVEEALDTDEKEMLLFLCRDVAIDVVPPNVRDLLDILRERGKLSVGDLAELLYRV

SEQ ID NO: 6738 - protein, 107 aa, Homo sapiens
IDQANYFLNFPCKVGTTPVSSPSQTPRPQPGPIPPHTQVRNQVYSWLLRLRPPSQGYLSSRSPQEMLRASGLTQKWVQREISNFEYLMQLNTIAGRTYNDLSQYPVV

SEQ ID NO: 6739 - protein, 125 aa, Homo sapiens
MAEVPELASEMMAYYSGNEDDLFFEADGPKQMKCSFQDLDLCPLDGGIQLRISDHHYSKGFRQAASVVVAMDKLRKMLVPCPQTFQENDLSTFFPFIFEEEPIFFDTWDNEAYVHDAPVRSLNCT

SEQ ID NO: 6740 - protein, 503 aa, Homo sapiens
MKCEHCTRKECSKKTKTDDQENVSADAPSPAQENGEKGEFHKLADAKIFLSDCLACDSCMTAEEGVQLSQQNAKDFFRVLNLNKKCDTSKHKVLVVSVCPQSLPYFAAKFNLSVTDASRRLCGFLKSLGVHYVFDTTIAADFSILESQKEFVRRYRQHSEEERTLPMLTSACPGWVRYAERVLGRPITAHLCTAKSPQQVMGSLVKDYFARQQNLSPEKIFHVIVAPCYDKKLEALQESLPPALHGSRGADCVLTSGKVLISWWCTPVITATQEAAARESLEPGRQRLQRDKIAPLDSSLGGGGEIAQIMEQGDLSVRDAAVDTLFGDLKEDKVTRHDGASSDGHLAHIFRHAAKELFNEDVEEVTYRALRNKDFQEVTLEKNGEVVLRFAAAYGFRNIQNMILKLKKGKFPFHFVEVLACAGGCLNGRGQAQTPDGHADKALLRQMEGIYADIPVRRPESSAHVQELYQEWLEGINSPKAREVLHTTYQSQERGTHSLDIKW

SEQ ID NO: 6741 - protein, 134 aa, Homo sapiens
MLEAHMQSYKGNDPLGEWERYIQWVEENFPENKEYLITLLEHLMKEFLDKKKYHNDPRFISYCLKFAEYNSDLHQFFEFLYNHGIGTLSSPLYIAWAGHLEAQGELQHASAVLQRGIQNQAEPREFLQQQYRLF

SEQ ID NO: 6742 - protein, 144 aa, Homo sapiens
QWKAFTKPEEACSFILSADFPALVVKASGLAAGKGVIVAKSKEEACKAVQEIMQEKAFGAAGETIVIEELLDGEEVSCLCFTDGKTVAPMPPAQDHKRLLEGDGGPNTGGMGAYCPAPQIKNRPGAVAHACNPSTLGGRGRWIT

SEQ ID NO: 6743 - protein, 323 aa, Homo sapiens
MMQNPQILAALQERLDGLVETPTGYIESLPRVVKRRVNALKNLQVKCAQIEAKFYEEVHDLERKYAVLYQPLFDKEELKEKAKIEDEKKDEEKEDPKGIPEFWLTVFKNVDLLSDMVQEHDEPILKHLKDIKVKFSDAGQPMSFVLEFHFEPNEYFTNEVLTKTYRMRSEPDDSDPFSFDGPEIMGCTGCQIDWKKGKNVTLKTIKKKQKHKGRGTVRTVTKTVSNDSFFNFFAPPEVPESGDLDDDAEAILAADFEIGHFLRERIIPRSVLYFTGEAIEDDDDDYDEEGEEADEEGEEEGDEENDPDYDPKKDQNPAECKQQ

SEQ ID NO: 6744 - protein, 98 aa, Homo sapiens
MAEQVLPQALYLSNMRKAVKIRERTPEDIFKPTNGIIHHFKTMHRYTLEMFRTCQFCPQFREIIHKALIDRNIQATLESQKKLNWCREVRKLVALKTN

SEQ ID NO: 6745 - protein, 92 aa, Homo sapiens
MGVQVETISPGDGMLEDGKKFDSSRDRNKPFKFMLGKQEVIRGWEEGVAQMSVGQRAKLTISPDYAYGATGHPGIIPPHATLVFDVELLKLE

SEQ ID NO: 6746 - protein, 97 aa, Homo sapiens
MEVTTRLTWNDENHLRKLLGNVSLSLLYKSSVHGGSIEDMVERCSRQGCTITMAYIDYNMIVAFMLGNYINLHESSTEPNDSLWFSLQKKNDTTEIE

SEQ ID NO: 6747 - protein, 127 aa, Homo sapiens
MADEALAGLDEGALRKLLEVTADLAERRRIRSAIRELQRQELEREEEALASKRFRAERQDNKENWLHSQQREAEQRAALARLAGQLESMNDVEELTALLRSAGEYEERKLIRAAIRRVRAQEIEAAT

SEQ ID NO: 6748 - protein, 192 aa, Homo sapiens
MVEQLDTAVITPAMLEEEEQLEAAGLERERKMLEKARMSWDRESTEIRYRRLQHLLEKSNIYSKFLLTKMEQQQLEEQKKKEKLERKKESLKVKKGKNSIDASEEKPVMRKKRGREDESYNISEVMSKEEILSVAKKNKKENEDENSSSTNLCVEDLQKNKDSNSIIKDRLSETVRQNTKFFFDPVRKCNGQ

SEQ ID NO: 6749 - protein, 120 aa, Homo sapiens
MDLSANQDEETDQETFQLEIDRDTKKCAFRTHTGKYWTLTATGGVQSTASSKNASCYFDIEWRDRRITLRASNGKFVTSKKNGQLAASVETAGDSELFLMKLINRPIIVFRGEHGFIGCR

SEQ ID NO: 6750 - protein, 98 aa, Homo sapiens
MNDVEELTALLRSAGEYEERKLIRAAIRRVRAQEIEAATLAGRLYSGRPNSGSREDSKGLAAHRLEQCEVPEREEQEQQAEVSKPTPTPEGTSQDVTT

SEQ ID NO: 6751 - protein, 349 aa, Homo sapiens
MKGTGIMDCAPKALLARALYDNCPDCSDELAFSRGDILTILEQHVPESEGWWKCLLHGRQGLAPANRLQILTEVAADRPCPPFLRGLEEAPASSEETYQVPTLPRPPTPGPVYEQMRSWAEGPQPPTAQVYEFPDPPTSARIICEKTLSFPKQAILTLPRPVRASLPTLPSQVYDVPTQHRGPVVLKEPEKQQLYDIPASPKKAGLHPPDSQASNPGPLIPQPSSQQTPERKPRLSEHCRLYFGALFKAISAFHGSLSSSQPAEIITQSKLVIMVGQKLVDTLCMETQERDVRNEILRGSSHLCSLLKDVALATKNAVLTYPSPAALGHLQAEAEKLEQHTRQFRGTLG

SEQ ID NO: 6752 - protein, 58 aa, Homo sapiens
MAKRTKKVGIVGKYGTRYGASLRKMVKKIEISQHAKYTCSFCGKGEREAFTSLTIRPR

SEQ ID NO: 6753 - protein, 126 aa, Homo sapiens
MDEKNTPIRTYQVCNVMEPSQNNWLRTDWITREGAQRVYIEIKFTLRDCNSLPGVMGTCKETFNLYYYESDNDKERFIRENQFVKIDTIAADESFTQVDIGDRIMKLNTEIRDVGPLSKKGFYLAF

SEQ ID NO: 6754 - protein, 395 aa, Homo sapiens
MKEDGGAEFSARSRKRKANVTVFLQDPDEEMAKIDRTARDQCGSQPWDNNAVCADPCSLIPTPDKEDDDRVYPNSTCKPRIIAPSRGSPLPVLSWANREEVWKIMLNKEKTYLRDQHFLEQHPLLQPKMRAILLDWLMEVCEVYKLHRETFYLAQDFFDRYMATQENVVKTLLQLIGISSLFIAAKLEEIYPPKLHQFAYVTDGACSGDEILTMELMIMKALKWRLSPLTIVSWLNVYMQVAYLNDLHEVLLPQYPQQIFIQIAELLDLCVLDVDCLEFPYGILAASALYHFSSSELMQKVSGYQWCDIENCVKWMVPFAMVIRETGSSKLKHFRGVADEDAHNIQTHRDSLDLLDKARAKKAMLSEQNRASPLPSGLLTPPQSGKKQSSGPEMA

SEQ ID NO: 6755 - protein, 533 aa, Homo sapiens
MAEGKAGGAAGLFAKQVQKKFSRAQEKVLQKLGKAVETKDERFEQSASNFYQQQAEGHKLYKDLKNFLSAVKVMHESSKRVSETLQEIYSSEWDGHEELKAIVWERIAKRGRKLVDYDSARHHLEAVQNAKKKDEAKTAKAEEEFNKAQTVFEDLNQELLEELPILYNSRIGCYVTIFQNISNLRDVFYREMSKLNHNLYEVMSKLEKQHSNKVFVVKGLSSSSRRSLVISPPVRTATVSSPLTSPTSPSTLSLKSESESVSATEDLAPDAAQGEDNSEIKELLEEEEIEKEGSEASSSEEDEPLPACNGPAQAQPSPTTERAKSQEEVLPSSTTPSPGGALSPSGQPSSSATEVVLRTRTASEGSEQPKKRASIQRTSAPPSRPPPPRATASPRPSSGNIPSSPTASGGGSPTSPRASLGTGTASPRTSLEVSPNPEPPEKPVRTPEAKENENIHNQNPEELCTSPTLMTSQVASEPGEAKKMEDKEKDNKLISANSSEGQDQLQVSMVPENNNLTAPEPQEEVSTSENPQL

SEQ ID NO: 6756 - protein, 68 aa, Homo sapiens
MVKKIEISQHAKYTCSFCGKTKMKRRAVGIWHCGSCMKTVAGGAWTYNTTSAVTVKSAIRRLKELKDQ

SEQ ID NO: 6757 - protein, 986 aa, Homo sapiens
MDRMASSMKQVPNPLPKVLSRRGVGAGLEAAERESFERTQTVSINKAINTQEVAVKEKHARTCILGTHHEKGAQTFWSVVNRLPLSSNAVLCWKFCHVFHKLLRDGHPNVLKDSLRYRNELSDMSRMWGHLSEGYGQLCSIYLKLLRTKMEYHTKNPRFPGNLQMSDRQLDEAGESDVNNFFQLTVEMFDYLECELNLFQTVFNSLDMSRSVSVTAAGQCRLAPLIQVILDCSHLYDYTVKLLFKLHSCLPADTLQGHRDRFMEQFTKLKDLFYRSSNLQYFKRLIQIPQLPENPPNFLRASALSEHISPVVVIPAEASSPDSEPVLEKDDLMDMDASQQNLFDNKFDDIFGSSFSSDPFNFNSQNGVNKDEKDHLIERLYREISGLKAQLENMKTESQRVVLQLKGHVSELEADLAEQQHLRQQAADDCEFLRAELDELRRQREDTEKAQRSLSEIERKAQANEQRYSKLKEKYSELVQNHADLLRKNAEVTKQVSMARQAQVDLEREKKELEDSLERISDQGQRKTQEQLEVLESLKQELATSQRELQVLQGSLETSAQSEANWAAEFAELEKERDSLVSGAAHREEELSALRKELQDTQLKLASTEESMCQLAKDQRKMLLVGSRKAAEQVIQDALNQLEEPPLISCAGSADHLLSTVTSISSCIEQLEKSWSQYLACPEDISGLLHSITLLAHLTSDAIAHGATTCLRAPPEPADSLTEACKQYGRETLAYLASLEEEGSLENADSTAMRNCLSKIKAIGEELLPRGLDIKQEELGDLVDKEMAATSAAIETATARIEGTASPKEFYAKNSRWTEGLISASKAVGWGATVMVDAADLVVQGRGKFEELMVCSHEIAASTAQLVAASKVKADKDSPNLAQLQQASRGVNQATAGVVASTISGKSQIEETDNMDFSSMTLTQIKRQEMDSQVRVLELENELQKERQKLGELRKKHYELAGVAEGWEEGTEASPPTLQEVVTEKE

SEQ ID NO: 6758 - protein, 336 aa, Homo sapiens
MAMDSSLQARLFPGLAIKIQRSNGLIHSANVRTVNLEKSCVSVEWAEGGATKGKEIDFDDVAAINPELLQLLPLHPKDNLPLQENVTIQKQKRRSVNSKIPAPKESLRSRSTRMSTVSELRITAQENDMEVELPAAANSRKQFSVPLRRKSCLVKEVEKMKNKREEKKAQNSEMRMKRAQEYDSSFPNWEFARMIKEFRATLECHPLTMTDPIEEHRICVCVRKRPLNKQELAKKEIDVISIPSKCLLLVHEPKLKVDLTKYLENQAFCFDFAFDETASNEVVYRFTARPLVQTIFEGGKATCFAYGQTGSGKTHTMGGDLSGKAQNASKGIYAMA

SEQ ID NO: 6759 - protein, 188 aa, Homo sapiens
MAKGDPKKPKGKMSAYAFFVQTCREEHKKKNPEVPVNFAEFSKKCSERWKTMSGKEKSKFDEMAKADKVRYDREMKDYGPAKGGKKKKDPNAPKRPPSGFFLFCSEFRPKIKSTNPGISIGDVAKKLGEMWNNLNDSEKQPYITKAAKLKEKYEKDVADYKSKGKFDGAKGPAKVARKKVEEEDEEEE

SEQ ID NO: 6760 - protein, 278 aa, Homo sapiens
MPPKKGGDGIKPPPIIGRFGTSLKIGIVGLPNVGKSTFFNVLTNSQASAENFPFCTIDPNESRVPVPDERFDFLCQYHKPASKIPAFLNVVDIAGLVKGAHNGQGLGNAFLSHISACDGIFHLTRAFEDDDITHVEGSVDPIRDIEIIHEELQLKDEEMIGPIIDKLEKVAVRGGDKKLKPEYDIMCKVKSWVIDQKKPVRFYHDWNDKEIEVLNKHLFLTSKPMVYLVNLSEKDYIRKKNKWLLESTDNKAEIILLKMEILSSSNLTHLNNRRRNKI

SEQ ID NO: 6761 - protein, 2041 aa, Homo sapiens
PMELRHLLRPRPGLDSEPGGAEAGKARHAGAVIRTLSGMARHQGPARALRYFDLTPSMAGIMVPPVQRWPGPGFTFHAWLCLHPMDTAPTPAPTRPLQRKQLYSFFTSSGSGFEAFFTAAGTLVVAVCTRKEYLTMSLPEVSFADSAWHCVAIVHVPGRRPFSQNLVHVYKDGHLVKTAPLRCPSLSEPFSSCCIGSAGYRTTTTTTGLPTPPVPATLAYTHPALTRSQSVPASTGLGWGSGLVAPLQEGSIDSTLAGTQDTRWGSPTSLEGELGAVAIFHEALQATALRTLCTLGPNETAPFKPEGELHELSTRLLLHYSPQACKNNICLDLSPSHGLDGRLTGHRVETWDVKDVVNCVGGMGALLPLLERVAAQPKEAEAGPAETHDLVGPELTSGHNTQGLVLPLGKSSEERMERNAVAAFLLMLRNFLQGHMVNQESLVQCQGPAIIGALLRKVPSWAMDMNVLMSAQLLMEQVAAEGSGPLLYLLYQHLLFNFHLWTLSDFAVRLGHIQYMSSIVREHRQKLRKKYGVQFILDALRTHYSPQRERPLAADDLRTVQTSLLGLAREFLVRSLSADDVQVTQTMLSFLAATGDDGQILRRLQQNERLPERSRQRLRLRECGLQGLVACLPEGTVSPQLCQGLYKLFLGAGSGNTAGGGGSSGTLTPASQPGTPSPLDGPRPFPAAPGRHSSSLSNVLEDGSLPEPTISGDDTSNTSNPQQTSEEELCNLLTNVLFSVTWRGVEGSDEAAWRERGQVFSVLTQLGASATLVRPPDCIKRSLLEMMLESALTDIKEAPVGVLASLTQQALWLLRLLQDFLCAEGHGNQELWSEKLFEGVCSLLDRLGAWPHLANGTADLREMAQIGLRLVLGYILLEDPQLHAQAYVRLHMLLQTAVPARREEACYVLSKLEAALGRVLNTSSLESATDEAGSPLAAAAAAAAAERCSWLVPLVRTLLDRAYEPLGLQWGLPSLPPTNGSPTFFEDFQAFCATPEWRHFIDKQVQPTMSQFEMDTYAKSHDLMSGFWNACYDMLMSSGQRRQWERAQSRRAFQELVLEPAQRRARLEGLRYTAVLKQQATQHSMALLHWGALWRQLASPCGAWALRDTPIPRWKLSSAETYSRMRLKLVPNHHFDPHLEASALRDNLGEVPLTPTEEASLPLAVTKEAKVSTPPELLQEDQLGEDELAELETPMEAAELDEQREKLVLSAECQLVTVVAVVPGLLEVTTQNVYFYDGSTERVETEEGIGYDFRRPLAQLREVHLRRFNLRRSALELFFIDQANYFLNFPCKVGTTPVSSPSQTPRPQPGPIPPHTQVRNQVYSWLLRLRPPSQGYLSSRSPQEMLRASGLTQKWVQREISNFEYLMQLNTIAGRTYNDLSQYPVFPWVLQDYVSPTLDLSNPAVFRDLSKPIGVVNPKHAQLVREKYESFEDPAGTIDKFHYGTHYSNAAGVMHYLIRVEPFTSLHVQLQSGRFDCSDRQFHSVAAAWQARLESPADVKELIPEFFYFPDFLENQNGFDLGCLQLTNEKVGDVVLPPWASSPEDFIQQHRQALESEYVSAHLHEWIDLIFGYKQRGPAAEEALNVFYYCTYEGAVDLDHVTDERERKALEGIISNFGQTPCQLLKEPHPTRLSAEEAAHRLARLDTNSPSIFQHLDELKAFFAEVVSDGVPLVLALVPHRQPHSFITQGSPDLLVTVSASGLLGTHSWLPYDRNISNYFSFSKDPTMGSHKTQRLLSGPWVPGSGVSGQALAVAPDGKLLFSGGHWDGSLRVTALPRGKLLSQLSCHLDVVTCLALDTCGIYLISGSRDTTCMVWRLLHQGGLSVGLAPKPVQVLYGHGAAVSCVAISTELDMAVSGSEDGTVIIHTVRRGQFVAALRPLGATFPGPIFHLALGSEGQIVVQSSAWERPGAQVTYSLHLYSVNGKLRASLPLAEQPTALTVTEDFVLLGTAQCALHILQLNTLLPAAPPLPMKVAIRSVAVTKERSHVLVGLEDGKLIVVVAGQPSEVRSSQFARKLWRSSRRISQVSSGETEYNPTEAR

SEQ ID NO: 6762 - protein, 116 aa, Homo sapiens
MASPPACPSEEDESLKGCELYVQLHGIQQVLKDCIVHLCISKPERPMKFLREHFEKLEKEENRQILARQKSNSQSDSHDEEVSPTPPNPVVKARRRRGGVSAEVYTEEDAVSYVRK

SEQ ID NO: 6763 - protein, 174 aa, Homo sapiens
MASSDIQVKELEKRASGQAFELILSPRSKESVPEFPLSPPKKKDLSLEEIQKKLEAAEERRKSHEAEVLKQLAEKREHEKEVLQKAIEENNNFSKMAEEKLTHKMEANKENREAQMAAKLERLREKMYFWTHGPGAHPAQISAEQSCLHSVPALCPALGLQSALITWSDLSHHH

SEQ ID NO: 6764 - protein, 527 aa, Homo sapiens
MAKERCLKKSFQDSLEDIKKRMKEKRNKNLAEIGKRRSFIAAPCQIITNTSTLLKNYQDNNKMLVLALENEKSKVKEAQDIILQLRKECYYLTCQLYALKGKLTSQQTVEPAQNQEICSSGMDPNSDDSSRNLFVKDLPQIPLEETELPGQGESFQIEDQIPTIPQDTLGVDFDSGEAKSTDNVLPRTVSVRSSLKKHCNSICQFDSLDDFETSHLAGKSFEFERVGFLDPLVNMHIPENVQHNACQWSKDQVNLSPKLIQPGTFTKTKEDILESKSEQTKSKQRDTQERKREEKRKANRRKSKRMSKYKENKSENKKTVPQKKMHKSVSSNDAYNFNLEEGVHLTPFRQKVSNDSNREENNESEVSLCESSGSGDDSDDLYLPTCKYIQNPTSNSDRPVTRPLAKRALKYTDEKETEGSKPTKTPTTTPPETQQSPHLSLKDITNVSLYPVVKIRRLSLSPKKNKASPAVALPKRRCTASVNYKEPTLASKLRRGDPFTDLCFLNSPIFKQKKDLRRSKKSMKQIQ

SEQ ID NO: 6765 - protein, 132 aa, Homo sapiens
MATSIGVSFSVGDGVPEAEKNAGEPENTYILRPVFQQRFRPSVVKDCIHAVLKEELANAEYSPEEMPQLTKHLSENIKDKLKEMGFDRYKMVVQVVIGEQRGEGVLLECSGMISAHCNLCLPGSSDSPASAS

SEQ ID NO: 6766 - protein, 135 aa, Homo sapiens
ESCEERRYLQSAQSQIHNTCWAMMGLMAVRHPDIEAQERGVRCLLEKQLPNGDWPQWPSSHRTQRFPALFGVITQAGLQCQYPCLQSSLEITSVFNPLFRGSVFFLFHEEDFLFTIGSQCRGVCSSPVGFSVLGG

SEQ ID NO: 6767 - protein, 57 aa, Homo sapiens
MSGRLWSKAIFAGYKRGLRNQREHTALLKIEGVYARDETEFYLGKRCAYVYKAKNWD

SEQ ID NO: 6768 - protein, 32 aa, Homo sapiens
MAPKRQSPLPPQKKKPRPPPALGPEETSASAG

SEQ ID NO: 6769 - protein, 138 aa, Homo sapiens
MKEDQVVAEEPGFQDEEESLFQDIDLLQKHGINVADIKKLKSVGICTIKGIQMTTRRALCNVKGLSEAKVDKIKEAANKLIEPGFLTAFEYSEKRKMVFHITTGSQEFDKLLGGGIESMAITEAFGEFRTGKTQLSHT

SEQ ID NO: 6770 - protein, 418 aa, Homo sapiens
GLTTQQQKEELVAQKRRKRRRMLRERSPSPPTIQSKRQTPSPRLALSTRYSPDEMNNSPNFEEKKKFLTIFNLTHISAEKRKDKERLVEMLRAMKQKALSAAVADSLTNSPRDSPAVSLSEPATQQASLDVEKPVGVAASLSDIPKAAEPGKLEQVRPQELSRVQELAPASGEKARLSEAPGGKKSLSMLHYIRGAAPKDIPVPLSHSTNGKSKPWEPFVAEEFAHQFHESVLQSTQKALQKHKGSVAVLSAEQNHKVDTSVHYNIPELQSSSRAPPPQHNGQQEPPTARKGPPTQELDRDSEEEEEEDDEDGEDEEEVPKRKWQGIEAVFEAYQEHIEEQNLERQVLQTQCRRLEARHYSLSLTAEQLSHSVAMGFPHVGQAGLELLTTGDLPASTSKSAGITGVSHHARPGHFQMS

SEQ ID NO: 6771 - protein, 306 aa, Homo sapiens
MARVPLGRSLTLSPRLEHNGMTSAHHNFRLPGSRDSPASASQVAEIIDLEWYEKSEETHASQIELLETSSTQEPLNASEAFCPRDCMVPVVFPGPVSQEGCCQFTCELLKHIMYQRQQLPLPYEQLKHFYRKPSPQAEEMLKKKPRATTEVSSRKCQQALAELESVLSHLEDFFARTLVPRVLILLGGNALSPKEFYELDLSLLAPYSVDQSLSTAACLRRLFRAIFMADAFSELQAPPLMGTVVMAQGHRNCGEDWFRPKLNYRVPSRGHKLTVTLSCGRPSIRTTAWEDYIWFQAPVTFKGFRE

SEQ ID NO: 6772 - protein, 637 aa, Homo sapiens
MARRPRHSIYSSDEDDEDFEMCDHDYDGLLPKSGKRHLGKTRWTREEDEKLKKLVEQNGTDDWKVIANYLPNRTDVQCQHRWQKVLNPELIKGPWTKEEDQRVIELVQKYGPKRWSVIAKHLKGRIGKQCRERWHNHLNPEVKKTSWTEEEDRIIYQAHKRLGNRWAEIAKLLPGRTDNAIKNHWNSTMRRKVEQEGYLQESSKASQPAVATSFQKNSHLMGFAQAPPTAQLPATGQPTVNNDYSYYHISEAQNVSSHVPYPVALHVNIVNVPQPAAAAIQRHYNDEDPEKEKRIKELELLLMSTENELKGQQTQNHTCSYPGWHSTTIADHTRPHGDSAPVSCLGEHHSTPSLPADPGSLPEESASPARCMIVHQGTILDNVKNLLEFAETLQFIDSFLNTSSNHENSDLEMPSLTSTPLIGHKLTVTTPFHRDQTVKTQKENTVFRTPAIKRSILESSPRTPTPFKHALAAQEIKYGPLKMLPQTPSHLVEDLQDVIKQESDESGIVAEFQENGPPLLKKIKQEVESPTDKSGNFFCSHHWEGDSLNTQLFTQTSPVADAPNILTSSVLMAPASEDEDNVLKAFTVPKNRSLASPLQPCSSTWEPASCGKMEEQMTSSSQARKYVNAFSARTLVM

SEQ ID NO: 6773 - protein, 245 aa, Homo sapiens
MLPLEPCRRPNFELIPLLNSVDSDNCGSMVPSFADILYVANDEEASYLRFRNSIWKNEEEKVEIFHPLRLVRDPLSPAVRQKETVKNDLPVNEAAIRKIAALENELTFLRSQIAAIVEMQELKNSTNSSSFGLSDERISLGQLSSSRAAHLSVDPDQLPGSVLSPPPPPPLPPQFSSLQPPCFPPVQPGSNNICDSDNPATEMSKQNPAANKTNYSHHSKSQRNKDIPNMLDVLKDMNKVKLRAI

SEQ ID NO: 6774 - protein, 303 aa, Homo sapiens
MAAAARARVAYLLRQLQRAACQCPTHSHTYSQAPGLSPSGKTTDYAFEMAVSNIRYGAAVTKEVGMDLKNMGAKNVCLMTDKNLSKLPPVQVAMDSLVKNGIPFTVYDNVRVEPTDSSFMEAIEFAQKGAFDAYVAVGGGSTMDTCKAANLYASSPHSDFLDYVSAPIGKGKPVSVPLKPLIAVPTTSGTGSETTGVAIFDYEHLKVKIGITSRAIKPTLGLIDPLHTLHMPARVVANSGFDVLCHALESYTTLPYHLRSPCPSNPITRPAYQGSNPISDIWAIHALRIVAKYLKRAVNSTDK

SEQ ID NO: 6775 - protein, 205 aa, Homo sapiens
MTLKASEGESGGSMHTALSDLYLEHLLQKRSRPEMFMRAQFDYDPKKDNLIPCKEAGLKFATGDIIQIINKDDSNWWQGRVEGSSKESAGLIPSPELQEWRVASMAQSAPSEAPSCSPFGKKKKYKDKYLAKHSSIFDQLDVVSYEEVVRLPAFKRKTLVLIGASGVGRSHIKNALLSQNPEKFVYPVPYTTRPPRKSEEDGKEY

SEQ ID NO: 6776 - protein, 490 aa, Homo sapiens
MDNYSTGYDVKPPCLYQMPLSGQQSSIKVEDIQMHNYQQHSHLPPQSEEMMPHSGSVYYKPSSPPTPTTPGFQVQHSPMWDDPGSLHNFHQNYVATTHMIEQRKTPVSRLSLFSFKQSPPGTPVSSCQMRFDGPLHVPMNPEPAGSHHVVDGQTFAVPNPIRKPASMGFPGLQIGHASQLLDTQVPSPPSRGSPSNEGLCAVCGDNAACQHYGVRTCEGCKGFFKRTVQKNAKYVCLANKNCPVDKRRRNRCQYCRFQKCLAVGMVKEVVRTDSLKGRRGRLPSKPKSPQEPSPPSPPVSLISALVRAHVDSNPAMTSLDYSRFQANPDYQMSGDDTQHIQQFYDLLTGSMEIIRGWAEKIPGFADLPKADQDLLFESAFLELFVLRLAYRSNPVEEYEHRHFCLLLHCCPGYGHRETRAQGTQESGRTAKQDCKLSQRPRDFQQWGVEPPQLFVQTVGEAPRTSYPLHTGATAHFLPEIGRLGATASNN

SEQ ID NO: 6777 - protein, 40 aa, Homo sapiens
MKDQSLRKLQQEMDSLTFRNLQLAKRVELLQDELALSEPR

SEQ ID NO: 6778 - protein, 164 aa, Homo sapiens
PRALCHTNQSLGRGLATTRGRGSDGNGPTGNGDHPNFSLSEGRAFGSLAAQPITSCLSVPAPPFSLGKLQDGLLHITTCSFVAPWNSLSLAQRRGFTKTYTVGCEECTVFPCLSIPCKLQSGTHCLWTDQLLQGSEKGFQSRHLACLPREPGLCTWQSLRSQIA

SEQ ID NO: 6779 - protein, 85 aa, Homo sapiens
MAKQPSDVSSECDREGRQLQPAERPPQLRPGAPTSLQTEPQASMRQAEPADMRPEIWIAQELRRIGDEFNAYYARRLAKLLASST

SEQ ID NO: 6780 - protein, 175 aa, Homo sapiens
MGAYKYIQELWRKKQSDVMRFLLRVRCWQYRQLSALHRAPRPTRPDKARRLGYKAKQGYVIYRIRVRRGGRKRPVPKGATYGKPVHHGVNQLKFARSLQSVAEVNAGRHCGALRVLNSYWVGEDSTYKFFEVILIDPFHKAIRRNPDTQWITKPVHKHREMRGLTSAGRKSRGLG

SEQ ID NO: 6781 - protein, 60 aa, Homo sapiens
MLLSLKPSEAPELDEDEGFGDWSQRPEQRQQHEGAQGALDSGEPPQCRSPEGEQEDRPGL

SEQ ID NO: 6782 - protein, 126 aa, Homo sapiens
RVHARIIGARGKAIRKIMDEFKVDIRFPQSGAPDPNCVTVTGLPENVEEAIDHILNLEEEYLADVVDSEALQVYMKPPAHEEAKAPSRGFVVRDAPWTASSSEKVRCGLLPSWVPGRVGGQAGLVS

SEQ ID NO: 6783 - protein, 146 aa, Homo sapiens
MKFQYKEDHPFEYRKKEGEKIRKKYPDRVPVIVEKAPKARVPDLDKRKYLVPSDLTVGQFYFLIRKRIHLRPEDALFFFVNNTIPPTSATMGQLYEVMVLVAQYWMPSSAVWHPLALVLDALITHLRSGAEGVIYPDPLTYGSVRL

SEQ ID NO: 6784 - protein, 282 aa, Homo sapiens
MEAKGNGDMKEESAAQLGCCHRPMALGGTGGSLSPSLDFQLFRGDQVFSACRPLPDMVDAHGPSCASWLCPLPLAPGRSALLACLQDLDLNLCTPQPAPLGTDLQGLQEDALSMKHEPPGLQASSTDDKKFTVKYPQNKDKLGKQPERAGEGAPCPAFSSHNSSSPPPLQNRKSPSPLAFCPCPPVNSISKELPFLLHAFYPGYPLLLPPPHLFTYGALPSDQCPHLLMLPQDPSYPTMAMPSLLMMVNELGHPSARWETLLPYPGAFQASGQALPSQARNP

SEQ ID NO: 6785 - protein, 269 aa, Homo sapiens
MKEESAAQLGCCHRPMALGGTGGSLSPSLDFQLFRGDQVFSACRPLPDMVDAHGPSCASWLCPLPLAPGRSALLACLQDLDLNLCTPQPAPLGTDLQGLQEDALSMKHEPPGLQASSTDDKKFTVKYPQNKDKLGKQPERAGEGAPCPAFSSHNSSSPPPLQNRKSPSPLAFCPCPPVNSISKELPFLLHAFYPGYPLLLPPPHLFTYGALPSDQCPHLLMLPQDPSYPTMAMPSLLMMVNELGHPSARWETLLPYPGAFQASGQALPS

SEQ ID NO: 6786 - protein, 183 aa, Homo sapiens
MMEQRSRDPGMVRSPQNQYPAELMRRFELYFQGPSSNKPRVIREVRADSVGKLVTVRGIVTRVSEVKPKMVVATYTCDQCGAETYQPIQSPTFMPLIMCPSQECQTNRSGGRLYLQTRGSRFIKFQEMKMQEHSDQVPVGNIPRSITVLVEGENTRIAQPGDHVSVTGIFLPILRTGFRQVVQ

SEQ ID NO: 6787 - protein, 269 aa, Homo sapiens
ADSMLLALQLSMAENNKQHSGEFTVSLSDVLLTWKYLLHEKLNLPVENMDVTDHYEDVRKIYDDFLKNSNMLDLIDVYQKCRALTSNCENYNTVSPSQLLDFLSGKQYAVGDETDLSIPTSPTSKYNRDNEKVQLLARKIIFSYLNLLVNSKNDLAVAYILNIPDRGLGREAFTDLKHAAREKQMSIFLVATSFIRTIELGGKGYAPPPSDPLRTHVKGLSNFINFIDKLDEILGEIPNPRSPTQVNNSIKPLRERICVSMQEKKIKRV

SEQ ID NO: 6788 - protein, 272 aa, Homo sapiens
LSQAGSAGVAALATVGVASGPGPGRPGPLQDETLGVASVPSQWRAVQGIRWETKSCQTASIATASASAQARNHVDAQVQTEAPVPVSVQPPSQYDIPRLAAFLRRVEAMVIRELNKNWQSHAFDGFEVNWTEQQQMVSCLYTLGYPPAQAQGLHVTSISWNSTGSVVACAYGRLDHGDWSTLKSFVCAWNLDRRDLRPQQPSAVVEVPSAVLCLAFHPTQPSHVAGELPAVSASSPLRTQLPALQRAQGSFPWALWPGDRKAGPDPLSLEPR

SEQ ID NO: 6789 - protein, 150 aa, Homo sapiens
MSQWYELQQLDSKFLEQVHQLYDDSFPMEIRQYLAQWLEKQDWEHAANDVSFATIRFHDLLSQLDDQYSRFSLENNFLLQHNIRKSKRNLQDNFQEDPIQMSMIIYSCLKEERKILENAQRFNQAQSGNIQSTVMLDKQKELDSKVRNVK

SEQ ID NO: 6790 - protein, 220 aa, Homo sapiens
MAGQPGHMPHGGSSNNLCHTLGPVHPPDPQRHPNTLSFRCSLADFQIEKKIGRGQFSEVYKATCLLDRKTVALKKVQIFEMMDAKARQDCVKEIGLLKQLNHPNIIKYLDSFIEDNELNIVLELADAGDLSQMIKYFKKQKRLIPERTVWKYFVQLCSAVEHMHSRRVMHRDIKPANVFITATGVVKLGDLGLGRFFSSETTAAHSLVGTPYYMSPERIH

SEQ ID NO: 6791 - protein, 276 aa, Homo sapiens
MEVMNLMEQPIKVTEWQQTYTYDSGIHSGANTCVPSVSSKGIMEEDEACGRQYTLKKTTTYTQGVPPSQGDLEYQMSTTARAKRVREAMCPGVSGEDSSLLLATQVEGQATNLQRLAEPSQLLKSAIVHLINYQDDAELATRALPELTKLLNDEDPVVVTKAAMIVNQLSKKEASRRALMGSPQLVAAVVRTMQNTSDLDTARCTTSILHNLSHHREGLLAIFKSGGIPALVRMLSSPVESVLFYAITTLHNLLLYQEGAKMAVRLADGLQKMVPL

SEQ ID NO: 6792 - protein, 127 aa, Homo sapiens
MIHTNLKKKFSCCVLVFLLFAVICVWKEKKKGSYYDSFKLQTKEFQVLKSLGKLAMGSDSQSVSSSSTQDPHRGRQTLGSLRGLAKAKPEASFQVWNKDSSSKNLIPRLQKIWKNYLSMNKYKVSYK

SEQ ID NO: 6793 - protein, 239 aa, Homo sapiens
MEPYEAQKMMAEIRGSKETATQPLPLYDTPYEPEEDGATAEGEGAPWPRESRLPEDDERPPEEYDQPWEWKKERISKAFAAQFEGPEKSCLSPGREEKGRLPPRLSAGNPKSAKPLSMEPSSPLGEWTDPALPLENQVWYHGAISRTDAENLLRLCKEASYLVRNSETSKNDFSLSLKSSQGFMHMKLSRTKEHKYVLGQNSPPFSSVPEIVHHYASRKLPIKGAEHMSLLYPVAIRTL

SEQ ID NO: 6794 - protein, 1531 aa, Homo sapiens
MEVSPLQPVNENMQVNKIKKNEDAKKRLSVERIYQKKTQLEHILLRPDTYIGSVELVTQQMWVYDEDVGINYREVTFVPGLYKIFDEILVNAADNKQRDPKMSCIRVTIDPENNLISIWNNGKGIPVVEHKVEKMYVPALIFGQLLTSSNYDDDEKKVTGGRNGYGAKLCNIFSTKFTVETASREYKKMFKQTWMDNMGRAGEMELKPFNGEDYTCITFQPDLSKFKMQSLDKDIVALMVRRAYDIAGSTKDVKVFLNGNKLPVKGFRSYVDMYLKDKLDETGNSLKVIHEQVNHRWEVCLTMSEKGFQQISFVNSIATSKGGRHVDYVADQIVTKLVDVVKKKNKGGVAVKAHQVKNHMWIFVNALIENPTFDSQTKENMTLQPKSFGSTCQLSEKFIKAAIGCGIVESILNWVKFKAQVQLNKKCSAVKHNRIKGIPKLDDANDAGGRNSTECTLILTEGDSAKTLAVSGLGVVGRDKYGVFPLRGKILNVREASHKQIMENAEINNIIKIVGLQYKKNYEDEDSLKTLRYGKIMIMTDQDQDGSHIKGLLINFIHHNWPSLLRHRFLEEFITPIVKVSKNKQEMAFYSLPEFEEWKSSTPNHKKWKVKYYKGLGTSTSKEAKEYFADMKRHRIQFKYSGPEDDAAISLAFSKKQIDDRKEWLTNFMEDRRQRKLLGLPEDYLYGQTTTYLTYNDFINKELILFSNSDNERSIPSMVDGLKPGQRKVLFTCFKRNDKREVKVAQLAGSVAEMSSYHHGEMSLMMTIINLAQNFVGSNNLNLLQPIGQFGTRLHGGKDSASPRYIFTMLSSLARLLFPPKDDHTLKFLYDDNQRVEPEWYIPIIPMVLINGAEGIGTGWSCKIPNFDVREIVNNIRRLMDGEEPLPMLPSYKNFKGTIEELAPNQYVISGEVAILNSTTIEISELPVRTWTQTYKEQVLEPMLNGTEKTPPLITDYREYHTDTTVKFVVKMTEEKLAEAERVGLHKVFKLQTSLTCNSMVLFDHVGCLKKYDTVLDILRDFFELRLKYYGLRKEWLLGMLGAESAKLNNQARFILEKIDGKIIIENKPKKELIKVLIQRGYDSDPVKAWKEAQQKVPDEEENEESDNEKETEKSDSVTDSGPTFNYLLDMPLWYLTKEKKDELCRLRNEKEQELDTLKRKSPSDLWKEDLATFIEELEAVEAKEKQDEQVGLPGKGGKAKGKKTQMAEVLPSPRGQRVIPRITIEMKAEAEKKNKKKIKNENTEGSPQEDGVELEGLKQRLEKKQKREPGTKTKKQTTLAFKPIKKGKKRNPWSDSESDRSSDESNFDVPPRETEPRRAATKTKFTMDLDSDEDFSDFDEKTDDEDFVPSDASPPKTKTSPKLSNKELKPQKSVVSDLEADDVKGSVPLSSSPPATHFPDETEITNPVPKKNVTVKKTAAKSQSSTSTTGAKKRAAPKGTKRDPALNSGVSQKPDPAKTKNRRKRKPSTSDDSDSNFEKIVSKAVTSKKSKGESDDFHMDFDSAVAPRAKSVRAKKPIKYLEESDEDDLF

SEQ ID NO: 6795 - protein, 462 aa, Homo sapiens
MSAEVIHQVEEALDTDEKEMLLFLCRDVAIDVVPPNVRDLLDILRERGKLSVGDLAELLYRVRRFDLLKRILKMDRKAVETHLLRNPHLVSDYRVLMAEIGEDLDKSDVSSLIFLMKDYMGRGKISKEKSFLDLVVELEKLNLVAPDQLDLLEKCLKNIHRIDLKTKIQKYKQSVQGAGTSYRNVLQAAIQKSLKDPSNNFRLHNGRSKEQRLKEQLGAQQEPVKKSIQESEAFLPQSIPEERYKMKSKPLGICLIIDCIGNETELLRDTFTSLGYEVQKFLHLSMHGISQILGQFACMPEHRDYDSFVCVLVSRGGSQSVYGVDQTHSGLPLHHIRRMFMGDSCPYLAGKPKMFFIQNYVVSEGQLEDSSLLEVDGPAMKNVEFKAQKRGLCTVHREADFFWSLCTADMSLLEQSHSSPSLYLQCLSQKLRQERGTIPGSGITESKDMHFSSLGCILLDVL

SEQ ID NO: 6796 - protein, 110 aa, Homo sapiens
MSRRSQRLTRYSQGDDDGSSSSGGSSVAGSQSTLFKDSPLRTLKRKSSNMKRLSPAPQLGPSSDAHTSYYSESLVHESWFPPRSSLEELHGDANWGEDLRVRRRRGTGGS

SEQ ID NO: 6797 - protein, 263 aa, Homo sapiens
YRPTWDLALDPLVSCKLCLGEYPVEQMTTIAQCQCIFCTLCLKQYVELLIKEGLETAISCPDAACPKQGHLQENEIECMVAAEIMQRYKKLQFEREVLFDPCRTWCPASTCQAVCQLQDVGLQTPQPVQCKACRMEFCSTCKASWHPGQGCPETMPITFLPGETSAAFKMEEDDAPIKRCPKCKVYIERDEGCAQMMCKNCKHAFCWYCLESLDDDFLLIHYDKGPCRNKLGHSRASVIWHRTQGDAILEKCILHNTESECHL

SEQ ID NO: 6798 - protein, 151 aa, Homo sapiens
MLKSSFATCVLVSEEDKHAIIVEPEKRGKYVVCFDPLDGSSNIDCLVSVGTIFGIYRKKSTDEPSEKDALQPGRNLVAAGYALYGSATMLVLAMDCGVNCFMLDPAIGEFILVDKDVKIKKKGKIYSLNEGYARDFDPAVTEYIQRKKFPP

SEQ ID NO: 6799 - protein, 918 aa, Homo sapiens
MEPIYPFARPQMNTRFPSSRMVPFHFPPSKCALWNPTPTGDFIYLHLSYYRNPKLVVTEKTIRLAYRHAKQNKKNSSCFLLGSLTADEDEEGVTLTVDRFDPGREVPECLEITPTASLPGDFLIPCKVHTQELCSREMIVHSVDDFSSALKALQCHICSKDSLDCALARNLSSNLNISQVQGTYKYGYLTMDETRKLLLLLESDPKVYSLPLVGIWLSGITHIYSPQVWACCLRYIFNSSVQERVFSESGNFIIVLYSMTHKEPEFYECFPCDGKIPDFRFQLLTSKETLHLFKNVEPPDKNPIRCELSAESQNAETEFFSKASKNFSIKRSSQKLSSGKMPIHDHDSGVEDEDFSPRPIPSPHPVSQKISKIQPSVPELSLVLDGNFIESNPLPTPLEMVNNENPPLINHLEHLKPLQPQLYDEKHSPEVEAGEPSLRGIPNQLNQDKPALLRHCKVRQPPAYKKGNPHTRNSIKPSSHNGPSHDIFEKLQTVSAGNVQNEEYPIRPSTLNSRQSSLAPQSQPHDFVFSPHNSGRPMELQIPTPPLPSYCSTNVCRCCQHHSHIQYSPLNSWQGANTVGSIQDVQSEALQKHSLFHPSGCPALYCNAFCSSSSPIALRPQGDMGSCSPHSNIEPSPVARPPSHMDLCNPQPCTVCMHTPKTESDNGMMGLSPDAYRFLTEQDRQLRLLQAQIQRLLEAQSLMPCSPKTTAVEDTVQAGRQMELVSVEAQSSPGLHMRKGVSIAVSTGASLFWNAAGEDQEPDSQMKQDDTKISSEDMNFSVDINNEVTSLPGSASSLKAVDIPSFEESNIAVEEEFNQPLSVSNGQLAESVSMCLQTGPTGGASNNSETSEEPKIEHVMQPLLHQPSDNQKIYQDLLGQVNHLLNSSSKETEQPSTKAVIISHECTRTQNVYHTKKK

SEQ ID NO: 6800 - protein, 208 aa, Homo sapiens
YVVKQEWFWGSIQMDARAGETMYLYEKANTPELKKSVSMLSLNTPNSNRKRRRLKETLAQLSRETDVSPFPPHTPKSCTKSSKSSTPVPSKQSARWQVAKELYQTESNYVNILATIIQLFQVPLEEEGQRGGPILAPEEIKTIFGSIPDIFDVHTKIKDDLEDLIVNWDESKSIGDIFLKYSKDLVKTYPPFVNFFEMSKETIIKCEK

SEQ ID NO: 6801 - protein, 195 aa, Homo sapiens
SHIAEDVGRLVKKAKKTYQAYHMESVNAEAKLREAERQEEKRAGRSVPTTTAGATEAGPLRKSSLKKGGRLVEKLWPPQRPVAASSCAPVCWLQAGFLVHPPWWGAMCAPSTHQRQAKFMEHKLKCTKARNEYLLSLASVNAAVSNYYLHDVLDLMDCCDTGFHLALGQVLRSYTAAESRTQASQVQGLGSLEEA

SEQ ID NO: 6802 - protein, 317 aa, Homo sapiens
MAEPGSRESETRARSPSVAAMASPQLCRALVSAQWVAEALRAPRAGQPLQLLDASWYLPKLGRDARREFEERHIPGAAFFDIDQCSDRTSPYDHMLPGAEHFAEYAGRLGVGAATHVVIYDASDQGLYSAPRVWWMFRAFGHHAVSLLDGGLRHWLRQNLPLSSGKSQPAPAEFRAQLDPAFIKTYEDIKENLESRRFQVVDSRATGRFRGTEPEPRDGIEPGHIPGTVNIPFTDFLSQEGLEKSPEEIRHLFQEKKVDLSKPLVATCGSGVTACHVALGAYLCGKPDVPIYDGSWVEWYMRARPEDVISEGRGKTH

SEQ ID NO: 6803 - protein, 183 aa, Homo sapiens
MALLTAETFRLQFNNKRRLRRPYYPRKALLCYQLTPQNGSTPTRGYFENKKKCHAEICFINEIKSMGLDETQCYQVTCYLTWSPCSSCAWELVDFIKAHDHLNLGIFASRLYYHWCKPQQKGLRLLCGSQVPVEVMGFPEFADCWENFVDHEKPLSFNPYKMLEELDKNSRAIKRRLERIKQS

SEQ ID NO: 6804 - protein, 122 aa, Homo sapiens
MAKQPSDVSSECDREGRQLQPAERPPQLRPGAPTSLQTEPQGNPEGNHGGEGDSCPHGSPQGPLAPPASPGPFATRSPLFIFMRRSSLLSRSSSGYFSFDTDRSPAPMSCDKSTQTPSPPCQ

SEQ ID NO: 6805 - protein, 122 aa, Homo sapiens
MAGILFEDIFDVKDIDPEGKKFDRVSRLHCESESFKMDLILDVNIQIYPVDLGDKFRLVIASTLYEDGTLDDGEYNPTDDRPSSSAYVSYGGLLMRLQGDANNLHGFEVDSRVYLLMKKLAF

SEQ ID NO: 6806 - protein, 129 aa, Homo sapiens
MSAEVIHQVEEALDTDEKEMLLFLCRDVAIDVVPPNVRDLLDILRERGKLSVGDLAELLYRVRRFDLLKRILKMDRKAVETHLLRNPHLVSDYRVLMAEIGEDLDKSDVSSLIFLMKDYMGRGKISKEK

SEQ ID NO: 6807 - protein, 520 aa, Homo sapiens
MGQSGRSRHQKRARAQAQLRNLEAYAANPHSFVFTRGCTGRNIRQLSLDVRRVMEPLTASRLQVRKKNSLKDCVAVAGPLGVTHFLILSKTETNVYFKLMRLPGGPTLTFQVKKYSLVRDVVSSLRRHRMHEQQFAHPPLLVLNSFGPHGMHVKLMATMFQNLFPSINVHKVNLNTIKRCLLIDYNPDSQELDFRHYSIKVVPVGASRGMKKLLQEKFPNMSRLQDISELLATGAGLSESEAEPDGDHNITELPQAVAGRGNMRAQQSAVRLTEIGPRMTLQLIKVQEGVGEGKVMFHSFVSKTEEELQAILEAKEKKLRLKAQRQAQQAQNVQRKQEQREAHRKKSLEGMKKARVGGSDEEASGIPSRTASLELGEDDDEQEDDDIEYFCQAVGEAPSEDLFPEAKQKRLAKSPGRKRKRWEMDRGRGRLCDQKFPKTKDKSQGAQVPSPALPTSWQLPTTNSVGSRGTSCGPYWWLSSWWPWPAMAWPCTASASGSSAHGTPPWSSLSSWQSATCSAP

SEQ ID NO: 6808 - protein, 138 aa, Homo sapiens
MSSLGASFVQIKFDDLQFFENCGGGSFGSVYRAKWISQDKEVAVKKLLKIEKEAEILSVLSHRNIIQFYGVILEPPNYGIVTEYASLGSLYDYINSNRSEEMDMDHIMTWATDVAKGMHYLHMEAPVKVIHRDLKSRN

SEQ ID NO: 6809 - protein, 1170 aa, Homo sapiens
MSLLNPVLLPPKVKAYLSQGERFIKWDDETTVASPVILRVDPKGYYLYWTYQSKEMEFLDITSIRDTRFGKFAKMPKSQKLRDVFNMDFPDNSFLLKTLTVVSGPDMVDLTFHNFVSYKENVGKAWAEDVLALVKHPLTANASRSTFLDKILVKLKMQLNSEGKIPVKNFFQMFPADRKRVEAALSACHLPKGKNDAINPEDFPEPVYKSFLMSLCPRPEIDEIFTSYHAKAKPYMTKEHLTKFINQKQRDSRLNSLLFPPARPDQVQGLIDKYEPSGINAQRGQLSPEGMVWFLCGPENSVLAQDKLLLHHDMTQPLNHYFINSSHNTYLTAGQFSGLSSAEMYRQVLLSGCRCVELDCWKGKPPDEEPIITHGFTMTTDIFFKEAIEAIAESAFKTSPYPIILSFENHVDSPRQQAKMAEYCRTIFGDMLLTEPLEKFPLKPGVPLPSPEDLRGKILIKNKKNQFSGPTSSSKDTGGEAEGSSPPSAPAGEGTVWAGEEGTELEEEEVEEEEEEESGNLDEEEIKKMQSDEGTAGLEVTAYEEMSSLVNYIQPTKFVSFEFSAQKNRSYVISSFTELKAYDLLSKASVQFVDYNKRQMSRIYPKGTRMDSSNYMPQMFWNAGCQMVALNFQTMDLPMQQNMAVFEFNGQSGYLLKHEFMRRPDKQFNPFSVDRIDVVVATTLSITVISGQFLSERSVRTYVEVELFGLPGDPKRRYRTKLSPSTNSINPVWKEEPFVFEKILMPELASLRVAVMEEGNKFLGHRIIPINALNSGYHHLCLHSESNMPLTMPALFIFLEMKDYIPGAWADLTVALANPIKFFSAHDTKSVKLKEAMGGLPEKPFPLASPVASQVNGALAPTSNGSPEPRTASLEELRELKGVVKLQRRHEKELRELERRGARRWEELLQRGAAQLAELGPPGVGGVGACKLGPGKGSRKKRSLPREESAGAAPGEGPEGVDGRVRELKDRLELELLRQGEEQYECVLKRKEQHVAEQISKMMELAREKQAAELKALKETSENDTKEMKKKLETKRLERIQGMTKVTTDKMAQERLKREINNSHIQEVVQVIKQMTENLERHQEKLEEKQAACLEQIREMEKQFQKEALAEYEARMKGLEAEVKESVRACLRTCFPSEAKDKPERACECPPELCEQDPLIAKADAQESRL

SEQ ID NO: 6810 - protein, 71 aa, Homo sapiens
MAACRYCCSCLRLRPLSDGPFLLPRRDRALTQLQVRALWSSAGSRAVAVDLGNRLTTDKKLLQQVEFPQTI

SEQ ID NO: 6811 - protein, 102 aa, Homo sapiens
MNAEPERKFGVVVVGVGRAGSVRMRDLRNPHPSSAFLNLIGFVSRRELGSIDGVQQISLEDALSSQEVEVAYICSESSSHEDYIRQFLNAGKHVLVEYPMTL

SEQ ID NO: 6812 - protein, 92 aa, Homo sapiens
MSTKFAIPCALILHCFFKRFPSSRMVPFHFPPSKCALWNPTPTGDFIYLHLSYYRNPKLVVTEKTIRLAYRHAKQNKKNSSCFLLGSLTADE

SEQ ID NO: 6813 - protein, 159 aa, Homo sapiens
MAENSVLTSTTGRTSLADSSIFDSKVTEISKENLLIGSTSYVEEEMPQIETRVILVQEAGKQEELIKALKDIKVGFVKMESVEEFEGLDSPEFENVFVVTDFQDSVFNDLYKADCRVIGPPVVLNCSQKGEPLPFSCRPLYCTSMMNLVLCFTGFRKKE

SEQ ID NO: 6814 - protein, 192 aa, Homo sapiens
MFFTCGPNEAMVVSGFCRSPPVMVAGGRVFVLPCIQQIQRISLNTLTLNVKSEKVKIQGQNKEMLAAACQMFLGKTEAEIAHIALETLEGHQRAIMAHMTVEEIYKDRQKFSEQVFKVASSDLVNMGISVVSYTLKDIHDDQDYLHSLGKARTAQVQKDARIGEAEAKRDAGIREAKAKQEKVSAQYLSEIE

SEQ ID NO: 6815 - protein, 665 aa, Homo sapiens
MMKTFFSTGQGNTEAFHTGTLQRQASHHIGDFCFQKIEKDIHGFQFQWKEDETNDHAAPMTEIKELTGSTGQHDQRHAGNKHIKDQLGLSFHSHLPELHIFQPEGKIGNQVEKSINNASSVSTSQRICCRPKTHISNKYGNNSLHSSLLTQKRNVHMREKSFQCIESGKSFNCSSLLKKHQITHLEEKQCKCDVYGKVFNQKRYLACHRRSHIDEKPYKCNECGKIFGHNTSLFLHKALHTADKPYECEECDKVFSRKSHLETHKIIYTGGKPYKCKVCDKAFTCNSYLAKHTIIHTGEKPYKCNECGKVFNRLSTLARHRRLHTGEKPYECEECEKVFSRKSHLERHKRIHTGEKPYKCKVCDKAFAYNSYLAKHSIIHTGEKPYKCNECGKVFNQQSTLARHHRLHTAEKPYKCEECDKVFRCKSHLERHRRIHTGEKPYKCKVCDKAFRSDSCLTEHQRVHTGEKPYMCNECGKVFSTKANLACHHKLHTAEKPYKCEECEKVFSRKSHMERHRRIHTGEKPYKCKVCDKAFRRDSHLAQHQRVHTGEKPYKCNECGKTFRQTSSLIIHRRLHTGEKPYKCNECGKTFSQMSSLVYHHRLHSGEKPYKCNECGKVFNQQAHLAQHQRVHTGEKPYKCNECGKTFSQMSNLVYHHRLHSGEKP

SEQ ID NO: 6816 - protein, 76 aa, Homo sapiens
MPDNRQPRNRQPRIRSGNEPRSAPAMEPDGRGAWAHSRAALDRLEKLLRCSRCTNILREPVCLGGCEHIFCRFERR

SEQ ID NO: 6817 - protein, 58 aa, Homo sapiens
MLRLPTVFRQMRPVSRVLAPHLTRAYAKDVKFGADARALMLQGVDLLADAVAVTMGPK

SEQ ID NO: 6818 - protein, 811 aa, Homo sapiens
MESQGVPPGPYRATKLWNEVTTSFRAGMPLRKHRQHFKKYGNCFTAGEAVDWLYDLLRNNSNFGPEVTRQQTIQLLRKFLKNHVIEDIKGRWGSENVDDNNQLFRFPATSPLKTLPRRYPELRKNNIENFSKDKDSIFKLRNLSRRTPKRHGLHLSQENGEKIKHEIINEDQENAIDNRELSQEDVEEVWRYVILIYLQTILGVPSLEEVINPKQVIPQYIMYNMANTSKRGVVILQNKSDDLPHWVLSAMKCLANWPRSNDMNNPTYVGFERDVFRTIADYFLDLPEPLLTFEYYELFVNILVVCGYITVSDRSSGIHKIQDDPQSSKFLHLNNLNSFKSTECLLLSLLHREKNKEESDSTERLQISNPGFQERCAKKMQLVNLRNRRVSANDIMGGSCHNLIGLSNMHDLSSNSKPRCCSLEGIVDVPGNSSKEASSVFHQSFPNIEGQNNKLFLESKPKQEFLLNLHSEENIQKPFSAGFKRTSTLTVQDQEELCNGKCKSKQLCRSQSLLLRSSTRRNSYINTPVAEIIMKPNVGQGSTSVQTAMESELGESSATINKRLCKSTIELSENSLLPASSMLTGTQSLLQPHLERVAIDALQLCCLLLPPPNRRKLQLLMRMISRMSQNVDMPKLHDAMGTRSLMIHTFSRCVLCCAEEVDLDELLAGRLVSFLMDHHQEILQVPSYLQTAVEKHLDYLKKGHIENPGDGLFAPLPTYSYCKQISAQEFDEQKVSTSQAAIAELLENIIKNRSLPLKEKRKKLKQFQKEYPLIYQKRFPTTESEAALFGDKPTIKQPMLILRKPKFRSLR

SEQ ID NO: 6819 - protein, 291 aa, Homo sapiens
MERKRWECPALPQGWEREEVPRRSGLSAGHRDVFYYSPSGKKFRSKPQLARYLGGSMDLSTFDFRTGKMLMSKMNKSRQRVRYDSSNQVKGKPDLNTALPVRQTASIFKQPVTKITNHPSNKVKSDPQKAVDQPRQLFWEKKLSGLNAFDIAEELVKTMDLPKGLQGVGPGCTDETLLSAIASALHTSTMPITGQLSAAVEKNPGVWLNTTQPLCKAFMVTDEDIRKQEELVQQVRKRLEEALMADMLAHVEELARDGEAPLDKACAEDDDEEDEEEEEEEPDPDPEMEHV

SEQ ID NO: 6820 - protein, 106 aa, Homo sapiens
MAENSVLTSTTGRTSLADSSIFDSKVTEISKENLLIGSTSYVEEEMPQIETRVILVQEAGKQEELIKALKDIKVGFVKMESVEEFEGLDSPEFENVFVVTDFQDSV

SEQ ID NO: 6821 - protein, 109 aa, Homo sapiens
QLLVFKHKMKNLVWTSGISALDGEFQSASEVDFYIDKDMIHIADTKVARRYGDFFIRQIHKFEEMESCAVTHAGVQRRDLSSLQPLPPGFKRVSLLSLPHSWNYSLIEP

SEQ ID NO: 6822 - protein, 133 aa, Homo sapiens
MAALRPLVKPKIVKKRTKKFIRHQSDRYVKIKRNWRKPRGIDNRVRRRFKGQILMPNIGYGSNKKTKHMLPSGFRKFLVHNVKELEVLLMCNKSYCAEIAHNVSSKNRKAIVERAAQLAIRVTNPNARLRSEE

SEQ ID NO: 6823 - protein, 222 aa, Homo sapiens
MLLSLKPSEAPELDEDEGFGDWSQRPEQRQQHEGAQGALDSGEPPQCRSPEGEQEDRPGLHAYEKEDSDEVHLEELSLSKEGPGPEDTVQDNLGAAGAEEEQEEHQKCQQPRTPSPLVLEGTIEQSSPPLSPTTKLIDRTESLNRSIEKSNSVKKSQPDLPISKIDQWLEQYTQAIETAGRTPKLARQASIELPSMAVASTKSRWETGEVQAQSAAKTPSCK

SEQ ID NO: 6824 - protein, 175 aa, Homo sapiens
MGHEQNQGAALLQMLPLLWLLPHSWAVPEEQSMITFLPLLLGLSLGCTGAGGFVAHVESTCLLDDAGTPKDFTYCISFNKDLLTCWDPEENKMAPCEFGVLNSLANVLSQHLNQKDTLMQRLRNGLQNCATHTQPFWGSLTNRTRPPSVQVAKTTPFNTREPVMLACYVWGFYPA

SEQ ID NO: 6825 - protein, 1643 aa, Homo sapiens
MHRAVDPPGARAAREAFALGGLSCAGAWSSCPPHPPPRSAWLPGGRCSASIGQPPLPAPLPPSHGSSSGHPSKPYYAPGAPTPRPLHGKLESLHGCVQALLREPAQPGLWEQLGQLYESEHDSEEATRCYHSALRYGGSFAELGPRIGRLQQAQLWNFHTGSCQHRAKVLPPLEQVWNLLHLEHKRNYGAKRGGPPVKRAAEPPVVQPVPPAALSGPSGEEGLSPGGKRRRGCNSEQTGLPPGLPLPPPPLPPPPPPPPPPPPPLPGLATSPPFQLTKPGLWSTLHGDAWGPERKGSAPPERQEQRHSLPHPYPYPAPAYTAHPPGHRLVPAAPPGPGPRPPGAESHGCLPATRPPGSDLRESRVQRSRMDSSVSPAATTACVPYAPSRPPGLPGTTTSSSSSSSSNTGLRGVEPNPGIPGADHYQTPALEVSHHGRLGPSAHSSRKPFLGAPAATPHLSLPPGPSSPPPPPCPRLLRPPPPPAWLKGPACRAAREDGEILEELFFGTEGPPRPAPPPLPHREGFLGPPASRFSVGTQDSHTPPTPPTPTTSSSNSNSGSHSSSPAGPVSFPPPPYLARSIDPLPRPPSPAQNPQDPPLVPLTLALPPAPPSSCHQNTSGSFRRPESPRPRVSFPKTPEVGPGPPPGPLSKAPQPVPPGVGELPARGPRLFDFPPTPLEDQFEEPAEFKILPDGLANIMKMLDESIRKEEEQQQHEAGVAPQPPLKEPFASLQSPFPTDTAPTTTAPAVAVTTTTTTTTTTTATQEEEKKPPPALPPPPPLAKFPPPSQPQPPPPPPPSPASLLKSLASVLEGQKYCYRGTGAAVSTRPGPLPTTQYSPGPPSGATALPPTSAAPSAQGSPQPSASSSSQFSTSGGPWARERRAGEEPVPGPMTPTQPPPPLSLPPARSESEVLEEISRACETLVERVGRSATDPADPVDTAEPADSGTERLLPPAQAKEEAGGVAAVSGSCKRRQKEHQKEHRRHRRACKDSVGRRPREGRAKAKAKVPKEKSRRVLGNLDLQSEEIQGREKSRPDLGGASKAKPPTAPAPPSAPAPSAQPTPPSASVPGKKAREEAPGPPGVSRADMLKLRSLSEGPPKELKIRLIKVESGDKETFIASEVEERRLRMADLTISHCAADVVRASRNAKVKGKFRESYLSPAQSVKPKINTEEKLPREKLNPPTPSIYLESKRDAFSPVLLQFCTDPRNPITVIRGLAGSLRLNLGLFSTKTLVEASGEHTVEVRTQVQQPSDENWDLTGTRQIWPCESSRSHTTIAKYAQYQASSFQESLQEEKESEDEESEEPDSTTGTPPSSAPDPKNHHIIKFGTNIDLSDAKRWKPQLQELLKLPAFMRVTSTGNMLSHVGHTILGMNTVQLYMKVPGSRTPGHQENNNFCSVNINIGPGDCEWFAVHEHYWETISAFCDRHGVDYLTGSWWPILDDLYASNIPVYRFVQRPGDLVWINAGTVHWVQATGWCNNIAWNVGPLTAYQYQLALERYEWNEVKNVKSIVPMIHVSWNVARTVKISDPDLFKMIKFCLLQSMKHCQVQRESLVRAGKKIAYQGRVKDEPAYYCNECDVEVFNILFVTSENGSRNTYLVHCEGCARRRSAGLQGVVVLEQYRTEELAQAYDAFTLAPASTSR

SEQ ID NO: 6826 - protein, 30 aa, Homo sapiens
MEDALFLRKSPPYIFSPIPFLGHAIAFGKS

SEQ ID NO: 6827 - protein, 264 aa, Homo sapiens
MNVTPEVKSRGMKFAEEQLLKHGWTQGKGLGRKENGITQALRVTLKQDTHGVGHDPAKEFTNHWWNELFNKTAANLVVETGQMATLTSGGEKPNKDLESCSDDDNQGSKSPKILTDEMLLQACEGRTAHKAARLGITMKAKLARLEAQEQAFLARLKGQDPGAPQLQSESKPPKKKKKKRRQKEEEEATASERNDADEKHPEHAEQNIRKSKKKKRRHQEGKVSDEREGTTKGNEKEDAAGTSGLGELNSREQTNQSLRKGKKK

SEQ ID NO: 6828 - protein, 196 aa, Homo sapiens
LVELVQYCHTQMDVTDYKGETVFHYAVQGDNSQLLGRNAVAGLNQVNNQGLTPLHLACQLGKQEMVRVLLLCNARCNIMGPNGYPIHSAMKFSQKGCAEMIISMDSSQIHSKDPRYGASPLHWAKNAEMARMLLKRGCNVNSTSSAGNTALHVAVMRNRFDCAIVLLTHGANADARGEHGNTPLHLAMSKDNVEMI

SEQ ID NO: 6829 - protein, 38 aa, Homo sapiens
MILLEVNNRIIEETLALKFENAAAGNKPEAVEVTFAGE

SEQ ID NO: 6830 - protein, 260 aa, Homo sapiens
VCVVMAAVSLSPASARLNPRRIAAIPSWPAPGSHRKFSAPRHGSLGFLPRKRSSRHRGKVKSFPKDDPSKPVHLTAFLGYKAGMTHIVREVDRPGSKVNKKEVVEAVTIVETPPMVVVGIVGYVETPRGLRTFKTVFAEHISDECKRRFYKNWHKSKKKAFTKYCKKWQDEDGKKQLEKDFSSMKKYCQVIRVIAHTQMRLLPLRQKKAHLMEIQVNGGTVAEKLDWARERLEQQVPVNQVFGQDEMIDVIGVTKGKGYK

SEQ ID NO: 6831 - protein, 221 aa, Homo sapiens
MLRLPTVFRQMRPVSRVLAPHLTRAYAKDVKFGADARALMLQGVDLLADAVAVTMGPKGRTVIIEQSWGSPKVTKDGVTVAKSIDLKDKYKNIGAKLVQDVANNTNEEAGDGTTTATVLARSIAKEGFEKISKGANPVEIRRGVMLAVDAVIAELKKQSKPVTTPEEIAQVATISANGDKEIGNIISDAMKKVGRKGVITVKDGKTLNDELEIIEGMKFDR

SEQ ID NO: 6832 - protein, 48 aa, Homo sapiens
MQAALEVTARYCGRELEQYGQCVAAKPESWQRDCHYLKMSIAQCTSSQ

SEQ ID NO: 6833 - protein, 482 aa, Homo sapiens
VEYHTFFRLLDQPKPKAKAVFFSRGSSFRYSGRTQKQLVDYFKDSGMKRIPYERRHSKTHTSVRALTADLPKQSISFPEGLRTPASPSSANAFYSLSPSTLVPSGLPEFKDSSSSLTDPQVSYVKSPAAERRSGAVAGGPDTPSAQPLGPPALQPGPGVGFCHVVSSCGSVCAGGQSFSALDLDTGRAGRELSAACKNDNGGDDFTTGSFPSGGEHRCDRQCRGGAPAFTLTNAQLQVSEEFIDDDPADISFFAGGSEAFSFPYGSVVPQESQASAQPLVAPPLCELPGSARSSPDRYSMEAVDMNTEDGFAFEEESDFNGNAHPSDTSELFEVKAQASRMQRLLGPSETSSLRNSQSENSSLNNMPLRGGLSVHTCSSASQSEASSMVNFPAYSVRSESSSAFQFSDIIDQLEQLSYPPTTAEDSSSTESDSWDSETEAPLDISLFFSNPFAHTSGERVPFDLQNNLKNLTPGEQIDKNPS

SEQ ID NO: 6834 - protein, 52 aa, Homo sapiens
MNSQLVTTEKRFLKDSLYNEGILIVWDPSVYHSDIPKWYQNPDYNFFNNYKT

SEQ ID NO: 6835 - protein, 57 aa, Homo sapiens
MSGFDDPGIFYSDSFGGDAQADEGQARKSQLQRRFKEFLRQYRVGTDRTGFTFKYSS

SEQ ID NO: 6836 - protein, 261 aa, Homo sapiens
MAQNLKDLAGRLPAGPRGMGTALKLLLGAGAVAYGVRESVFTVEGGHRAIFFNRIGGVQQDTILAEGLHFRIPWFQYPIIYDIRARPRKISSPTGSKDLQMVNISLRVLSRPNAQELPSMYQRLGLDYEERVLPSIVNEVLKSVVAKFNASQLITQRAQVSLLIRRELTERAKDFSLILDDVAITELSFSREYTAAVEAKQVALSKNPGYIKLRKIRAAQNISKTIATSQNRIYLTADNLVLNLQDESFTRGSDSLIKGKK

SEQ ID NO: 6837 - protein, 154 aa, Homo sapiens
MKEESAAQLGCCHRPMALGGTGGSLSPSLDFQLFRGDQPAPLGTDLQGLQEDALSMKHEPPGLQASSTDDKKFTVKYPQNKDKLGKQPERAGEGAPCPAFSSHNSSSPPPLQNRKSPSPLAFCPCPPVNSISKELPFLLHAFYPGYPLLLPPPH

SEQ ID NO: 6838 - protein, 118 aa, Homo sapiens
MSAEVIHQVEEALDTDEKEMLLFLCRDVAIDVVPPNVRDLLDILRERGKLSVGDLAELLYRVRRFDLLKRILKMDRKAVETHLLRNPHLVSDYRVLMAEIGEDLDKSDVSSLIFLMKD

SEQ ID NO: 6839 - protein, 172 aa, Homo sapiens
MAKQPSDVSSECDREGRQLQPAERPPQLRPGAPTSLQTEPQGNPEGNHGGEGDSCPHGSPQGPLAPPASPGPFATRSPLFIFMRRSSLLSRSSSGYFSFDTDRSPAPMSCDKSTQTPSPPCQAFNHYLSAMASMRQAEPADMRPEIWIAQELRRIGDEFNAYYARRMPLPPD

SEQ ID NO: 6840 - protein, 203 aa, Homo sapiens
MSRESDVEAQQSHGSSACSQPHGSVTQSQGSSSQSQGISSSSTSTMPNSSQSSHSSSGTLSSLETVSTQELYSIPEDQEPEDQEPEEPTPAPWARLWALQDGFANLECVNDNYWFGRDKSCEYCFDEPLLKRTDKYRTYSKKHFRIFREVGPKNSYIAYIEDHSGNGTFVNTELVGKGKRRPLNNNSEIALSLSRNKVVPVER

SEQ ID NO: 6841 - protein, 159 aa, Homo sapiens
DKIEDEVTRQVAQCKCAKRFQVEQIGENKYRFGDSQQLRLVRILRSTVMVRVGGGWMALDEFLVKNDPCRVHHPGSKIKRSDSSSSISSQSPIARGRTNIELREKFILPEGASQGMTPFRSRGRRSKPSSRAASPTRSSSSASQSNHSCTSMPSSPATP

SEQ ID NO: 6842 - protein, 124 aa, Homo sapiens
MSRRSQRLTRYSQGDDDGSSSSGGSSVAGSQSTLFKDSPLRTLKRKSSNMKRLSPAPQLGPSSDAHTSYYSESLVHESWFPPRSSLEELHGDANWDPTFQKLLEAQKSPWFFPAQVRTCGCGGG

SEQ ID NO: 6843 - protein, 115 aa, Homo sapiens
MAPAKKGGEKKKGRSAINEVVTREYTINIHKRIHGVGFKKRAPRALKEIRKFAMKEMGTPDVRIDTRLNKAVWAKGIRNVPYRIRVRLSRKRNEDEDSPNKLYTLVTYVPVTTFK

SEQ ID NO: 6844 - protein, 554 aa, Homo sapiens
MARRPRHSIYSSDEDDEDFEMCDHDYDGLLPKSGKRHLGKTRWTREEDEKLKKLVEQNGTDDWKVIANYLPNRTDVQCQHRWQKVLNPELIKGPWTKEEDQRVIELVQKYGPKRWSVIAKHLKGRIGKQCRERWHNHLNPEVKKTSWTEEEDRIIYQAHKRLGNRWAEIAKLLPGRTDNAIKNHWNSTMRRKVEQEGYLQESSKASQPAVATSFQKNSHLMGFAQAPPTAQLPATGQPTVNNDYSYYHISEAQNVSSHVPYPVALHVNIVNVPQPAAAAIQRHYNDEDPEKEKRIKELELLLMSTENELKGQQVLPTQNHTCSYPGWHSTTIADHTRPHGDSAPVSCLGEHHSTPSLPADPGSLPEESASPARCMIVHQGTILDNDSSSWCDLSSFEFFEEADFSPSQHHTGKALQLQQREGNGTKPAGEPSPRVNKRMLSESSLDPPKVLPPARHSTIPLVILRKKRGQASPLATGDCSSFIFADVSSSTPKRSPVKSLPFSPSQFLNTSSNHENSDLEMPSLTSTPLIGHKLTVTTPFHRDQTVKTQKENTV

SEQ ID NO: 6845 - protein, 241 aa, Homo sapiens
MDDKKKKRSPKPCLAQPAQAPGTLRRVPVPTSHSGSLALGLPHLPSPKQRAKFKRVGKEKCRPVLAGGGSGSAGTPLQHSFLTEVTDVYEMEGGLLNLLNDFHSGRLQAFGKECSFEQLEHVREMQEKLARLHFSLDVCGEEEDDEEEEDGVTEGLPEEQKKTMADRNLDQLLSNLEDLSNSMYPFQGTRLCVCVPERSVSSSPALQEYSHTTNFPTSCSPVRFSHRLPKPRYRNLEFPQN

SEQ ID NO: 6846 - protein, 241 aa, Homo sapiens
MAARVLIIGSGGREHTLAWKLAQSHHVKQVLVAPGNAGTACSEKISNTAISISDHTALAQFCKEKKIEFVVVGPEAPLAAGIVGNLRSAGVQCFGPTAEAAQLESSKRFAKEFMDRHGIPTAQWKAFTKPEEACSFILSADFPALVVKASGLAAGKGVIVAKSKEEACKAVQEIMQEKAFGAAGETIVIEELLDGEEVSCLCFTDGKTVAPMPPAQDHKRLLEGDGGPNTGGMGAYCPAPQ

SEQ ID NO: 6847 - protein, 82 aa, Homo sapiens
MAYHSFLVEPISCHAWNKDRTQIAICPNNHEVHIYEKSGAKWTKVHELKEHNGQVTGIDWAPESNRIVTCGTDRNAYVWTLK

SEQ ID NO: 6848 - protein, 215 aa, Homo sapiens
MAKERCLKKSFQDSLEDIKKRMKEKRNKNLAEIGKRRSFIAAPCQIITNTSTLLKNYQDNNKMLVLALENEKSKVKEAQDIILQLRKECYYLTCQLYALKGKLTSQQTVEPAQNQEICSSGMDPNSDDSSRNLFVKDLPQIPLEETELPGQGESFQIEDQIPTIPQDTLGVDFDSGALEVSPAKEAIFILYYVREFVSRFPDCRKCKLETHICLR

SEQ ID NO: 6849 - protein, 93 aa, Homo sapiens
MFVSDFRKEFYEVVQSQRVLLFVASDVDALCACKILQALFQCDHVQYTLVPVSGWQELETAFLEHKEQFHYFILINCGANVDLLDILQPDEDT

SEQ ID NO: 6850 - protein, 167 aa, Homo sapiens
MSKPEDLKVVKNCANTTRSFCDLTDEWRSTHEAYVTVLEGFSGNTTLFSCSHNFWLAIDMSFEPPEFEIVGFTNHINVMVKFPSIVEEELQFDLSLVIEEQSEGIVKKHKPEIKGNMSGNFTYIIDKLIPNTNYCVSVYLEHSDEQAVIKSPLKCTLLPPGQESEFS

SEQ ID NO: 6851 - protein, 205 aa, Homo sapiens
MEDLEEDVRFIVDETLDFGGLSPSDSREEEDITVLVTPEKPLRRGLSHRSDPNAVAPAPQGVRLSLGPLSPEKLEEILDEANRLAAQLEQCALQDRESAGEGLGPRRVKPSPRRETFVLKDSPVRDLLPTVNSLTRSTPSPSSLTPRLRSNDRKGSVRALRATSGKRPSNMKRESPTCNLFPASKSPASSPLTRSTPPVRGRAGP

SEQ ID NO: 6852 - protein, 320 aa, Homo sapiens
MKGDFRKKKSEARTPLEQEIFNLLHKNKQPVTDPLLTPVEKASLRAMSLEEAKMRRAELQRARALQSYYEAKARREKKIKSKKYHKVVKKGKAKKALKEFEQLRKVNPAAALEELEKIEKARMMERMSLKHQNSGKWAKSKAIMAKYDLEARQAMQEQLSKNKELTQKLQVASESEEEEGGTEDVEELLVPDVVNEVQMNADGPNPWMLRSCTSDTKEAATQEDPEQLPELEAHGVSESEGEERPVAEEEILLREFEERRSLRKRSELSQDAEPAGSQETKDSGSQEVLSELRVLSQKLKENHQSRKQKASSEGTIPQVQ

SEQ ID NO: 6853 - protein, 1095 aa, Homo sapiens
MDQKILSLAAEKTADKLQEFLQTLREGDLTNLLQNQAVKGKVAGALLRAIFKGSPCSEEAGTLRRRKIYTCCIQLVESGDLQKEIASEIIGLLMLEAHHFPGPLLVELANEFISAVREGSLVNGKSLELLPIILTALATKKENLAYGKGVLSGEECKKQLINTLCSGRWDQQYVIQLTSMFKDVPLTAEEVEFVVEKALSMFSKMNLQEIPPLVYQLLVLSSKGSRKSVLEGIIAFFSALDKQHNEEQSGDELLDVVTVPSGELRHVEGTIILHIVFAIKLDYELGRELVKHLKVGQQGDSNNNLSPFSIALLLSVTRIQRFQDQVLDLLKTSVVKSFKDLQLLQGSKFLQNLVPHRSYVSTMILEVVKNSVHSWDHVTQGLVELGFILMDSYGPKKVLDGKTIETSPSLSRMPNQHACKLGANILLETFKIHEMIRQEILEQVLNRVVTRASSPISHFLDLLSNIVMYAPLVLQSCSSKVTEAFDYLSFLPLQTVQRLLKAVQPLLKVSMSMRDCLILVLRKAMFANQLDARKSAVAGFLLLLKNFKVLGSLSSSQCSQSLSVSQVHVDVHSHYNSVANETFCLEIMDSLRRCLSQQADVRLMLYEGFYDVLRRNSQLANSVMQTLLSQLKQFYEPKPDLLPPLKLEACILTQGDKISLQEPLDYLLCCIQHCLAWYKNTVIPLQQGEEEEEEEEAFYEDLDDILESITNRMIKSELEDFELDKSADFSQSTSIGIKNNICAFLVMGVCEVLIEYNFSISSFSKNRFEDILSLFMCYKKLSDILNEKAGKAKTKMANKTSDSLLSMKFVSSLLTALFRVLLWRYTSIPTSVEESGKKEKGKSISLLCLEGLQKIFSAVQQFYQPKIQQFLRALDVTDKEGEEREDADVSVTQRTAFQIRQFQRSLLNLLSSQEEDFNSKEALLLVTVLTSLSKLLEPSSPQFVQMLSWTSKICKENSREDALFCKSLMNLLFSLHVSYKSPVILLRDLSQDIHGHLGDIDQDVEVEKTNHFAIVNLRTAAPTVCLLVLSQAEKVLEEVDWLITKLKGQVSQETLSVSPGVSELRRNSKKYGKAGEAVWFSSDPPVLFFHFLRTE

SEQ ID NO: 6854 - protein, 384 aa, Homo sapiens
MAEIGEDLDKSDVSSLIFLMKDYMGRGKISKEKSFLDLVVELEKLNLVAPDQLDLLEKCLKNIHRIDLKTKIQKYKQSVQGAGTSYRNVLQAAIQKSLKDPSNNFRLHNGRSKEQRLKEQLGAQQEPVKKSIQESEAFLPQSIPEERYKMKSKPLGICLIIDCIGNETELLRDTFTSLGYEVQKFLHLSMHGISQILGQFACMPEHRDYDSFVCVLVSRGGSQSVYGVDQTHSGLPLHHIRRMFMGDSCPYLAGKPKMFFIQNYVVSEGQLEDSSLLEVDGPAMKNVEFKAQKRGLCTVHREADFFWSLCTADMSLLEQSHSSPSLYLQCLSQKLRQERKRPLLDLHIELNGYMYDWNSRVSAKEKYYVWLQHTLRKKLILSYT

SEQ ID NO: 6855 - protein, 187 aa, Homo sapiens
MERPQPDSMPQDLSEALKEATKEVHTQAENAEFMRNFQKGQVTRDGFKLVMASLYHIYVALEEEIERNKESPVFAPVYFPEELHRKAALEQDLAFWYGPRWQEVIPYTPAMQRYVKRLHEVGRTEPELLVAHAYTRYLGDLSGGQVLKKIAQKALDLPSSGEGLAFFTFPNIASATKFKQLYRSRMN

SEQ ID NO: 6856 - protein, 677 aa, Homo sapiens
MQTQEILRILRLPELGDLGQFFRSLSATTLDSGGARRSVIGSGPQLLTHYYDDARTMYQVFRRGLSISGNGPCLGFRKPKQPYQWLSYQEVADRAEFLGSGLLQHNCKACTDQFIGVFAQNRPEWIIVELACYTYSMVVVPLYDTLGPGAIRYIINTGLSCQEGASATASTQADISTVIVDKPQKAVLLLEHVERKETPGLKLIILMDPFEEALKERGQKCGVVIKSMQAVEDCGQENHQAPVPPQPDDLSIVCFTSGTTGNPKGAMLTHGNVVADFSGFLKVTEKVIFPRQDDVLISFLPLAHMFERVIQSVVYCHGGRVGFFQGDIRLLSDDMKALCPTIFPVVPRLLNRMYDKIFSQANTPLKRWLLEFAAKRKQAEVRSGIIRNDSIWDELFFNKIQASLGGCVRMIVTGAAPASPTVLGFLRAALGCQVYEGYGQTECTAGCTFTTPGDWTSGHVGAPLPCNHIKLVDVEELNYWACKGEGEICVRGPNVFKGYLKDPDRTKEALDSDGWLHTGDIGKWLPAGTLKIIDRKKHIFKLAQGEYVAPEKIENIYIRSQPVAQIYVHGDSLKAFLVGIVVPDPEVMPSWAQKRGIEGTYADLCTNKDLKKAILEDMVRLGKESGLHSFEQVKAIHIHSDMFSVQNGLLTPTLKAKRPELREYFKKQIEELYSISM

SEQ ID NO: 6857 - protein, 163 aa, Homo sapiens
MVRDWEGRCAHRGRPAGGGLSNTQRGGGRLFEYILLYKDGVMFQIDQATKQCSKMTLTQPWDPLDIPQNSTFEDQYSIGGPQEQITVQEWSDRKSARSYETWIGIYTVKDCYPVQETFTINYSVILSTRFFDIQLGIKDPSVFTPPSTCQMAQLEKMSEDCSW

SEQ ID NO: 6858 - protein, 373 aa, Homo sapiens
MQEKDASSQGFLPHFQHFATQAIHVGQDPEQWTSRAVVPPISLSTTFKQGAPGQHSGFEYSRSGNPTRNCLEKAVAALDGAKYCTNRYFRQVASEFGLKISFVDCSKIKLLEAAITPETKLVWIETPTNPTQKVIDIEGCAHIVHKHGDIILVVDNTFMSPYFQRPLALGADISMYSATKYMNGHSDVVMGLVSVNCESLHNRLRFLQNSLGAVPSPIDCYLCNRGLKTLHVRMEKHFKNGMAVAQFLESNPWVEKVIYPGLPSHPQHELVKRQCTGCTGMVTFYIKGTLQHAEIFLKNLKLFTLAESLGGFESLAELPAIMTHASVLKNDRDVLGISDTLIRLSVGLEDEEDLLEDLDQALKAAHPPSGSHS

SEQ ID NO: 6859 - protein, 161 aa, Homo sapiens
MMGHRPVLVLSQNTKRESGRKVQSGNINAAKTIADIIRTCLGPKSMMKMLLDPMGGIVMTNDGNAILREIQVQHPAAKSMIEISRTQDEEVGDGTTSVIILESHSVTMLECGGAILAHCNLCLPAGEMLSVAEHFLEQQMHPTVVISAYRKALDDMISTLK

SEQ ID NO: 6860 - protein, 168 aa, Homo sapiens
MPATRKPMRYGHTEGHTEVCFDDSGSFIVTCGSDGDVRIWEDLDDDDPKFINVGEKAYSCALKSGKLVTAVSNNTIQVHTFPEGVPDGILTRFTTNANHVVFNGDGTKIAAGSSDFLVKIVDVMDSSQQKTFRGHDAPVLSLSFDPKDIFLASASCDGSVRVWQISDQ

SEQ ID NO: 6861 - protein, 25 aa, Homo sapiens
SLVNASISSSVVKSYFSSEIYYIYH

SEQ ID NO: 6862 - protein, 231 aa, Homo sapiens
MGVTVQSQGPGGKVVTCAHRYEKRQHVNTKQESRDIFGRCYVLSQNLRIEDDMDGGDWSFCDGRLRGHEKFGSCQQGVAATFTKDFHYIVFGAPGTYNWKGIVRVEQKNNTFFDMNIFEDGPYEVGGETEHDESLVPVPANSYLGFSLDSGKGIVSKDEITFVSGAPRANHSGAVVLLKRDMKSAHLLPEHIFDGEGLASSFGYDVAVVDLNKDGWQDIVIGAPQYFDRDG

SEQ ID NO: 6863 - protein, 318 aa, Homo sapiens
GGYARNDAGEKLPSVMAGVPARRGQSSPPPAPPICLRRRTRLSTASEETVQNRVSLEKVLGITAQNSSGLTCDPGTGHVAYLAGMWRMGPASESCGEDSIAPSLSRTVPGMYCVVVILDPKENKQQHIFNTARKSLSALAFSPDGKYIVTGENGHRPAVRIWDVEEKNQVAEMLGHKYGVACVAFSPNMKHIVSMGYQHDMVLNVWDWKKDIVVASNKVSCRVIALSFSEDSSYFVTVGNRHVRFWFLEVSTETKVTSTVPLVGRSGILGELHNNIFCGVACGRGRMAGSTFCVSYSGLLCQFNEKRVLEKWINLKVS

SEQ ID NO: 6864 - protein, 153 aa, Homo sapiens
MESYHKPDQQKLQALKDTANRLRISSIQATTAAGSGHPTSCCSAAEIMAVLFFHTMRYKSQDPRNPHNDRFVLSKGHAAPILYAVWAEAGFLAEAELLNLRKISSDLDGHPVPKQAFTDVATGSLGQGLGAACGMAYTGKYFDKARHQSPGPE

SEQ ID NO: 6865 - protein, 712 aa, Homo sapiens
MLKDYLSVAQDALRTQKELYHVKEQRLALALDEYVRLNDAYKEKSSSHTSLFSGSSSSTKYDPDILKAEISTTRLRVKKLKRELSQMKQELLYKEQGFETLQQIDKKMSGGQSGYELSEAKAILTELKSIRKAISSGEKEKQDLMQSLAKLQERFHLDQNIGRSEPDLRCSPVNSHLCLSRQTLDAGSQTSISGDIGVRSRSNLAEKVRLSLQYEEAKRSMANLKIELSKLDSEAWPGALDIEKEKLMLINEKEELLKELQFVTPQKRTQDELERLEAERQRLEEELLSVRGTPSRALAERLRLEERRKELLQKLEETTKLTTYLHSQLKSLSASTLSMSSGSSLGSLASSRGSLNTSSRGSLNSLSSTELYYSSQSDQIDVDYQYKLDFLLQEKSGYIPSGPITTIHENEVVKSPSQPGQSGLCGVAAAATGHTPPLAEAPKSVASLSSRSSLSSLSPPGSPLVLEGTFPMSSSHDASLHQFTADFEDCELSSHFADISLIENQILLDSDSGGASQSLSEDKDLNECAREPLYEGTADVEKSLPKRRVIHLLGEKTTCVSAAVSDESVAGDSGVYEAFVKQPSEMEDVTYSEEDVAIVETAQVQIGLRYNAKSSSFMVIIAQLRNLHAFLIPHTSKVYFRVAVLPSSTDVSCLFRTKVHPPTESILFNDVFRVAISQTALQQKTLRKNFTFVTAITHGVCLPLPVPMPSFA

SEQ ID NO: 6866 - protein, 235 aa, Homo sapiens
QEHSKESPARSTPHRTPIITPNTKAIQERLFKQDVSNDFEINIEVYSLVQKKDPSGLDKKKKTSKSKAITPKRLLTSITTKSNIHSSVMASPGGLSAVRTSNFALVGSYTLSLSSVGNTKFVLDKVPFLSSLEGHIYLKIKCQVNSSVEERGFLTIFEDVSGFGAWHRRWCVLSGNCISYWTYPDDEKRKNPIGRINLANCTSRQIEPANREFCARRNTFELITVRPQREDDRET

SEQ ID NO: 6867 - protein, 485 aa, Homo sapiens
MAAAVPDEAVARDVQRLLVQFQDEGGQLLGSPFDVPVDITPDRLQLVCNALLAQEDPLPLAFFVHDAEIVSSLGKTLESQAVETEKVLDIIYQPQAIFRVRAVTRCTSSLEGHSEAVISVAFSPTGKYLASGSGDTTVRFWDLSTETPHFTCKGHRHWVLSISWSPDGRKLASGCKNGQILLWDPSTGKQVGRTLAGHSKWITGLSWEPLHANPECRYVASSSKDGSVRIWDTTAGRCERILTGHTQSVTCLRWGGDGLLYSASQDRTIKVWRAHDGVLCRTLQGHGHWVNTMALSTDYALRTGAFEPAEASVNPQDLQGSLQELKERALSRYNLVRGQGPERLVSGSDDFTLFLWSPAEDKKPLTRMTGHQALINQVLFSPDSRIVASASFDKSIKLWDGRTGKYLASLRGHVAAVYQIAWSADSRLLVSGSSDSTLKVWDVKAQKLAMDLPGHADEVYAVDWSPDGQRVASGGKDKCLRIWRR

SEQ ID NO: 6868 - protein, 372 aa, Homo sapiens
MSPKRIAKRRSPPADAIPKSKKVKDTRAAASRRVPGARSCQVSHRSHSTEPGLVLTLGQGDVGQLGLGENVMERKKPALVSIPEDVVQAEAGGMHTVCLSKSGQVYSFGCNDEGALGRDTSVEGSEMVPGKVELQEKVVQVSAGDSHTAALTDDGRVFLWGSFRDNNGVIGLLEPMKKSMVPVQVQLDVPVVKVASGNDHLVMLTADGDLYTLGCGEQGQLGRVPELFANRGGRQGLERLLVPKCVMLKSRGSRGHVRFQDAFCGAYFTFAISHEGHVYGFGLSNYHQLGTPGTESCFIPQNLTSFKNSTKSWVGFSGGQHHTVCMDSEGKAYSLGRAEYGRLGLGEGAEEKSIPTLISRLPAVSSVACGAS

SEQ ID NO: 6869 - protein, 128 aa, Homo sapiens
MAEPDYIEDDNPELIRPQKLINPVKTSRNHQDLHRELLMNQKRGLAPQNKPELQKVMEKRKRDQVIKQKEEEAQKKKSDLEIELLKRQQKLEQLELEKQKLQEEQENAPEFVKVKGNLRRTGQEVAQA

SEQ ID NO: 6870 - protein, 74 aa, Homo sapiens
MPRARKGNTLRKGGQRRGGGARSSAQADSGSSDDEAASEARSTASECPSLLSTTAEDSLVPRPGRVLLRACAWP

SEQ ID NO: 6871 - protein, 62 aa, Homo sapiens
MAALRPLVKPKIVKKRTKKFIRHQSDRYVKIKRNWRKPRGIDNRVRRRFKGQILMPNIGYGS

SEQ ID NO: 6872 - protein, 174 aa, Homo sapiens
MLKKMGEAVARVARKVNETVESGSDTLDLAECKLVSFPIGIYKVLRNVSGQIHLITLANNELKSLTSKFMTTFSQLRELHLEGNFLHRLPSEVSALQHLKAIDLSRNQFQDFPEQLTALPALETINLEENEIVDVPVEKLAAMPALRSINLRFNPLNAEVRVIAPPLIKFDMLM

SEQ ID NO: 6873 - protein, 196 aa, Homo sapiens
MPFSKEKYILDSSPEKLHKELEEELKLSSTDLRSHAWYHGRIPREVSETLVQRNGDFLIRDSLTSLGDYVLTCRWRNQALHFKINKVVVKAGESYTHIQYLFEQESFDHVPALVRYHVGSRKAVSEQSGAIIYCPVNRTFPLRYLEASYGLGQGSSKPASPVSPSGPKGSHMKRRSVTMTDGLTADKVTRSDGCPT

SEQ ID NO: 6874 - protein, 16 aa, Homo sapiens
MAAFSEMGVMPEIAQA

SEQ ID NO: 6875 - protein, 151 aa, Homo sapiens [sequence omitted]

SEQ ID NO: 6876 - protein, 174 aa, Homo sapiens
MRWQLSEQLRCLELQGELRRELLQELAEFMRRRAEVELEYSRGLEKLAERFSSRGGRLGSSREHQSFRKEPSLLSPLHCWAVLLQHTRQQSRESAALSEVLAGPLAQRLSHIAEDVGRLVKKSRDLEQQLQDELLEVVSELQTAKKTYQAYHMESVNAEAKLREAERQEEKRAG

SEQ ID NO: 6877 - protein, 28 aa, Homo sapiens
MCGIWALFGSDDCLSVQCLSAMKIAHRG

SEQ ID NO: 6878 - protein, 299 aa, Homo sapiens
MRWLWLLLFPDSPVTLREVLPSQPWRLRGCSDLRGENVFTGQSKIYSYMSPNKCSGMRFPLQEENSVTHHEVKCQGKPLAGIYRKREEKRNAGNAVRSAMKSEEQKIKDARKGPLVPFPNQKSEAAEPPKTPPSSCDSTNAAIAKQALKKPIKGKQAPRKKAQGKTQQNRKLTDFYPVRRSSRKSKAELQSEERKRIDELIESGKEEGMKIDLIDGKGRGVIATKQFSRGDFVVEYHGDLIEITDAKKREALYAQDPSTGCYMYYFQYLSKTYCVDATRETNRLGRLINHSKCGNCQTK

SEQ ID NO: 6879 - protein, 368 aa, Homo sapiens
MLSKRGCHARIYADFPIRRLISQRSSLETLEDIEENAPLRRCRTLSGSPRPKNFKKIHFIKNMRQHDTRNGRIVLISGRRSFCSIFSVLPYRDSTQVGDLKLDGGRQSTGAVSLKEIIGLEGVELGADGKTVSYTQFLLPTNAFGARRNTIDSTSSFSQFRNLSHRSLSIGRASGTQGSLDTGSDLGDFMDYDPNLLDDPQWPCGKHKRVLIFPSYMTTVIDYVKPSDLKKDMNETFKEKFPHIKLTLSKIRSLKREMRKLAQEDCGLEEPTVAMAFVYFEKLALKGKLNKQNRKLCAGACVLLAAKIGSDLKKHEVKHLIDKLEEKFRLNRRELIAFEFPVLVALEFALHLPEHEVMPHYRRLVQSS

SEQ ID NO: 6880 - protein, 111 aa, Homo sapiens
EPPEFEIVGFTNHINVMVKFPSIVEEELQFDLSLVIEEQSEGIVKKHKPEIKGNMSGNFTYIIDKLIPNTNYCVSVYLEHSDEQAVIKSPLKCTLLPPGQESVIGYSKINA

SEQ ID NO: 6881 - protein, 356 aa, Homo sapiens
MFAKATRNFLREVDADGDLIAVSNLNDSDKLQLLSLVTKKKRFWCWQRPKYQFLSLTLGDVLIEDQFPSPVVVESDFVKYEGKFANHVSGTLETALGKVKLNLGGSSRVESQSSFGTLRKQEVDLQQLIRDSAERTINLRNPVLQQVLEGRNEVLCVLTQKITTMQKCVISEHMQVEEKCGGIVGIQTKTVQVSATEDGNVTKDSNVVLEIPAATTIAYGVIELYVKLDGQFEFCLLRGKQGGFENKKRIDSVYLDPLVFREFAFIDMPDAAHGISSQDGPLSVLKQATLLLERNFHPFAELPEPQQTALSDIFQAVLFDDELLMVLEPVVSPETSQGSVFTGVFWNRGGGRMELC

SEQ ID NO: 6882 - protein, 705 aa, Homo sapiens
MGESPASVVLNASGGLFSLKMETLESELTCPICLELFEDPLLLPCAHSLCFSCAHRILVSSCSSGESIEPITAFQCPTCRYVISLNHRGLDGLKRNVTLQNIIDRFQKASVSGPNSPSESRRERTYRPTTAMSSERIACQFCEQDPPRDAVKTCITCEVSYCDRCLRATHPNKKPFTSHRLVEPVPDTHLRGITCLDHENEKVNMYCVSDDQLICALCKLVGRHRDHQVASLNDRFEKLKQTLEMNLTNLVKRNSELENQMAKLIQICQQVEVNTAMHEAKLMEECDELVEIIQQRKQMIAVKIKETKVMKLRKLAQQVANCRQCLERSTVLINQAEHILKENDQARFLQSAKNIAERVAMATASSQVLIPDINFNDAFENFALDFSREKKLLEGLDYLTAPNPPSIREELCTASHDTITVHWISDDEFSISSYELQYTIFTGQANFISLYNSVDSWMIVPNIKQNHYTVHGLQSGTRYIFIVKAINQAGSRNSEPTRLKTNSQPFKLDPKMTHKKLKISNDGLQMEKDESSLKKSHTPERFSGTGCYGAAGNIFIDSGCHYWEVVMGSSTWYAIGIAYKSAPKNEWIGKNASSWVFSRCNSNFVVRHNNKEMLVDVPPHLKRLGVLLDYDNNMLSFYDPANSLHLHTFDVTFILPVCPTFTIWNKSLMILSGLPAPDFIDYPERQECNCRPQESPYVSGMKTCH

SEQ ID NO: 6883 - protein, 118 aa, Homo sapiens
AAAEVAGQFVIKLTHDVELNLDYERYNSQLLSFVRDLNQYRADIKEMGLSLQWLYSARGDFFRATSRLTTDFGNAEKTDRFVMKKLNDRVMREGPQMMLLLTDARPSNHFLSPLLSLH

SEQ ID NO: 6884 - protein, 214 aa, Homo sapiens
MLIKGGNANATVTKVLKDVYALKKPYGVLYKKKNITRPFEDQTSLEFFSKKSDCSLFMFGSHNKKRPNNLVIGRMYDYHVLDMIELGIENFVSLKDIKNSKCPEGTKPMLIFAGDDFDVTEDYRRLKSLLIDFFRGPTVSNIRLAGLEYVLHFTALNGKIYFRSYKLLLKKSGCRTPRIELEEMGPSLDLVLRRTHLASDDLYKLSMKMPKALK

SEQ ID NO: 6885 - protein, 268 aa, Homo sapiens
GRGRGRRPAAAEAQGQSPPLPEAHAAADREVQPALRGHPGGANGHADLRDATGIENLGWKTNKGKKRRRDPDSKSGEVDATSDQEESVAWALAPAVPQSPLKNELRRKYLTQVDILLQGAEYFECAGNRAGRDVRVTPLPSLASPAVPAPGYCSRISRKSPGDPAKPASSPREWDPLHPSSTDMALVPRNDSLSLQETSSSSFLSSQPFEDDDICNVTISDLYAGMLHSMSRLLSTKPSSIISTKTFIMQNWNSRRRHRYKSRMNKTY

SEQ ID NO: 6886 - protein, 64 aa, Homo sapiens
MLLSLKPSEAPELDEDEGFGDWSQRPEQRQQHEGAQGALDSGEPPQCRSPEGEQEDRPGLHAYE

SEQ ID NO: 6887 - protein, 748 aa, Homo sapiens
MLGTLRAMEGEDVEDDQLLQKLRASRRRFQRRMQRLIEKYNQPFEDTPVVQMATLTYETPQGLRIWGGRLIKERNEGEIQDSSMKPADRTDGSVQAAAWGPELPSHRTVLGADSKSGEVDATSDQEESVAWALAPAVPQSPLKNELRRKYLTQVDILLQGAEYFECAGNRAGRDVRVTPLPSLASPAVPAPGYCSRISRKSPGDPAKPASSPREWDPLHPSSTDMALVPRNDSLSLQETSSSSFLSSQPFEDDDICNVTISDLYAGMLHSMSRLLSTKPSSIISTKTFIMQNWNSRRRHRYKSRMNKTYCKGARRSQRSSKENFIPCSEPVKGTGALRDCKNVLDVSCRKTGLKLEKAFLEVNRPQIHKLDPSWKERKVTPSKYSSLIYFDSSATYNLDEENRFRTLKWLISPVKIVSRPTIRQGHGENRQREIEIRFDQLHREYCLSPRNQPRRMCLPDSWAMNMYRGGPASPGGLQGLETRRLSLPSSKAKAKSLSEAFENLGKRSLEAGRCLPKSDSSSSLPKTNPTHSATRPQQTSDLHVQGNSSGIFRKSVSPSKTLSVPDKEVPGHGRNRYDEIKEEFDKLHQKYCLKSPGQMTVPLCIGVSTDKASMEVRYQTEGFLGKLNPDPHFQGFQKLPSSPLGCRKSLLGSTAIEAPSSTCVARAITRDGTRDHQFPAKRPRLSEPQGSGRQGNSLGASDGVDNTVRPGDQGSSSQPNSEERGENTSYRMEEKSDFMLEKLETKSV

SEQ ID NO: 6888 - protein, 54 aa, Homo sapiens
MSGGLLKALRSDSYVELSQYRDQHFRVREAGPRDGKALGKNAEKRVTMKNKKNY

SEQ ID NO: 6889 - protein, 172 aa, Homo sapiens
CKQSTKTEEKLRPTRTSSESIYSRPGSSIPGSPGHTIYAKVDNEILDYKDLAAIPKVKAIYDIERPDLITYEPFYTSGYDDKQERQSLGESPRTLSPTPSAEGYQDVRDRMIHRSTSQGSINSPVYSRHSYTPTTSRSPQHFHRPDQGINIYRKPPIYKQHVLFEVILLLLI

SEQ ID NO: 6890 - protein, 451 aa, Homo sapiens
MASRCWRWWGWSAWPRTRLPPAGSTPSFCHHFSTQEKTPQICVVGSGPAGFYTAQHLLKQHPQAHVDIYEKQPVPFGLVRFGVAPDHPEVKSYGAEDHRALEIPGEELPGVCSARAFVGWYNGLPENQELEPDLSCDTAVILGQGNVALDVARILLTPPEHLERTDITKAALGVLRQSRVKTVWLVGRRGPLQVAFTIKELREMIQLPGARPILDPVDFLGLQDKIKEVPRPRKRLTELLLRTATEKPGPAEAARQASASRAWGLRFFRSPQQVLPSPDGRRAAGVRLAVTRLEGVDEATRAVPTGDMEDLPCGLVLSSIGYKSRPVDPSVPFDSKLGVIPNVEGRVMDVPGLYCSGWVKRGPTGVIATTMTDSFLTGQMLLQDLKAGLLPSGPRPGYAAIQALLSSRGVRPVSFSDWEKLDAEEVARGQGTGKPREKLVDPQEMLRLLGH

SEQ ID NO: 6891 - protein, 195 aa, Homo sapiens
MFQAFPGDYDSGSRCSSSPSAESQYLSSVDSFGSPPTAAASQETDQLEEEKAELESEIAELQKEKERLEFVLVAHKPGCKIPYEEGPGPGPLAEVRDLPGSAPAKEDGFSWLLPPPPPPPLPFQTSQDAPPNLTASLFTHSEVQVLGDPFPVVNPSYTSSFVLTCPEVSAFAGAQRTSGSDQPSDPLNSPSLLAL

SEQ ID NO: 6892 - protein, 89 aa, Homo sapiens
MVEEENIRVVRCGGSELNFRRAVFSADSKYIFCVSGDFVKVYSTVTEECVHILHGHRNLVTGIQLNPNNHLQVPLHALRISKRAVFLFP

SEQ ID NO: 6893 - protein, 1007 aa, Homo sapiens
MRDFGFGVLQTAPLRSSSPGPLFCGEAYGPYAVGSVNPLPSATPFGPLSPPPLPVTGFLEAASPFSVPLGGGAGSPAAAASSSSPFLAHQQTMQDELLLGLTQQPARPLSGAAATEKLPDHHPGGGTIAGVTHLLPSQDFKPSLHHPSSSSASSCCCCRTSSPQDFSKRQQQQLSSQKRKEFSPPHLPHPPDSKPPPPPPPLHCPGRFSPPPPPAGPLLQPAQLAQRQQQQPPQQFSLLHQQHLSPQDFAPRQRPADLPPLPQLPPSPPAAPRRRHGGAGSPRKTPAAGEGSAAESPNAGLASSTPVNPAPGSMESPNHPLLNSPSNLLPGGALGAGAFSSLQSPDLPHPGGGGGGGGGGPPGGGGGGGSASPPPLPGFGTPWSVQTASPPPQPQQPPPTQPQQQPPPPQQPPQPQPQPPGSSATTPGGGSGGSLSAMPPPSPDSENGFYPGLPSSMNPAFFPSFSPVSPHGCTGLSVPTSGGGGGGFGGPFSATAVPPPPPPAMNIPQQQPPPPAAPQQPQSRRSPVSPQLQQQHQAAAAAFLQQRNSYNHHQPLLKQSPWSNHQSSGWGTGSMSWGAMHGRDHRRTGNMGIPGTMNQISPLKKPFSGNVIAPPKFTRSTPSLTPKSWIEDNVFRTDNNSNTLLPLQVRMDRSRMYDSLNMHSLENSLIDIMRAEHDPLKGRLSYPHPGTDNLLMLNARSYGRRRGRSSLFPIDDGLLDDGHSDQVGVLNSPTCYSAHQNGERIERFSRKVFVGGLPPDIDEDEITASFRRFGPLVVDWPHKAESKSYFPPKGYAFLLFQEESSVQALIDACIEEDGKLYLCVSSPTIKDKPVQIRPWNLSDSDFVMDGSQPLDPRKTIFVGGVPRPLRAVELAMIMDRLYGGVCYAGIDTDPELKYPKGAGRVAFSNQQSYIAAISARFVQLQHGDIDKRVEVKPYVLDDQMCDECQGARCGGKFAPFFCANVTCLQYYCEFCWANIHSRAGREFHKPLVKEGADRPRQIHFRWN

SEQ ID NO: 6894 - protein, 156 aa, Homo sapiens
MPVARSWVCRKTYVTPRRPFEKSRLDQELKLIGEYGLRNKREVWRVKFTLAKIRKAARELLTLDEKDPRRLFEGNALLRRLVRIGVLDEGKMKLDYILGLKIEDFLERRLQTQVFKLGLAKSIHHARVLIRQRHIRYHLGWAPESSSTCPSDGCPH

SEQ ID NO: 6895 - protein, 289 aa, Homo sapiens
MNDTVTIRTRKFMTNRLLQRKQMVIDVLHPGKATVPKTEIREKLAKMYKTTPDVIFVFGFRTHFGGGKTTGFGMIYDSLDYAKKNEPKHRLARHGLYEKKKTSRKQRKERKNRMKKVRGTAKANVGAGKKMRELGLGVQALGRISQEERCTDVKNSKARESRGVVWQVEVPGPWSVWTCGRLRRGCGKYLQVAVTWRKTENREQCCQACLLERALVRNGAFMSPASPAPAGSPHPVDGDLVLHLPEALSATLTLSPHIQAINKSFGPFFEIHQESSCFSPPSCLSGLGH

SEQ ID NO: 6896 - protein, 389 aa, Homo sapiens
MEKRETFVQAVSKELVGEFLQFVQLDKEASDPFSLNELLDELSRKQKEELWQRLKNLLTDVLLESPVDGWQVVEAQGEDNMETEHGSKMRKSIEIIYAITSVILASVSVINESENYEALLECVIILNGILYALPESERKLQSSIQDLCVTWWEKGLPAKEDTGKTAFVMLLRRSLETKTGADVCRLWRIHQALYCFDYDLEESGEIKDMLLECFININYIKKEEGRRFLSCLFNWNINFIKMIHGTIKNQLQGLQKSLMVYIAEIYFRAWKKASGKILEAIENDCIQDFMFHGIHLPRRSPVHSKVREVLSYFHHQKKVRQGVEEMLYRLYKPILWRGLKARNSEVRSNAALLFVEAFPIRDPNLHAIEMDSEIQKQFEELYGSLVFVK

SEQ ID NO: 6897 - protein, 186 aa, Homo sapiens [sequence omitted]

SEQ ID NO: 6898 - protein, 278 aa, Homo sapiens
MPGGPIPPGFFQGPPGSQPSPHAQPPPHNPSSMMGPHSQPFMSPRYAGGPRPPIRMGNQPPGGVPGTQPLLPNSMDPTRQQGHPNMGGSMQRMNPPRGMGPMGPGPQNYGSGMRPPPNSLGPAMPGINMGPGAGRPWPNPNSANSIPYSSSSPGTYVGPPGGGGPPGTPIMPSPADSTNSSDNIYTMINPVPPGGSRSNFPMGPGSDGPMGGMGGMEPHHMNGSLGSGDIDGLPKNSPNNISGISNPPGTPRDDGELGGNFLHSFQNDNYSPSMTMSV

SEQ ID NO: 6899 - protein, 356 aa, Homo sapiens
SFSLSLFRKHVLGPCSVSLQSPLRDSVLATSGSLAHQPISRPPCLAPVGSLLNFMASHGNDAARARFESKVPSFYYRPTPSDCQLLREQWIRAKYERQEFIYPEKQEPYSAGYREGFLWKRGRDNGQFLSRKFVLTEREGALKYFNRNDAKEPKAVMKIEHLNATFQPAKIGHPHGLQVTYLKDNSTRNIFIYHEDGKEIVDWFNALRAARFHYLQVAFPGAGDADLVPKLSRNYLKEGYMEKTGPKQTEGFRKRWFTMDDRRLMYFKDPLDAFARGEVFIGSKESGYTVLHGFPPSTQGHHWPHGITIVTPDRKFLFACETESDQREWVAAFQKAVDRPMLPQEYAVEAHFKHKP

SEQ ID NO: 6900 - protein, 175 aa, Homo sapiens
MKTCWTREQLQGKRQGEVVKGKQGGEYRHPDPARQAGWQETEMLRLPTVFRQMRPVSRVLAPHLTRAYAKDVKFGADARALMLQGVDLLADAVAVTMGPKGRTVIIEQSWGSPKVTKDGVTVAKSIDLKDKYKNIGAKLVQDVANNTNEEAGDGTTTATVLARSIAKEGFEKISK

SEQ ID NO: 6901 - protein, 74 aa, Homo sapiens
MIHTNLKKKFSCCVLVFLLFAVICVWKEKKKGSYYDSFKLQTKEFQVLKSLGKLAMGSDSQSVSSSSTQDPHRG

SEQ ID NO: 6902 - protein, 106 aa, Homo sapiens
MGLPVSWAPPALWVLGCCALLLSLWALCTACRRPEDAVAPRKRARRQRARLQGSATAAEASLLRRTHLCSLSKSDTRLHELHRGPRSSRALRPASMDLLRPHWLEV

SEQ ID NO: 6903 - protein, 524 aa, Homo sapiens
CGVKLSALMVATGRARGARRAGQQPPPPLRVNVVLSGLLGKLFPGPARASQLRHEGNRLYRERQVEAALLKYNEAVKLAPNDHLLYSNRSQIYFTLESHENALHDAEIACKLRPMGFKDNLELPHCSSQEEAAARGDGSSLMDPAKVKGDGQQHHMKDQEEEEEKWDATSPKAASSKTGKCQEKKRKHCQIESQEETGMPNKASKQDPPTDQGDKPALSLPLASFDASDLECALCMRLFYEPVTTPCGHTFCLKCLERCLDHNAKCPLCKDGLSQCLASRKYSKNVIMEELIAKFLPEELKERRKLYEEEMEELSNLNKNVPIFVCTMAYPTVPCPLHIFEPCYRLMIRRCIETGTRQFGMCLGDPVKGFAEYGCILEIRNVQFFADGRSVVDSIGKRRFRVLHQSQRDGYNTADIEYIEDQKVQGEDCAELMGLHNCVYQQASLWFHSLKLSLKNRILNHFGPMPEKDADPQMNPNGPAWCWWMLAVLPLESRAQLPFLAMRSLKDRLNGIRRVLAFISRNQN

SEQ ID NO: 6904 - protein, 195 aa, Homo sapiens
MYTPMAPGNYLISVKYGGPNHIVGSPFKAKVTGQRLVSPGSANETSSILVESVTRSSTETCYSAIPKASSDASKVTSKGAGLSKAFVGQKSSFLVDCSKAGSNMLLIGVHGPTTPCEEVSMKHVGNQQYNVTYVVKERGDYVLAVKWGRNTSLAALFMSQCLKTVFSNPGESSCGCFCCLFVIHFIQSPPACLWG

SEQ ID NO: 6905 - protein, 1092 aa, Homo sapiens
LNTSSLESATDEAGSPLAAAAAAAAAERCSWLVPLVRTLLDRAYEPLGLQWGLPSLPPTNGSPTFFEDFQAFCATPEWRHFIDKQVQPTMSQFEMDTYAKSHDLMSGFWNACYDMLMSSGQRRQWERAQSRRAFQELVLEPAQRRARLEGLRYTAVLKQQATQHSMALLHWGALWRQLASPCGAWALRDTPIPRWKLSSAETYSRMRLKLVPNHHFDPHLEASALRDNLGEVPLTPTEEASLPLAVTKEAKVSTPPELLQEDQLGEDELAELETPMEAAELDEQREKLVLSAECQLVTVVAVVPGLLEVTTQNVYFYDGSTERVETEEGIGYDFRRPLAQLREVHLRRFNLRRSALELFFIDQANYFLNFPCKVGTTPVSSPSQTPRPQPGPIPPHTQVRNQVYSWLLRLRPPSQGYLSSRSPQEMLRASGLTQKWVQREISNFEYLMQLNTIAGRTYNDLSQYPVFPWVLQDYVSPTLDLSNPAVFRDLSKPIGVVNPKHAQLVREKYESFEDPAGTIDKFHYGTHYSNAAGVMHYLIRVEPFTSLHVQLQSGRFDCSDRQFHSVAAAWQARLESPADVKELIPEFFYFPDFLENQNGFDLGCLQLTNEKVGDVVLPPWASSPEDFIQQHRQALESEYVSAHLHEWIDLIFGYKQRGPAAEEALNVFYYCTYEGAVDLDHVTDERERKALEGIISNFGQTPCQLLKEPHPTRLSAEEAAHRLARLDTNSPSIFQHLDELKAFFAEVTVSASGLLGTHSWLPYDRNISNYFSFSKDPTMGSHKTQRLLSGPWVPGSGVSGQALAVAPDGKLLFSGGHWDGSLRVTALPRGKLLSQLSCHLDVVTCLALDTCGIYLISGSRDTTCMVWRLLHQGGLSVGLAPKPVQVLYGHGAAVSCVAISTELDMAVSGSEDGTVIIHTVRRGQFVAALRPLGATFPGPIFHLALGSEGQIVVQSSAWERPGAQVTYSLHLYSVNGKLRASLPLAEQPTALTVTEDFVLLGTAQCALHILQLNTLLPAAPPLPMKVAIRSVAVTKERSHVLVGLEDGKLIVVVAGQPSEVRSSQFARKLWRSSRRISQVSSGETEYNPTEAR

SEQ ID NO: 6906 - protein, 116 aa, Homo sapiens
MPPKKGGDGIKPPPIIGRFGTSLKIGIVGLPNVGKSTFFNVLTNSQASAENFPFCTIDPNESRVPVPDERFDFLCQYHKPASKIPAFLNVVDIAGLVKGAHNGQGLGNAFLSHISA

SEQ ID NO: 6907 - protein, 144 aa, Homo sapiens
MSSQQFPRLGAPSTGLSQAPSQIANSGSAGLINPAATVNDESGRDSEVSAREHMSSSSSLQSREEKQEPVVVRPYPQVQMLSTHHAVASATPVAVTAPPAHLTPAVPLSFSEGLMKVPGQVTVTMESSIPQASAIPVATISGQQ

SEQ ID NO: 6908 - protein, 502 aa, Homo sapiens
MKCEHCTRKECSKKTKTDDQENVSADAPSPAQENGEKGEFHKLADAKIFLSDCLACDSCMTAEEGVQLSQQNAKDFFRVLNLNKKCDTSKHKVLVVSVCPQSLPYFAAKFNLSVTDASRRLCGFLKSLGVHYVFDTTIAADFSILESQKEFVRRYRQHSEEERTLPMLTSACPGWVRYAERVLGRPITAHLCTAKSPQQVMGSLVKDYFARQQVQEEMGSAFPVLPGGSTGWGALQMFGRTTPSPEGGSRQTWMECWCSNLSPEKIFHVIVAPCYDKKLEALQESLPPALHGSRGADCVLTSGEIAQIMEQGDLSVRDAAVDTLFGDLKEDKVTRHDGASSDGHLAHIFRHAAKELFNEDVEEVTYRALRNKDFQEVTLEKNGEVVLRFAAAYGFRNIQNMILKLKKGKFPFHFVEVLACAGGCLNGRGQAQTPDGHADKALLRQMEGIYADIPVRRPESSAHVQELYQEWLEGINSPKAREVLHTTYQSQERGTHSLDIKW

SEQ ID NO: 6909 - protein, 227 aa, Homo sapiens
MDILDQGALQRLFKKYSFMAVIHFAGLKAVGESVQKPLDYYRVNLTGTIQLLEIMKAHGVKNLVFSSSATVYGNPQYLPLDEAHPTGGCTNPYGKSKFFIEEMIRDLCQADKTWNAVLLRYFNPTGAHASGCIGEDPQGIPNNLMPYVSQVAIGRREALNVFGNDYDTEDGTGVRDYIHVVDLAKGHIAALRKLKEQCGCRIYNLGTGTGYSVLQMVQAMEKASGKK

SEQ ID NO: 6910 - protein, 188 aa, Homo sapiens
MVGPGPTAAAAVEERQRKLQEYLAAKGKLKSQNTKPYLKSKNNCQNQPPSKSTIRPKNDVTNHVVLPVKPKRSISIKLQPRPPNTAGSQKPKLEPPKLLGKRLTSECVSSNPYSKPSSKSFQQCEAGSSTTGELSRKPVGSLNIEQLKTTKQQLTDQGNAKSTDFGLQVEKGCSPEPFSEQDSSQNSS

SEQ ID NO: 6911 - protein, 1236 aa, Homo sapiens
MGRSGKLPSGVSAKLKRWKKGHSSDSNPAICRHRQAARSRFFSRPSGRSDLTVDAVKLHNELQSGSLRLGKSEAPETPMEEEAELVLTEKSSGTFLSGLSDCTNVTFSKVQRFWESNSAAHKEICAVLAAVTEVIRSQGGKETETEYFAALVLSCLATLLRKQDLEAWGYPVTLQVYHGLLSFTVHPKPKIRKAAQHGVCSVLKGSEFMFEKAPAHHPAAISTAKFCIQEIEKSGGSKEATTTLHMLTLLKDLLPCFPEGLVKSCSETLLRVMTLSHVLVTACAMQAFHSLFHARPGLSTLSAELNAQIITALYDYVPSENDLQPLLAWLKVMEKAHINLVRLQWDLGLGHLPRFFGTAVTCLLSPHSQVLTAATQSLKEILKECVAPHMADIGSVTSSASGPAQSVAKMFRAVEEGLTYKFHAAWSSVLQLLCVFFEACGRQAHPVMRKCLQSLCDLRLSPHFPHTAALDQAVGAAVTSMGPEVVLQAVPLEIDGSEETLDFPRSWLLPVIRDHVQETRLGFFTTYFLPLANTLKSKAMDLAQAGSTVESKIYDTLQWQMWTLLPGFCTRPTDVAISFKGLARTLGMAISERPDLRVTVCQALRTLITKGCQAEADRAEVSRFAKNFLPILFNLYGQPVAAGDTPAPRRAVLETIRTYLTITDTQLVNSLLEKASEKVLDPASSDFTRLSVLDLVVALAPCADEAAISKLYSTIRPYLESKAHGVQKKAYRVLEEVCASPQGPGALFVQSHLEDLKKTLLDSLRSTSSPAKRPRLKCLLHIVRKLSAEHKEFITALIPEVILCTKEVSVGARKNAFALLVEMGHAFLRFGSNQEEALQCYLVLIYPGLVGAVTMVSCSILALTHLLFEFKGLMGTSTVEQLLENVCLLLASRTRDVVKSALGFIKVAVTVMDVAHLAKHVQLVMEAIGKLSDDMRRHFRMKLRNLFTKFIRKFGFELVKRLLPEEYHRVLVNIRKAEARAKRHRALSQAAVEEEEEEEEEEEPAQGKGDSIEEILADSEDEEDNEEEERSRGKEQRKLARQRSRAWLKEGGGDEPLNFLDPKVAQRVLATQPGPGRGRKKDHGFKVSADGRLIIREEADGNKMEEEEGAKGEDEEMADPMEDVIIRNKKHQKLKHQKEAEEEELEIPPQYQAGGSGIHRPVAKKAMPGAEYKAKKAKGDVKKKGRPDPYAYIPLNRSKLNRRKKMKLQGQFKGLVKAARRGSQVGHKNRRKDRRP

SEQ ID NO: 6912 - protein, 144 aa, Homo sapiens
MSRRSQRLTRYSQGDDDGSSSSGGSSVAGSQSTLFKDSPLRTLKRKSSNMKRLSPAPQLGPSSDAHTSYYSESLVHESWFPPRSSLEELHGDANWGEDLRVRRRRGTGGSESSRASGLVGRKATEDFLGSSSGYSSEDDYVGRR

SEQ ID NO: 6913 - protein, 166 aa, Homo sapiens
MRIPALNAYMKSLLSLPVWVLMDEDVRIFFYQSPYDSEQVPQALRRLRPRTRKVKSVSPQGNSVDRMAAPRAEALFDFTGNSKLELNFKAGDVIFLLSRINKDWLEGTVRGATGIFPLSFVKILKDFPEEDDPTNWLRCYYYEDTISTIKSVAWEGGACPAFLPSL

SEQ ID NO: 6914 - protein, 2754 aa, Homo sapiens
MAASERLYELWLLYYAQKDLGYLQQWLKAFVGAFKKSISLSSLEPRRPEEAGAEVPLLPLDELHVLAEQLHQADLEQALLLLKLFIILCRNLENIEAGRGQVLVPRVLALLTKLVAELKGCPPPQGRGTQLENVALHALLLCEGLFDPYQTWRRQRSGEVISSKEKSKYKFPPAALPQEFSAFFQESLQNADHLPPILLLRLIHLFCAVLAGGKENGQMAVSDGSVKGLLSVVRGWSRGPAPDPCLVPLALEALVGAVHVLHASRAPPRGPELRALLESYFHVLNADWPAGLSSGPEEALVTLRVSMLDAIPMMLACEDRPVLQATFLSNNCFEHLTRLIQNSKLYLQSRAPPEGDSDLATRLLTEPDVQKVLDQDTDAIAVHVVRVLTCIMSDSPSAKEVFKERIGYPHLQEVLQSHGPPTHRLLQELLNMAVEGDHSMCPPPPIRNEQPVLVLAQWLPSLPTAELRLFLAQRLRWLCDSCPASRATCVQAGLVGCLLETLSTGLALEARCQEQLLALLQALGRVSIRPMELRHLLRPRPGLDSEPGGAEAGKARHAGAVIRTLSGMARHQGPARALRYFDLTPSMAGIMVPPVQRWPGPGFTFHAWLCLHPMDTAPTPAPTRPLQRKQLYSFFTSSGSGFEAFFTAAGTLVVAVCTRKEYLTMSLPEVSFADSAWHCVAIVHVPGRRPFSQNLVHVYKDGHLVKTAPLRCPSLSEPFSSCCIGSAGYRTTTTTTGLPTPPVPATLAYTHPALTRSQSVPASTGLGWGSGLVAPLQEGSIDSTLAGTQDTRWGSPTSLEGELGAVAIFHEALQATALRTLCTLGPNETAPFKPEGELHELSTRLLLHYSPQACKNNICLDLSPSHGLDGRLTGHRVETWDVKDVVNCVGGMGALLPLLERVAAQPKEAEAGPAETHDLVGPELTSGHNTQGLVLPLGKSSEERMERNAVAAFLLMLRNFLQGHMVNQESLVQCQGPAIIGALLRKVPSWAMDMNVLMSAQLLMEQVAAEGSGPLLYLLYQHLLFNFHLWTLSDFAVRLGHIQYMSSIVREHRQKLRKKYGVQFILDALRTHYSPQRERPLAADDLRTVQTSLLGLAREFLVRSLSADDVQVTQTMLSFLAATGDDGQAVGALDLLLALLHGSLVQESLAVFLLEPGNLEVLLALLVRPGSLPLLPDRVCKILRRLQQNERLPERSRQRLRLRECGLQGLVACLPEGTVSPQLCQGLYKLFLGADCLNLSDLLAVVQLSLQADLSVRLDICRQLFHLIYGQPDVVRLLARQAGWQDVLTRLYVLEAATAGSPPPSSPESPTSPKPAPPKPPTESPAEPSDVFLPSEAPCPDPDGFYHALSPFCTPFDLGLERSSVGSGNTAGGGGSSGTLTPASQPGTPSPLDGPRPFPAAPGRHSSSLSNVLEDGSLPEPTISGDDTSNTSNPQQTSEEELCNLLTNVLFSVTWRGVEGSDEAAWRERGQVFSVLTQLGASATLVRPPDCIKRSLLEMMLESALTDIKEAPVGVLASLTQQALWLLRLLQDFLCAEGHGNQELWSEKLFEGVCSLLDRLGAWPHLANGTADLREMAQIGLRLVLGYILLEDPQLHAQAYVRLHMLLQTAVPARREEACYVLSKLEAALGRVLNTSSLESATDEAGSPLAAAAAAAAAERCSWLVPLVRTLLDRAYEPLGLQWGLPSLPPTNGSPTFFEDFQAFCATPEWRHFIDKQVQPTMSQFEMDTYAKSHDLMSGFWNACYDMLMSSGQRRQWERAQSRRAFQELVLEPAQRRARLEGLRYTAVLKQQATQHSMALLHWGALWRQLASPCGAWALRDTPIPRWKLSSAETYSRMRLKLVPNHHFDPHLEASALRDNLGEVPLTPTEEASLPLAVTKEAKVSTPPELLQEDQLGEDELAELETPMEAAELDEQREKLVLSAECQLVTVVAVVPGLLEVTTQNVYFYDGSTERVETEEGIGYDFRRPLAQLREVHLRRFNLRRSALELFFIDQANYFLNFPCKVGTTPVSSPSQTPRPQPGPIPPHTQVRNQVYSWLLRLRPPSQGYLSSRSPQEMLRASGLTQKWVQREISNFEYLMQLNTIAGRTYNDLSQYPVFPWVLQDYVSPTLDLSNPAVFRDLSKPIGVVNPKHAQLVREKYESFEDPAGTIDKFHYGTHYSNAAGVMHYLIRVEPFTSLHVQLQSGRFDCSDRQFHSVAAAWQARLESPADVKELIPEFFYFPDFLENQNGFDLGCLQLTNEKVGDVVLPPWASSPEDFIQQHRQALESEYVSAHLHEWIDLIFGYKQRGPAAEEALNVFYYCTYEGAVDLDHVTDERERKALEGIISNFGQTPCQLLKEPHPTRLSAEEAAHRLARLDTNSPSIFQHLDELKAFFAEVVSDGVPLVLALVPHRQPHSFITQGSPDLLVTVSASGLLGTHSWLPYDRNISNYFSFSKDPTMGSHKTQRLLSGPWVPGSGVSGQALAVAPDGKLLFSGGHWDGSLRVTALPRGKLLSQLSCHLDVVTCLALDTCGIYLISGSRDTTCMVWRLLHQGGLSVGLAPKPVQVLYGHGAAVSCVAISTELDMAVSGSEDGTVIIHTVRRGQFVAALRPLGATFPGPIFHLALGSEGQIVVQSSAWERPGAQVTYSLHLYSVNGKLRASLPLAEQPTALTVTEDFVLLGTAQCALHILQLNTLLPAAPPLPMKVAIRSVAVTKERSHVLVGLEDGKLIVVVAGQPSEVRSSQFARKLWRSSRRISQVSSGETEYNPTEAR

SEQ ID NO: 6915 - protein, 255 aa, Homo sapiens
EPFTSLHVQLQSGRFDCSDRQFHSVAAAWQARLESPADVKELIPEFFYFPDFLENQNGFDLGCLQLTNEKVGDVVLPPWASSPEDFIQQHRQALESEYVSAHLHEWIDLIFGYKQRGPAAEEALNVFYYCTYEGAVDLDHVTDERERKALEGIISNFGQTPCQLLKEPHPTRLSAEEAAHRLARLDTNSPSIFQHLDELKAFFAEDAATAEWPVGARQWCEWTSTGSGPGWKAAIQRWPLGWQPAGDCTTPWQAV

SEQ ID NO: 6916 - protein, 95 aa, Homo sapiens
MQAFLKGTSISTKPPLTKDRGVAASAGSSGENKKAKPVPWVEKYRPKCVDEVAFQEEVVAVLKKSLEGADLPNLLFYGPPGTGKTSTILAAAREL

SEQ ID NO: 6917 - protein, 219 aa, Homo sapiens
MGSAKSVPVTPARPPPHNKHLARVADPRSPSAGILRTPIQVESSPQPGLPAGEQLEGLKHAQDSDPRSPTLGIARTPMKTSSGDPPSPLVKQLSEVFETEDSKSNLPPEPVLPPEAPLSSELDLPLGTQLSVEEQMPPWNQTEFPSKQVFSKEEARQPTETPVASQSSDKPSRDPETPRSSASSVPDFEEAVPGTCGHSHPVSCDSQAAHPVIVAREDA

SEQ ID NO: 6918 - protein, 181 aa, Homo sapiens
LLKMAQGHRVETEHYEEIEDYDYNNPNDTSNFCPGLQTAQQNGDTPEAQGLDITTYGESNLVAEPQKVNKIEIHYAKTAKKMDMKKLKQSMWSLLTALSGKEADAEANHREAGKEAALAEVADEKMLSGLTKDLQRSLPPVMAQNLSIPLAFACLLHLANEKNLKLEGTEDLSDVLVRQGD

SEQ ID NO: 6919 - protein, 172 aa, Homo sapiens
MKPPSSIQTSCKFKDVRRNVQKDTEELKSCGIQDIFVFCTRGELSKYRVPNLLDLYQQCGIITHHHPIADGGTPDIASCCEIMEELTTCLKNYRKTLIHCYGGLGRSCLVAACLLLYLSDTISPEQAIDSLRDLRGSGAIQTIKQYNYLHEFRDKLAAHLSSRDSQSRSVSR

SEQ ID NO: 6920 - protein, 983 aa, Homo sapiens
QLEEEVKDLADKKESVAHWEAQITEIIQWVSDEKDARGYLQALASKMTEELEALRNSSLGTRATDMPWKMRRFAKLDMSARLELQSALDAEIRAKQAIQEELNKVKASNIITECKLKDSEKKNLELLSEIEQLIKDTEELRSEKGIEHQDSQHSFLAFLNTPTDALDQFETVDSTPLSVHTPTLRKKGCPGSTGFPPKRKTHQFFVKSFTTPTKCHQCTSLMVGLIRQGCSCEVCGFSCHITCVNKAPTTCPVPPEQTKGPLGIDPQKGIGTAYEGHVRIPKPAGVKKGWQRALAIVCDFKLFLYDIAEGKASQPSVVISQVIDMRDEEFSVSSVLASDVIHASRKDIPCIFRVTASQLSASNNKCSILMLADTENEKNKWVGVLSELHKILKKNKFRDRSVYVPKEAYDSTLPLIKTTQAAAIIDHERIALGNEEGLFVVHVTKDEIIRVGDNKKIHQIELIPNDQLVAVISGRNRHVRLFPMSALDGRETDFYKLSETKGCQTVTSGKVRHGALTCLCVAMKRQVLCYELFQSKTRHRKFKEIQVPYNVQWMAIFSEQLCVGFQSGFLRYPLNGEGNPYSMLHSNDHTLSFIAHQPMDAICAVEISSKEYLLCFNSIGIYTDCQGRRSRQQELMWPANPSSCCYNAPYLSVYSENAVDIFDVNSMEWIQTLPLKKVRPLNNEGSLNLLGLETIRLIYFKNKMAEGDELVVPETSDNSRKQMVRNINNKRRYSFRVPEEERMQQRREMLRDPEMRNKLISNPTNFNHIAHMGPGDGIQILKDLPMPGFPYPSPHHHSGLISSPINFEHIYHMTVNSAEKFLSPDSINPEYSPSLRSVPGTPSFMTLRNPRPQESRTVFSGSVSIPSITKSRPEPGRSMSASSGLSARSSAQNGSALKREFSGGSYSAKRQPMPSPSEGSLSSGGMDQGSDAPARDFDGEDSDSPRHSTASNSSNLSSPPSPASPRKTKSLSLESTDRGSWDP

SEQ ID NO: 6921 - protein, 739 aa, Homo sapiens
MEGGGGRDEPSACRAGDVNMDDPKKEDILLLADEKFDFDLSLSSSSANEDDEVFFGPFGHKERCIAASLELNNPVPEQPPLPTSESPFAWSPLAGEKFVEVYKEAHLLALHIESSSRNQAAQAAKPEDPRSQGVERFIQESKLKINLFEKEKEMKKSPTSLKRETYYLSDSPLLGPPVGEPRLLASSPALPSSGAQARLTRAPGPPHSAHALPRESCTAHAASQAATQRKPGTKLLLPRAASVRGRSIPGAAEKPKKEIPASPSRTKIPAEKESHRDVLPDKPAPGAVNVPAAGSHLGQGKRAIPVPNKLGLKKTLLKAPGSTSNLARKSSSGPVWSGASSACTSPAVGKAKSSEFASIPANSSRPLSNISKSGRMGPAMLRPALPAGPVGASSWQAKRVDVSELAAEQLTAPPSASPTQPQTPEGGGQWLNSSCAWSESSQLNKTRSIRRRDSCLNSKTKVMPTPTNQFKIPKFSIGDSPDSSTPKLSRAQRPQSCTSVGRVTVHSTPVRRSSGPAPQSLLSAWRVSALPTPASRRCSGLPPMTPKTMPRAVGSPLCVPARRRSSEPRKNSAMRTEPTRESNRKTDSRLVDVSPDRGSPPSRVPQALNFSPEESDSTFSKSTATEVAREEAKPGGDAAPSEALLVDIKLEPLAVTPDAASQPLIDLPLIDFCDTPEAHVAVGSESRPLIDLMTNTPDMNKNVAKPSPVVGQLIDLSSPLIQLSPEADKENVDSPLLKF

SEQ ID NO: 6922 - protein, 170 aa, Homo sapiens
LASRLLPDFLLERRLTLADALEKCLKKGKGEEQALAAAVLGLLCVQLGPGPKGEELFHSLQPLLVSVLSDSTASPAARLHCASALGLGCYVAAADIQDLVSCLACLESVFSRFYGLGGSSTSPVVPASLHGLLSAALQAWALLLTICPSTQISHILDSCPGCPSSCPVKV

SEQ ID NO: 6923 - protein, 207 aa, Homo sapiens
AEPDGDHNITELPQAVAGRGNMRAQQSAVRLTEIGPRMTLQLIKVQEGVGEGKVMFHSFVSKTEEELQAILEAKEKKLRLKAQRQAQQAQNVQRKQEQREAHRKKSLEGMKKARVGGSDEEASGIPSRTASLELDLFPEAKQKRLAKSPGRKRKRWEMDRGRGRLCDQKFPKTKDKSQGAQARRGPRGASRDGGRGRGRGRPGKRVA

SEQ ID NO: 6924 - protein, 131 aa, Homo sapiens
MNDTVTIRTRKFMTNRLLQRKQMVIDVLHPGKATVPKTEIREKLAKMYKTTPDVIFVFGFRTHFGGGKTTGFGMIYDSLDYAKKNEPKHRLARHGLYEKKKTSRKQRKERKNRMKKVRGTAKANVGAGKKQ

SEQ ID NO: 6925 - protein, 83 aa, Homo sapiens
MLSEVLLVSAPGKVILHGEHAVVHGKVALAVSLNLRTFLRLQPHSNGKVDLSLPNIGIKRAWDVARLQSLDTSFLGGPRRIWS

SEQ ID NO: 6926 - protein, 279 aa, Homo sapiens
ISVPGPPGPPGPPGPPGTMGASSGVRLWATRQAMLGQVHEVPEGWLIFVAEQEELYVRVQNGFRKVQDNEVAALQPPVVQLHDSNPYPRREHPHPTARPWRADDILASPPRLPEPQPYPGAPHHSSYVHLRPARPTSPPAHSHRDFQPVLHLVALNSPLSGGMRGIRGADFQCFQQARAVGLAGTFRAFLSSRLQDLYSIVRRADRAAVPIVNLKDELLFPSWEALFSGSEGPLKPGARIFSFDGKDVLRHPTWPQKSVWHGSDPNGRRLTESYCETWR

SEQ ID NO: 6927 - protein, 225 aa, Homo sapiens
MSKEIFPFCRVGNIPYEATEEQLKDIFSEVGPVVSFRLVYDRETGKPKGYGFCEYQDQETALSAMRNLNGREFSGRALRVDNAASEKNKEELKSLGTGAPVIESPYGETISPEDAPESISKAVASLPPEQMFELMKQMKLCVQNSPQEARNMLLQNPQLAYALLQAQVVMRIVDPEIALKILHRQTNIPTLIAGNPQPVHGAGPGSGSNVSMNQQNPQAPQAQSL

SEQ ID NO: 6928 - protein, 129 aa, Homo sapiens
MRARDSTGHPLMLREQTLGQHLHGEDTGEWEHTCEVCMTNCPTLIVMVGLPARGKTYISKKLTRYLNWIGVPTREFNVGQYRRDVVKTYKSFEFFLPDNEEGLKIRKQCALAALRDVRRFLSEEGGHVA

SEQ ID NO: 6929 - protein, 614 aa, Homo sapiens
MKRDRLGRFLSPGSSRQCGASDGGGGVSRTRGRPSLSGGPRVDGATARRAWGPVGSCGDAGEDGADEAGAGRALAMGHCRLCHGKFSSRSLRSISERAPGASMERPSAEERVLVRDFQRLLGVAVRQDPTLSPFVCKSCHAQFYQCHSLLKSFLQRVNASPAGRRKPCAKVGAQPPTGAEEGACLVDLITSSPQCLHGLVGWVHGHAASCGALPHLQRTLSSEYCGVIQVVWGCDQGHDYTMDTSSSCKAFLLDSALAVKWPWDKETAPRLPQHRGWNPGDAPQTSQGRGTGTPVGAETKTLPSTDVAQPPSDSDAVGPRSGFPPQPSLPLCRAPGQLGEKQLPSSTSDDRVKDEFSDLSEGDVLSEDENDKKQNAQSSDESFEPYPERKVSGKKSESKEAKKSEEPRIRKKPGPKPGWKKKLRCEREELPTIYKCPYQGCTAVYRGADGMKKHIKEHHEEVRERPCPHPGCNKVFMIDRYLQRHVKLIHTEVRNYICDECGQTFKQRKHLLVHQMRHSGAKPLQCEVCGFQCRQRASLKYHMTKHKAETELDFACDQCGRRFEKAHNLNVHMSMVHPLTQTQDKALPLEAEPPPGPPSPSVTTEGQAVKPEPT

SEQ ID NO: 6930 - protein, 882 aa, Homo sapiens
MAENSVLTSTTGRTSLADSSIFDSKVTEISKENLLIGSTSYVEEMPQIETRVILVQEAGKQEELIKALKDIKVGFVKMESVEEFEGLDSPEFENVFVVTDFQDSVFNDLYKADCRVIGPPVVLNCSQKGEPLPFSCRPLYCTSMMNLVLCFTGFRKKEELVRLVTLVHHMGGVIRKDFNSKVTHLVANCTQGEKFRVAVSLGTPIMKPEWIYKAWERRNEQDFYAAVDDFRNEFKVPPFQDCILSFLGFSDEEKTNMEEMTEMQGGKYLPLGDERCTHLVVEENIVKDLPFEPSKKLYVVKQEWFWGSIQMDARAGETMYLYEKANTPELKKSVSMLSLNTPNSNRKRRRLKETLAQLSRETDVSPFPPRKRPSAEHSLSIGSLLDISNTPESSINYGDTPKSCTKSSKSSTPVPSKQSARWQVAKELYQTESNYVNILATIIQLFQVPLEEEGQRGGPILAPEEIKTIFGSIPDIFDVHTKIKDDLEDLIVNWDESKSIGDIFLKYSKDLVKTYPPFVNFFEMSKETIIKCEKQKPRFHAFLKINQAKPECGRQSLVELLIRPVQRLPSVALLLNDLKKHTADENPDKSTLEKAIGSLKEVMTHINEDKRKTEAQKQIFDVVYEVDGCPANLLSSHRSLVQRVETISLGEHPCDRGEQVTLFLFNDCLEIARKRHKVIGTFRSPHGQTRPPASLKHIHLMPLSQIKKVLDIRETEDCHNAFALLVRPPTEQANVLLSFQMTSDELPKENWLKMLCRHVANTICKADAENLIYTADPESFEVNTKDMDSTLSRASRAIKKTSKKVTRAFSFSKTPKRALRRALMTSHGSVEGRSPSSNDKHVMSRLSSTSSLAGIPSPSLVSLPSFFERRSHTLSRSTTHLI

SEQ ID NO: 6931 - protein, 98 aa, Homo sapiens
MSGGSADYNREHGGPEGMDPDGVIESNWNEIVDNFDDMNLKESLLRGIYAYGFEKPSAIQQRAIIPCIKGYDVIAQAQSGTGKTATFAISILQQLEIE

SEQ ID NO: 6932 - protein, 272 aa, Homo sapiens
MSLQVLNDKNVSNEKNTENCDFLFSPPEVTGRSSVLRVSQKENVPPKNLAKAMKVTFQTPLRDPQTHRILSPSMASKLEAPFTQDDTLGLENSHPVWTQKENQQLIKEVDAKTTHGILQKPVEADTDLLGDASPAFGSGSSSESGPGALADLDCSSSSQSPGSSENQMVSPGKVSGSPEQAVEENLSSYSLDRRVTPASETLEDPCRTESQHKAETPHGAEEECKAETPHGAEEECRHGGVCAPAAVATSPPGAIPKEACGGAPLQGLPGEA

SEQ ID NO: 6933 - protein, 208 aa, Homo sapiens
MNKHQKPVLTGQRFKTRKRDEKEKFEPTVFRDTLVQGLNEAGDDLEAVAKFLDSTGSRLDYRRYADTLFDILVAGSMLAPGGTRIDDGDKTKMTNHCVFSANEDHETIRNYAQVFNKLIRRYKYLEKAFEDEMKKLLLFLKAFSETEQTKLAMLSGILLGNGTLPATILTSLFTDSLVKEGIAASFAVKLFKAWMAEKDANSVTSSLR

SEQ ID NO: 6934 - protein, 97 aa, Homo sapiens
MVRKKNSLKDCVAVAGPLGVTHFLILSKTETNVYFKLMRLPGGPTLTFQVKKYSLVRDVVSSLRRHRMHEQQFAHPPLLVLNSFGPHGMHVKLMATM

SEQ ID NO: 6935 - protein, 74 aa, Homo sapiens
MELHILEHRVRVLSVARPGLWLYTHPLIKLLFLPRRSRCKFFSLTETPEDYTLMVDEEGFKDEETETQITHPRS

SEQ ID NO: 6936 - protein, 234 aa, Homo sapiens
LVEDTFTIDEVSEVLNGLQAVVHSEVESELINTAYTNVLLLRQLFAQAEKWYLKLQTDISELENRELLEQVAEFEKAEITSSNKKPILDVTKPKLAPLNEGGTAELLNKATNALDEKSKLEKALQDLQLDQGNQKDFIKAQDLSNLENTVAALKSEFQKTLNDKTENQKSLEENLATAKHDLLRVQEQLHMAEKELEKKFQQTAAYRNMKEILTKKNDQIKDLRKRLAQYEPED

SEQ ID NO: 6937 - protein, 213 aa, Homo sapiens
MASFPPRVNEKEIDGSYFAWSQGHRTVKLVPWSQCLQNFLLHGTKNVTNSSSLRLPRQNSDGGQKNKPREHIIDCGDIVWSLAFGSSVPEKQSRCVNIEWHRFRFGQDQLLLATGLNNGRIKIWDVYTGKLLLNLVDHTEVVRDLTFAPDGSLILVSASRDKTLRVWDLKDDGNMMKVLRGHQNWVYSCAFSPDSSMLCSVGASKAVVAAILV

SEQ ID NO: 6938 - protein, 97 aa, Homo sapiens
MIHTNLKKKFSCCVLVFLLFAVICVWKEKKKGSYYDSFKLQTKEFQVLKSLGKLAMGSDSQSVSSSSTQDPHRGRQTLGSLRGLAKAKPEASFQVWN

SEQ ID NO: 6939 - protein, 257 aa, Homo sapiens
MFSEQAAQRAHTLLSPPSANNATFARVPVATYTNSSQPFRLGERSFSRQYAHIYATRLIQMRPFLENRAQQHWGTVLAVFGSVRDDGKFLVEDYCFADLAPQKPAPPLDTDRFVLLVSGLGLGGGGGESLLGTQLLVDVVTGQLGDEGEQCSAAHVSRVILAGNLLSHSTQSRDSINKAKYLTKKTQAASVEAVKMLDEILLQLSASVPVDVMPGEFDPTNYTLPQQPLHPCMFPLATAYSTLQLVTNPYQATIDGV

SEQ ID NO: 6940 - protein, 161 aa, Homo sapiens
MKMRRYKLFLMFCMAGLCLISFLHFFKTLSYVTFPRELASLSPNLVSSFFWNNAPVTPQASPEPGGPDLLRTPLYSHSPLLQPLPPSKAAEELHRVDLVLPEDTTEYFVRTKAGGVCFKPGTKMLERPPPGRPEEKPEGANGSSARRPPRYLLSARERTGG

SEQ ID NO: 6941 - protein, 180 aa, Homo sapiens
MSHRKFSAPRHGSLGFLPRKRSSRHRGKVKSFPKDDPSKPVHLTAFLGYKAGMTHIVREVDRPGSKVNKKEVVEAVTIVETPPMVVVGIVGYVETPRGLRTFKTVFAEHISDECKRRFYKNCSARLCPMSSIQAPLAGGKGSLEAGNELHPHAVPVCLPLTPRRGDEGLHLVPSPTLLCS

SEQ ID NO: 6942 - protein, 302 aa, Homo sapiens
MELRSYQWEVIMPALEGKNIIIWLPTGAGKTRAAAYVAKRHLETVDGAKVVVLVNRVHLVTQHGEEFRRMLDGRWTVTTLSGDMGPRAGFGHLARCHDLLICTAELLQMALTSPEEEEHVELTVFSLIVVDECHHTHKDTVYNVIMSQYLELKLQRAQPLPQVLGLTASPGTGGASKLDGAINHVLQLCANLDTWCIMSPQNCCPQLQEHSQQPCKQYNLCHRRSQDPFGDLLKKLMDQIHDHLEMPELSRKFGTQMYEQQVVKLSEAAALAGLQEQRVYALHLRRYNDALLIHDTVRAVDA

SEQ ID NO: 6943 - protein, 218 aa, Homo sapiens
MSKEERPGREEILECQVMWEPDSKKNTQMDRFRAAVGAACGLALESYDDLYHWSVESYSDFWAEFWKFSGIVFSRVYDEVVDTSKGIADVPEWFKGSRLNYAENLLRHKENDRVALYIANQHKKPNHWKQAVSGPAQATEQGLPSAIVGRTSSPCAVGKDHGSPVPTETYWDTSSGAGAQASMYFQSPWALLMHIPGEEPWSNVSTYHMGLGKAKRKL

SEQ ID NO: 6944 - protein, 252 aa, Homo sapiens
MELGPEPPHRRRLLFACSPPPASQPVVKALFGASAAGGLSPVTNLTVTMDQLQGLGSDYEQPLEVKNNSNLQRMGSSESTDSGFCLDSPGPLDSKENLENPMRRIHSLPKLLGCSPALKRSHSDSLDHDIFQLIDPDENKENEAFEFKKPVRPVSRGCLHSHGLQEGKDLFTQRQNSAPARMLSSNERDSSEPGNFIPLFTPQSPVTATLSDEDDGFVDLLDGENLKNEEETPSCMASLWTAPLVMRTTNLV

SEQ ID NO: 6945 - protein, 534 aa, Homo sapiens
MASRCWRWWGWSAWPRTRLPPAGSTPSFCHHFSTQEKTPQICVVGSGPAGFYTAQHLLKRVEALCSQPRVLNSPALSGEGEDLGASQPLSLGPTSCHPVPQQHPQAHVDIYEKQPVPFGLVRFGVAPDHPEVKNVINTFTQTAHSGRCAFWGNVEVGRDVTVPELQEAYHAVVLSYGAEDHRALEIPGEELPGVCSARAFVGWYNGLPENQELEPDLSCDTAVILGQGNVALDVARILLTPPEHLERTDITKAALGVLRQSRVKTVWLVGRRGPLQVAFTIKELREMIQLPGARPILDPVDFLGLQDKIKEVPRPRKRLTELLLRTATEKPGPAEAARQASASRAWGLRFFRSPQQVLPSPDGRRAAGVRLAVTRLEGVDEATRAVPTGDMEDLPCGLVLSSIGYKSRPVDPSVPFDSKLGVIPNVEGRVMDVPGLYCSGWVKRGPTGVIATTMTDSFLTGQMLLQDLKAGLLPSGPRPGYAAIQALLSSRGVRPVSFSDWEKLDAEEVARGQGTGKPREKLVDPQEMLRLLGH

SEQ ID NO: 6946 - protein, 162 aa, Homo sapiens
MNKHQKPVLTGQRFKTRKRDEKEKFEPTVFRDTLVQGLNEAGDDLEAVAKFLDSTGSRLDYRRYADTLFDILVAGSMLAPGGTRIDDGDKTKMTNHCVFSANEDHETIRNYAQVFNKLIRRYKYLEKAFEDEMKKLLLFLKAFSETEQTKLAMLSGILLGNG

SEQ ID NO: 6947 - protein, 186 aa, Homo sapiens
GCGLRRVVFRSLKFMASHGNDAARARFESKVPSFYYRPTPSDCQLLREQWIRAKYERQEFIYPEKQEPYSAGYREGFLWKRGRDNGQFLSRKFVLTEREGALKYFNRNDAKEPKAVMKIEHLNATFQPAKIGHPHGLQVTYLKDNSTRNIFIYHEDGKEIVDWFNALRAARFHYLQVAFPGAGDAD

SEQ ID NO: 6948 - protein, 191 aa, Homo sapiens
MLVRLNVRCSCRGVVLGGCRKLLASLVQPKGKKAKGKKVAPAPAVVKKQEAKKVVNPLFEKRPKNFGIGQDIQPKRDLTRFVKWPRYIRLQRQRAILYKRLKVPPAINQFTQALDRQTATQLLKLAHKYRPETKQEKKQRLLARAEKKAAGKGDVPTKRPPVLRAGVNTVTTLVENKKAQLVVIAHDVDPI

SEQ ID NO: 6949 - protein, 543 aa, Homo sapiens
MNCLEGPGKTCGPLASEEELVSACQLEKEEENEGEEEEEEEDEEDLDPDLDPDLEEEENDLGDPAVLGAVHNTQRALLSSPGVKAPGMLGMSLASLHFLWQTLDYLSPIPFWPTFPSTSSPAQHFGPRLPSPDPTLFCSLLTSWPPRFSHLTQLHPRHQRILQQQQHSQTPSPPAKKPWSQQPDPYANLMTRKEKDWVIKVQMVQLQSAKPRLDDYYYQEYYQKLEKKQADEELLGRRNRVESLKLVTPYIPKAEAYESVVRIEGSLGQVAVSTCFSPRRAIDAVPHGTQEQDIEAASSQRLRVLYRIEKMFLQLLEIEEGWKYRPPPPCFSEQQSNQVEKLFQTLKTQEQNNLEEAADGFLQVLSVRKGKALVARLLPFLPQDQAVTILLAITHHLPLLVRRDVADQALQMLFKPLGKCISHLTLHELLQGLQGLTLLPPGSSERPVTVVLQNQFGISLLYALLSHGEQLVSLHSSLEEPNSDHTAWTDMVVLIAWEIAQMPTASLAEPLAFPSNLLPLFCHHVDKQLVQQLEARMEFAWIY

SEQ ID NO: 6950 - protein, 580 aa, Homo sapiens
GNNRASHRKELRSSVTCEKRRTRGLSRIVPKSKEFIETESSSSSSSSDSDLESEQEEYPLSKAQTVAASASSGNDQRLKEAAANGGSGPRAPVGSINARTTSDIAKELEEQFYTLVPFGRNELLSPLKDSDEIRSLWVKIDLTLLSRIPEHLPQEPGVLSAPATKDSESAPPSHTSDTPAEKALPKSKRKRKCDNEDDYREIKKSQGEKDSSSRLATSTSNTLSANHCNMNINSVAIPINKNEKMLRSPISPLSDASKHKYTSEDLTSSSRPNGNSLFTSASSSKKPKADSQLQPHGGDLTKAAHNNSENIPLHKSRPQTKPWSPGSNGHRDCKRQKLVFDDMPRSADYFMQEAKRMKHKADAMVEKFGKALNYAEAALSFIECGNAMEQGPMESKSPYTMYSETVELIRYAMRLKTHSGPNATPEDKQLAALCYRCLALLYWRMFRLKRDHAVKYSKALIDYFKNSSKAAQAPSPWGASGNSVGSQGSLSNASALSPSTIVSIPQRIHQMAANHVSITNSILHSYDYWEMADNLAKENREFFNDLDLLMGPVTLHSSMEHLVQYSQQGLHWLRNSAHLS

SEQ ID NO: 6951 - protein, 275 aa, Homo sapiens
IGSAREADPALNVETEIEILKKLNHPCIIKIKNFFDAEDYYIVLELMEGGELFDKVVGNKRLKEATCKLYFYQMLLAVQYLHENGIIHRDLKPENVLLSSQEEDCLIKITDFGHSKILGETSLMRTLCGTPTYLAPEVLVSVGTAGYNRAVDCWSLGVILFIWTQVSLKDQITSGKYNFIPEVWAEVSEKALDLVKKLLVVDPKARFTTEEALRHPWLQDEDMKRKFQDLLSEENESTALPQVLAQPSTSRKRPREGEAEGAETTKRPAVCAAVL

SEQ ID NO: 6952 - protein, 273 aa, Homo sapiens
MEFSIKQSPLSVQSVVKCIKMKQAPEILGSANGKTPSCEVNRECSVFLSKAQLSSSLQEGVMQKFNGHDALPFIPADKLKDLTSRVFNGEPGAHDAKLRFESQEMKGIGTPPNTTPIKNGSPEIKLKITKTYMNGKPLFESSICGDSAADVSQSEENGQKPENKARRNRKRSIKYDSLLEQGLVEAALVSKISSPSDKKIPAKKESCPNTGRDKDHLLKYNVGDLVWSKVSGYPWWPCMVSADPLLHSYTKLKGIFKSKKFEHLKTSQIVLKD

SEQ ID NO: 6953 - protein, 103 aa, Homo sapiens
MESGAKGCEVVVSGKLRGQRAKSMKFVDGLMIHSGDPVNYYVDTAVRHVLLRQGVLGIKVKIMLPWDPTGKIGPKKPLPDHVSIVEPKDEILPTTPISEQKGG

SEQ ID NO: 6954 - protein, 76 aa, Homo sapiens
MLRREARLRREYLYRKAREEAQRSAQERKERLRRALEENRLIPTELRREALALQGSLEFDDAGGEGNYTRCDQPRG

SEQ ID NO: 6955 - protein, 48 aa, Homo sapiens
MSFVAGVIRRLDETVVNRIAAGEVIQRPANAIKEMIENWYGGSRAGLT

SEQ ID NO: 6956 - protein, 73 aa, Homo sapiens
KPAVEAYGEFLCMFEENYPETLKRLFVVKAPKLFPVAYNLIKPFLSEDTRKKIMVLGGGSLCQMERMLVLGFS

SEQ ID NO: 6957 - protein, 972 aa, Homo sapiens
MERMNWLSRLASRGPGHRIPQGANLQTPVMADPETCLMVFKNHWSQVVRILERQGPRAAPGGADDLSAVRNHTYQMLTLLAEDRAVPSAPTGPGPLLEFALHEDLLTRVLTWQLQWDELGDGVEERRAEQLKLFEMLVSEARQPLLRHGPVREALLTLLDACGRPVPSSPALDEGLVLLLSQLCVCVAQEPSLLEFFLQPPPEPGAAPRLLLFSRLVPFVHREGTLGQQARDALLLLMALSAGSPTVGRYIADHSYFCPVLATGLSALYSSLPRKIEVPGDDWHCLRREDWLGVPALALFMSSLEFCNAVIQVAHPLVQKQLVDYIHNGFLVPVMGPALHKTSVEEMIASTAYLELFLRSISEPALLRTFLRFLLLHRHDTHTILDTLVARIGSNSRLCMVSLSLFRTLLNLSCEDVLLQLVLRYLVPCNHVMLSQKPAVRDVDLYGRAADKFLSLIPRCCRHHAPSPPRPEHASWARGPGSPSVDSSSVTTVPRPSTPSRLALFLRQQSLGGSESPGPAPCSPGLSASPASSPGRRPTPAEEPGELEDNYLEYLREARRGVDRCVRACRTWSAPYDGERPSPEPSPFGSRTKKRSLLPEEDRNNVGEGEEEELGRRGRAGGAGEGPGHLPPPQLNGVPGSWPEGAKKVRLVPKEGAGELLEGISEGMAGLEGFGQELRELEVALSNGGTGSESPLEPPLPLEEEEAYESFTCPPEPPGPFLSSPLRTLNQLPSQPFTGPFMAVLFAKLENMLQNSVYVNFLLTGLVAQLACHPQPLLRSFLLNTNMVFQPSVKSLLQVLGSVKNKIENFAASQEDFPALLSKAKKYLIARGKLDWAEGPAAGPAPRRSDPLVKSRRPSLGELLLRHAHSPTRARQAAQLVLQPGRDGAGLGLSGGSPGASTPVLLTRGGAPERQGEALRVKNAVYCAVIFPEFLKELAAISQAHAVTSPFLLETSEEGSGPLISGCGPLNP

SEQ ID NO: 6958 - protein, 193 aa, Homo sapiens
MEPLASNIQVLLQAAEFLERREREAEHGYASLCPHRSPGPIHRRKKRPPQAPGAQDSGRSVHNELEKRRRAQLKRCLERLKQQMPLGADCARYTTLSLLRRARMHIQKLEDQEQRARQLKERLRSKQQSLQRQLEQLRGLAGAAERERLRADSLDSSGLSSERSDSDQVLPNENGGTPNHRPTGRGNNISSHH

SEQ ID NO: 6959 - protein, 198 aa, Homo sapiens
MAPILPGTRRVTSGASPQVPLPFWRECISVHVGQAGVQMGNACWELYCLEHGIQPDGQMPSDKTIGGGDDSFTTFFCETGAGKHVPRAVFVDLEPTVIDEIRNGPYRQLFHPEQLITGKEDAANNYARGHYTIGKEIIDPVLDRIRKLSDQCTGLQGFLVFHSFGGGTGSGFTSLLMERLSVDYGKKSKLEFSIYPAP

SEQ ID NO: 6960 - protein, 100 aa, Homo sapiens
MFGLFVEHGPYVVTSNMTLRDRDFPWTTTLSMLYIDNPVGTGFSFTDDTHGYAVNEDDVARDLYSALIQFFQIFPEYKNNDFYVTGESYAGKYVPAIAHL

SEQ ID NO: 6961 - protein, 153 aa, Homo sapiens
MAKGDPKKPKGKMSAYAFFVQTCREEHKKKNPEVPVNFAEFSKKCSERWKTMSGKEKSKFDEMAKADKVRYDREMKDYGPAKGGKKKKDPNAPKRPPSGFFLFCSEFRPKIKSTNPGISIGDVAKKLGEMWNNLNDSEKQPYITKAAKLKEKY

SEQ ID NO: 6962 - protein, 695 aa, Homo sapiens
MGQTGKKSEKGPVCWRKRVKSEYMRLRQLKRFRRADEVKSMFSSNRQKILERTEILNQEWKQRRIQPVHILTSCSVTSDLDFPTQVIPLKTLNAVASVPIMYSWSPLQQNFMVEDETVLHNIPYMGDEVLDQDGTFIEELIKNYDGKVHGDRECGFINDEIFVELVNALGQYNDDDDDDDGDDPEEREEKQKDLEDHRDDKESRPPRKFPSDKIFEAISSMFPDKGTAEELKEKYKELTEQQLPGALPPECTPNIDGPNAKSVQREQSLHSFHTLFCRRCFKYDCFLHPFHATPNTYKRKNTETALDNKPCGPQCYQHLEGAKEFAAALTAERIKTPPKRPGGRRRGRLPNNSSRPSTPTINVLESKDTDSDREAGTETGGENNDKEEEEKKDETSSSSEANSRCQTPIKMKPNIEPPENVEWSGAEASMFRVLIGTYYDNFCAIARLIGTKTCRQVYEFRVKESSIIAPAPAEDVDTPPRKKKRKHRLWAAHCRKIQLKKGQNRFPGCRCKAQCNTKQCPCYLAVRECDPDLCLTCGAADHWDSKNVSCKNCSIQRGSKKHLLLAPSDVAGWGIFIKDPVQKNEFISEYCGEIISQDEADRRGKVYDKYMCSFLFNLNNDFVVDATRKGNKIRFANHSVNPNCYAKVMMVNGDHRIGIFAKRAIQTGEELFFDYRYSQADALKYVGIEREMEIP

SEQ ID NO: 6963 - protein, 69 aa, Homo sapiens
MEDLTDEEEVPASQSTENRVLPAPAPRREKTNEELQEELRNLQEQMKALQEQLKVTTIKQTASPARLQK

SEQ ID NO: 6964 - protein, 57 aa, Homo sapiens
SNPAPPESQEKKPLKPCCACPETKKARDACIIEKGEEHCGHLIEAHKECMRALGFKI

SEQ ID NO: 6965 - protein, 87 aa, Homo sapiens
MNVHRGSDSDRLLRQEASCLVDDTLAVAQEKEANSLASSGPHNLTYPLGPRNEDLSLDYASQPANLQFPHIMPLAEDIKGSCFQSGN

SEQ ID NO: 6966 - protein, 699 aa, Homo sapiens
MDLSALRVEEVQNVINAMQKILECPICLELIKEPVSTKCDHIFCKFCMLKLLNQKKGPSQCPLCKNDITKRSLQESTRFSQLVEELLKIICAFQLDTGLEYANSYNFAKKENNSPEHLKDEVSIIQSMGYRNRAKRLLQSEPENPSLQETSLSVQLSNLGTVRTLRTKQRIQPQKTSVYIELGSDSSEDTVNKATYCSVGDQELLQITPQGTRDEISLDSAKKAACEFSETDVTNTEHHQPSNNDLNTTEKRAAERHPEKYQGEAASGCESETSVSEDCSGLSSQSDILTTQQRDTMQHNLIKLQQEMAELEAVLEQHGSQPSNSYPSIISDSSALEDLRNPEQSTSEKVLTSQKSSEYPISQNPEGLSADKFEVSADSSTSKNKEPGVERSSPSKCPSLDDRWYMHSCSGSLQNRNYPSQEELIKVVDVEEQQLEESGPHDLTETSYLPRQDLEGTPYLESGISLFSDDPESDPSEDRAPESARVGNIPSSTSALKVPQLKVAESAQSPAAAHTTDTAGYNAMEESVSREKPELTASTERVNKRMSMVVSGLTPEEFMLVYKFARKHHITLTNLITEETTHVVMKTDAEFVCERTLKYFLGIAGGKWVVSYFWVTQSIKERKMLNEHDFEVRGDVVNGRNHQGPKRARESQDRKIFRGLEICCYGPFTNMPTGCPPNCGCAARCLDRGQWLPCNWADV

SEQ ID NO: 6967 - protein, 80 aa, Homo sapiens
MAAAAAEQQQFYLLLGNLLSPDNVVRKQAEETYENIPGQSKITFLLQAIRNTTAAEEARQMAAVLLRRLLSSAFDEVYPA

SEQ ID NO: 6968 - protein, 219 aa, Homo sapiens
MWWHQHNLCFRRPIEEDYSSGDVEEKVAAIAETDESAESEGVIDSHKRREILSRRPSYRKILNELSSDVPGVPKIEEERSEEEGTPPSIATMAVPTSIYQTSTGQYNEETELAPSHMAAATGDMPTYQIRAPTAALPQGVVMAASPGSLHSPQQLAEEATRKRELRLMKNREAAKECRRRKKEYVKCLESRVAVLEVQNKKLIEELETLKDICSPKTDY

SEQ ID NO: 6969 - protein, 56 aa, Homo sapiens
MAFMEKPPAGKVLLDDTVPLTAAIEASQSLQSHTRLPCNRFPCSSDQNQSGRWWNL

SEQ ID NO: 6970 - protein, 678 aa, Homo sapiens
MAAPGPLPAAALSPGAPTPRELMHGVAGVTSRAGRDREAGSVLPAGNRGARKASRRSSSRSMSRDNKFSKKDCLSIRNVVASIQTKEGLNLKLISGDVLYIWADVIVNSVPMNLQLGGGPLSRAFLQKAGPMLQKELDDRRRETEEKVGNIFMTSGCNLDCKAVLHAVAPYWNNGAETSWQIMANIIKKCLTTVEVLSFSSITFPMIGTGSLQFPKAVFAKLILSEVFEYSSSTRPITSPLQEVHFLVYTNDDEGCQAFLDEFTNWSRINPNKARIPMAGDTQGVVGTVSKPCFTAYEMKIGAITFQVATGDIATEQVDVIVNSTARTFNRKSGVSRAILEGAGQAVESECAVLAAQPHRDFIITPGGCLKCKIIIHVPGGKDVRKTVTSVLEECEQRKYTSVSLPAIGTGNAGKNPITVADNIIDAIVDFSSQHSTPSLKTVKVVIFQPELLNIFYDSMKKRDLSASLNFQSTFSMTTCNLPEHWTDMNHQLFCMVQLEPGQSEYNTIKDKFTRTCSSYAIEKIERIQNAFLWQSYQVKKRQMDIKNDHKNNERLLFHGTDADSVPYVNQHGFNRSCAGKNAVSYGKGTYFAVDASYSAKDTYSKPDSNGRKHMYVVRVLTGVFTKGRAGLVTPPPKNPHNPTDLFDSVTNNTRSPKLFVVFFDNQAYPEYLITFTA

SEQ ID NO: 6971 - protein, 69 aa, Homo sapiens
VDLVPGGDRQSPINIRWRDSVYDPGLKPLTISYDPATCLHVWNNGYSFLVEFEDSTDKSECAPFSTGSP

SEQ ID NO: 6972 - protein, 241 aa, Homo sapiens
IPSQSTRHSTVATECLSKNTEENLLSLKNSLNDCSNQVILAKASQEHHLSEETKCSASLFSSQCSELEDLTANTNTQDPFLIGSSKQMRHQSESQGVGLSDKELVSDDEERGTGLEENNQEEQSMDSNLGEAASGCESETSVSEDCSGLSSQSDILTTQQRDTMQHNLIKLQQEMAELEAVLEQHGSQPSNSYPSIISDSSALEDLRNPEQSTSEKVLTSQKSSEYPISQNPEGLSADKFE

SEQ ID NO: 6973 - protein, 101 aa, Homo sapiens
MAEPDYIEDDNPELIRPQKLINPVKTSRNHQDLHRELLMNQKRGLAPQNKPELQKVMEKRKRDQVIKQKEEEAQKKKSDLEIELLKRQQKLEQLELEKQKL

SEQ ID NO: 6974 - protein, 624 aa, Homo sapiens
MGIGVSLLLQFSLTPGGYRSVGRSRRCSRGSIPRNIPKRSWKKPHPQLCSLQAEEEPMLERRCRGPLAMGLAQPRLLSGPSQESPQTLGKESRGLRQQGTSVAQSGAQAPGRAHRCAHCRRHFPGWVALWLHTRRCQARLPLPCPECGRRFRHAPFLALHRQVHAAATPDLGFACHLCGQSFRGWVALVLHLRAHSAAKRPIACPKCERRFWRRKQLRAHLRRCHPPAPEARPFICGNCGRSFAQWDQLVAHKRVHVAEALEEAAAKALGPRPRGRPAVTAPRPGGDAVDRPFQCACCGKRFRHKPNLIAHRRVHTGERPHQCPECGKRFTNKPYLTSHRRIHTGEKPYPCKECGRRFRHKPNLLSHSKIHKRSEGSAQAAPGPGSPQLPAGPQESAAEPTPAVPLKPAQEPPPGAPPEHPQDPIEAPPSLYSCDDCGRSFRLERFLRAHQRQHTGERPFTCAECGKNFGKKTHLVAHSRVHSGERPFACEECGRRFSQGSHLAAHRRDHAPDRPFVCPDCGKAFRHKPYLAAHRRIHTGEKPYVCPDCGKAFSQKSNLVSHRRIHTGERPYACPDCDRSFSQKSNLITHRKSHIRDGAFCCAICGQTFDDEERLLAHQKKHDV

SEQ ID NO: 6975 - protein, 121 aa, Homo sapiens
MDSTACLKSLLLTVSQYKAVKSEANATQLLRHLEVISGQKLTRLFTSNQILTSECLSCLVELLEDPNISASLILSIIGLLSQLAVDIETRDCLQNTYNLNSVLAGVVCRSSHTDSVFLQMN

SEQ ID NO: 6976 - protein, 81 aa, Homo sapiens
MESYHKPDQQKLQALKDTANRLRISSIQATTAAGSGCSVFSHDREFIEIPPHVMLQRRRDHGCPLFPHHALQVPGPPESAQ

SEQ ID NO: 6977 - protein, 113 aa, Homo sapiens
MNRTQELSGQLSAATGDMPTYQIRAPTAALPQGVVMAASPGSLHSPQQLAEEATRKRELRLMKNREAAKECRRRKKEYVKCLESRVAVLEVQNKKLIEELETLKDICSPKTDY

SEQ ID NO: 6978 - protein, 334 aa, Homo sapiens
MGQTGKKSEKGPVCWRKRVKSEYMRLRQLKRFRRADEVKSMFSSNRQKILERTEILNQEWKQRRIQPVHILTSVSSLRGTRECSVTSDLDFPTQVIPLKTLNAVASVPIMYSWSPLQQNFMVEDETVLHNIPYMGDEVLDQDGTFIEELIKNYDGKVHGDRECGFINDEIFVELVNALGQYNDDDDDDDGDDPEEREEKQKDLEDHRDDKESRPPRKFPSDKIFEAISSMFPDKGTAEELKEKYKELTEQQLPGALPPECTPNIDGPNAKSVQREQSLHSFHTLFCRRCFKYDCFLHPFHATPNTYKRKNTETALDNKPCGPQCYQHLPLLPRN

SEQ ID NO: 6979 - protein, 97 aa, Homo sapiens
SAISADLGRQELIQRSSEALATVTGIVDGSGSIGAAVGQETGSHIEGVTGARETERTMSATSGPLGLRVCPNLGLSRSSSLILDCQASLNTASHLRC

SEQ ID NO: 6980 - protein, 115 aa, Homo sapiens
MAVPTSIYQTSTGQYIAIAQGGTIQISNPGSDGVQGLQALTMTNSGAPPPGATIVQYAAQSADGTQQFFVPGSQVVVQAATGDMPTYQIRAPTAALPQGVVMAASPGSLHSPQQL

SEQ ID NO: 6981 - protein, 2649 aa, Homo sapiens
MAVWEAEQLGGLQRGDLLTPPAPDGDGRTAPLGQPPGAQLYCPACLVTCHSQEAFENHCASSEHAQMVAFDQALPWEHRSPPPGLSKFELCPKPDLCEYGDACTKAHSAQELQEWVRRTQAVELRGQAAWQDGLVPYQERLLAEYQRSSSEVLVLAETLDGVRVTCNQPLMYQAQERKTQYSWTFAVHSEEPLLHVALLKQEPGADFSLVAPGLPPGRLYARGERFRVPSSTADFQVGVRVQAASFGTFEQWVVFDFGRRPVLLQKLGLQLGQGRRPGPCRNLALGHPEEMERWHTGNRHVVPGVERTAEQTALMAKYKGPALALEFNRSSVASGPISPTNYRQRMHQFLYEEEAAQQQLVAKLTLRGQVFLKTALQTPALNMLFAPPGALYAEVPVPSSLMPDTDQGFLLGRAVSTALVAPVPAPDNTVFEVRLERRASSEQALWLLLPARCCLALGLQPEARLVLEVQFQIDPMTFRLWHQAVDTLPEEQLVVPDLPTCALPRPWSVPPLRRGNRKQELAVALIAGWGPGDGRRVPPLLIYGPFGTGKTYTLAMASLEVIRRPETKVLICTHTNSAADIYIREYFHSHVSGGHPEATPLRVMYTDRPLSQTDPVTLQYCCLTDDRQAFRPPTRAELARHRVVVTTTSQARELRVPVGFFSHILIDEAAQMLECEALTPLAYASHGTRLVLAGDHMQVTPRLFSVARARAAEHTLLHRLFLCYQQETHEVARQSRLVFHENYRCTDAIVSFISRHFYVAKGNPIHARGKVPPHPRHYPLMFCHVAGSPDRDMSMASWLNLAEIAQVVEKVQEAYNTWPSCWGGREQRCICVVSHGAQVSALRQELRRRDLGQVSVGSFEILPGRQFRVVVLSTVHTCQSLLSPGALAPEFFTDARVLNTVLTRAQSQLVVVGDAVALCSFGACGKLWESFIRECVERHSVCPEGLSMEQVEQGVAQRRRWPPRGTQAGAAGNWEAAPEPVGDLAEEQAAVVTAMVKAEPGDEALSPASRDITATTAQTEAAAAPAGDAVKEDVVPGACAAGAAAAAGVESTEAEDAEADFWPWDGELNADDAILRELLDESQKVMVTVGEDGLLDTVARPESLQQARLYENLPPAALRKLLHAEPERYRHCSFVPETFERASAIPLDDASSGPIQVRGRLDCGMAFAGDEVLVQLLSGDKAPEGRLRGRVLGVLKRKRHELAFVCRMDTWDPRIMVPINGSVTKIFVAELKDPSQVPIYSLRKGRLQRVGLERLTAEARHSRLFWVQIVLWRQGFYYPLGIVREVLPEASTWEQGLRILGLEYSLRVPPSDQATITKVLQKYHTELGRVAGRREDCRAFLTFTVDPQGACNLDDALSVRDLGPRCEVAVHITDVASFVPRDGVLDVEARRQGAAFYAPGREPVPMLPASLCQDVLSLLPGRDRLAISLFLTMEKASGQLKSLRFAPSVVQSDRQLSYEEAEEVIRQHPGAGRELPARLDSVDACVVAACYFSRLLRRHRLRSDCFYEQPDEDGTLGFRAAHIMVKEYMIQFNRLVAEFLVGSECTRTVTPLRWQPAPRSQQLKALCEKHGDRVPLSLHLGHHLHGGGGSPPDTRLHLLASLWKQVQFAARTQDYEQMVDLVTTDDMHPFLAPAGRDLRKALERSAFGRCARGHQQQGGHYSLQVDWYTWATSPIRRYLDVVLQRQILLALGHGGSAYSARDIDGLCQAFSLQHALAQSYQRRARSLHLAVQLKAQPLDKLGFVVDVEAGSRCFRLLFPSNRETLPDPCPVPYGSLQLAEHPHALAGRPGLRLLWRRRVYSAQGSSPPLPLPGTVPDPHTLAVETALWKQLLELVELQRWPEAAALIQEKGEASQRRELVQVQRSHCGHFLEVARELGSGDTLQVQLGTSLQHGFLVPSPQLWTVAPGFSLCLEHVERPGDCFSGRVYRAPRDRYRDVDEYACVWEPFCALESATGAVAENDSVTLQHLSVSWEASRTPQGQLQGAFRLEAAFLEENCADINFSCCYLCIRLEGLPAPTASPRPGPSSLGPGLNVDPGTYTWVAHGQTQDWDQERRADRQEAPRRVHLFVHHMGMEKVPEEVLRPGTLFTVELLPKQLPDLRKEEAVRGLEEASPLVTSIALGRPVPQPLCRVIPSRFLERQTYNIPGGRHKLNPSQNVAVREALEKPFTVIQGPPGTGKTIVGLHIVFWFHKSNQEQVQPGGPPRGEKRLGGPCILYCGPSNKSVDVLAGLLLRRMELKPLRVYSEQAEASEFPVPRVGSRKLLRKSPREGRPNQSLRSITLHHRIRQAPNPYSSEIKAFDTRLQRGELFSREDLVWYKKVLWEARKFELDRHEVILCTCSCAASASLKILDVRQILVDEAGMATEPETLIPLVQFPQAEKVVLLGDHKQLRPVVKNERLQNLGLDRSLFERYHEDAHMLDTQYRMHEGICAFPSVAFYKSKLKTWQGLRRPPSVLGHAGKESCPVIFGHVQGHERSLLVSTDEGNENSKANLEEVAEVVRITKQLTLGRTVEPQDIAVLTPYNAQASEISKALRREGIAGVAVSSITKSQGSEWRYVLVSTVRTCAKSDLDQRPTKSWLKKFLGFVVDPNQVNVAVTRAQEGLCLIGDHLLLRCCPLWRSLLDFCEAQQTLVPAGQVRVCRRPTMPS

SEQ ID NO: 6982 - protein, 109 aa, Homo sapiens
MAVTGDDTAATGDMPTYQIRAPTAALPQGVVMAASPGSLHSPQQLAEEATRKRELRLMKNREAAKECRRRKKEYVKCLESRVAVLEVQNKKLIEELETLKDICSPKTDY

SEQ ID NO: 6983 - protein, 554 aa, Homo sapiens
MFPVAPKPQDSSQPSDRLMTEKQQEEAEWESINVLLMMHGLKPLSLVKRTDLKDLIIFDKQSSQRMRQNLKLLVEETSCQQNMIQELIETNQQLRNELQLEQSRAANQEQRANDLEQIMESVKSKIGELEDESLSRACHQQNKIKDLQKEQKTLQVKCQHYKKKRTEQEETIASLQMEVCRLKKEEEDRIVTQNRVFAYLCKRVPHTVLDRQLLCLIDYYESKIRKIHTQRQYKEDESQSEEENDYRNLDASPTYKGLLMSLQNQLKESKSKIDALSSEKLNLQKDLETRPTQHELRLYKQQVKKLEKALKKNVKLQELINHKKAEDTEKKDEPSKYNQQQALIDQRYFQVLCSINSIIHNPRAPVIIYKQTKGGVQNFNKDLVQDCGFEHLVPVIEMWADQLTSLKDLYKSLKTLSAELVPWLNLKKQDENEGIKVEDLLFIVDTMLEEVENKEKDSNMPHFQTLQAIVSHFQKLFDVPSLNGVYPRMNEVYTRLGEMNNAVRNLQELLELDSSSSLCVLVSTVGKLCRLINEDVNEQVMQVLGPEDLQRYLF

SEQ ID NO: 6984 - protein, 100 aa, Homo sapiens
MSSGTELLWPGAALLVLLGVAASLCVRCSRPGAKRSEKIYQQRSLREDQQSFTGSRTYSLVGQAWPGPLADMAPTRKDKLLQFYPSLEDPASSRYQNFSK

SEQ ID NO: 6985 - protein, 136 aa, Homo sapiens
MVVMNSLRVILQASPGKLLWRKFQIPRFMPARPCSLYTCTYKTRNRALHPLWESVDLVPGGDRQSPINIRWRDSVYDPGLKPLTISYDPATCLHVWNNGYSFLVEFEDSTDKSVIKGGPLEHNYRLKQFHFHWGAI

SEQ ID NO: 6986 - protein, 222 aa, Homo sapiens
MDLSALRVEEVQNVINAMQKILECPICLELIKEPVSTKCDHIFCKFCMLKLLNQKKGPSQCPLCKNDITKRSLQESTRFSQLVEELLKIICAFQLDTGLEYANSYNFAKKENNSPEHLKDEVSIIQSMGYRNRAKRLLQSEPENPSLETSLSVQLSNLGTVRTLRTKQRIQPQKTSVYIELGSDSSEDTVNKATYCSVGDQELLQITPQGTRDEISLDSAKK

SEQ ID NO: 6987 - protein, 75 aa, Homo sapiens
MAPSTPLLTVRGSEGLYMVNGPPHFTESTVFPRDRVSPCCPAGLELPTSGDPPASASQTAGITGGIWEELQSLYL

SEQ ID NO: 6988 - protein, 15 aa, Homo sapiens
SYEQYFGPGTRLTVT

SEQ ID NO: 6989 - protein, 98 aa, Homo sapiens
MPGLVDSNPAPPESQEKKPLKPCCACPETKKARDAWFRGRVSVDLSRSLVPGNDGERGERQASTTHSFLQIIIEKGEEHCGHLIEAHKECMRALGFKI

SEQ ID NO: 6990 - protein, 149 aa, Homo sapiens
MDHKEVSTCVAPYEGGVWKVRVDLPDKYPFKSPSIGFMNKIFHPNIDEASGTVCLDVINQTWTALYDLTNIFESFLPQLLAYPNPIDPLNGDAAAMYLHRPEEYKQKIKEYIQKYATEEALKEQEEGTGDSSSESSMSDFSEDEAQDME

SEQ ID NO: 6991 - protein, 144 aa, Homo sapiens
MGQTGKKSEKGPVCWRKRVKSEYMRLRQLKRFRRADEVKSMFSSNRQKILERTEILNQEWKQRRIQPVHILTSVSSLRGTREAIHLLFPLRFSITQFLLGTSLLPRVSVWLCTPTTTIFGLTSLSSSQWSSHTVAYCTSWLIVR

SEQ ID NO: 6992 - protein, 62 aa, Homo sapiens
RRMDTDVVKLIESKHEVTILGGLNEFVVKFYGPQGTPYEGGVWKVRVDLPDKYPFKSPSIEL

SEQ ID NO: 6993 - protein, 57 aa, Homo sapiens
MAAAAAEQQQFYLLLGNLLSPDNVVRKQAEETYENIPGQSKITFLLQAIRNTTAAEE

SEQ ID NO: 6994 - protein, 235 aa, Homo sapiens
MNIRNARPEDLMNMQHCNLLCLPENYQMKYYFYHGLSWPQLSYIAEDENGKIVGYVLAKMEEDPDDVPHGHITSLAVKRSHRRLGLAQKLMDQASRAMIENFNAKYVSLHVRKSNRAALHLYSNTLNFQISEVEPKYYADGEDAYAMKRDLTQMADELRRHLELKEKGRHVVLGAIENKVESKGNSPPSSGEACREEKGLAAEDSGGDSKDLSEVSETTESTDVKDSSEASDSAS

SEQ ID NO: 6995 - protein, 81 aa, Homo sapiens
MTAALAVVTTSGLEDGVPRSRGEGTGEVVLERGPGAAYHMFVVMEDLVEKLKLLRYEEEFLRKSNLKAPSREELQIFLLQN

SEQ ID NO: 6996 - protein, 79 aa, Homo sapiens
MACLGFQRHKAQLNLATRTWPCTLLFFLLFIPVFCKAMHVAQPAVVLASSRGIASFVSKEKKPSYNRGLCENAPNRARM

SEQ ID NO: 6997 - protein, 483 aa, Homo sapiens
MAAPGPLPAAALSPGAPTPRELMHGVAGVTSRAGRDREAGSVLPAGNRGARKASRRSSSRSMSRDNKFSKKDCLSIRNVVASIQTKEGLNLKLISGDVLYIWADVIVNSVPMNLQLGGGPLSRAFLQKAGPMLQKELDDRRRETEEKVGNIFMTSGCNLDCKAVLHAVAPYWNNGAETSWQVATGDIATEQVDVIVNSTARTFNRKSGVSRAILEGAGQAVESECAVLAAQPHRDFIITPGGCLKCKIIIHVPGGKDVRKTVTSVLEECEQRKYTSVSLPAIGTGNLPEHWTDMNHQLFCMVQLEPGQSEYNTIKDKFTRTCSSYAIEKIERIQNAFLWQSYQVKKRQMDIKNDHKNNERLLFHGTDADSVPYVNQHGFNRSCAGKNAVSYGKGTYFAVDASYSAKDTYSKPDSNGRKHMYVVRVLTGVFTKGRAGLVTPPPKNPHNPTDLFDSVTNNTRSPKLFVVFFDNQAYPEYLITFTA

SEQ ID NO: 6998 - protein, 107 aa, Homo sapiens
DMDAYCRKENSSEICSNNGECVCGQCVCRKRDNTNEIYSGKFCECDNFNCDRSNGLICGGNGVCKCRVCECNPNYTGSACDCSLDTSTCEASNGQICNGRGICECGV

SEQ ID NO: 6999 - protein, 90 aa, Homo sapiens
LGTEGPLEEEEDGEELIGDGMERDYRAIPELDAYEAEGLALDDEDVEELTASQREAAERAMRQRDREAGRGLGRMRRGLLYGVSCLPRQR

SEQ ID NO: 7000 - protein, 121 aa, Homo sapiens
MAVTGDDTDEETELAPSHMAAATGDMPTYQIRAPTAALPQGVVMAASPGSLHSPQQLAEEATRKRELRLMKNREAAKECRRRKKEYVKCLESRVAVLEVQNKKLIEELETLKDICSPKTDY

SEQ ID NO: 7001 - protein, 194 aa, Homo sapiens
MPKFKAARGVGGQEKHAPLADQILAGNAVRAGVREKRRGRGTGEAEEEYVGPRLSRRILQQARQQQEELEAEHGTGDKPAAPRERTTRLGPRMPQDGSDDEDEEWPTLEKAATMTAAGHHAEVVVDPEDERAIEMFMNKNPPARYYLSTAVENCPRHLRSSLHSPTGSKSSTSQSRRPGLQLPCTRPPGFLPLT

SEQ ID NO: 7002 - protein, 634 aa, Homo sapiens
MLSSRDQRVVTSEDQVQEGTKVLKLKTKMADKENMKRPAESKNNTVVGKHCIPLKPSNELTNSTVVIDTHKPKDSNQTPHLLLTEDDPQSQHMTLSQAFHLKNNSKKKQMTTEKQKQDANMPKKPVLGSYRGQIVQSKINSFRKPLQVKDESSAATKKLSATIPKATKPQPVNTSSVTVKSNRSSNMTATTKFVSTTSQNTQLVRPPIRSHHSNTRDTVKQGISRTSANVTIRKGPHEKELLQSKTALSSVKTSSSQGIIRNKTLSRSIASEVIARPASLSNDKLMEKSEPVDQRRHTAGKAIVDSRSAQPKETSEERKARLSEWKAGKGRVLKRPPNSVVTQHEPAGQNEKPVGSFWTTMAEEDEQRLFTEKVNNTFSECLNLINEGCPKEDILVTLNDLIKNIPDAKKLVKYWICLALIEPITSPIENIIAIYEKAILAGAQPIEEMRHTIVDILTMKSQEKANLGENMEKSCASKEEVKEVSIEDTGVDVDPEKLEMESKLHRNLLFQDCEKEQDNKTKDPTHDVKTPNTETRTSCLIKYNVSTTPYLQSVKKKVQFDGTNSAFKELKFLTPVRRSRRLQEKTSKLPDMLKDHYPCVSSLEQLTELGRETDAFVCRPNAALCRVYYEADTT

SEQ ID NO: 7003 - protein, 84 aa, Homo sapiens
MAEPDYIEDDNPELIRPQKLINPVKTSRNHQDLHRELLMNQKRGLAPQNKPELQKVMEKRKRDQVIKQKEEEAQKKKSDLEIEL

SEQ ID NO: 7004 - protein, 84 aa, Homo sapiens
MFRKGKKRHSSSSSQSSEISTKSKSVDSSLGGLSRSSTVASLDTDSTKSSGQSNNNSDTCAEFRIKYVGAIEKLKLSEGKGLEG

SEQ ID NO: 7005 - protein, 57 aa, Homo sapiens
MAVARAALGPLVTGLYDVQAFKFGDFVLKSGLSSPIYIDLRGIVSRPRLLSQELSVL

SEQ ID NO: 7006 - protein, 63 aa, Homo sapiens
MDLSALRVEEVQNVINAMQKILECPICLELIKEPVSTKCDHIFCKFCMLKLLNQKKGPSQCPL

SEQ ID NO: 7007 - protein, 174 aa, Homo sapiens
MDWLNVFKDFFSIGKVKRKPSVPDSASPADDSFVDPGERLYDLNMPAYVKFNYMAEREDELSLIKGTKCDYIRPSLTGKFAGNPWYYGKVTRHQAEMALNERGHEGDFLIRDSESSPNDFSVSLKAQGKNKHFKVQLKETVYCIGQRKFSTMEELVEHYKKAPIFTSEQGEKLY

SEQ ID NO: 7008 - protein, 1150 aa, Homo sapiens
MAVPARTCGASRPGPARTARPWPGCGPHPGPGTRRPTSGPPRPLWLLLPLLPLLAAPGASAYSFPQQHTMQHWARRLEQEVDGVMRIFGGVQQLREIYKDNRNLFEVQENEPQKLVEKVAGDIESLLDRKVQALKRLADAAENFQKAHRWQDNIKEEDIVYYDAKADAELDDPESEDVERGSKASTLRLDFIEDPNFKNKVNYSYAAVQIPTDIYKGSTVILNELNWTEALENVFMENRRQDPTLLWQVFGSATGVTRYYPATPWRAPKKIDLYDVRRRPWYIQGASSPKDMVIIVDVSGSVSGLTLKLMKTSVCEMLDTLSDDDYVNVASFNEKAQPVSCFTHLVQANVRNKKVFKEAVQGMVAKGTTGYKAGFEYAFDQLQNSNITRANCNKMIMMFTDGGEDRVQDVFEKYNWPNRTVRVFTFSVGQHNYDVTPLQWMACANKGYYFEIPSIGAIRINTQEYLDVLGRPMVLAGKEAKQVQWTNVYEDALGLGLVVTGTLPVFNLTQDGPGEKKNQLILGVMGIDVALNDIKRLTPNYTLGANGYVFAIDLNGYVLLHPNLKPQTTNFREPVTLDFLDAELEDENKEEIRRSMIDGNKGHKQIRTLVKSLDERYIDEVTRNYTWVPIRSTNYSLGLVLPPYSTFYLQANLSDQILQVKLPISKLKDFEFLLPSSFESEGHVFIAPREYCKDLNASDNNTEFLKNFIELMEKVTPDSKQCNNFLLHNLILDTGITQQLVERVWRDQDLNTYSLLAVFAATDGGITRVFPNKAAEDWTENPEPFNASFYRRSLDNHGYVFKPPHQDALLRPLELENDTVGILVSTAVELSLGRRTLRPAVVGVKLDLEAWAEKFKVLASNRTHQDQPQKCGPNSHCEMDCEVNNEDLLCVLIDDGGFLVLSNQNHQWDQVGRFFSEVDANLMLALYNNSFYTRKESYDYQAACAPQPPGNLGAAPRGVFVPTVADFLNLAWWTSAAAWSLFQQLLYGLIYHSWFQADPAEAEGSPETRESSCVMKQTQYYFGSVNASYNAIIDCGNCSRLFHAQRLTNTNLLFVVAEKPLCSQCEAGRLLQKETHSDGPEQCELVQRPRYRRGPHICFDYNATEDTSDCGRGASFPPSLGVLVSLQLLLLLGLPPRPQPQVLVHASRRL

SEQ ID NO: 7009 - protein, 92 aa, Homo sapiens [sequence omitted]

SEQ ID NO: 7010 - protein, 230 aa, Homo sapiens
MSLQVLNDKNVSNEKNTENCDFLFSPPEVTGRSSVLRVSQKENVPPKNLAKAMKVTFQTPLRDPQTHRILSPSMASKLEAPFTQDDTLGLENSHPVWTQKENQQLIKEVDAKTTHGILQKPVEADTDLLGDASPAFGSGSSSESGPGALADLDCSSSSQSPGSSENQMVSPGKVSGSPEQAVEENLSSYSLDRRVTPASETLEDPCRTESQHKAETPHGAEEECKAETPH

SEQ ID NO: 7011 - protein, 206 aa, Homo sapiens
MVTQTHIAEATGWVPGDRKRARKFIDSDFSESKRSKKGDKNGKGLRHFSMKVCEKVQRKGTTSYNEVADELVSEFTNSNNHLAADSQAYDQKNIRRRVYDALNVLMAMNIISKEKKEIKWIGLPTNSAQECQNLEIEKQRRIERIKQKRAQLQELLLQQIAFKNLVQRNRQNEQQNQGPPALNSTIQLPFIIINTSRKTVIDCSIS

SEQ ID NO: 7012 - protein, 150 aa, Homo sapiens
MEVAPEQPRWMAHPAVLNAQHPDSHHPGLAHNYMEPAQLLPPDEVDVFFNHLDSQGNPYYANPAHARARVSYSPAHARLTGGQMCRPHLLHSPGLPWLDGGKAALSAAAAHHHNPWTVSPFSKTPLHPSAAGGPGGPLSVYPGAGGGSGG

SEQ ID NO: 7013 - protein, 136 aa, Homo sapiens
MKAQTALSFFLILITSLSGSQGIFPLAFFIYVPMNEQIVIGRLDEDIILPSSFERGSEVVIHWKYQDSYKVHSYYKGSDHLESQDPRYANRTSLFYNEIQNGNASLFFRRVSLLDEGIYTCYVGTAIQVITNKVVL

SEQ ID NO: 7014 - protein, 28 aa, Homo sapiens
MFRRPVLQVLRQFVRHESETTTSLVLER

SEQ ID NO: 7015 - protein, 266 aa, Homo sapiens
ELLKIICAFQLDTGLEYANSYNFAKKENNSPEHLKDEVSIIQSMGYRNRAKRLLQSEPENPSLQETSLSVQLSNLGTVRTLRTKQRIQPQKTSVYIELAACEFSETDVTNTEHHQPSNNDLNTTEKRAAERHPEKYQGEAASGCESETSVSEDCSGLSSQSDILTTQQRDTMQHNLIKLQQEMAELEAVLEQHGSQPSNSYPSIISDSSALEDLRNPEQSTSEKAVLTSQKSSEYPISQNPEGLSADKFEVSADSSTSKNKEPGVE

SEQ ID NO: 7016 - protein, 182 aa, Homo sapiens
MRPGGFLGAGQRLSRAMSRCVLEPRPPGKRWMVAGLGNPGLPGTRHSVGMAVLGQLARRLGVAESWTRDRHCAADLALAPLGDAQLVLLRPRRLMNANGRSVARAAELFGLTAEEVYLVHDELDKPLGRLALKLGGSARQCQGCGWVSGARRTLRRFRPMCWAASPLLSRSCCLCCWIEPPT

SEQ ID NO: 7017 - protein, 97 aa, Homo sapiens
MLSSSRDQRVVTSEDQVQEGTKVLKLKTKMADKENMKRPAESKNNTVVGKHCIPLKPSNELTNSTVVIDTHKPKDSNQTPHLLLTEDDPQSQHMTLS

SEQ ID NO: 7018 - protein, 110 aa, Homo sapiens
CGMFAPQTFVMHSHRSPDKRTCHWGFESAKWHCYLHVNQKYLGTPEEKKLKIILEEMKEKFSMRSGKRNQSKTDAPSGMELQSWYPVIKQEGDHVSQTHSFLHPRCINLK

SEQ ID NO: 7019 - protein, 95 aa, Homo sapiens
MDYRRLLMSRVVPGQFDDADSSDSENRDLKTVKEKDDILFEDLQDNVNENGEGEIEDEEEEGYDDDDDDWDWDEGVGKLAKGYVWNGGSNPQLVP

SEQ ID NO: 7020 - protein, 875 aa, Homo sapiens
MDEEEDNLSLLTALLEENESALDCNSEENNFLTRENGEPDAFDELFDADGDGESYTEEADDGETGETRDEKENLATLFGDMEDLTDEEEVPASQSTENRVLPAPAPRREKTNEELQEELRNLQEQMKALQEQLKVTTIKQTASPARLQKSPVEKSPRPPLKERRVQRIQESTCFSAELDVPALPRTKRVARTPKASPPDPKSSSSRMTSAPSQPLQTISRNKPSGITRGQIVGTPGSSGETTQPICVEAFSGLRLRRPRVSSTEMNKKMTGRKLIRLSQIKEKMAREKLEEIDWVTFGVILKKVTPQSVNSGKTFSIWKLNDLRDLTQCVSLFLFGEVHKALWKTEQGTVVGILNANPMKPKDGSEEVCLSIDHPQKVLIMGEALDLGTCKAKKKNGEPCTQTVNLRDCEYCQYHVQAQYKKLSAKRADLQSTFSGGRIPKKFARRGTSLKERLCQDGFYYGGVSSASYAASIAAAVAPKKKIQTTLSNLVVKGTNLIIQETRQKLGIPQKSLSCSEEFKELMDLPTCGARNLKQHLAKATASGIMGSPKPAIKSISASALLKQQKQRMLEMRRRKSEEIQKRFLQSSSEVESPAVPSSSRQPPAQPPRTGSEFPRLEGAPATMTPKLGRGVLEGDDVLFYDESPPPRPKLSALAEAKKLAAITKLRAKGQVLTKTNPNSIKKKQKDPQDILEVKERVEKNTMFSSQAEDELEPARKKRREQLAYLESEEFQKILKAKSKHTGILKEAEAEMQERYFEPLVKKEQMEEKMRNIREVKCRVVTCKTCAYTHFKLLETCVSEQHEYHWHDGVKRFFKCPCGNRSISLDRLPNKHCSNCGLYKWERDGMLKEKTGPKIGGETLLPRGEEHAKFLNSLK

SEQ ID NO: 7021 - protein, 44 aa, Homo sapiens
MTKNEKKSLNQSLAEWKLFIYNPTTGEFLGRTAKSWGSQYVVGK

SEQ ID NO: 7022 - protein, 40 aa, Homo sapiens
MAASSRAQVLSLYRAMLRESKRFSAYNYRSTLANCIQLTS

SEQ ID NO: 7023 - protein, 138 aa, Homo sapiens
MTNSGAPPPGATIVQYAAQSADGTQQFFVPGSQVVVQAATGDMPTYQIRAPTAALPQGVVMAASPGSLHSPQQLAEEATRKRELRLMKNREAAKECRRRKKEYVKCLESRVAVLEVQNKKLIEELETLKDICSPKTDY

SEQ ID NO: 7024 - protein, 334 aa, Homo sapiens
MESYHKPDQQKLQALKDTANRLRISSIQATTAAGSGHPTSCCSAAEIMAVLFFHTMRYKSQDPRNPHNDRFVLSKGHAAPILYAVWAEAGFLAEAELLNLRKISSDLDGHPVPKQAFTDVATGSLGQGLGAACGMAYTGKYFDKASYRVYCLLGDGELSEGSVWEAMAFASIYKLDNLVAILDINRLGQSDPAPLQHQMDIYQKRCEAFGWHAIIVDGHSVEELCKAFGQAKHQPTAIIAKTFKGRGITGVEDKESWHGKPLPKNMAEQIIQEIYSQIQSKKKILATPPQEDAPSVDIANIRMPSLPSYKVGDKVQNSHPQGLRAGTGQAGPCQ

SEQ ID NO: 7025 - protein, 124 aa, Homo sapiens
MGLPEERVRSGSGSRGQEEAGAGGRARSWSPPPEVSRSAHVPSLQRYRELHRRSVEEPREFWGDIAKEFYWKTPCPGPFLRYNFDVTKGKIFIEWMKGATTNICYNVLDRNVHEKKLGDKVAFY

SEQ ID NO: 7026 - protein, 51 aa, Homo sapiens
MAEPDYIEDDNPELIRPQKLINPVKTSRNHQDLHRELLMNQKRILVWLEIH

SEQ ID NO: 7027 - protein, 68 aa, Homo sapiens
MNSAAGFSHLDRRERVLKLGESFEKQPRCAFHTVRYDFKPASIDTSSEGYLEVGEGEQVTITLPNIES

SEQ ID NO: 7028 - protein, 124 aa, Homo sapiens
MAEPDYIEDDNPELIRPQKLINPVKTSRNHQDLHRELLMNQKRGLAPQNKPELQKVMEKRKRDQVIKQKEEEAQKKKSDLEIELLKRQQKLEQLELEKQKLQEEQENAPEFVKVKGNLRRTGQE

SEQ ID NO: 7029 - protein, 93 aa, Homo sapiens
MKRPAESKNNTVVGKHCIPLKPSNELTNSTVVIDTHKPKDSNQTPHLLLTEDDPQSQHMTLSQAFHLKNNSKKKQMTTEKQKQDANMPKKPVL

SEQ ID NO: 7030 - protein, 50 aa, Homo sapiens
MPRKGTQPSTARRREEGPPPPSPDGASSDAEPEPPSGRTESPATAAETAR

SEQ ID NO: 7031 - protein, 97 aa, Homo sapiens
MNVHRGSDSDRLLRQEASCLVDDTLAVAQEKEANSLASSGPHNLTYPLGPRNEDLSLDYASQPANLQFPHIMPLAEDIKGSCFQSGNKRNHEPFIAP

SEQ ID NO: 7032 - protein, 129 aa, Homo sapiens
MGVGRQQRGPFQGVRVKNSVKELLLHIRSHKQKASGQAVDDFKTQGVNIEQFRELKNTVSYSGKRKGPDSLSDGPACKRPALLHSQFLTPPQTPTPGESMEDVHLNEPKQESSADLLQNIINIKNECSP

SEQ ID NO: 7033 - protein, 110 aa, Homo sapiens
MIVDKLLDDSRGGEGLRDAAGGCGLMTSPLNLSYFYGASPPAAAPGACDASCSVLGPSAPGSPGSDSSDFSSASSVSSCGAVESRSRGGARAERQPVEPHMGVGRQQRGP

SEQ ID NO: 7034 - protein, 2409 aa, Homo sapiens
MQEHSTRRRSLSLCPDWESWDPQKPVDNAREAMQQADDWLGVPQVITPEEIIHPDVDEHSVMTYLSQFPKAKLKPGAPLKPKLNPKKARAYGRGIEPTGNMVKQPAKFTVDTISAGQGDVMVFVEDPEGNKEEAQVTPDSDKNKTYSVEYLPKVTGLHKVTVLFAGQHISKSPFEVSVDKAQGDASKVTAKGPGLEAVGNIANKPTYFDIYTAGAGVGDIGVEVEDPQGKNTVELLVEDKGNQVYRCVYKPMQPGPHVVKIFFAGDTIPKSPFVVQVGEACNPNACRASGRGLQPKGVRIRETTDFKVDTKAAGSGELGVTMKGPKGLEELVKQKDFLDGVYAFEYYPSTPGRYSIAITWGGHHIPKSPFEVQVGPEAGMQKVRAWGPGLHGGIVGRSADFVVESIGSEVGSLGFAIEGPSQAKIEYNDQNDGSCDVKYWPKEPGEYAVHIMCDDEDIKDSPYMAFIHPATGGYNPDLVRAYGPGLEKSGCIVNNLAEFTVDPKDAGKAPLKIFAQDGEGQRIDIQMKNRMDGTYACSYTPVKAIKHTIAVVWGGVNIPHSPYRVNIGQGSHPQKVKVFGPGVERSGLKANEPTHFTVDCTEAGEGDVSVGIKCDARVLSEDEEDVDFDIIHNANDTFTVKYVPPAAGRYTIKVLFASQEIPASPFRVKVDPSHDASKVKAEGPGLSKAGVENGKPTHFTVYTKGAGKAPLNVQFNSPLPGDAVKDLDIIDNYDYSHTVKYTPTQQGNMQVLVTYGGDPIPKSPFTVGVAAPLDLSKIKLNGLENRVEVGKDQEFTVDTRGAGGQGKLDVTILSPSRKVVPCLVTPVTGRENSTAKFIPREEGLYAVDVTYDGHPVPGSPYTVEASLPPDPSKVKAHGPGLEGGLVGKPAEFTIDTKGAGTGGLGLTVEGPCEAKIECSDNGDGTCSVSYLPTKPGEYFVNILFEEVHIPGSPFKADIEMPFDPSKVVASGPGLEHGKVGEAGLLSVDCSEAGPGALGLEAVSDSGTKAEVSIQNNKDGTYAVTYVPLTAGMYTLTMKYGGELVPHFPARVKVEPAVDTSRIKVFGPGIEGKDVFREATTDFTVDSRPLTQVGGDHIKAHIANPSGASTECFVTDNADGTYQVEYTPFEKGLHVVEVTYDDVPIPNSPFKVAVTEGCQPSRVQAQGPGLKEAFTNKPNVFTVVTRGAGIGGLGITVEGPSESKINCRDNKDGSCSAEYIPFAPGDYDVNITYGGAHIPGSPFRVPVKDVVDPSKVKIAGPGLGSGVRARVLQSFTVDSSKAGLAPLEVRVLGPRGLVEPVNVVDNGDGTHTVTYTPSQEGPYMVSVKYADEEIPRSPFKVKVLPTYDASKVTASGPGLSSYGVPASLPVDFAIDARDAGEGLLAVQITDQEGKPKRAIVHDNKDGTYAVTYIPDKTGRYMIGVTYGGDDIPLSPYRIRATQTGDASKCLATGPGIASTVKTGEEVGFVVDAKTAGKGKVTCTVLTPDGTEAEADVIENEDGTYDIFYTAAKPGTYVIYVRFGGVDIPNSPFTVMVTEEAYVPVSDMNGLGFKPFDLVIPFAVRKGEITGEVHMPSGKTATPEIVDNKDGTVTVRYAPTEVGLHEMHIKYMGSHIPESPLQFYVNYPNSGSVSAYGPGLVYGVANKTATFTIVTEDAGEGGLDLAIEGPSKAEISCIDNKDGTCTVTYLPTLPGDYSILVKYNDKHIPGSPFTAKITDDSRRCSQVKLGSAADFLLDISETDLSSLTASIKAPSGRDEPCLLKRLPNNHIGISFIPREVGEHLVSIKKNGNHVANSPVSIMVVQSEIGDARRAKVYGRGLSEGRTFEMSDFIVDTRDAGYGGISLAVEGPSKVDIQTEDLEDGTCKVSYFPTVPGVYIVSTKFADEHVPGSPFTVKISGEGRVKESITRTSRAPSVATVGSICDLNLKIPEINSSDMSAHVTSPSGRVTEAEIVPMGKNSHCVRFVPQEMGVHTVSVKYRGQHVTGSPFQFTVGPLGEGGAHKVRAGGPGLERGEAGVPAEFSIWTREAGAGGLSIAVEGPSKAEITFDDHKNGSCGVSYIAQEPGNYEVSIKFNDEHIPESPYLVPVIAPSDDARRLTVMSLQESGLKVNQPASFAIRLNGAKGKIDAKVHSPSGAVEECHVSELEPDKYAVRFIPHENGVHTIDVKFNGSHVVGSPFKVRVGEPGQAGNPALVSAYGTGLEGGTTGIQSEFFINTTRAGPGTLSVTIEGPSKVKMDCQETPEGYKVMYTPMAPGNYLISVKYGGPNHIVGSPFKAKVTGQRLVSPGSANETSSILVESVTRSSTETCYSAIPKASSDASKVTSKGAGLSKAFVGQKSSFLVDCSKAGSNMLLIGVHGPTTPCEEVSMKHVGNQQYNVTYVVKERGDYVLAVKWGEEHIPGSPFHVTVP

SEQ ID NO: 7035 - protein, 86 aa, Homo sapiens
MFRKGKKRHSSSSSQSSEISTKSKSVDSSLGGLSRSSTVASLDTDSTKSSGQSNNNSDTCAEFRIKYVGAIEKLKLSEGKGLEGPL

SEQ ID NO: 7036 - protein, 266 aa, Homo sapiens
MPIRALCTICSDFFDHSRDVAAIHCGHTFHLQCLIQWFETAPSRTCPQCRIQEEENVLDAEFLKNELDNVRAQLSQKDKEKRDSQVIIDTLRDTLEERNATVVSLQQALGKAEMLCSTLKKQMKYLEQQQDETKQAQEEARRLRSKMKTMEQIELLLQSQRPEVEEMIRDMGVGQSAVEQLAVYCVSLKKEYENLKEARKASGEVADKLRKDLFSSRSKLQTVYSELDQAKLELKSAQKDLQSADKEIMSLKKKLTMLQETLNLPP

SEQ ID NO: 7037 - protein, 150 aa, Homo sapiens
MERLVIRMPFSHLSTYSLVWVMAAVVLCTAQVQVVTQDEREQLYTPASLKCSLQNAQEALIVTWQKKKAVSPENMVTFSENHGVVIQPAYKDKINITQLGLQNSTITFWNITLEDEGCYMCLFNTFGFGKISGTACLTVYAHSIPSLQIL

SEQ ID NO: 7038 - protein, 76 aa, Homo sapiens
MVVMNSLRVILQASPGKLLWRKFQIPRFMPARPCSLYTCTYKTRNRALHPLWESVDLVPGGDRQSPINIRWRDSVY

SEQ ID NO: 7039 - protein, 569 aa, Homo sapiens
MSEASGNLNSLRMANVALREELNALRGENANLGLQLGRALAEVNSLRGNVSSYIRWPVPIVPVLAEENLEFALSEIEVIPGGELPFLCRPPPRAEPDCISDDLLINVIQDRSTPDGPADPPLLPIPPPPALPPPASKEPPPQPPLAPLERPEIEPFSGDPVYLAEFLMQLETFIADHEVHFPGGAERVAFLISFFTGEAKDWAISVTQEGSPLHANFPRFLDEIRKEFCGPIPPRVAKKAIRKLKQGHCTLGSYADAFQFLAQFLSWDDCRLQNQFLKGLSEFFRKELLWSTEMADLDELILECVEIERKVRVPKPIPLPGVRNIIFPFAPSPNEEESEDEEYYSEDEDQEARRHRLHSKDQRKRMRAFQQEMKEKEEEEMKKEEEMKKKEEKEEEEEEEMKQKEEEEEIRNKNEEEGESKDEEDEDEDGGQKPEGEPQQDPGTEETYGEVEEEPLDEAQDDDLDELMEMEPTFVHASSQTSGPTSGYHAENFLGASPPIIQPSRRRNQNRVPLLEGLPGTNSPFYSSPQLIRRTGRLGQRQVRRRPPVLFRLTPRQGGHRAARGRIRV

SEQ ID NO: 7040 - protein, 686 aa, Homo sapiens
MAISQHQFYLDRKQSKAKIPSARSLDEIAMDLTETGTQRASKLVTLETKSQFIMASNGSLISSGSQDSEVSEEQKREKILELKKKEKLLQEKLLKKVEELKKICLREAELTGKMPKEYPLNIGEKPPQVRRRVGTAFKLDDNLLPSEEDPALQELESNFLIQQKLVEAAKKLANEPDLCKTVKKKRKQDYTDAMKKLQEIENAINEYRIRCGKKPSQKATVLPEDIIPSESSSLSDTTTYDDPSDAFTFPGQRSSSVPHSPRILPPKSLGIERIHFRKSSINEQFVDTRQSREMLSTHSSPYKTLERRPQGGRSMPTTPVLTRNAYSSSHLEPESSSQHCRQRSGSLESQSHLLSEMDSDKPFFSLSKSQRSSSTEILDDGSSYTSQSSTEYYCVTPVTGPYYTTQTLDTRTRGRRRSKKQNVSTSNSGSMPNLAQKDSLRNGVYSKSQEPPSSSYYIAGYTPYAECDFYYSGGYVYENDTEGQYSVNPSYRSSAHYGYERQRDYSRSFHEDEVDRVPHNPYATLRLPRKAAAKSEHITKNIHKALVAEHLRGWYQRASGQKDQGHSPQTSFDSDRGSQRCLGFAGLQVPCSPSSRASSYSSVSSTNASGNWRTQLTIGLSDYETPAHSSYTSCYGNVYNPLPSPSRQYTEISQLDGTDGNQLEDNLESSEQRLFWHEDSKPGTLV

SEQ ID NO: 7041 - protein, 201 aa, Homo sapiens
MTSKGPEEEHPSVTLFRQYLRIRTVQPKPDYGAAVAFFEETARQLGLGCQKVEVAPGYVVTVLTWPGTNPTLSSILLNSHTDVVPVFKEHWSHDPFEAFKDSEGYIYARGAQDMKCVSIQYLEAVRRLKVEGHRFPRTIHMTFVPDEEVGGHQGMELFVQRPEFHALRAGFALDEGIANPTDAFTVFYSERSPWCCSQTPT

SEQ ID NO: 7042 - protein, 63 aa, Homo sapiens
MSLQVLNDKNVSNEKNTENCDFLFSPPEVTGRSSVLRVSQKENVPPKNLAKAMKVLSSSLRNR

SEQ ID NO: 7043 - protein, 1816 aa, Homo sapiens
MLKLLNQKKGPSQCPLCKNDITKRSLQESTRFSQLVEELLKIICAFQLDTGLEYANSYNFAKKENNSPEHLKDEVSIIQSMGYRNRAKRLLQSEPENPSLQETSLSVQLSNLGTVRTLRTKQRIQPQKTSVYIELGSDSSEDTVNKATYCSVGDQELLQITPQGTRDEISLDSAKKAACEFSETDVTNTEHHQPSNNDLNTTEKRAAERHPEKYQGSSVSNLHVEPCGTNTHASSLQHENSSLLLTKDRMNVEKAEFCNKSKQPGLARSQHNRWAGSKETCNDRRTPSTEKKVDLNADPLCERKEWNKQKLPCSENPRDTEDVPWITLNSSIQKVNEWFSRSDELLGSDDSHDGESESNAKVADVLDVLNEVDEYSGSSEKIDLLASDPHEALICKSERVHSKSVESNIEDKIFGKTYRKKASLPNLSHVTENLIIGAFVTEPQIIQERPLTNKLKRKRRPTSGLHPEDFIKKADLAVQKTPEMINQGTNQTEQNGQVMNITNSGHENKTKGDSIQNEKNPNPIESLEKESAFKTKAEPISSSISNMELELNIHNSKAPKKNRLRRKSSTRHIHALELVVSRNLSPPNCTELQIDSCSSSEEIKKKKYNQMPVRHSRNLQLMEGKEPATGAKKSNKPNEQTSKRHDSDTFPELKLTNAPGSFTKCSNTSELKEFVNPSLPREEKEEKLETVKVSNNAEDPKDLMLSGERVLQTERSVESSSISLVPGTDYGTQESISLLEVSTLGKAKTEPNKCVSQCAAFENPKGLIHGCSKDNRNDTEGFKYPLGHEVNHSRETSIEMEESELDAQYLQNTFKVSKRQSFAPFSNPGNAEEECATFSAHSGSLKKQSPKVTFECEQKEENQGKNESNIKPVQTVNITAGFPVVGQKDKPVDNAKCSIKGGSRFCLSSQFRGNETGLITPNKHGLLQNPYRIPPLFPIKSFVKTKCKKNLLEENFEEHSMSPEREMGNENIPSTVSTISRNNIRENVFKEASSSNINEVGSSTNEVGSSINEIGSSDENIQAELGRNRGPKLNAMLRLGVLQPEVYKQSLPGSNCKHPEIKKQEYEEVVQTVNTDFSPYLISDNLEQPMGSSHASQVCSETPDDLLDDGEIKEDTSFAENDIKESSAVFSKSVQKGELSRSPSPFTHTHLAQGYRRGAKKLESSEENLSSEDEELPCFQHLLFGKVNNIPSQSTRHSTVATECLSKNTEENLLSLKNSLNDCSNQVILAKASQEHHLSEETKCSASLFSSQCSELEDLTANTNTQDPFLIGSSKQMRHQSESQGVGLSDKELVSDDEERGTGLEENNQEEQSMDSNLGEAASGCESETSVSEDCSGLSSQSDILTTQQRDTMQHNLIKLQQEMAELEAVLEQHGSQPSNSYPSIISDSSALEDLRNPEQSTSEKAVLTSQKSSEYPISQNPEGLSADKFEVSADSSTSKNKEPGVERSSPSKCPSLDDRWYMHSCSGSLQNRNYPSQEELIKVVDVEEQQLEESGPHDLTETSYLPRQDLEGTPYLESGISLFSDDPESDPSEDRAPESARVGNIPSSTSALKVPQLKVAESAQSPAAAHTTDTAGYNAMEESVSREKPELTASTERVNKRMSMVVSGLTPEEFMLVYKFARKHHITLTNLITEETTHVVMKTDAEFVCERTLKYFLGIAGGKWVVSYFWVTQSIKERKMLNEHDFEVRGDVVNGRNHQGPKRARESQDRKIFRGLEICCYGPFTNMPTDQLEWMVQLCGASVVKELSSFTLGTGVHPIVVVQPDAWTEDNGFHAIGQMCEAPVVTREWVLDSVALYQCQELDTYLIPQIPHSHY

SEQ ID NO: 7044 - protein, 194 aa, Homo sapiens
WRQLFDVVIVQADKPSFFTDRRKPFRKLDEKGSLQWDRITRLEKGKIYRQGNLFDFLRLTEWRGPRVLYFGDHLYSDLADLMLRHGWRTGAIIPELEREIRIINTEQYMHSLTWQQALTGLLERMQTYQDAESRQVLAAWMKERQELSCLLNYRVDFTFYPRRTPLQHEAPLWMDQLCTGCMKTPFLGDMAHIR

SEQ ID NO: 7045 - protein, 182 aa, Homo sapiens
MGLPEERVRSGSGSRGQEEAGAGGRARSWSPPPEVSRSAHVPSLQRYRELHRRSVEEPREFWGDIAKEFYWKTPCPGPFLRYNFDVTKGKIFIEWMKGATTNICYNVLDRNVHEKKLGDKVAFYCGDVVLPCWPGWSQLPDLREGNEPGETTQITYHQLLVQVCQFSNVLRKQGIQKGDRVA

SEQ ID NO: 7046 - protein, 572 aa, Homo sapiens
MLKLLNQKKGPSQCPLCKNDITKRSLQESTRFSQLVEELLKIICAFQLDTGLEYANSYNFAKKENNSPEHLKDEVSIIQSMGYRNRAKRLLQSEPENPSLQETSLSVQLSNLGTVRTLRTKQRIQPQKTSVYIELGSDSSEDTVNKATYCSVGDQELLQITPQGTRDEISLDSAKKAACEFSETDVTNTEHHQPSNNDLNTTEKRAAERHPEKYQGEAASGCESETSVSEDCSGLSSQSDILTTQQRDTMQHNLIKLQQEMAELEAVLEQHGSQPSNSYPSIISDSSALEDLRNPEQSTSEKAVLTSQKSSEYPISQNPEGLSADKFEVSADSSTSKNKEPGVERSSPSKCPSLDDRWYMHSCSGSLQNRNYPSQEELIKVVDVEEQQLEESGPHDLTETSYLPRQDLEGTPYLESGISLFSDDPESDPSEDRAPESARVGNIPSSTSALKVPQLKVAESAQSPAAAHTTDTAGYNAMEESVSREKPELTASTERVNKRMSMVVSGLTPEEFMLVYKFARKHHITLTNLITEETTHVVMKTDAEFVCERTLKYFLGIAGGKWVVSYFWVTQS

SEQ ID NO: 7047 - protein, 173 aa, Homo sapiens
MPRKGTQPSTARRREEGPPPPSPDGASSDAEPEPPSGRTESPATAAETASEELDNRSLEEILNSIPPPPPPAMTNEAGAPRLMITHIVNQNFKSYAGEKILGPFHKRFSCIIGPNGSGKSNVIDSMLFVFGYRAQKIRSKKLSVLIHNSDEHKDIQSCTVEVHFQKIIDKEGD

SEQ ID NO: 7048 - protein, 25 aa, Homo sapiens
MQQETVPVPVPSEKTKQPKECFLIQ

SEQ ID NO: 7049 - protein, 574 aa, Homo sapiens
PSSANSISSSTSSNHSGHTPEPPLPPVGGDLASRLSSDEGEMDGADESEKLDCQFSTHHPRPLAFCSFGSRLMGRGYYVFDRRWDRFRFALNSMVEKHLNSQMWKHRNPSHRASGPSPLFRTCLTNLLSLSNIGAAWVSTLESVAPRYPLNLAAQTPGPGGPEPGGMAADGGVEDIRKKRNGQDSFFFNKHLTLHQEPPTQYSLSARKIPPAADSPLPSPAAHITTPVPASVLQPFSNPSAVYLPSAPISSRLTSSYIMTSAMLSNAAFVTSPDPSALMSHTTAFPHVAATLSIMDSTFKAPSAVSPIPAVIPSPSHKPSKTKTSKSSKVKDLSTRSDESPSNKKRKPQSSTSSSSSSSSSSLQTSLSSPLSGPHKKNCVLNASSALNSYQAAPPYNSLSVHNSNNGVSPLSAKLEPSGRTSLPGGPADIVRQVGAVGGSSDSCPLSVPSLALHAGDLSLASHNAVSSLPLSFDKSEGKKRKNSSSSSKACKITKMPGMNSVHKKNPPSLLAPVPDPVNSTSSRQVRDLLAPPSPALGGRGSWAAPLLSRAAPTGNTSLIPVLVFPEGSFHPLL

SEQ ID NO: 7050 - protein, 64 aa, Homo sapiens
MAPQKDRKPKRSTWRFNLDLTHPVEDGIFDSGNFGTFPSEYLGFSSLVLHFFCFKIGAISTGEG

SEQ ID NO: 7051 - protein, 103 aa, Homo sapiens
MASSPAQRRRGNDPLTSSPGRSSRRTDALTSSPGRDLPPFEDESEGLLGTEGPLEEEEDGEELIGDGMERDYRAIPELDAYEAEGLALDDEDVEELTASQREA

SEQ ID NO: 7052 - protein, 42 aa, Homo sapiens
KNEKKSLNQSLAEWKLFIYNPTTGEFLGRTAKSWGSQYVVGK

SEQ ID NO: 7053 - protein, 1884 aa, Homo sapiens
MDLSALRVEEVQNVINAMQKILECPICLELIKEPVSTKCDHIFCKFCMLKLLNQKKGPSQCPLCKNDITKRSLQESTRFSQLVEELLKIICAFQLDTGLEYANSYNFAKKENNSPEHLKDEVSIIQSMGYRNRAKRLLQSEPENPSLQETSLSVQLSNLGTVRTLRTKQRIQPQKTSVYIELGSDSSEDTVNKATYCSVGDQELLQITPQGTRDEISLDSAKKAACEFSETDVTNTEHHQPSNNDLNTTEKRAAERHPEKYQGSSVSNLHVEPCGTNTHASSLQHENSSLLLTKDRMNVEKAEFCNKSKQPGLARSQHNRWAGSKETCNDRRTPSTEKKVDLNADPLCERKEWNKQKLPCSENPRDTEDVPWITLNSSIQKVNEWFSRSDELLGSDDSHDGESESNAKVADVLDVLNEVDEYSGSSEKIDLLASDPHEALICKSERVHSKSVESNIEDKIFGKTYRKKASLPNLSHVTENLIIGAFVTEPQIIQERPLTNKLKRKRRPTSGLHPEDFIKKADLAVQKTPEMINQGTNQTEQNGQVMNITNSGHENKTKGDSIQNEKNPNPIESLEKESAFKTKAEPISSSISNMELELNIHNSKAPKKNRLRRKSSTRHIHALELVVSRNLSPPNCTELQIDSCSSSEEIKKKKYNQMPVRHSRNLQLMEGKEPATGAKKSNKPNEQTSKRHDSDTFPELKLTNAPGSFTKCSNTSELKEFVNPSLPREEKEEKLETVKVSNNAEDPKDLMLSGERVLQTERSVESSSISLVPGTDYGTQESISLLEVSTLGKAKTEPNKCVSQCAAFENPKGLIHGCSKDNRNDTEGFKYPLGHEVNHSRETSIEMEESELDAQYLQNTFKVSKRQSFAPFSNPGNAEEECATFSAHSGSLKKQSPKVTFECEQKEENQGKNESNIKPVQTVNITAGFPVVGQKDKPVDNAKCSIKGGSRFCLSSQFRGNETGLITPNKHGLLQNPYRIPPLFPIKSFVKTKCKKNLLEENFEEHSMSPEREMGNENIPSTVSTISRNNIRENVFKEASSSNINEVGSSTNEVGSSINEIGSSDENIQAELGRNRGPKLNAMLRLGVLQPEVYKQSLPGSNCKHPEIKKQEYEEVVQTVNTDFSPYLISDNLEQPMGSSHASQVCSETPDDLLDDGEIKEDTSFAENDIKESSAVFSKSVQKGELSRSPSPFTHTHLAQGYRRGAKKLESSEENLSSEDEELPCFQHLLFGKVNNIPSQSTRHSTVATECLSKNTEENLLSLKNSLNDCSNQVILAKASQEHHLSEETKCSASLFSSQCSELEDLTANTNTQDPFLIGSSKQMRHQSESQGVGLSDKELVSDDEERGTGLEENNQEEQSMDSNLGEAASGCESETSVSEDCSGLSSQSDILTTQQRDTMQHNLIKLQQEMAELEAVLEQHGSQPSNSYPSIISDSSALEDLRNPEQSTSEKDSHIHGQRNNSMFSKRPREHISVLTSQKSSEYPISQNPEGLSADKFEVSADSSTSKNKEPGVERSSPSKCPSLDDRWYMHSCSGSLQNRNYPSQEELIKVVDVEEQQLEESGPHDLTETSYLPRQDLEGTPYLESGISLFSDDPESDPSEDRAPESARVGNIPSSTSALKVPQLKVAESAQSPAAAHTTDTAGYNAMEESVSREKPELTASTERVNKRMSMVVSGLTPEEFMLVYKFARKHHITLTNLITEETTHVVMKTDAEFVCERTLKYFLGIAGGKWVVSYFWVTQSIKERKMLNEHDFEVRGDVVNGRNHQGPKRARESQDRKIFRGLEICCYGPFTNMPTDQLEWMVQLCGASVVKELSSFTLGTGVHPIVVVQPDAWTEDNGFHAIGQMCEAPVVTREWVLDSVALYQCQELDTYLIPQIPHSHY

SEQ ID NO: 7054 - protein, 369 aa, Homo sapiens
MDSCLMVWHMKPQSRAYRFTGHKDAVTCVNFSPSGHLLASGSRDKTVRIWVPNVKGESTVFRAHTATVRSVHFCSDGQSFVTASDDKTVKVWATHRQKFLFSLSQHINWVRCAKFSPDGRLIVSASDDKTVKLWDKSSRECVHSYCEHGGFVTYVDFHPSGTCIAAAGMDNTVKVWDVRTHRLLQHYQLHSAAVNGLSFHPSGNYLITASSDSTLKILDLMEGRLLYTLHGHQGPATTVAFSRTGEYFASGGSDEQVMVWKSNFDIVDHGEVTKVPRPPATLASSMGNLPEVDFPVPPGRGRSVESVQSQPQEPVSVPQTLTSTLEHIVGQLDVLTQTVSILEQRLTLTEDKLKQCLENQQLIMQRATP

SEQ ID NO: 7055 - protein, 177 aa, Homo sapiens
MNVEKAEFCNKSKQPGLARSQHNRWAGSKETCNDRRTPSTEKKVDLNADPLCERKEWNKQKLPCSENPRDTEDVPWITLNSSIQKVNEWFSRSDELLGSDDSHDGESESNAKVADVLDVLNEVDEYSGSSEKIDLLASDPHEALICKSERVHSKSVESNIEDKIFGKTYRKKASLPN

SEQ ID NO: 7056 - protein, 96 aa, Homo sapiens
MPTYQIRAPTAALPQGVVMAASPGSLHSPQQLAEEATRKRELRLMKNREAAKECRRRKKEYVKCLESRVAVLEVQNKKLIEELETLKDICSPKTDY

SEQ ID NO: 7057 - protein, 121 aa, Homo sapiens
MAPKDRKPKRSTWRFNLDLTHPVEDGIFDSGNFEQFLREKVKVNGKTGNLGNVVHIERFKNKITVVSEKQFSKRYLKYLTKKYLKKNNLRDWLRVVASDKETYELRYFQISQDEDESESED

SEQ ID NO: 7058 - protein, 67 aa, Homo sapiens
MAEPDYIEDDNPELIRPQKLINPVKTSRNHQDLHRELLMNQKRGLAPQNKPELQKVMEKRKRDQVIK

SEQ ID NO: 7059 - protein, 37 aa, Homo sapiens
MAATSLMSALAARLLQPAHSCSLRLRPFHLAAVRNQQ

SEQ ID NO: 7060 - protein, 152 aa, Homo sapiens
MSSPSPGKRRMDTDVVKLIESKHEVTILGGLNEFVVKFYGPQGTPYEGGVWKVRVDLPDKYPFKSPSIDLTNIFESFLPQLLAYPNPIDPLNGDAAAMYLHRPEEYKQKIKEYIQKYATEEALKEQEEGTGDSSSESSMSDFSEDEAQDMEL

SEQ ID NO: 7061 - protein, 473 aa, Homo sapiens
MDLSALRVEEVQNVINAMQKILECPICLELIKEPVSTKCDHIFCKFCMLKLLNQKKGPSQCPLCKNDITKRSLQESTRFSQLVEELLKIICAFQLDTGLEYANSYNFAKKENNSPEHLKDEVSIIQSMGYRNRAKRLLQSEPENPSLQETSLSVQLSNLGTVRTLRTKQRIQPQKTSVYIELGSDSSEDTVNKATYCSVGDQELLQITPQGTRDEISLDSAKKAACEFSETDVTNTEHHQPSNNDLNTTEKRAAERHPEKYQGSSVSNLHVEPCGTNTHASSLQHENSSLLLTKDRMNVEKAEFCNKSKQPGLARSQHNRWAGSKETCNDRRTPSTEKKVDLNADPLCERKEWNKQKLPCSENPRDTEDVPWITLNSSIQKVNEWFSRSDELLGSDDSHDGESESNAKVADVLDVLNEVDEYSGSSEKIDLLASDPHEALICKSERVHSKSVESNIEDKIFGKTYRKKASLPN

SEQ ID NO: 7062 - protein, 741 aa, Homo sapiens
MLERKKPKTAENQKASEENEITQPGGSSAKPGLPCLNFEAVLSPDPALIHSTHSLTNSHAHTGSSDCDISCKGMTERIHSINLHNFSNSVLETLNEQRNRGHFCDVTVRIHGSMLRAHRCVLAAGSPFFQDKLLLGYSDIEIPSVVSVQSVQKLIDFMYSGVLRVSQSEALQILTAASILQIKTVIDECTRIVSQNVGDVFPGIQDSGQDTPRGTPESGTSGQSSDTESGYLQSHPQHSVDRIYSALYACSMQNGSGERSFYSGAVVSHHETALGLPRDHHMEDPSWITRIHERSQQMERYLSTTPETTHCRKQPRPVRIQTLVGNIHIKQEMEDDYDYYGQQRVQILERNESEECTEDTDQAEGTESEPKGESFDSGVSSSIGTEPDSVEQQFGPGAARDSQAEPTQPEQAAEAPAEGGPQTNQLETGASSPERSNEVEMDSTVITVSNSSDKSVLQQPSVNTSIGQPLPSTQLYLRQTETLTSNLRMPLTLTSNTQVIGTAGNTYLPALFTTQPAGSGPKPFLFSLPQPLAGQQTQFVTVSQPGLSTFTAQLPAPQPLASSAGHSTASGQGEKKPYECTLCNKTFTAKQNYVKHMFVHTGEKPHQCSICWRSFSLKDYLIKHMVTHTGVRAYQCSICNKRFTQKSSLNVHMRLHRGEKSYECYICKKKFSHKTLLERHVALHSASNGTPPAGTPPGARAGPPGVVACTEGTTYVCSVCPAKFDQIEQFNDHMRMHVSDG

SEQ ID NO: 7063 - protein, 92 aa, Homo sapiens
MTSFRLALIQLQISSIKSDNVTRACSFIREAATQGAKIVSLPECFNSPYGAKYFPEYAEKIPGESTQKLSEVAKECSIYLIGGNFLPTRLYP

SEQ ID NO: 7064 - protein, 147 aa, Homo sapiens
MGLPEERVRSGSGSRGQEEAGAGGRARSWSPPPEVSRSAHVPSLQRYRELHRRSVEEPREFYWKTPCPGPFLRYNFDVTKGKIFIEWMKGATTNICYNVLDRNVHEKKLGDKVAFYWEGNEPGETTQITYHQLLVQVCQFSNVLRKQ

SEQ ID NO: 7065 - protein, 289 aa, Homo sapiens
MFYFLPQQKTKAAAPGVEDEPLLRENPRRFVIFPIEYHDIWQMYKKAEASFWTAEEVDLSKDIQHWESLKPEERYFISHVLAFFAASDGIVNENLVERFSQEVQITEARCFYGFQIAMENIHSEMYSLLIDTYIKDPKEREFLFNAIETMPCVKKKADWALRWIGDKEATYGERVVAFAAVEGIFFSGSFASIFWLKKRGLMPGLTFSNELISRDEGLHCDFACLMFKHLVHKPSEERVREIIINAVRIEQEFLTEALPVKLIGMNCTLMKQYIEFVADRLMLELGFSK

SEQ ID NO: 7066 - protein, 121 aa, Homo sapiens
MKVELCSFSGYKIYPGHGRRYARTDGKVFQFLNAKCESAFLSKRNPRQINWTVLYRRKHKKGQSEEIQKKRTRRAVKFQRAITGASLADIMAKRNQKPEVRKAQREQAIRHLQRQHLSKRL

SEQ ID NO: 7067 - protein, 193 aa, Homo sapiens
MSLQVLNDKNVSNEKNTENCDFLFSPPEVTGRSSVLRVSQKENVPPKNLAKAMKVTFQTPLRDPQTHRILSPSMASKLEAPFTQDDTLGLENSHPVWTQKEKQLHSASAEDTPVVQLAAETPTAESKERALNSASTSLPTSCPGSEPVPTHQQGQPALELKEESFRDPAEVLGTGAEVDYLEQFGTSSFKESA

SEQ ID NO: 7068 - protein, 170 aa, Homo sapiens
MPRKGTQPSTARRREEGPPPPSPDGASSDAEPEPPSGRTESPATAAETASEELDNRSLEEILNSIPPPPPPAMTNEAGAPRLMITHIVNQNFKSYAGEKILGPFHKRFSCIIGPNGSGKSNVIDSMLFVFGYRAQKIRSKKLSVLIHNSDEHKDIQSCTVEVHFQKIIDK

SEQ ID NO: 7069 - protein, 343 aa, Homo sapiens
MTSKGPEEEHPSVTLFRQYLRIRTVQPKPDYGAAVAFFEETARQLGLGCQKVEVAPGYVVTVLTWPGTNPTLSSILLNSHTDVVPVFKEHWSHDPFEAFKDSEGYIYARGAQDMKCVSIQYLEAVRRLKVEGHRFPRTIHMTFVPDEEVGGHQGMELFVQRPEFHALRAGFALDEGIANPTDAFTVFYSERSPWWVRVTSTGRPGHASRFMEDTAAEKLAFEEQLQSWCQAAGEGVTLEFAQKWMHPQVTPTDDSNPWWAAFSRVCKDMNLTLEPEIMPAATDNRYIRAVGVPALGFSPMNRTPVLLHDHDERLHEAVFLRGVDIYTRLLPALASVPALPSDS

SEQ ID NO: 7070 - protein, 649 aa, Homo sapiens
MDLSALRVEEVQNVINAMQKILECPICLELIKEPVSTKCDHIFCKFCMLKLLNQKKGPSQCPLCKNDITKRSLQESTRFSQLVEELLKIICAFQLDTGLEYANSYNFAKKENNSPEHLKDEVSIIQSMGYRNRAKRLLQSEPENPSLQETSLSVQLSNLGTVRTLRTKQRIQPQKTSVYIELGSDSSEDTVNKATYCSVGDQELLQITPQGTRDEISLDSAKKAACEFSETDVTNTEHHQPSNNDLNTTEKRAAERHPEKYQGSSVSNLHVEPCGTNTHASSLQHENSSLLLTKDRMNVEKAEFCNKSKQPGLARSQHNRWAGSKETCNDRRTPSTEKKVDLNADPLCERKEWNKQKLPCSENPRDTEDVPWITLNSSIQKVNEWFSRSDELLGSDDSHDGESESNAKVADVLDVLNEVDEYSGSSEKIDLLASDPHEALICKSERVHSKSVESNIEDKIFGKTYRKKASLPNLSHVTENLIIGAFVTEPQIIQERPLTNKLKRKRRPTSGLHPEDFIKKADLAVQKTPEMINQGTNQTEQNGQVMNITNSGHENKTKGDSIQNEKNPNPIESLEKESAFKTKAEPISSSISNMELELNIHNSKAPKKNRLRRKSSTRHIHALELVVSRNLSPPNCTELQIDSCSSSEE

SEQ ID NO: 7071 - protein, 167 aa, Homo sapiens
DRWPAPVPGKTLHLPIMGVVMKVDTNISVILPTVHEVDIFRCFCPVFLHSQMLWELVLLGEPLVVMAPSPSESSETVLALVNCISPLKYFSDFRPYFTIHDSEFKEYTTRTQAPPSVILGVTNPFFAKTLQHWPHIIRIGDLKPTGEIPKQVKVKKLKNLKTLDSKP

SEQ ID NO: 7072 - protein, 155 aa, Homo sapiens
MPIRALCTICSDFFDHSRDVAAIHCGHTFHLQCLIQWFETAPSRTCPQCRIQVRVGKRTIINKLFFDLAQEEENVLDAEFLKNELDNVRAQLSQKDKEKRDSQVIIDTLRDTLEERNATVVSLQQALGKAEMLCSTLKKQMKYLEQQQDETKQAQ

SEQ ID NO: 7073 - protein, 156 aa, Homo sapiens
TAEVLYPSTGQETAPEVNFTFEGETGKNPDEEDNTFYQRLKSMKEPLEAQNIPDNFGNVSPEMTLVLHLAWVACGYIIWQNSTEDTWYKMVKIQTVKQVQRNDDFIELDYTILLHNIASQFHGIHDSTNSIFTFHLNTSTAIQTFSVPAFQEGKKS

SEQ ID NO: 7074 - protein, 236 aa, Homo sapiens
MAETKLQLFVKASEDGESVGHCPSCQRLFMVLLLKGVPFTLTTVDTRRSPDVLKDFAPGSQLPILLYDSDAKTDTLQIEDFLEETLGPPDFPSLAPRYRESNTAGNDVFHKFSAFIKNPVPAQDEALYQQLLRALARLDSYLRAPLEHELAGEPQLRESRRRFLDGDRLTLADCSLLPKLHIVDTVCAHFRQAPIPAELRGVRRYLDSAMQEKEFKYTCPHSAEILAAYRPAVHPR

SEQ ID NO: 7075 - protein, 48 aa, Homo sapiens
MDSTACLKSLLLTVSQYKAVKSEANATQLLRHLELTYCLWEEAEGIIP

SEQ ID NO: 7076 - protein, 59 aa, Homo sapiens
MAPSTPLLTVRGSEGLYMVNGPPHFTESTVFPRESGKNCKVCIFSKDGTLFAWGNGENF

SEQ ID NO: 7077 - protein, 498 aa, Homo sapiens
ELLKIICAFQLDTGLEYANSYNFAKKENNSPEHLKDEVSIIQSMGYRNRAKRLLQSEPENPSLETSLSVQLSNLGTVRTLRTKQRIQPQKTSVYIELAACEFSETDVTNTEHHQPSNNDLNTTEKRAAERHPEKYQGEAASGCESETSVSEDCSGLSSQSDILTTQQRDTMQHNLIKLQQEMAELEAVLEQHGSQPSNSYPSIISDSSALEDLRNPEQSTSEKAVLTSQKSSEYPISQNPEGLSADKFEVSADSSTSKNKEPGVERSSPSKCPSLDDRWYMHSCSGSLQNRNYPSQEELIKVVDVEEQQLEESGPHDLTETSYLPRQDLEGTPYLESGISLFSDDPESDPSEDRAPESARVGNIPSSTSALKVPQLKVAESAQSPAAAHTTDTAGYNAMEESVSREKPELTASTERVNKRMSMVVSGLTPEEFMLVYKFARKHHITLTNLITEETTHVVMKTDAEFVCERTLKYFLGIAGGKWVVSYFWVTQSIKERK

SEQ ID NO: 7078 - protein, 375 aa, Homo sapiens
MLQRIGLIFLHNIVVVSNCFYFQAFLDEFTNWSRINPNKARIPMAGDTQGVVGTVSKPCFTAYEMKIGAITFQVATGDIATEQVDVIVNSTARTFNRKSGVSRAILEGAGQAVESECAVLAAQPHRDFIITPGGCLKCKIIIHVPGGKDVRKTVTSVLEECEQRKYTSVSLPAIGTGNLPEHWTDMNHQLFCMVQLEPGQSEYNTIKDKFTRTCSSYAIEKIERIQNAFLWQSYQVKKRQMDIKNDHKNNERLLFHGTDADSVPYVNQHGFNRSCAGKNAVSYGKGTYFAVDASYSAKDTYSKPDSNGRKHMYVVRVLTGVFTKGRAGLVTPPPKNPHNPTDLFDSVTNNTRSPKLFVVFFDNQAYPEYLITFTA

SEQ ID NO: 7079 - protein, 12 aa, Homo sapiens
FTFGPGTKVDIK

SEQ ID NO: 7080 - protein, 140 aa, Homo sapiens
MVQAHGGRSRAQPLTLSLGAAMTQPPPEKTPAKKHVRLQERTHLLCEHTPGGHPTLSAHCWTPPYPLGPSAPATQPQATGRRILEDPFKLCQPRRPGHPWPRLQGPIQDHLAKSPEPCLSRPGTEPGGRRLHQCQLHPRL

SEQ ID NO: 7081 - protein, 532 aa, Homo sapiens
MAGAGLRAAARRWLLCGGHGGPRAASSSPSCPGCGPPGPGAHCPGVPRSAPAQAPTSGADLSAHLWARYQDMRRLVHDLLPPEVCSLLNPAAIYANNEISLRDVEVYGFDYDYTLAQYADALHPEIFSTARDILIEHYKSLLMKIDAFHYVQLGTAYRGLQPVPDEEVIELYGGTQHIPLYQMSGFYGKGPSIKQFMDIFSLPEMALLSCVVDYFLGHSLEFDQAHLYKDVTDAIRDVHVKGLMYQWIEQDMEKYILRGDETFAVLSRLVAHGKQLFLITNSPFSFVDKGMRHMVGPDWRQLFDVVIVQADKPSFFTDRRKPFRKLDEKGSLQWDRITRLEKGKIYRQGNLFDFLRLTEWRGPRVLYFGDHLYSDLADLMLRHGWRTGAIIPELEREIRIINTEQYMHSLTWQQALTGLLERMQTYQDAESRQVLAAWMKERQELRCITKALFNAQFGSIFRTFHNPTYFSRRLVRFSDLYMASLSCLLNYRVDFTFYPRRTPLQHEAPLWMDQLCTGCMKTPFLGDMAHIR

SEQ ID NO: 7082 - protein, 36 aa, Homo sapiens
MAATSLMSALAARLLQPAHSCSLRLRPFHLAAVRAY

SEQ ID NO: 7083 - protein, 743 aa, Homo sapiens
MCRPSPSPVSPASNPRTSLVQVKTKACLSGHHSASSTSKPFKTPKDNLLTSSSKQHTVFPAKGSRDKPCVPVPVVSLEKIPNLVKADGANVKMNSTTTTAVSASSTSSSAVSTPPLIKPVLMSKSVPPSPEKILNGKGILPTTIDKKHQNGTKNSNKPYRRLSEREFDPNKHCGVLDPETKKPCTRSLTCKTHSLSHRRAVPGRKKQFDLLLAEHKAKSREKEVKDKEHLLTSTREILPSQSGPAQDSLLGSSGSSGPEPKVASPAKSRPPNSVLPRPSSANSISSSTSSNHSGHTPEPPLPPVGGDLASRLSSDEGEMDGADESEKLDCQFSTHHPRPLAFCSFGSRLMGRGYYVFDRRWDRFRFALNSMVEKHLNSQMWKKIPPAADSPLPSPAAHITTPVPASVLQPFSNPSAVYLPSAPISSRLTSSYIMTSAMLSNAAFVTSPDPSALMSHTTAFPHVAATLSIMDSTFKAPSAVSPIPAVIPSPSHKPSKTKTSKSSKVKDLSTRSDESPSNKKRKPQSSTSSSSSSSSSSLQTSLSSPLSGPHKKNCVLNASSALNSYQAAPPYNSLSVHNSNNGVSPLSAKLEPSGRTSLPGGPADIVRQVGAVGGSSDSCPLSVPSLALHAGDLSLASHNAVSSLPLSFDKSEGKKRKNSSSSSKACKITKMPGMNSVHKKNPPSLLAPVPDPVNSTSSRQVRDLLAPPSPALGGRGSWAAPLLSRAAPTGNTSLIPVLVFPEG

SEQ ID NO: 7084 - protein, 124 aa, Homo sapiens
EAQSVILRRYFLELTQSFIIPLERYVASLMPLQKSISPWKSPPQLRQFLPEEFMKTLEKTGPQLTSRIKGDWIGLYRHFLKSPNFDGWFKTRRKEMTQKLEALHLEALCEEVRKLCVCVMINNC

SEQ ID NO: 7085 - protein, 65 aa, Homo sapiens
MNPSMKQKQEEIKENIKNSSVPRRTLKMIQPSASGSLVGRENELSAGLSKRKHRNDHLTSTTSSP

SEQ ID NO: 7086 - protein, 66 aa, Homo sapiens
MAVARAALGPLVTGLYDVQAFKFGDFVLKSGLSSPIYIDLRGIVSRPRLLSQMGSLLRHPGWSAAL

SEQ ID NO: 7087 - protein, 133 aa, Homo sapiens
MACPDENVSSGELRGLCAAPREEKERETEAAQMEHQKERNSFEERIQALEEDLREKEREIATEKKNSLKRDKAIQGLTMALKSKEKKVEELNSEIEKLSAAFAKAREALQKAQTQEFQGSEDYETALSGKEAL

SEQ ID NO: 7088 - protein, 193 aa, Homo sapiens
VAAIAETDESAESEGVIDSHKRREILSRRPSYRKILNELSSDVPGVPKIEEERSEEEGTPPSIATMAVPTSIYQTSTGQYNEETELAPSHMAAATGDMPTYQIRAPTAALPQGVVMAASPGSLHSPQQLAEEATRKRELRLMKNREAAKECRRRKKEYVKCLESRVAVLEVQNKKLIEELETLKDICSPKTDY

SEQ ID NO: 7089 - protein, 746 aa, Homo sapiens
MGQTGKKSEKGPVCWRKRVKSEYMRLRQLKRFRRADEVKSMFSSNRQKILERTEILNQEWKQRRIQPVHILTSVSSLRGTRECSVTSDLDFPTQVIPLKTLNAVASVPIMYSWSPLQQNFMVEDETVLHNIPYMGDEVLDQDGTFIEELIKNYDGKVHGDRECGFINDEIFVELVNALGQYNDDDDDDDGDDPEEREEKQKDLEDHRDDKESRPPRKFPSDKIFEAISSMFPDKGTAEELKEKYKELTEQQLPGALPPECTPNIDGPNAKSVQREQSLHSFHTLFCRRCFKYDCFLHPFHATPNTYKRKNTETALDNKPCGPQCYQHLEGAKEFAAALTAERIKTPPKRPGGRRRGRLPNNSSRPSTPTINVLESKDTDSDREAGTETGGENNDKEEEEKKDETSSSSEANSRCQTPIKMKPNIEPPENVEWSGAEASMFRVLIGTYYDNFCAIARLIGTKTCRQVYEFRVKESSIIAPAPAEDVDTPPRKKKRKHRLWAAHCRKIQLKKDGSSNHVYNYQPCDHPRQPCDSSCPCVIAQNFCEKFCQCSSECQNRFPGCRCKAQCNTKQCPCYLAVRECDPDLCLTCGAADHWDSKNVSCKNCSIQRGSKKHLLLAPSDVAGWGIFIKDPVQKNEFISEYCGEIISQDEADRRGKVYDKYMCSFLFNLNNDFVVDATRKGNKIRFANHSVNPNCYAKVMMVNGDHRIGIFAKRAIQTGEELFFDYRYSQADALKYVGIEREMEIP

SEQ ID NO: 7090 - protein, 142 aa, Homo sapiens
GQKHNQDARILNCFSRLPGSCHEQKDRKPKRSTWRFNLDLTHPVEDGIFDSGNFEQFLREKVKVNGKTGNLGNVVHIERFKNKITVVSEKQFSKRYLKYLTKKYLKKNNLRDWLRVVASDKETYELRYFQISQDEDESESED

SEQ ID NO: 7091 - protein, 287 aa, Homo sapiens
MPSDLAKKKAAKKKEAAKARQRPRKGHEENGDVVTEPQVAEKNEANGRETTEVDLLTKELEDFEMKKAAARAVTGVLASHPNSTDVHIINLSLTFHGQELLSDTKLELNSGRRYGLIGLNGIGKSMLLSAIGKREVPIPEHIDIYHLTREMPPSDKTPLHCVMEVDTERAMLEKEAERLAHEDAECEKLMELYERLEELDADKAEMRASRILHGLGFTPAMQRKKLKDFSGGWRMRVALARALFIRPFMLLLDEPTNHLDLDACVWLEEELKTFKRILVLVSHSQDF

SEQ ID NO: 7092 - protein, 76 aa, Homo sapiens
MVQAHGGRSRAQPLTLSLGAAMTQPPPEKTPAKKHVRLQERRSLQTLSAPKTWTSLATPPRTDTRPSCQIPRAVSV

SEQ ID NO: 7093 - protein, 103 aa, Homo sapiens
MQAKGRRHRSSALIGRPVTTRKRRRGGATKQLMDIESKHEVTILGGLNEFVVKFYGPQGTPYEGGVWKVRVDLPDKYPFKSPSIGFMNKIFHPNIDEASGTVC

SEQ ID NO: 7094 - protein, 101 aa, Homo sapiens
MAAAAAEQQQFYLLLGNLLSPDNVVRKQAEETYENIPGQSKITFLLQAIRNTTAAEEARQMAAVLLRRLLSSAFDEVYPALPSDVQTAIKSELLMIIQMET

SEQ ID NO: 7095 - protein, 146 aa, Homo sapiens
MDHHQPGTGRYQVLLNEEDNSESSAIEQPPTSNPAPQIVQAASSAPALETDSSPPPYSSITVEVPTTSDTEVYGEFYPVPPPYSVATSLPTYDEAEKAKAAAMAAAAAETSQRIQEEECPPRDDFSDADQLRVGNDGIFMLAFFIF

SEQ ID NO: 7096 - protein, 366 aa, Homo sapiens
MDGRRVPAQPAAEFSLTPGGYRSVGRSRRCSRGSIPRNIPKRSWKKPHPQLCSLQEEEPMLERRCRGPLAMGLAQPRLLSGPSQESPQTLGKESRGLRQQGTSVAQSGAQAPGRAHRCAHCRRHFPGWVALWLHTRRCQARLPLPCPECGRRFRHAPFLALHRQVHAAATPDLGFACHLCGQSFRGWVALVLHLRAHSAAKRPIACPKCERRFWRRKQLRAHLRRCHPPAPEARPFICGNCGRSFAQWDQLVAHKRVHVAEALEEAAAKALGPRPRGRPAVTAPRPGGDAVDRPFQCACCGKRFRHKPNLIAHRRVHTGERPHQCPECGKRFTNKPYLTSHRRIHTGEKPYPCKECGRRFRHKPNL

SEQ ID NO: 7097 - protein, 74 aa, Homo sapiens
MAAAAAEQQQFYLLLGNLLSPDNVVRKQAEETYENIPGQSKITFLLQAIRNTTAAEEARQMAAVLLRRLLSSAF

SEQ ID NO: 7098 - protein, 601 aa, Homo sapiens
MGVGRQQRGPFQGVRVKNSVKELLLHIRSHKQKASGQAVDDFKTQGVNIEQFRELKNTVSYSGKRKGPDSLSDGPACKRPALLHSQFLTPPQTPTPGESMEDVHLNEPKQESSADLLQNIINIKNECSPVSLNTVQVSWLNPVVVPQSSPAEQCQDFHGGQVFSPPQKCQPFQVRGSQQMIDQASLYQYSPQNQHVEQQPHYTHKPTLEYSPFPIPPQSPAYEPNLFDGPESQFCPNQSLVSLLGDQRESENIANPMQTSSSVQQQNDAHLHSFSMMPSSACEAMVGHEMASDSSNTSLPFSNMGNPMNTTQLGKSLFQWQVEQEESKLANISQDQFLSKDADGDTFLHIAVAQGRRALSYVLARKMNALHMLDIKEHNGQSAFQVAVAANQHLIVQDLVNIGAQVNTTDCWGRTPLHVCAEKGHSQVLQAIQKGAVGSNQFVDLEATNYDGLTPLHCAVIAHNAVVHELQRNQQPHSPEVQELLLKNKSLVDTIKCLIQMGAAVEAKDRKSGRTALHLAAEEANLELIRLFLELPSCLSFVNAKAYNGNTALHVAASLQYRLTQLDAVRLLMRKGADPSTRNLENEQPVHLVPDGPVGEQ

SEQ ID NO: 7099 - protein, 128 aa, Homo sapiens
MASSPAQRRRGNDPLTSSPGRSSRRTDALTSSPGRDLPPFEDESEGLLGTEGPLEEEEDGEELIGDGMERDYRAIPELDAYEAEGLALDDEDVEELTASQREAAERAMRQRDREAGRGLGRMRRGLLY

SEQ ID NO: 7100 - protein, 125 aa, Homo sapiens
MNRTQELSGQLSDEETELAPSHMAAATGDMPTYQIRAPTAALPQGVVMAASPGSLHSPQQLAEEATRKRELRLMKNREAAKECRRRKKEYVKCLESRVAVLEVQNKKLIEELETLKDICSPKTDY

SEQ ID NO: 7101 - protein, 96 aa, Homo sapiens
MFRKGKKRHSSSSSQSSEISTKSKSVDSSLGGLSRSSTVASLDTDSTKSSGQSNNNSDTCAEFRIKYVGAIEKLKLSEGKGLEGPLDLINYIDVAQ

SEQ ID NO: 7102 - protein, 76 aa, Homo sapiens
MVTFSENHGVVIQPAYKDKINITQLGLQNSTITFWNITLEDEGCYMCLFNTFGFGKISGTACLTVYAHSIPSLQIL

SEQ ID NO: 7103 - protein, 228 aa, Homo sapiens
MTSKGPEEEHPSVTLFRQYLRIRTVQPKPDYGAAVAFFEETARQLGLGCQKVETTYPPDHLQVAPGYVVTVLTWPGTNPTLSSILLNSHTDVVPVFKEHWSHDPFEAFKDSEGYIYARGAQDMKCVSIQYLEAVRRLKVEGHRFPRTIHMTFVPDEEVGGHQGMELFVQRPEFHALRAGFALDEGIANPTDAFTVFYSERSPWWVRVTSTGRPGHASRFMEDTAAEKL

SEQ ID NO: 7104 - protein, 579 aa, Homo sapiens
MTEKQQEEAEWESINVLLMMHGLKPLSLVKRTDLKDLIIFDKQSSQRMRQNLKLLVEETSCQQNMIQELIETNQQLRNELQLEQSRAANQEQRANDLEQIMESVKSKIGELEDESLSRACHQQNKIKDLQKEQKTLQVKCQHYKKKRTEQEETIASLQMEVCRLKKEEEDRIVTQNRVFAYLCKRVPHTVLDRQLLCLIDYYESKIRKIHTQRQYKEDESQSEEENDYRNLDASPTYKGLLMSLQNQLKESKSKIDALSSEKLNLQKDLETRPTQHELRLYKQQVKKLEKALKKNVKLQELINHKKAEDTEKKDEPSKYNQQQALIDQRYFQVLCSINSIIHNPRAPVIIYKQTKGGVQNFNKDLVQDCGFEHLVPVIEMWADQLTSLKDLYKSLKTLSAELVPWLNLKKQDENEGIKVEDLLFIVDTMLEEVENKEKDSNMPHFQTLQAIVSHFQKLFDVPSLNGVYPRMNEVYTRLGEMNNAVRNLQELLELDSSSSLCVLVSTVGKLCRLINEDVNEQVMQVLGPEDLQSIIYKLEEHEEFFPAFQAFTNDLLEILEIDDLDAIVPAVKKLKVLSY

SEQ ID NO: 7105 - protein, 737 aa, Homo sapiens
MGQTGKKSEKGPVCWRKRVKSEYMRLRQLKRFRRADEVKSMFSSNRQKILERTEILNQEWKQRRIQPVHILTSCSVTSDLDFPTQVIPLKTLNAVASVPIMYSWSPLQQNFMVEDETVLHNIPYMGDEVLDQDGTFIEELIKNYDGKVHGDRECGFINDEIFVELVNALGQYNDDDDDDDGDDPEEREEKQKDLEDHRDDKESRPPRKFPSDKIFEAISSMFPDKGTAEELKEKYKELTEQQLPGALPPECTPNIDGPNAKSVQREQSLHSFHTLFCRRCFKYDCFLHPFHATPNTYKRKNTETALDNKPCGPQCYQHLEGAKEFAAALTAERIKTPPKRPGGRRRGRLPNNSSRPSTPTINVLESKDTDSDREAGTETGGENNDKEEEEKKDETSSSSEANSRCQTPIKMKPNIEPPENVEWSGAEASMFRVLIGTYYDNFCAIARLIGTKTCRQVYEFRVKESSIIAPAPAEDVDTPPRKKKRKHRLWAAHCRKIQLKKDGSSNHVYNYQPCDHPRQPCDSSCPCVIAQNFCEKFCQCSSECQNRFPGCRCKAQCNTKQCPCYLAVRECDPDLCLTCGAADHWDSKNVSCKNCSIQRGSKKHLLLAPSDVAGWGIFIKDPVQKNEFISEYCGEIISQDEADRRGKVYDKYMCSFLFNLNNDFVVDATRKGNKIRFANHSVNPNCYAKVMMVNGDHRIGIFAKRAIQTGEELFFDYRYSQADALKYVGIEREMEIP

SEQ ID NO: 7106 - protein, 393 aa, Homo sapiens
MDGRRVPAQPAAEFSLTPGGYRSVGRSRRCSRGSIPRNIPKRSWKKPHPQLCSLQAEEEPMLERRCRGPLAMGLAQPRLLSGPSQESPQTLGKESRGLRQQGTSVAQSGAQAPGRAHRCAHCRRHFPGWVALWLHTRRCQARLPLPCPECGRRFRHAPFLALHRQVHAAATPDLGFACHLCGQSFRGWVALVLHLRAHSAAKRPIACPKCERRFWRRKQLRAHLRRCHPPAPEARPFICGNCGRSFAQWDQLVAHKRVHVAEALEEAAAKALGPRPRGRPAVTAPRPGGDAVDRPFQCACCGKRFRHKPNLIAHRRVHTGERPHQCPECGKRFTNKPYLTSHRRIHTGEKPYPCKECGRRFRHKPNLLSHSKIHKRSEGSAQAAPGPGSPQLP

SEQ ID NO: 7107 - protein, 97 aa, Homo sapiens
MKAQTALSFFLILITSLSGSQGIFPLAFFIYVPMNEQIVIGRLDEDIILPSSFERGSEVVIHWKYQDSYKVHSYYKGSDHLESQDPRYANRTSLFYN

SEQ ID NO: 7108 - protein, 144 aa, Homo sapiens
MKAQTALSFFLILITSLSGSQGIFPLAFFIYVPMNEQIVIGRLDEDIILPSSFERGSEVVIHWKYQDSYKVHSYYKGSDHLESQDPRYANRTSLFYNEIQNGNASLFFRRVSLLDEGIYTCYVGTAIQVITNKVVLKVGVFLTP

SEQ ID NO: 7109 - protein, 213 aa, Homo sapiens
MESLLLLPRFGRISDLTVDLSTPEGSFPSDEGWPFAKYLGACGRMVAVNYVGEELWSYFNAPWEKRVDLAWQLMEIAEQLTNNDFEFALYLLDVSFDNFAVGPRDGKVIIVDAENVLVADKRLIRQNKPENWDVWYESKFDDCDKEACLSFSKEILCARATVDHNYYAVCQNLLSRHATWRGTSGGLLHDPPSEIAKDGRLEALLDECANPKK

SEQ ID NO: 7110 - protein, 622 aa, Homo sapiens
MDLSALRVEEVQNVINAMQKILECPICLELIKEPVSTKCDHIFCKSLQESTRFSQLVEELLKIICAFQLDTGLEYANSYNFAKKENNSPEHLKDEVSIIQSMGYRNRAKRLLQSEPENPSLQETSLSVQLSNLGTVRTLRTKQRIQPQKTSVYIELGSDSSEDTVNKATYCSVGDQELLQITPQGTRDEISLDSAKKAACEFSETDVTNTEHHQPSNNDLNTTEKRAAERHPEKYQGSSVSNLHVEPCGTNTHASSLQHENSSLLLTKDRMNVEKAEFCNKSKQPGLARSQHNRWAGSKETCNDRRTPSTEKKVDLNADPLCERKEWNKQKLPCSENPRDTEDVPWITLNSSIQKVNEWFSRSDELLGSDDSHDGESESNAKVADVLDVLNEVDEYSGSSEKIDLLASDPHEALICKSERVHSKSVESNIEDKIFGKTYRKKASLPNLSHVTENLIIGAFVTEPQIIQERPLTNKLKRKRRPTSGLHPEDFIKKADLAVQKTPEMINQGTNQTEQNGQVMNITNSGHENKTKGDSIQNEKNPNPIESLEKESAFKTKAEPISSSISNMELELNIHNSKAPKKNRLRRKSSTRHIHALELVVSRNLSPPNCTELQIDSCSSSE

SEQ ID NO: 7111 - protein, 146 aa, Homo sapiens
MAESSESFTMASSPAQRRRGNDPLTSSPGRSSRRTDALTSSPGRDLPPFEDESEGLLGTEGPLEEEEDGEELIGDGMERDYRAIPELDAYEAEGLALDDEDVEELTASQREAAERAMRQRDREAGRGLGRMRRGLLYGVSCLPRQR

SEQ ID NO: 7112 - protein, 63 aa, Homo sapiens
MAPKDRKPKRSTWRFNLDLTHPVEDGIFDSGNFGTFPSEYLGFSSLVLHFFCFKIGAISTGEG

SEQ ID NO: 7113 - protein, 163 aa, Homo sapiens
TGAGVFPGSQFVPGVRSIAEFLAKSKSEETQEEVQVLLDSLVHGNPKYQNQVYKGLIALLPCESPKAQQLSLQTLRTAQPIIGTTHPSIVDCVLKVLGTMHLEVQYEAIELIKDLVGYDVRQALLKGLVALLIPSVKEISKLQAKILSAHPQPADVFAAGRGR

SEQ ID NO: 7114 - protein, 284 aa, Homo sapiens
MPIRALCTICSDFFDHSRDVAAIHCGHTFHLQCLIQWFETAPSRTCPQCRIQVGKRTIINKLFFDLAQEEENVLDAEFLKLQTVYSELDQAKLELKSAQKDLQSADKEIMSLKKKLTMLQETLNLPPVASETVDRLVLESPAPVEVNLKLRRPSFRDDIDLNATFDVDTPPARPSSSQHGYYEKLCLEKSHSPIQDVPKKICKGPRKESQLSLGGQSCAGEPDEELVGAFPIFVRNAILGQKQPKRPRSESSCSKDVVRTGFDGLGGRTKFIQPVSFSCDVELS

SEQ ID NO: 7115 - protein, 423 aa, Homo sapiens
MPRKGTQPSTARRREEGPPPPSPDGASSDAEPEPPSGRTESPATAAETASEELDNRSLEEILNSIPPPPPPAMTNEAGAPRLMITHIVNQNFKSYAGEKILGPFHKRFSCIIGPNGSGKSNVIDSMLFVFGYRAQKIRSKKLSVLIHNSDEHKDIQSCTVEVHFQKIIDKEGDDYEVIPNSNFYVSRTACRDNTSVYHISGKKKTFKDVGNLLRSHGIDLDHNRFLILQGEVEQIAMMKPKGQTEHDEGMLEYLEDIIGCGRLNEPIKVLCRRVEILNEHRGEKLNRVKMVEKEKDALEGEKNIAIEFLTLENEIFRKKNHVCQYYIYELQKRIAEMETQKEKIHEDTKEINEKSNILSNEMKAKNKDVKDTEKKLNKITKFIEENKEKFTQLDLEDVQVREKLKHATSKAKKLEKQLQKDKE

SEQ ID NO: 7116 - protein, 192 aa, Homo sapiens
MAKQKRKVPEVTEKKNKKLKKASAEGPLLGPEAAPSGEGAGSKGEAVLRPGLDAEPELSPEEQRVLERKLKKERKKEERQRLREAGLVAQHPPARRSGAELALDYLCRWAQKHKNWRFQKTRQTWLLLHMYDSDKVPDEHFSTLLAYLEGLQGRARELTVQKAEALMRELDEEGSDPPLPGRAQRIRQVLQL

SEQ ID NO: 7117 - protein, 70 aa, Homo sapiens
MAAAAAEQQQFYLLLGNLLSPDNVVRKQAEETYENIPGQSKITFLLQAIRNTTAAEEARQMAAVLLRRLL

SEQ ID NO: 7118 - protein, 134 aa, Homo sapiens
LAVEGPSKVDIQTEDLEDGTCKVSYFPTVPGVYIVSTKFADEHVPEINSSDMSAHVTSPSGRVTEAEIVPMGKNSHCVRFVPQEMGVHTVSVKYRGQHVTGSPFQFTVGPLGEGGAHKVRAGGPGLERGEAGVP

SEQ ID NO: 7119 - protein, 318 aa, Homo sapiens
QLDTGLEYANSYNFAKKENNSPEHLKDEVSIIQSMGYRNRAKRLLQSEPENPSLETSLSVQLSNLGTVRTLRTKQRIQPQKTSVYIELAACEFSETDVTNTEHHQPSNNDLNTTEKRAAERHPEKYQGSSVSNLHVEPCGTNTHASSLQHENSSLLLTKDRMNVEKAEFCNKSKQPGLARSQHNRWAGSKETCNDRRTPSTEKKVDLNADPLCERKEWNKQKLPCSENPRDTEDVPWITLNSSIQKVNEWFSRSDELLGSDDSHDGESESNAKVADVLDVLNEVDEYSGSSEKIDLLASDPHEALICKSERVHSKSVE

SEQ ID NO: 7120 - protein, 2633 aa, Homo sapiens
MPVTEKDLAEDAPWKKIQQNTFTRWCNEHLKCVNKRIGNLQTDLSDGLRLIALLEVLSQKRMYRKYHQRPTFRQMQLENVSVALEFLDRESIKLVSIDSKAIVDGNLKLILGLVWTLILHYSISMPVWEDEGDDDAKKQTPKQRLLGWIQNKIPYLPITNFNQNWQDGKALGALVDSCAPGLCPDWESWDPQKPVDNAREAMQQADDWLGVPQVITPEEIIHPDVDEHSVMTYLSQFPKAKLKPGAPLKPKLNPKKARAYGRGIEPTGNMVKQPAKFTVDTISAGQGDVMVFVEDPEGNKEEAQVTPDSDKNKTYSVEYLPKVTGLHKVTVLFAGQHISKSPFEVSVDKAQGDASKVTAKGPGLEAVGNIANKPTYFDIYTAGAGVGDIGVEVEDPQGKNTVELLVEDKGNQVYRCVYKPMQPGPHVVKIFFAGDTIPKSPFVVQVGEACNPNACRASGRGLQPKGVRIRETTDFKVDTKAAGSGELGVTMKGPKGLEELVKQKDFLDGVYAFEYYPSTPGRYSIAITWGGHHIPKSPFEVQVGPEAGMQKVRAWGPGLHGGIVGRSADFVVESIGSEVGSLGFAIEGPSQAKIEYNDQNDGSCDVKYWPKEPGEYAVHIMCDDEDIKDSPYMAFIHPATGGYNPDLVRAYGPGLEKSGCIVNNLAEFTVDPKDAGKAPLKIFAQDGEGQRIDIQMKNRMDGTYACSYTPVKAIKHTIAVVWGGVNIPHSPYRVNIGQGSHPQKVKVFGPGVERSGLKANEPTHFTVDCTEAGEGDVSVGIKCDARVLSEDEEDVDFDIIHNANDTFTVKYVPPAAGRYTIKVLFASQEIPASPFRVKVDPSHDASKVKAEGPGLSKAGVENGKPTHFTVYTKGAGKAPLNVQFNSPLPGDAVKDLDIIDNYDYSHTVKYTPTQQGNMQVLVTYGGDPIPKSPFTVGVAAPLDLSKIKLNGLENRVEVGKDQEFTVDTRGAGGQGKLDVTILSPSRKVVPCLVTPVTGRENSTAKFIPREEGLYAVDVTYDGHPVPGSPYTVEASLPPDPSKVKAHGPGLEGGLVGKPAEFTIDTKGAGTGGLGLTVEGPCEAKIECSDNGDGTCSVSYLPTKPGEYFVNILFEEVHIPGSPFKADIEMPFDPSKVVASGPGLEHGKVGEAGLLSVDCSEAGPGALGLEAVSDSGTKAEVSIQNNKDGTYAVTYVPLTAGMYTLTMKYGGELVPHFPARVKVEPAVDTSRIKVFGPGIEGKDVFREATTDFTVDSRPLTQVGGDHIKAHIANPSGASTECFVTDNADGTYQVEYTPFEKGLHVVEVTYDDVPIPNSPFKVAVTEGCQPSRVQAQGPGLKEAFTNKPNVFTVVTRGAGIGGLGITVEGPSESKINCRDNKDGSCSAEYIPFAPGDYDVNITYGGAHIPGSPFRVPVKDVVDPSKVKIAGPGLGSGVRARVLQSFTVDSSKAGLAPLEVRVLGPRADDTDSQSWRSPLKALSEFFKGDPKGDFNKTGLVEPVNVVDNGDGTHTVTYTPSQEGPYMVSVKYADEEIPRSPFKVKVLPTYDASKVTASGPGLSSYGVPASLPVDFAIDARDAGEGLLAVQITDQEGKPKRAIVHDNKDGTYAVTYIPDKTGRYMIGVTYGGDDIPLSPYRIRATQTGDASKCLATGPGIASTVKTGEEVGFVVDAKTAGKGKVTCTVLTPDGTEAEADVIENEDGTYDIFYTAAKPGTYVIYVRFGGVDIPNSPFTVMATDGEVTAVEEAPVNACPPGFRPWVTEEAYVPVSDMNGLGFKPFDLVIPFAVRKGEITGEVHMPSGKTATPEIVDNKDGTVTVRYAPTEVGLHEMHIKYMGSHIPESPLQFYVNYPNSGSVSAYGPGLVYGVANKTATFTIVTEDAGEGGLDLAIEGPSKAEISCIDNKDGTCTVTYLPTLPGDYSILVKYNDKHIPGSPFTAKITDDSRRCSQVKLGSAADFLLDISETDLSSLTASIKAPSGRDEPCLLKRLPNNHIGISFIPREVGEHLVSIKKNGNHVANSPVSIMVVQSEIGDARRAKVYGRGLSEGRTFEMSDFIVDTRDAGYGGISLAVEGPSKVDIQTEDLEDGTCKVSYFPTVPGVYIVSTKFADEHVPGSPFTVKISGEGRVKESITRTSRAPSVATVGSICDLNLKIPEINSSDMSAHVTSPSGRVTEAEIVPMGKNSHCVRFVPQEMGVHTVSVKYRGQHVTGSPFQFTVGPLGEGGAHKVRAGGPGLERGEAGVPAEFSIWTREAGAGGLSIAVEGPSKAEITFDDHKNGSCGVSYIAQEPGNYEVSIKFNDEHIPESPYLVPVIAPSDDARRLTVMSLQESGLKVNQPASFAIRLNGAKGKIDAKVHSPSGAVEECHVSELEPDKYAVRFIPHENGVHTIDVKFNGSHVVGSPFKVRVGEPGQAGNPALVSAYGTGLEGGTTGIQSEFFINTTRAGPGTLSVTIEGPSKVKMDCQETPEGYKVMYTPMAPGNYLISVKYGGPNHIVGSPFKAKVTGQRLVSPGSANETSSILVESVTRSSTETCYSAIPKASSDASKVTSKGAGLSKAFVGQKSSFLVDCSKAGSNMLLIGVHGPTTPCEEVSMKHVGNQQYNVTYVVKERGDYVLAVKWGEEHIPGSPFHVTVP

SEQ ID NO: 7121 - protein, 126 aa, Homo sapiens
MAEPDYIEDDNPELIRPQKLINPVKTSRNHQDLHRELLMNQKRGLAPQNKPELQKVMEKRKRDQVIKQKEEEAQKKKSDLEIELLKRQQKLEQLELEKQKLQEEQENAPEFVKVKGNLRRTGQEVA

SEQ ID NO: 7122 - protein, 59 aa, Homo sapiens
MDLSALRVEEVQNVINAMQKILECPICLELIKEPVSTKCDHIFCKVLLCCPSWSTVVRS

SEQ ID NO: 7123 - protein, 98 aa, Homo sapiens
MPTSARCDDLEALKKKGCPPDDIENPRGSKDIKKNKNVTNRSKGTAEKLKPEDITQIQPQQLVLRLRSGEPQTFTLKFKRAEDYPIDLYYLMDLSYSM

SEQ ID NO: 7124 - protein, 93 aa, Homo sapiens
MAEPDYIEDDNPELIRPQKLINPVKTSRNHQDLHRELLMNQKRGLAPQNKPELQKVMEKRKRDQVIKQKEEEAQKKKSDLEIELLKRQQKLEQ

SEQ ID NO: 7125 - protein, 142 aa, Homo sapiens
MAVARAALGPLVTGLYDVQAFKFGDFVLKSGLSSPIYIDLRGIVSRPRLLSQVADILFQTAQNAGISFDTVCGVPYTALPLATVICSTNQIPMLIRRKETKDYGSTQRTQLRCTCRAAQDPPSCIEASQAYAKEGDQSVSIC

SEQ ID NO: 7126 - protein, 187 aa, Homo sapiens
MGLPEERVRSGSGSRGQEEAGAGGRARSWSPPPEVSRSAHVPSLQRYRELHRRSVEEPREFWGDIAKEFYWKTPCPGPFLRYNFDVTKGKIFIEWMKGATTNICYNVLDRNVHEKKLGDKVAFYWCSSSPGQGSCAQSMGTTNALRQPTLRSFLDTMLQEMAASGTRMAITGSLAGLMTCSMYLDTC

SEQ ID NO: 7127 - protein, 243 aa, Homo sapiens
MTDYGEEQRNELEALESIYPDSFTVLSENPPSFTITVTSEAGENDETVQTTLKFTYSEKYPDEAPLYEIFSQENLEDNDVSDILKLLALQAEENLGMVMIFTLVTAVQEKLNEIVDQIKTRREEEKKQKEKEAEEAEKQLFHGTPVTIENFLNWKAKFDAELLEIKKKRMKEEEQAGKNKLSGKQLFETDHNLDTSDIQFLEDAGNNVEVDESLFQEMDDLELEDDEDDPDYNPADPESDSAD

SEQ ID NO: 7128 - protein, 150 aa, Homo sapiens
MKVELCSFSGYKIYPGHGRRYARTDGKVFQFLNAKCESAFLSKRNPRQINWTVLYRRKHKKGQSEEIQKKRTRRAVKFQRAITGASLADIMAKRNQKPEVRKAQREQAIRAAKEAKKAKQASKKTAMAAAKVIMGFLYFLEQYNRKIFFF

SEQ ID NO: 7129 - protein, 141 aa, Homo sapiens
MAFMEKPPAGKVLLDDTVPLTAAIEASQSLQSHTEYIIRVQRGISVENSWQIVRRYSDFDLLNNSLQIAGLSLPLPPKKLIGNMDREFIAERQKGLQNYLNVITTNHILSNCELVKKFLDPNNYSANYTAPLHLSGYLCHS

SEQ ID NO: 7130 - protein, 299 aa, Homo sapiens
MVGKARSSNFTLSEKLDLLKLVKPYVKILEEHTNKHSVIVEKNRCWDIIAVNYNAIGVDRPPRTAQGLRTLYKRLKEYAKQELLQQKETQSDFKSNISEPTKKVMEMIPQISSFCLVRDRNHIQSANLDEEAQAGTSSLQVMLDHHPVAITVEVKQEEDIKPPPPLVLNSQQSDTLEQREEHELVHVMERSLSPSLSSVDMRMTSSPSSIPRRDDFFRHESGEHFRSLLGYDPQILQMLKEEHQIILENQKNFGLYVQEKRDGLKRRQQLEEELLRAKIEVEKLKAIRLRHDLPEYNSL

SEQ ID NO: 7131 - protein, 623 aa, Homo sapiens
MDLSALRVEEVQNVINAMQKILECPICLELIKEPVSTKCDHIFCKFCMLKLLNQKKGPSQCPLCKNDITKRSLQESTRFSQLVEELLKIICAFQLDTGLEYANSYNFAKKENNSPEHLKDEVSIIQSMGYRNRAKRLLQSEPENPSLETSLSVQLSNLGTVRTLRTKQRIQPQKTSVYIELGSDSSEDTVNKATYCSVGDQELLQITPQGTRDEISLDSAKKAACEFSETDVTNTEHHQPSNNDLNTTEKRAAERHPEKYQGEAASGCESETSVSEDCSGLSSQSDILTTQQRDTMQHNLIKLQQEMAELEAVLEQHGSQPSNSYPSIISDSSALEDLRNPEQSTSEKAVLTSQKSSEYPISQNPEGLSADKFEVSADSSTSKNKEPGVERSSPSKCPSLDDRWYMHSCSGSLQNRNYPSQEELIKVVDVEEQQLEESGPHDLTETSYLPRQDLEGTPYLESGISLFSDDPESDPSEDRAPESARVGNIPSSTSALKVPQLKVAESAQSPAAAHTTDTAGYNAMEESVSREKPELTASTERVNKRMSMVVSGLTPEEFMLVYKFARKHHITLTNLITEETTHVVMKTDAEFVCERTLKYFLGIAGGKWVVSYFWVTQSIKERK

SEQ ID NO: 7132 - protein, 14 aa, Homo sapiens
MPTSARCDDLEALK

SEQ ID NO: 7133 - protein, 130 aa, Homo sapiens
MAEPDYIEDDNPELIRPQKLINPVKTSRNHQDLHRELLMNQKRGLAPQNKPELQKVMEKRKRDQVIKQKEEEAQKKKSDLEIELLKRQQKLEQLELEKQKLQEEQENAPEFVKVKGNLRRTGQEVAQAQE

SEQ ID NO: 7134 - protein, 453 aa, Homo sapiens
MEDIQTNAELKSTQEQSVPAESAAVLNDYSLTKSHEMENVDSGEGPANEDEDIGDDSMKVKDEYSERDENVLKSEPMGNAEEPEIPYSYSREYNEYENIKLERHVVSFDSSRPTSGKMNCDVCGLSCISFNVLMVHKRSHTVEKPYKCEFCGRSYKQRSSLEEHKERCRTFLQSTDPGDTASAEARHIKAEMGSERALVLDRLASNVAKRKSSMPQKFIGEKRHCFDVNYNSSYMYEKESELIQTRMMDQAINNAISYLGAEALRPLVQTPPAPTSEMVPVISSMYPIALTRAEMSNGAPQELEKKSIHLPEKSVPSERGLSPNNSGHDSTDTDSNHEERQNHIYQQNHMVLSRARNGMPLLKEVPRSYELLKPPPICPRDSVKVINKEGEVMDVYRCDHCRVLFLDYVMFTIHMGCHGFRDPFECNMCGYRSHDRYEFSSHIARGEHRALLK

SEQ ID NO: 7135 - protein, 834 aa, Homo sapiens
MMKEVLSTGQGNREVIHTGTLQRHQSYHIGDFCFQEIEKEIHNIEFQCQEDERNGHEAPTTKIKKLTGSTDQHDHRHAGNKPIKDQLGSSFYSHLPELHIFQIKGEIANQLEKSTSDASSVSTSQRISCRPQIHISNNYGNNPLNSSLLPQKQEVHMREKSFPCNESGKAFNCSSLLRKHQIPHLGDKQYKCDVCGKLFNHKQYLACHRRCHTGEKPYKCKECGKSFSYKSSLTCHHRLHTGVKPYKCNECGKVFRQNSALVIHKAIHTGEKPYKCNECGKAFNQQSHLSRHQRLHTGVKPYKCKICEKAFACHSYLANHTRIHSGEKTYKCNECGKAFNHQSSLARHHILHTGEKPYKCEECDKVFSQKSTLERHKRIHTGEKPYKCKVCDTAFTCNSQLARHRRIHTGEKTYKCNECRKTFSRRSSLLCHRRLHSGEKPYKCNQCGNTFRHRASLVYHRRLHTLEKSYKCTVCNKVFMRNSVLAVHTRIHTAKKPYKCNECGKAFNQQSHLSRHRRLHTGEKPYKCEACDKVFGQKSALESHKRIHTGEKPYRCQVCDTAFTWNSQLARHTRIHTGEKTYKCNECGKTFSYKSSLVWHRRLHGGEKSYKCKVCDKAFVCRSYVAKHTRIHSGMKPYKCNECSKTFSNRSSLVCHRRIHSGEKPYKCSECSKTFSQKATLLCHRRLHSGEKPYKCNDCGNTFRHWSSLVYHRRLHTGEKSYKCTVCDKAFVRNSYLARHIRIHTAEKPYKCNECGKAFNEQSHLSRHHRIHTGEKPYKCEACDKVFSRKSHLKRHRIIHTGEKPYKCNECGKAFSDRSTLIHHQAIHGIGKFD

SEQ ID NO: 7136 - protein, 835 aa, Homo sapiens
SDEEDEERPARKRRQVERATEDGEEDEEMIESIENLEDLKGHSVREWVSMAGPRLEIHHRFKNFLRTHVDSHGHNVFKERISDMCKENRESLVVNYEDLAAREHVLAYFLPEAPAELLQIFDEAALEVVLAMYPKYDRITNHIHVRISHLPLVEELRSLRQLHLNQLIRTSGVVTSCTGVLPQLSMVKYNCNKCNFVLGPFCQSQNQEVKPGSCPECQSAGPFEVNMEETIYQNYQRIRIQESPGKVAAGRLPRSKDAILLADLVDSCKPGDEIELTGIYHNNYDGSLNTANGFPVFATVILANHVAKKDNKVAVGELTDEDVKMITSLSKDQQIGEKESSRNASLAEAGIGAIPSQLLAIEPSLRRSGVPIGEVGVSQRQEARSFSSANTHWFLEDLLGPSCRDTMIFASIAPSIYGHEDIKRGLALALFGGEPKNPGGKHKVRGDINVLLCGDPGTAKSQFLKYIEKVSSRAIFTTGQGASAVGLTAYVQRHPVSREWTLEAGALVLADRGVCLIDEFDKMNDQDRTSIHEAMEQQSISISKAGIVTSLQARCTVIAAANPIGGRYDPSLTFSENVDLTEPIISRFDILCVVRDTVDPVQDEMLARFVVGSHVRHHPSNKEEEGLANGSAAEPAMPNTYGVEPLPQEVLKKYIIYAKERVHPKLNQMDQDKVAKMYSDLRKESMATGSIPITVRHIESMIRMAEAHARIHLRDYVIEDDVNMAIRVMLESFIDTQKFSVMRSMRKTFARYLSFRRDNNELLLFILKQLVAEQVTYQRNRFGAQQDTIEVPEKDLVDKARQINIHNLSAFYDSELFRMNKFSHDLKRKMILQQF

SEQ ID NO: 7137 - protein, 58 aa, Homo sapiens
MSSGTELLWPGAALLVLLGVAASLCVRCSRPGAKRSEKIYQQRSLREDQQSFTGSRTY

SEQ ID NO: 7138 - protein, 128 aa, Homo sapiens
MNEQIVIGRLDEDIILPSSFERGSEVVIHWKYQDSYKVHSYYKGSDHLESQDPRYANRTSLFYNEIQNGNASLFFRRVSLLDEGIYTCYVGTAIQVITNKVVLKVGVFLTPVMKYEKRNTNSFLICSV

SEQ ID NO: 7139 - protein, 129 aa, Homo sapiens
LTPLHCAVIAHNAVVHELQRNQQPHSPEVQELLLKNKSLVDTIKCLIQMGAAVEAKAYNGNTALHVAASLQYRLTQLDAVRLLMRKGADPSTRNLENEQPVHLVPDGPVGEQIRRILKGKSIQQRAPPY

SEQ ID NO: 7140 - protein, 759 aa, Homo sapiens
MDLSALRVEEVQNVINAMQKILECPICLELIKEPVSTKCDHIFCKFCMLKLLNQKKGPSQCPLCKNDITKRSLQESTRFSQLVEELLKIICAFQLDTGLEYANSYNFAKKENNSPEHLKDEVSIIQSMGYRNRAKRLLQSEPENPSLQETSLSVQLSNLGTVRTLRTKQRIQPQKTSVYIELGSDSSEDTVNKATYCSVGDQELLQITPQGTRDEISLDSAKKAACEFSETDVTNTEHHQPSNNDLNTTEKRAAERHPEKYQGEAASGCESETSVSEDCSGLSSQSDILTTQQRDTMQHNLIKLQQEMAELEAVLEQHGSQPSNSYPSIISDSSALEDLRNPEQSTSEKVLTSQKSSEYPISQNPEGLSADKFEVSADSSTSKNKEPGVERSSPSKCPSLDDRWYMHSCSGSLQNRNYPSQEELIKVVDVEEQQLEESGPHDLTETSYLPRQDLEGTPYLESGISLFSDDPESDPSEDRAPESARVGNIPSSTSALKVPQLKVAESAQSPAAAHTTDTAGYNAMEESVSREKPELTASTERVNKRMSMVVSGLTPEEFMLVYKFARKHHITLTNLITEETTHVVMKTDAEFVCERTLKYFLGIAGGKWVVSYFWVTQSIKERKMLNEHDFEVRGDVVNGRNHQGPKRARESQDRKIFRGLEICCYGPFTNMPTDQLEWMVQLCGASVVKELSSFTLGTGVHPIVVVQPDAWTEDNGFHAIGQMCEAPVVTREWVLDSVALYQCQELDTYLIPQIPHSHY

SEQ ID NO: 7141 - protein, 53 aa, Homo sapiens
MAAPSGGVNCEEFAEFQLKWMQSELNVEEVVNDRSWKVFNERCRIHFKPPKNE

SEQ ID NO: 7142 - protein, 98 aa, Homo sapiens
MDLSALRVEEVQNVINAMQKILECPICLELIKEPVSTKCDHIFCKSLQESTRFSQLVEELLKIICAFQLDTGLEYANSYNFAKKENNSPEHLKDEVSI

SEQ ID NO: 7143 - protein, 31 aa, Homo sapiens
MPTSARCDDLEALKKKGCPPDDIENPRGSKD

SEQ ID NO: 7144 - protein, 164 aa, Homo sapiens
MKLYSLSVLYKGEAKVVLLKAAYDVSSFSFFQRSSVQEFMTFTSQLIVERSSKGTRASVKEQDYLCHVYVRNDSLAGVVIADNEYPSRVAFTLLEKVLDEFSKQVDRIDWPVGSPATIHYPALDGHLSRYQNPREADPMTKVQAELDETKIILARKQNSCCAIM

SEQ ID NO: 7145 - protein, 118 aa, Homo sapiens
SRFTVEQEIDLKDVLKALGITEIFIKDANLTGLSDNKEIFLSKAIHKSFLEVNEEGSEAAAVSGMIAISRMAVLYPQVIVDHPFFFLIRNRRTGTILFMGRVMHPETMNTSGHDFEEL

SEQ ID NO: 7146 - protein, 180 aa, Homo sapiens
MPRKGTQPSTARRREEGPPPPSPDGASSDAEPEPPSGRTESPATAAETASEELDNRSLEEILNSIPPPPPPAMTNEAGAPRLMITHIVNQNFKSYAGEKILGPFHKRFSCIIGPNGSGKSNVIDSMLFVFGYRAQKIRSKKLSVLIHNSDEHKDIQSCTVEVHFQKIIDKEGDDYEVIPN

SEQ ID NO: 7147 - protein, 216 aa, Homo sapiens
PVKLEFDVSDGATSKRAPPPRRLGERSGLKPPLRKAAVRQQKAPQEVEEDDGRSGAGEDPPMPASRGSYHLDWDKMDDPNFIPFGGDTKSGCSEAQPPESPETRLGQPAAEQLHAGPATEEPGPCLSQQLHSASAEDTPVVQLAAETPTAESKERALNSASTSLPTSCPGSEPVDYLEQFGTSSFKESALRKQSLYLKFDPLLRDSPGRPVPVATE

SEQ ID NO: 7148 - protein, 872 aa, Homo sapiens
MSQGILSPPAGLLSDDDVVVSPMFESTAADLGSVVRKNLLSDCSVVSTSLEDKQQVPSEDSMEKEDQGCVRIENVETLVLQAPKDSFALKSNERGIGQATHRFTFSQIFGPEVGQASFFNLTVKEMVKDVLKGQNWLIYTYGVTNSGKTHTIQGTIKDGGILPRSLALIFNSLQGQLHPTPDLKPLLSNEVIWLDSKQIRQEEMKKLSLLNGGLQEEELSTSLKRSVYIESRIGTSTSFDSGIAGLSSISQCTSSSQLDETSHRWAQPDTAPLPVPANIRFSIWISFFEIYNELLYDLLEPPSQQRKRQTLRLCEDQNGNPYVKDLNWIHVQDAEEAWKLLKVGRKNQSFASTHLNQNSSRSHSIFSIRILHLQGEGDIVPKISELSLCDLAGSERCKDQKSGERLKEAGNINTSLHTLGRCIAALRQNQQNRSKQNLVPFRDSKLTRVFQGFFTGRGRSCMIVNVNPCASTYDETLHVAKFSAIASQLVHAPPMQLGFPSLHSFIKEHSLQVSPSLEKGAKADTGLDDDIENEADISMYGKEELLQVVEAMKTLLLKERQEKLQLEMHLRDEICNEMVEQMQQREQWCSEHLDTQKELLEEMYEEKLNILKESLTSFYQEEIQERDEKIEELEALLQEARQQSVAHQQSGSELALRRSQRLAASASTQQLQEVKAKLQQCKAELNSTTEELHKYQKMLEPPPSAKPFTIDVDKKLEEGQKNIRLLRTELQKLGESLQSAERACCHSTGAGKLRQALTTCDDILIKQDQTLAELQNNMVLVKLDLRKKAACIAEQYHTVLKLQGQVSAKKRLGTNQENQQPNQQPPGKKPFLRNLLPRTPTCQSSTDCSPYARILRSRRSPLLKSGPFGKKY

SEQ ID NO: 7149 - protein, 131 aa, Homo sapiens
MFEEKASSPSGKMGGEEKPIGAGEEKQKEGGKKKNKEGSGDGGRAELNPWPEYIYTRLEMYNILKAEHDSILAEKAEKDSKPIKVTLPDGKQVDAESWKTTPYQIACGISHGKSLWWMFMLRSANRKWILL

SEQ ID NO: 7150 - protein, 55 aa, Homo sapiens
MGKCRGLRTARKLRSHRRDQKWHDKQYKKAHLGTALKANPFGGASHAKGIVLEKV

SEQ ID NO: 7151 - protein, 39 aa, Homo sapiens
MTEQMTLRGTLKGHNGWVTQIATTPQFPDMILSASRGTD

SEQ ID NO: 7152 - protein, 141 aa, Homo sapiens
MLLPNILLTEQLYDGYDEEYDCPILDEDRVVDELDNQMREGGVIVDYHGCDFFPERWFHIVFVLRTDTNVLYERLETRGYNEKKLTDNIQCEIFQVLYEEATASYKEEIVHQLPSNKPEELENNVDQILKWIEQWIKDHNS

SEQ ID NO: 7153 - protein, 144 aa, Homo sapiens
MSGELPPNINIKEPRWDQSTFIGRANHFFTVTDPRNILLTNEQLESARKIVHDYRQGIVPPGLTENELWRAKYIYDSAFHPDTGEKMILIGRMSAQVPMNMTITGCMMTFYRTTPAVLFWQWINQSFNAVVNYTNRSGDAPLTV

SEQ ID NO: 7154 - protein, 46 aa, Homo sapiens
MKSAGGSGRSLLPSPRVCEEQRCEEEVFPLAMNYLDRYLSCVPTRK

SEQ ID NO: 7155 - protein, 132 aa, Homo sapiens
MRQDSLEPVLRDPCYLINEGICNRNIDQTMLSILLFFHSASGASVVAIDNKIEQAMDLVKNHLMYAVREEVEILKEQIRELVEKNSQLERENTLLKTLASPEQLEKFQSCLSPEEPAPESPQVPEAPGGSAV

SEQ ID NO: 7156 - protein, 1138 aa, Homo sapiens
MGDFAAPAAAANGSSICINSSLNSSLGGAGIGVNNTPNSTPAAPSSNHPAAGGCGGSGGPGGGSAAVPKHSTVVERLRQRIEGCRRHHVNCENRYQQAQVEQLELERRDTVSLYQRTLEQRAKKSGAGTGKQQHPSKPQQDAEAASAEQRNHTLIMLQETVKRKLEGARSPLNGDQQNGACDGNFSPTSKRIRKDISAGMEAINNLPSNMPLPSASPLHQLDLKPSLPLQNSGTHTPGLLEDLSKNGRLPEIKLPVNGCSDLEDSFTILQSKDLKQEPLDDPTCIDTSETSLSNQNKLFSDINLNDQEWQELIDELANTVPEDDIQDLFNEDFEEKKEPEFSQPATETPLSQESASVKSDPSHSPFAHVSMGSPQARPSSSGPPFSTVSTATSLPSVASTPAAPNPASSPANCAVQSPQTPNQAHTPGQAPPRPGNGYLLNPAAVTVAGSASGPVAVPSSDMSPAEQLKQMAAQQQQRAKLMQQKQQQQQQQQQQQQQQQQQQQQQQQQQHSNQTSNWSPLGPPSSPYGAAFTAEKPNSPMMYPQAFNNQNPIVPPMANNLQKTTMNNYLPQNHMNMINQQPNNLGTNSLNKQHNILTYGNTKPLTHFNADLSQRMTPPVANPNKNPLMPYIQQQQQQQQQQQQQQQQQQPPPPQLQAPRAHLSEDQKRLLLMKQKGVMNQPMAYAALPSHGQEQHPVGLPRTTGPMQSSVPPGSGGMVSGASPAGPGFLGSQPQAAIMKQMLIDQRAQLIEQQKQQFLREQRQQQQQQQQQILAEQQLQQSHLPRQHLQPQRNPYPVQQVNQFQGSPQDIAAVRSQAALQSMRTSRLMAQNAGMMGIGPSQNPGTMATAAAQSEMGLAPYSTTPTSQPGMYNMSTGMTQMLQHPNQSGMSITHNQAQGPRQPASGQGVGMVSGFGQSMLVNSAITQQHPQMKGPVGQALPRPQAPPRLQSLMGTVQQGAQSWQQRSLQGMPGRTSGELGPFNNGASYPLQAGQPRLTKQHFPQGLSQSVVDANTGTVRTLNPAAMGRQMMPSLPGQQGTSQARPMVMSGLSQGVPGMPAFSQPPAQQQIPSGSFAPSSQSQAYERNAPQDVSYNYSGDGAGGSFPGLPDGADLVDSIIKGGPGDEWMQELDELFGNP

SEQ ID NO: 7157 - protein, 232 aa, Homo sapiens
MLMFDPVPVKQEAMDPVSVSYPSNYMESMKPNKYGVIYSTPLPEKFFQTPEGLSHGIQMEPVDLTVNKRSSPPSAGNSPSSLKFPSSHRRASPGLSMPSSSPPIKKYSPPSPGVQPFGVPLSMPPVMAAALSRHGIRSPGILPVIQPVVVQPVPFMYTSHLQQPLMVSLSEEMENSSSSMQVPVIESYEKPISQKKIKIEPGIEPQRTDYYPEEMSPPLMNSVSPPQALLQE

SEQ ID NO: 7158 - protein, 404 aa, Homo sapiens
MISLIIPPKDQISRVAKMLADEFGTASNIKSRVNRLSVLGAITSVQQRLKLYNKVPPNGLVVYCGTIVTEEGKEKKVNIDFEPFKPINTSLYLCDNKFHTEALTALLSDDSKFGFIVIDGSGALFGTLQGNTREVLHKFTVDLPKKHGRGGQSALRFARLRMEKRHNYVRKVAETAVQLFISGDKVNVAGLVLAGSADFKTELSQSDMFDQRLQSKVLKLVDISYGGENGFNQAIELSTEVLSNVKFIQEKKLIGRYFDEISQDTGKYCFGVEDTLKALEMGAVEILIVYENLDIMRYVLHCQGTEEEKILYLTPEQEKDKSHFTDKETGQEHELIESMPLLEWFANNYKKFGATLEIVTDKSQEGSQFVKGFGGIGGILRYRVDFQGMEYQGGDDEFFDLDDY

SEQ ID NO: 7159 - protein, 160 aa, Homo sapiens
MEPLTFRDVAIEFSPEEWKCLDPAQQNLYRDVMLENYRNLVSLAMCSHFTQDFLPVQGIEDSFHKLILRRYEKCGHDNLQLRKGCKSMNVCKVQKGVYNGINKCLSNTQSKIFQCNARVKVFSKFANSNKDKTRHTGEKHFKCNECGKSFQKFSDLTQHK

SEQ ID NO: 7160 - protein, 79 aa, Homo sapiens
MESEDLSGRELTIDSIMNKVRDIKNKFKNEDLTDELSLNKISADTTECRLHDGRVFVCYIHRTLNGVWHMITRELLTKL

SEQ ID NO: 7161 - protein, 194 aa, Homo sapiens
MWKLTRDETNYGIPQRALRGHSHFVSDVVISSDGQFALSGSWDGTLRLWDLTTGTTTRRFVGHTKDVLSVAFSSDNRQIVSGSRDKTIKLWNTLGVCKYTVQDESHSEWVSCVRFSPNSSNPIIVSCGWDKLVKVWNLANCKLKTNHIGHTGYLNTVTVSPDGSLCASGGKDGQAMLWDLNEGKHLYTLDGGDI

SEQ ID NO: 7162 - protein, 163 aa, Homo sapiens
MAQVLRGTVTDFPGFDERADAETLRKAMKGLGTDEESILTLLTSRSNAQRQEISAAFKTLFGRDLLDDLKSELTGKFEKLIVALMKPSRLYDAYELKHALKGAGTNEKVLTEIIASRTPEELRAIKQVYEEEYGSSLEDDVVGDTSGYYQRMLVVLLQVLRGD

SEQ ID NO: 7163 - protein, 365 aa, Homo sapiens
AFEKIPSETLNRILGDPEALRDLLNNHILKSAMCAEAIVAGLSVETLEGTTLEVGCSGDMLTINGKAIISNKDILATNGVIHYIDELLIPDSAKTLFELAAESDVSTAIDLFRQAGLGNHLSGSERLTLLAPLNSVFKDGTPPIDAHTRNLLRNHIIKDQLASKYLYHGQTLETLGGKKLRVFVYRNSLCIENSCIAAHDKRGRYGTLFTMDRVLTPPMGTVMDVLKGDNRFSMLVAAIQSAGLTETLNREGVYTVFAPTNEAFRALPPRERSRLLGDAKELANILKYHIGDEILVSGGIGALVRLKSLQGDKLEVSLKNNVVSVNKEPVAEPDIMATNGVVHVITNVLQPPAPVYQKLLERMKH

SEQ ID NO: 7164 - protein, 312 aa, Homo sapiens
LSPDPWKRDAKEKLEKQQQMHIVDMLSKEIQELQSKPDRSAEESDRLRKLMLEWQFQKRLQESKQKDEDDEEEEDDDVDTMLIMQRLEAERRARDEERRRQQQLEEMRKREAEDRARQEEERRRQEEERTKRDAEEKRRQEEGYYSRLEAERRRQHDEAARRLLEPEAPGLCRPPLPRDYEPPSPSPAPGAPPPPPQRNASYLKTQVLSPDSLFTAKFVAYNEEEEEEDCSLAGPNSYPGSTGAAVGAHDACRDAKEKRSKSQDADSPGSSGAPENLTFKERQRLFSQGQDVSNKVKASRKLTELENELNTK

SEQ ID NO: 7165 - protein, 124 aa, Homo sapiens
MAGVSFSGHRLELLAAYEEVIREESAADWALYTYEDGSDDLKLAASGEGGLQELSGHFENQKVMYGFCSVKDSQAALPKYVLINWVGEDVPDARKCACASHVAKVAEFFQGVDVIVNASSVEDI

SEQ ID NO: 7166 - protein, 988 aa, Homo sapiens
METKGYHSLPEGLDMERRWGQVSQAVERSSLGPTERTDENNYMEIVNVSCVSGAIPNNSTQGSSKEKQELLPCLQQDNNRPGILTSDIKTELESKELSATVAESMGLYMDSVRDADYSYEQQNQQGSMSPAKIYQNVEQLVKFYKGNGHRPSTLSCVNTPLRSFMSDSGSSVNGGVMRAVVKSPIMCHEKSPSVCSPLNMTSSVCSPAGINSVSSTTASFGSFPVHSPITQGTPLTCSPNVENRGSRSHSPAHASNVGSPLSSPLSSMKSSISSPPSHCSVKSPVSSPNNVTLRSSVSSPANINNSRCSVSSPSNTNNRSTLSSPAASTVGSICSPVNNAFSYTASGTSAGSSTLRDVVPSPDTQEKGAQEVPFPKTEEVESAISNGVTGQLNIVQYIKPEPDGAFSSSCLGGNSKINSDSSFSVPIKQESTKHSCSGTSFKGNPTVNPFPFMDGSYFSFMDDKDYYSLSGILGPPVPGFDGNCEGSGFPVGIKQEPDDGSYYPEASIPSSAIVGVNSGGQSFHYRIGAQGTISLSRSARDQSFQHLSSFPPVNTLVESWKSHGDLSSRRSDGYPVLEYIPENVSSSTLRSVSTGSSRPSKICLVCGDEASGCHYGVVTCGSCKVFFKRAVEGKCSWQHNYLCAGRNDCIIDKIRRKNCPACRLQKCLQAGMNLGARKSKKLGKLKGIHEEQPQQQQPPPPPPPPQSPEEGTTYIAPAKEPSVNTALVPQLSTISRALTPSPVMVLENIEPEIVYAGYDSSKPDTAENLLSTLNRLAGKQMIQVVKWAKVLPGFKNLPLEDQITLIQYSWMCLSSFALSWRSYKHTNSQFLYFAPDLVFNEEKMHQSAMYELCQGMHQISLQFVRLQLTFEEYTIMKVLLLLSTIPKDGLKSQAAFEEMRTNYIKELRKMVTKCPNNSGQSWQRFYQLTKLLDSMHDLVSDLLEFCFYTFRESHALKVEFPAMLVEIISDQLPKVESGNAKPLYFHRK

SEQ ID NO: 7167 - protein, 175 aa, Homo sapiens
VCEEQRCEEEVFPLAMNYLDRYLSCVPTRKAQLQLLGAVCMLLASKLRETTPLTIEKLCIYTDHAVSPRQLRDWEVLVLGKLKWDLAAVIAHDFLAFILHRLSLPRDRQALVKKHAQTFLALCATDYTFAMYPPSMIATGSIGAAVQGLGACSMSGDELTELLAGITGTEVVSAG

SEQ ID NO: 7168 - protein, 37 aa, Homo sapiens
MEFSIKQSPLSVQSVVKCIKMKQAPEILGSANGKTPS

SEQ ID NO: 7169 - protein, 264 aa, Homo sapiens
MPDSAPAMADKMDMSLDDIIKLNRSQRGGRGGGRGRGRAGSQGGRGGGAQAAARVNRGGGPIRNRPAIARGAAGGGGRNRPAPYSRPKQLPDKWQHDLFDSGFGGGAGVETGGKLLVSNLDFGVSDADIQELFAEFGTLKKAAVHYDRSGRSLGTADVHFERKADALKAMKQYNGVPLDGRPMNIQLVTSQIDAQRRPAQSVNRGGMTRNRGAGGFGGGGGTRRGTRGGARGRGRGAGRNSKQQLSAEELDAQLDAYNARMDTS

SEQ ID NO: 7170 - protein, 49 aa, Homo sapiens
MTPRHHCEAYSSAGEEEEEEEEEKNVSPSQRDEVIQWLAKLKYQFNLYP

SEQ ID NO: 7171 - protein, 86 aa, Homo sapiens
MEADIITNLRCRLKEAEEERLKAAQYGLQLVESQNELQNQLDKCRNEMMTMTESYEQEKYTLQREVELKSRMLESLSCECEAIKQQ

SEQ ID NO: 7172 - protein, 150 aa, Homo sapiens
MESEDLSGRELTIDSIMNKVRDIKNKFKNEDLTDELSLNKISADTTDNSGTVNQIMMMANNPEDWLSLLLKLEKNSVPLSDALLNKLIGRYSQAIEALPPDKYGQNESFARIQVRFAELKAIQEPDDARDYFQMARANCKKFAFVHISFA

SEQ ID NO: 7173 - protein, 90 aa, Homo sapiens
MDSFKVVLEGPAPWGFRLQGGKDFNVPLSISRLTPGGKAAQAGVAVGDWVLSIDGENAGSLTHIEAQNKIRACGERLSLGLSRAQPVQSK

SEQ ID NO: 7174 - protein, 892 aa, Homo sapiens
MATCIGEKIEDFKVGNLLGKGSFAGVYRAESIHTGLEVAIKMIDKKAMYKAGMVQRVQNEVKIHCQLKHPSILELYNYFEDSNYVYLVLEMCHNGEMNRYLKNRVKPFSENEARHFMHQIITGMLYLHSHGILHRDLTLSNLLLTRNMNIKIADFGLATQLKMPHEKHYTLCGTPNYISPEIATRSAHGLESDVWSLGCMFYTLLIGRPPFDTDTVKNTLNKVVLADYEMPSFLSIEAKDLIHQLLRRNPADRLSLSSVLDHPFMSRNSSTKSKDLGTVEDSIDSGHATISTAITASSSTSISGSLFDKRRLLIGQPLPNKMTVFPKNKSSTDFSSSGDGNSFYTQWGNQETSNSGRGRVIQDAEERPHSRYLRRAYSSDRSGTSNSQSQAKTYTMERCHSAEMLSVSKRSGGGENEERYSPTDNNANIFNFFKEKTSSSSGSFERPDNNQALSNHLCPGKTPFPFADPTPQTETVQQWFGNLQINDPLSEQSKTRGMEPPWGYQNRTLRSITSPLVAHRLKPIRQKTKKAVVSILDSEEVCVELVKEYASQEYVKEVLQISSDGNTITIYYPNGGRGFPLADRPPSPTDNISRYSFDNLPEKYWRKYQYASRFVQLVRSKSPKITYFTRYAKCILMENSPGADFEVWFYDGVKIHKTEDFIQVIEKTGKSYTLKSESEVNSLKEEIKMYMDHANEGHRICLALESIISEEERKTRSAPFFPIIIGRKPGSTSSPKALSPPPSVDSNYPTRERASFNRMVMHSAASPTQAPILNPSMVTNEGLGLTTTASGTDISSNSLKDCLPKSAQLLKSVFVKNVGWATQLTSGAVWVQFNDGSQLVVQAGVSSISYTSPNGQTTRYGENEKLPDYIKQKLQCLSSILLMFSNPTPNFH

SEQ ID NO: 7175 - protein, 565 aa, Homo sapiens
MDLEAWDPHLEPDAEAMVDGNTKKEGDLIAAQARLKDLEALLNSKEAALSTALSEKRTLEGELHDLRGQVAKLEAALGEAKKQLQDEMLRRVDAENRLQTMKEELDFQKNIYSEELRETKRRHETRLVEIDNGKQREFESRLADALQELRAQHEDQVEQYKKELEKTYSAKLDNARQSAERNSNLVGAAHEELQQSRIRIDSLSAQLSQLQKQLAAKEAKLRDLEDSLARERDTSRRLLAEKEREMAEMRARMQQQLDEYQELLDIKLALDMEIHAYRKLLEGEEERLRLSPSPTSQRSRGRASSHSSQTQGGGSVTKKRKLESTESRSSFSQHARTSGRVAVEEVDEEGKFVRLRNKSNEDQSMGNWQIKRQNGDDPLLTYRFPPKFTLKAGQVVTIWAAGAGATHSPPTDLVWKAQNTWGCGNSLRTALINSTGEEVAMRKLVRSVTVVEDDEDEDGDDLLHHHHGSHCSSSGDPAEYNLRSRTVLCGTCGQPADKASASGSGAQVGGPISSGSSASSVTVTRSYRSVGGSGGGSFGDNLVTRSYLLGNSSPRTQSPQNCSIM

SEQ ID NO: 7176 - protein, 137 aa, Homo sapiens
DESHSEWVSCVRFSPNSSNPIIVSCGWDKLVKVWNLANCKLKTNHIGHTGYLNTVTVSPDGSLCASGGKDGQAMLWDLNEGKHLYTLDGGDIINALCFSPNRYWLCAATGPSIKIWTLFAGYTDNLVRVWQVTIGTR

SEQ ID NO: 7177 - protein, 602 aa, Homo sapiens
MAVYVGMLRLGRLCAGSSGVLGARAALSRSWQEARLQGVRFLSSREVDRMVSTPIGGLSYVQGCTKKHLNSKTVGQCLETTAQRVPEREALVVLHEDVRLTFAQLKEEVDKAASGLLSIGLCKGDRLGMWGPNSYAWVLMQLATAQAMELEYVLKKVGCKALVFPKQFKTQQYYNVLKQICPEVENAQPGALKSQRLPDLTTVISVDAPLPGTLLLDEVVAAGSTRQHLDQLQYNQQFLSCHDPINIQFTSGTTGSPKGATLSHYNIVNNSNILGERLKLHEKTPEQLRMILPNPLYHCLGSVAGTMMCLMYGATLILASPIFNGKKALEAISRERGTFLYGTPTMFVDILNQPDFSSYDISTMCGGVIAGSPAPPELIRAIINKINMKDLVVAYGTTENSPVTFAHFPEDTVEQKAESVGRIMPHTEARIMNMEAGTLAKLNTPGELCIRGYCVMLGYWGEPQKTEEAVDQDKWYWTGDVATMNEQGFCKIVGRSKDMIIRGGENIYPAELEDFFHTHPKVQEVQVVGVKDDRMGEEICACIRLKDGEETTVEEIKAFCKGKISHFKIPKYIVFVTNYPLTISGKIQKFKLREQMERHLNL

SEQ ID NO: 7178 - protein, 137 aa, Homo sapiens
MNGDSRAAVVTSPPPTTAPHKERYFDRVDENNPEYLRERNMAPDLRQDFNMMEQKKRVSMILQSPAFCEELESMIQEQFKKGKNPTGLLALQQIADFMTTNVPNVYPAAPQGGMAALNMSLGMVTPVNDLRGSDSIA

SEQ ID NO: 7179 - protein, 32 aa, Homo sapiens
MAELGEADEAELQRLVAAEQQKAQFTAQATCP

SEQ ID NO: 7180 - protein, 56 aa, Homo sapiens
MSGELPPNINIKEPRWDQSTFIGRANHFFTVTDPRNILLTNEQLESARKIVHDYRK

SEQ ID NO: 7181 - protein, 236 aa, Homo sapiens
MPLHSSLGDRARLHLKKKKSYQDKTIIMWKLTRDETNYGIPQRALRGHSHFVSDVVISSDGQFALSGSWDGTLRLWDLTTGTTTRRFVGHTKDVLSVAFSSDNRQIVSGSRDKTIKLWNTLGVCKYTVQDESHSEWVSCVRFSPNSSNPIIVSCGWDKLVKVWNLANCKLKTNHIGHTGYLNTVTVSPDGSLCASGGKDGQAMLWDLNEGKHLYTLDGGDIINALCFSPNRYWLCA

SEQ ID NO: 7182 - protein, 173 aa, Homo sapiens
MDCLLELSATDTKIEESSSQSFVASENQVGAAESKIMEKRPEEESEDSKMDSFLDMQLTEDLDSLIQNAFEKLNSSPDDQVYSFLPSQDVNSFNDSSEFINPDSSNMTPIFSTQNMNLNGENLENSGSTLSLNPLPSHSVLNESKCFIKDNTLALESNYPEDSLLSSSLNVAS

SEQ ID NO: 7183 - protein, 100 aa, Homo sapiens
MNTEMYQTPMEVAVYQLHNFSISFFSSLLGGDVVSVKLDNSASGASVVAIDNKIEQAMVSGITASFSSPDLAAAYVTLGRIEGMGEKALSQNPEEADSLP

SEQ ID NO: 7184 - protein, 123 aa, Homo sapiens
MGKCRGLRTARKLRSHRRDQKWHDKQYKKAHLGTALKANPFGGASHAKGIVLEKVGVEAKQPNSAIRKCVRVQLIKNGKKITAFVPNDGCLNFIEVSISTLSYLLFLGWPPSHFYLMQGSFLT

SEQ ID NO: 7185 - protein, 555 aa, Homo sapiens
MGKAFKVMNELRSKQLLCDVMIVAEDVEIEAHRVVLAACSPYFCAMFTGDMSESKAKKIEIKDVDGQTLSKLIDYIYTAEIEVTEENVQVLLPAASLLQLMDVRQNCCDFLQSQLHPTNCLGIRAFADVHTCTDLLQQANAYAEQHFPEVMLGEEFLSLSLDQVCSLISSDKLTVSSEEKVFEAVISWINYEKETRLEHMAKLMEHVRLPLLPRDYLVQTVEEEALIKNNNTCKDFLIEAMKYHLLPLDQRLLIKNPRTKPRTPVSLPKVMIVVGGQAPKAIRSVECYDFEEDRWDQIAELPSRRCRAGVVFMAGHVYAVGGFNGSLRVRTVDVYDGVKDQWTSIASMQERRSTLGAAVLNDLLYAVGGFDGSTGLASVEAYSYKTNEWFFVAPMNTRRSSVGVGVVEGKLYAVGGYDGASRQCLSTVEQYNPATNEWIYVADMSTRRSGAGVGVLSGQLYATGGHDGPLVRKSVEVYDPGTNTWKQVADMNMCRRNAGVCAVNGLLYVVGGDDGSCNLASVEYYNPVTDKWTLLPTNMSTGRSYAGVAVIHKSL

SEQ ID NO: 7186 - protein, 129 aa, Homo sapiens
MFEEKASSPSGKMGGEEKPIGAGEEKQKEGGKKKNKEGSGDGGRAELNPWPEYIYTRLEMYNILKAEHDSILAEKAEKDSKPIKVTLPDGKQVDAESWKTTPYQIACGISQGLADNTVIAKVNNVVWDL

SEQ ID NO: 7187 - protein, 82 aa, Homo sapiens
MENGCLLNYLRENKGKLRKEMLLSVCQDICEGMEYLERNGYIHRDLAARNCLVSSTCIVKISDFGMTRSFNVGSFYRRKNAF

SEQ ID NO: 7188 - protein, 138 aa, Homo sapiens
MKLIILEHYSQASEWAAKYIRNRIIQFNPGPEKYFTLGLPTGSTPLGCYKKLIEYYKNGDLSFKYVKTFNMDEYVGLPRDHPESYHSFMWNNFFKHIDIHPENTHILDGNAVDLQAECDAFEEKIKAAGGIELFVGGI

SEQ ID NO: 7189 - protein, 116 aa, Homo sapiens
MTEQMTLRGTLKGHNGWVTQIATTPQFPDMILSASRDKTIIMWKLTRDETNYGIPQRALRGHSHFVSDVVISSDGQFALSGSWDGTLRLWDLTTQGHHHEAICGPYQGCAECGLLL

SEQ ID NO: 7190 - protein, 1308 aa, Homo sapiens
MGSKDHAVFFREMTQLILNEMPKAGYSSILNDFVESNFFVIDGDSLLVTCLGVKSFKWGQNLHFFYLVECYLVDLLSNGGQFTIVFFKDAEYAYFDFPELLSLRTALILHLQHNTNIDVQTEFSGCLSQDWKLFLEQHYPYFLIVSEEGLSDLQTYLFNFLIIHSWGMKVNVVLSSGHESDTLRFYAYTMESTDRNQTFSKENETVIQSAYKSLIQHLEEIRVLVLATHFEHLKWNDMMEEAYQTLFLLQHLWSEGSDIQRVLCVTSCSLSLRMYHRVLVHSNCLSLQEVEDFCRLRCLCVAFQLHLPLSQRACSRVITCSWIRNSDSFLKMNKWCEYFILSNLNVFGCWNLNLNHVSDLYDEQLLKNIAFYYEFESTQEPHLNLGDSIRRDYEDLWNVVSHLVKEFNVGKSFPLRTTRRHFLRQEKSVIQEISLEKMPSVGFIPMTSAVIDEFVGDMMKDLPILKSDDPVVPSLFKQKTSDELLHWHAQRLLSDDYDRIKCHVDEQSRDPHVLDFLKKIQDYQQFYGKSLESISTKVIVTQTTRPKEDSSGASGEILQNTKPHQITKKSKKKSFLKEDQNKAQQNDDLLFSIEEEMKNNLHSGIRKLEDYLTSCASNSVKFGVEMLGLIACFKAWKKHCRGEGKISKDLSIAVQMMKRIHSLLERYPEILEAEHHQYIAKCLKYLGFNDLANSLDPTLIGDDKNKKKYSIDIGPARFQLQYMGHYLIRDERKDRDPRVQDFIPNAWQQELLDVVDKNESAVIVAPTSSGKTYASYYCMEKVLRESDVGVVVYVAPAKSLVGQVAATVENRFTKTLPAGRTLCGAFTRDYCHNVLNCQVLITVPECFEILLLAPHRQKWVERIRYVIFDEVHYLGREVGAKFWELLLVIIRCPFLVLSATINNPNLLTKWLQSVKQYWKQADKIMEEKCISEKQADKCLNFLQDHSYKNQSYEVRLVLCGERYNDLEKHICSVKHDDVYFDHFHPCAALTTDIIEKYGFPPDLTLTPQESIQLYDTMAQVWETWPRAQELCPEEFILFKNKIVIKKLDARKYEENLKAELTNWIKNGQVKKVKRVLKNLSPDSLSSSKDMVKMFPLLVEKLRQMDKLPAIFFLFKNDDVGKRAGSVCTFLEKTETKSHPHTECHSYVFAIDEVLEKVRKTQKRISTKKNPKKAEKLERKKVYRAEYINFLENLKILEISEDCTYADVKALHTEITRNKDSTLERVLPRVRFTRHGKELKALAQRGIGYHHSSMYFKEKEFVEILFVKGLIRVVTATETLALGIHMPCKSVVFAQDSVYLDALNYRQIM

SEQ ID NO: 7191 - protein, 423 aa, Homo sapiens
MKQDVLNCTEGPIHSNGTSMISLIIPPKDQISRVAKMLADEFGTASNIKSRVNRLSVLGAITSVQQRLKLYNKVPPNGLVVYCGTIVTEEGKEKKVNIDFEPFKPINTSLYLCDNKFHTEALTALLSDDSKFGFIVIDGSGALFGTLQGNTREVLHKFTVDLPKKHGRGGQSALRFARLRMEKRHNYVRKVAETAVQLFISGDKVNVAGLVLAGSADFKTELSQSDMFDQRLQSKVLKLVDISYGGENGFNQAIELSTEVLSNVKFIQEKKLIGRYFDEISQDTGKYCFGVEDTLKALEMGAVEILIVYENLDIMRYVLHCQGTEEEKILYLTPEQEKDKSHFTDKETGQEHELIESMPLLEWFANNYKKFGATLEIVTDKSQEGSQFVKGFGGIGGILRYRVDFQGMEYQGGDDEFFDLDDY

SEQ ID NO: 7192 - protein, 95 aa, Homo sapiens
MADDPSAADRNVEIWKIKKLIKSLEAARGNGTSMISLIIPPKDQISRVAKMLADEFGTASNIKSRVNRLSVLGAITSVQQRLKLYNKGSYSTTFR

SEQ ID NO: 7193 - protein, 118 aa, Homo sapiens
MFEEKASSPSGKMGGEEKPIGAGEEKQKEGGKKKNKEGSGDGGRAELNPWPEYIYTRLEMYNILKAEHDSILAEKAEKDSKPIKVTLPDGKQVDAESWKTTPYQIACGIRPGRQHRYC

SEQ ID NO: 7194 - protein, 273 aa, Homo sapiens
ISSDGQFALSGSWDGTLRLWDLTTGTTTRRFVGHTKDVLSVAFSSDNRQIVSGSRDKTIKLWNTLGVCKYTVQDESHSEWVSCVRFSPNSSNPIIVSCGWDKLVKVWNLANCKLKTNHIGHTGYLNTVTVSPDGSLCASGGKDGQAMLWDLNEGKHLYTLDGGDIINALCFSPNRYWLCAATGPSIKIWDLEGKIIVDELKQEVISTSSKAEPPQCTSLAWSADGQEYITTTYKLAVEMRAVSYSLPGVVAHAYWRLRLCLLATRTTWCECGR

SEQ ID NO: 7195 - protein, 230 aa, Homo sapiens
MEADIITNLRCRLKEAEEERLKAAQYGLQLVESQNELQNQLDKCRNEMMTMTESYEQEKYTLQREVELKSRMLESLSCECEAIKQQQKMHLEKLEEQLSRSHGQEVNELKTKIEKLKVELDEARLSEKQLKHQVDHQKELLSCKSEELRVMSERVQESMSSEMLALQIELTEMESMKTTLKEEVNELQYRQEQLELLITNLMRQVDRLKEEKEEREKEAVSYYNALEKAR

SEQ ID NO: 7196 - protein, 119 aa, Homo sapiens
ISRLTPGGKAAQAGVAVGDWVLSIDGENAGSLTHIEAQNKIRACGERLSLGLSRAQPVQSKPQKAPHFHPGPHLTLPARPARLCLCPGLRPRRGPSAVHLCTQRLPQQDGPALWGAPAR

SEQ ID NO: 7197 - protein, 433 aa, Homo sapiens
MGRKKIQITRIMDERNRQVTFTKRKFGLMKKAYELSVLCDCEIALIIFNSTNKLFQYASTDMDKVLLKYTEYNEPHESRTNSDIVETLRKKGLNGCDSPDPDADDSVGHSPESEDKYRKINEDIDLMISRQRLCAVPPPNFEMPVSIPVSSHNSLVYSNPVSSLGNPNLLPLAHPSLQRNSMSPGVTHRPPSAGNTGGLMGGDLTSGAGTSAGNGYGNPRNSPGLLVSPGNLNKNMQAKSPPPMNLGMNNRKPDLRVLIPPGSKNTMPSVNQRINNSQSAQSLATPVVSVATPTLPGQGMGGYPSAISTTYGTEYSLSSADLSSLSGFNTASALHLGSVTGWQQQHLHNMPPSALSQLGDRTTTPSRYPQHTRHEAGRSPVDSLSSCSSSYDGSDREDHRNEFHSPIGLTRPSPDERESPSVKRMRLSEGWAT

SEQ ID NO: 7198 - protein, 1706 aa, Homo sapiens; identical to SEQ ID NO: 4502

SEQ ID NO: 7199 - protein, 50 aa, Homo sapiens
MYNILKAEHDSILAEKAEKDSKPIKVTLPDGKQVDAESWKTTPYQIACGI

SEQ ID NO: 7200 - protein, 119 aa, Homo sapiens
MAQSKLDCRSPVGLDCCNCCLDLAHRSGLQRGSSGENNNPGSPTVSNFRQLQEKLVFENLNTDKLNSIMRQDSLEPVLRDPCYLINEGICNRNIDQTMLSILLFFHSASGASVVAIDNK

SEQ ID NO: 7201 - protein, 155 aa, Homo sapiens
MELPAVNLKVILLGHWLLTTCFWVACWPPSSWTSCTSASSTRGSASRTRAALAWAWPSSACCSSRSPAASSTTCTGSAGVSSWSTLVSLGLLRTVVPTRRLTQQRRPQIPLQSQRAGVKMPEGTEASHAAPGPAPGLPRAWEVVLGMLLTSVSWT

SEQ ID NO: 7202 - protein, 52 aa, Homo sapiens
MGTTGLESLSLGDRGAAPTVTSSERLVPDPPNDLRQNGNTCALEVSGEVSFS

SEQ ID NO: 7203 - protein, 61 aa, Homo sapiens
AFDEYGRPFLIIKDQDRKSRLMGLEALKSHIMAAKAVANTMRTSLGPNDCQADGGTVQVSG

SEQ ID NO: 7204 - protein, 269 aa, Homo sapiens
MTEQMTLRGTLKGHNGWVTQIATTPQFPDMILSASRDKTIIMWKLTRDETNYGIPQRALRGHSHFVSDVVISSDGQFALSGSWDGTLRLWDLTTQDESHSEWVSCVRFSPNSSNPIIVSCGWDKLVKVWNLANCKLKTNHIGHTGYLNTVTVSPDGSLCASGGKDGQAMLWDLNEGKHLYTLDGGDIINALCFSPNRYWLCAATGPSIKIWDLEGKIIVDELKQEVISTSSKAEPPQCTSLAWSADGQTLFAGYTDNLVRVWQVTIGTR

SEQ ID NO: 7205 - protein, 74 aa, Homo sapiens
MTKGTSSFGKRRNKTHTLCRRCGSKAYHLQKSTCGKCGYPAKRKRKCMDSVKEQHLNPRGQLLQHPVHLKNVND

SEQ ID NO: 7206 - protein, 317 aa, Homo sapiens
MAGVSFSGHRLELLAAYEEVIREESAADWALYTYEDGSDDLKLAASGGGLQELSGHFENQKVMYGFCSVKDSQAALPKYVLINWVGEDVPDARKCACASHVAKVAEFFQGVDVIVNASSVEDIDAGAIGQRLSNGLARLSSPVLHRLRLREDENAEPVGTTYQKTDAAVEMKRINREQFWEQAKKEEELRKEEERKKALDERLRFEQERMEQERQEQEERERRYREREQQIEEHRRKQQTLEAEEAKRRLKEQSIFGDHRDEEEETHMKKSESEVEEAAAIIAQRPDNPREFFKQQERVASASAGSCDVPSPFNHRP

SEQ ID NO: 7207 - protein, 392 aa, Homo sapiens
MEFSIKQSPLSVQSVVKCIKMKQAPEILGSANGKTPSCEVNRECSVFLSKAQLSSSLQEGVMQKFNGHDALPFIPADKLKDLTSRVFNGEPGAHDAKLRFESQEMKGIGTPPNTTPIKNGSPEIKLKITKTYMNGKPLFESSICGDSAADVSQSEENGQKPENKARRNRKRSIKYDSLLEQGLVEAALVSKISSPSDKKIPAKKESCPNTGRDKDHLLKYNVGDLVWSKVSGYPWWPCMVSADPLLHSYTKLKGQKKSARQYHVQFFGDAPERAWIFEKSLVAFEGEGQFEKLCQESAKQAPTKAEKIKLLKPISGKLRAQWEMGIVQAEEAASMSVEERKAKFTFLYVGDQLHLNPQVAKEAGIAAESLGEMAESSGVSEEAAENPKSVRE

SEQ ID NO: 7208 - protein, 220 aa, Homo sapiens
MAGNKGRGRAAYTFNIEAVGFSKGEKLPDVVLKPPPLFPDTDYKPVPLKTGEGEEYMLALKQELRETMKRMPYFIETPEERQDIERYSKRYMKVYKEEWIPDWRRLPREMMPRNKCKKAGPKPKKAKDAGKGTPLTNTEDVLKKMEELEKRGDGEKSDEENEEKEGSKEKSKEGDDDDDDDAAEQEEYDEEEQEEENDYINSYFEDGDDFGADSDDNMDE

SEQ ID NO: 7209 - protein, 194 aa, Homo sapiens
FKNDDVGKRAGSVCTFLEKTETKSHPHTECHSYVFAIDEVLEKVRKTQKRITKKNPKKAEKLERKKVYRAEYINFLENLKILEISEDCTYADVKALHTEITRNKDSTLERVLPRVRFTRHGKELKALAQRGIGYHHSSMYFKEKEFVEILFVKGLIRVVTATETLALGIHMPCKSVVFAQDSVYLDALNYRQIM

SEQ ID NO: 7210 - protein, 159 aa, Homo sapiens
MSQGILSPPAGLLSDDDVVVSPMFESTAADLGSVVRKNLLSDCSVVSTSLEDKQQVPSEDSMEKVKVYLRVRPLLPSELERQEDQGCVRIENVETLVLQAPKDSFALKSNERGIGQATHRFTFSQIFGPEVGQASFFNLTVKEMVKDVLKGQNWLIYTY

SEQ ID NO: 7211 - protein, 165 aa, Homo sapiens
MMEIFSETKDVFQLKDLEKIAPKEKGITAMSVKEVLQSLVDDGMVDCERIGTSNYYWAFPSKALHARKHKLEVLESQLSEGSQKHASLQKSIEKAKIGRCETEERTRLAKELSSLRDQREQLKAEVEKYKDCDPQVVEEIRQANKVAKEAANRWTGMYYNNADKL

SEQ ID NO: 7212 - protein, 393 aa, Homo sapiens
MTAEDSTAAMSSDSAAGSSAKVPEGVAGAPNEAALLALMERTGYSMVQENGQRKYGGPPPGWEGPHPQRGCEVFVGKIPRDVYEDELVPVFEAVGRIYELRLMMDFDGKNRGYAFVMYCHKHEAKRAVRELNNYEIRPGRLLGVCCSVDNCRLFIGGIPKMKKREEILEEIAKVTEGVLDVIVYASAADKMKNRGFAFVEYESHRAAAMARRKLMPGRIQLWGHQIAVDWAEPEIDVDEDVMETVKILYVRNLMIETTEDTIKKSFGQFNPGCVERVKKIRDYAFVHFTSREDAVHAMNNLNGTELEGSCLEVTLAKPVDKEQYSRYQKAARGGGAAEAAQQPSYVYSCDPYTLAYYGYPYNALIGPNRDYFVKDTILETHPASLPLVLRRHA

SEQ ID NO: 7213 - protein, 134 aa, Homo sapiens
MGKGDPNKPRGKMSSYAFFVQTCREEHKKKHPDSSVNFAEFSKKCSERWKTMSAKEKSKFEDMAKSDKARYDREMKNYVPPKGDKKGKKKDPNAPKRPPSAFFLFCSEHRPKIKSEHPGLSIGDTAKKLGEMWS

SEQ ID NO: 7214 - protein, 232 aa, Homo sapiens
MGAERRLLSIKEAFRLAQQPHQNQAKLVVALSRTYRTMDDKTVFHEEFIHYLKYVMVVYKREPAVERVIEFAAKFVTSFHQSDMEDDEEEEDGGLLNYLFTFLLKSHEANSNAVRFRVCLLINKLLGSMPENAQIDDDVFDKINKAMLIRLKDKIPNVRIQAVLALSRLQDPKDDECPVVNAYATLIENDSNPEVRRAVLSCIAPSAKTLPKIVGRTKDVKEAVRKLAYQML

SEQ ID NO: 7215 - protein, 151 aa, Homo sapiens
QPLMKLGTQTVPCNKILLWSRIKDLAHQFTQVQRDMFTLEDTLLGYLADDLTWCEINYQSCPDWRKDCSNNPVSVFWKTVSRRFAEAACDVVHVMLNGSRSKIFDKNSTFGSVEVHNLQPEKVQTLEAWVIHGGREDSRDLCQDPTIKELE

SEQ ID NO: 7216 - protein, 177 aa, Homo sapiens
MKDKAGQKCKPIDVFDFPDNSDVSSIGRLGENEKDEETYETFDPPLHSTAIYADEEEFSKHCGLSLSSTPPGKEAKRSSDTSGNEASEIESVKISAKKPGRKLRPISDDSESIEESDTRRKVKSAEKISTQRHEVIRTTASSELSEKPAESVTSKKTGPLSAQPSVEKENLAIESQS

SEQ ID NO: 7217 - protein, 600 aa, Homo sapiens
MLDFPQHVSSDKEVRAASTEADKRLSRFDIEMSMRGDIFERIVHLQETCDLGKIKPEARRYLEKSIKMGKRNGLHLPEQVQNEIKSMKKRMSELCIDFNKNLNEDDTFLVFSKAELGALPDDFIDSLEKTDDDKYKITLKYPHYFPVMKKCCIPETRRRMEMAFNTRCKEENTIILQQLLPLRTKVAKLLGYSTHADFVLEMNTAKSTSRVTAFLDDLSQKLKPLGEAEREFILNLKKKECKDRGFEYDGKINAWDLYYYMTQTEELKYSIDQEFLKEYFPIEVVTEGLLNTYQELLGLSFEQMTDAHVWNKSVTLYTVKDKATGEVLGQFYLDLYPREGKYNHAACFGLQPGCLLPDGSRMMAVAALVVNFSQPVAGRPSLLRHDEVRTYFHEFGHVMHQICAQTDFARFSGTNVETDFVEVPSQMLENWVWDVDSLRRLSKHYKDGSPIADDLLEKLVASRLVNTGLLTLRQIVLSKVDQSLHTNTSLDAASEYAKYCSEILGVAATPGTNMPATFGHLAGGYDGQYYGYLWSEVFSMDMFYSCFKKEGIMNPEVGMKYRNLILKPGGSLDGMDMLHNFLKREPNQKAFLMSRGLHAP

SEQ ID NO: 7218 - protein, 555 aa, Homo sapiens
MERTGYSMVQENGQRKYGGPPPGWEGPHPQRGCEVFVGKIPRDVYEDELVPVFEAVGRIYELRLMMDFDGKNRGYAFVMYCHKHEAKRAVRELNNYEIRPGRLLGVCCSVDNCRLFIGGIPKMKKREEILEEIAKVTEGVLDVIVYASAADKMKNRGFAFVEYESHRAAAMARRKLMPGRIQLWGHQIAVDWAEPEIDVDEDVMETVKILYVRNLMIETTEDTIKKSFGQFNPGCVERVKKIRDYAFVHFTSREDAVHAMNNLNGTELEGSCLEVTLAKPVDKEQYSRYQKAARGGGAAEAAQQPSYVYSCDPYTLAYYGYPYNALIGPNRDYFVKAGSIRGRGRGAAGNRAPGPRGSYLGGYSAGRGIYSRYHEGKGKQQEKGYELVPNLEIPTVNPVAIKPGTVAIPAIGAQYSMFPAAPAPKMIEDGKIHTVEHMISPIAVQPDPASAAAAAAAAAAAAAAVIPTVSTPPPFQGRPITPVYTVAPNVQRIPTAGIYGASYVPFAAPATATIATLQKNAAAAAAMYGGYAGYIPQAFPAAAIQVPIPDVYQTY

SEQ ID NO: 7219 - protein, 320 aa, Homo sapiens
MAPRGRRRPRPHRSEGARRSKNTLERTHSMKDKAGQKCKPIDVFDFPDNSDVSSIGRLGENEKDEETYETFDPPLHSTAIYADEEEFSKHCGLSLSSTPPGKEAKRSSDTSGNEASEIESVKISAKKPGRKLRPISDDSESIEESDTRRKVKSAEKISTQRHEVIRTTASSELSEKPAESVTSKKTGPLSAQPSVEKENLAIESQSKTQKKGKISHDKRKKSRSKAIGSDTSDIVHIWCPEGMKTSDIKELNIVLPEFEKTHLEHQQRIESKVCKAAIATFYVNVKEQFIKMLKESQMLTNLKRKNAKVRATAETTTNKI

SEQ ID NO: 7220 - protein, 116 aa, Homo sapiens
MAALLLRHVGRHCLRAHFSPQLCIRNWSLPMAMSICHRGTGIALSADVGPRKRPEDSPAIPVWSGCPGSYCVVLYGAGSHVKKGGSQHHLPTHYYIHPSFCLSFLSPAWEKFSLFV

SEQ ID NO: 7221 - protein, 105 aa, Homo sapiens
MMPLAEAGALAQGGGPSATEWACILRRLLRKEGVDGGLFSPEDPQAQAAHLTDGQSIQKKWQDFSCPQSRKTECFWQKEQHKQRSGNPRCLQFEGGERTPPPPQT

SEQ ID NO: 7222 - protein, 576 aa, Homo sapiens
MLRSGPASGPSVPTGRAMPSRRVARPPAAPELGALGSPDLSSLSLAVSRSTEIIDEYIKENGFGLDGGQPGPGEGLPRLVSRGAASLSTVTLGPVAPPATPPPWGCPLGRLVSPAPGPGPQPHLVITEQPKQRGMRFRYECEGRSAGSILGESSTEASKTLPAIELRDCGGLREVEVTACLVWKDWPHRVHPHSLVGKDCTDGICRVRLRPHVSPRHSFNNLGIQCVRKKEIEAAIERKIQLGIDPYNAGSLKNHQEVDMNVVRICFQASYRDQQGQMRRMDPVLSEPVYDKKSTNTSELRICRINKESGPCTGGEELYLLCDKVQKEDISVVFSRASWEGRADFSQADVHRQIAIVFKTPPYEDLEIVEPVTVNVFLQRLTDGVCSEPLPFTYLPRDHDSYGVDKKRKRGMPDVLGELNSSDPHGIESKRRKKKPAILDHFLPNHGSGPFLPPSALLPDPDFFSGTVSLPGLEPPGGPDLLDDGFAYDPTAPTLFTMLDLLPPAPPHASAVVCSGGAGAVVGETPGPEPLTLDSYQAPGPGDGGTASLVGSNMFPNHYREAAFGGGLLSPGPEAT

SEQ ID NO: 7223 - protein, 156 aa, Homo sapiens
MQLKPMEINPEMLNKVLSRLGVAGQWRFVDVLGLEEESLGSVPAPACALLLLFPLTAQHENFRKKQIEELKGQEVSPKVYFMKQTIGNSCGTIGLIHAVANNQDKLGFEDGSVLKQFLSETEKMSPEDRAKCFEKNEAIQAAHDAVAQEGQCRMTR

SEQ ID NO: 7224 - protein, 401 aa, Homo sapiens
MALRVTRNSKINAENKAKINMAGAKRVPTAPAATSKPGLRPRTALGDIGNKVSEQLQAKMPMKKEAKPSATGKVIDKKLPKPLEKVPMLVPVPVSEPVPEPEPEPEPEPVKEEKLSPEPILVDTASPSPMETSGCAPAEEDLCQAFSDVILAVNDVDAEDGADPNLCSEYVKDIYAYLRQLEEEQAVRPKYLLGREVTGNMRAILIDWLVQVQMKFRLLQETMYMTVSIIDRFMQNNCVPKKMLQLVGVTAMFIASKYEEMYPPEIGDFAFVTDNTYTKHQIRQMEMKILRALNFGLGRPLPLHFLRRASKIGEVDVEQHTLAKYLMELTMLDYDMVHFPPSQIAAGAFCLALKILDNGEWTPTLQHYLSYTEESLLPVMQHLAKNVVMVNQGLTKHMVSQ

SEQ ID NO: 7225 - protein, 909 aa, Homo sapiens
MATCIGEKIEDFKVGNLLGKGSFAGVYRAESIHTGLEVAIKMIDKKAMYKAGMVQRVQNEVKIHCQLKHPSILELYNYFEDSNYVYLVLEMCHNGEMNRYLKNRVKPFSENEARHFMHQIITGMLYLHSHGILHRDLTLSNLLLTRNMNIKIADFGLATQLKMPHEKHYTLCGTPNYISPEIATRSAHGLESDVWSLGCMFYTLLIGRPPFDTDTVKNTLNKVVLADYEMPSFLSIEAKDLIHQLLRRNPADRLSLSSVLDHPFMSRNSSTKSKDLGTVEDSIDSGHATISTAITASSSTSISGSLFDKRRLLIGQPLPNKMTVFPKNKSSTDFSSSGDGNSFYTQWGNQETSNSGRGRVIQDAEERPHSRYLRRAYSSDRSGTSNSQSQAKTYTMERCHSAEMLSVSKRSGGGENEESSNHLCPGKTPFPFADPTPQTETVQQWFGNLQINAHLRKTTEYDSISPNRDFQGHPDLQKDTSKNAWTDTKVKKNSDASDNAHSVKQQNTMKYMTALHSKPEIIQQECVFGSDPLSEQSKTRGMEPPWGYQNRTLRSITSPLVAHRLKPIRQKTKKAVVSILDSEEITIYYPNGGRGFPLADRPPSPTDNISRYSFDNLPEKYWRKYQYASRFVQLVRSKSPKITYFTRYAKCILMENSPGADFEVWFYDGVKIHKTEDFIQVIEKTGKSYTLKSESEVNSLKEEIKMYMDHANEGHRICLALESIISEEERKTRSAPFFPIIIGRKPGSTSSPKALSPPPSVDSNYPTRERASFNRMVMHSAASPTQAPILNPSMVTNEGLGLTTTASGTDISSNSLKDCLPKSAQLLKSVFVKNVGWATQLTSGAVWVQFNDGSQLVVQAGVSSISYTSPNGQTTRYGENEKLPDYIKQKLQCLSSILLMFSNPTPNFH

SEQ ID NO: 7226 - protein, 58 aa, Homo sapiens
MNECCLCGTSVAMRTLYRTRYGIPGSICDDYMATLCCPHCTLCQIKRDINRRRAMRTF

SEQ ID NO: 7227 - protein, 867 aa, Homo sapiens
METKGYHSLPEGLDMERRWGQVSQAVERSSLGPTERTDENNYMEIVNVSCVSGAIPNNSTQGSSKEKQELLPCLQQDNNRPGILTSDIKTELESKELSATVAESMGLYMDSVRDADYSYEQQNQQGSMSPAKIYQNVEQLVKFYKGNGHRPSTLSCVNTPLRSFMSDSGSSVNGGVMRAVVKSPIMCHEKSPSVCSPLNMTSSVCSPAGINSVSSTTASFGSFPVHSPITQGTPLTCSPNVENRGSRSHSPAHASNVGSPLSSPLSSMKSSISSPPSHCSVKSPVSSPNNVTLRSSVSSPANINNSRCSVSSPSNTNNRSTLSSPAASTVGSICSPVNNAFSYTASGTSAGSSTLRDVVPSPDTQEKGAQEVPFPKTEEVESAISNGVTGQLNIVQYIKPEPDGAFSSSCLGGNSKINSDSSFSVPIKQESTKHSCSGTSFKGNPTVNPFPFMDGSYFSFMDDKDYYSLSGILGPPVPGFDGNCEGSGFPVGIKQEPDDGSYYPEASIPSSAIVGVNSGGQSFHYRIGAQGTISLSRSARDQSFQHLSSFPPVNTLVESWKSHGDLSSRRSDGYPVLEYIPENVSSSTLRSVSTGSSRPSKICLVCGDEASGCHYGVVTCGSCKVFFKRAVEGQHNYLCAGRNDCIIDKIRRKNCPACRLQKCLQAGMNLGGFKNLPLEDQITLIQYSWMCLSSFALSWRSYKHTNSQFLYFAPDLVFNEEKMHQSAMYELCQGMHQISLQFVRLQLTFEEYTIMKVLLLLSTIPKDGLKSQAAFEEMRTNYIKELRKMVTKCPNNSGQSWQRFYQLTKLLDSMHDLVSDLLEFCFYTFRESHALKVEFPAMLVEIISDQLPKVESGNAKPLYFHRK

SEQ ID NO: 7228 - protein, 257 aa, Homo sapiens
SRSGLYRSPSMPENLNRPRLKQVEKFKDNTIPDKVKKKYFSGQGKLRKGLCLKKTVSLCDITITQMLEEDSNQGHLIGDFSKVCALPTVSGKHQDLKYVNPETVSRFLEMVAALLSGKFQGLIEKFYVIDCRYPYEYLGGHIQGALNLYSQEELFNFFLKKPIVPLDTQKRIIIVFHCEFSSERGPRMCRCLREEDRSLNQYPALYYPELYILKGGYRDFFPEYMELCEPQSYCPMHHQDHKTELLRCRSQSKVQEG

SEQ ID NO: 7229 - protein, 300 aa, Homo sapiens
MEVVPLGSQTRERGSSPGAGRSGETQKNGGPSQEGSCQQGVGQPRGLPQKAGRGLQQASHLREAGEEAPWMRRKRPAGPAGAGTDKTIIMWKLTRDETNYGIPQRALRGHSHFVSDVVISSDGQFALSGSWDGTLRLWDLTTGTTTRRFVGHTKDVLSVAFSSDNRQIVSGSRDKTIKLWNTLGVCKYTVQDESHSEWVSCVRFSPNSSNPIIVSCGWDKLVKVWNLANCKLKTNHIGHTGYLNTVTVSPDGSLCASGGKDGQAMLWDLNEGKHLYTLDGGDIINALCFSPNRYWLCAAT

SEQ ID NO: 7230 - protein, 929 aa, Homo sapiens
MIDKKAMYKAGMVQRVQNEVKIHCQLKHPSILELYNYFEDSNYVYLVLEMCHNGEMNRYLKNRVKPFSENEARHFMHQIITGMLYLHSHGILHRDLTLSNLLLTRNMNIKIADFGLATQLKMPHEKHYTLCGTPNYISPEIATRSAHGLESDVWSLGCMFYTLLIGRPPFDTDTVKNTLNKVVLADYEMPSFLSIEAKDLIHQLLRRNPADRLSLSSVLDHPFMSRNSSTKSKDLGTVEDSIDSGHATISTAITASSSTSISGSLFDKRRLLIGQPLPNKMTVFPKNKSSTDFSSSGDGNSFYTQWGNQETSNSGRGRVIQDAEERPHSRYLRRAYSSDRSGTSNSQSQAKTYTMERCHSAEMLSVSKRSGGGENEERYSPTDNNANIFNFFKEKTSSSSGSFERPDNNQALSNHLCPGKTPFPFADPTPQTETVQQWFGNLQINAHLRKTTEYDSISPNRDFQGHPDLQKDTSKNAWTDTKVKKNSDASDNAHSVKQQNTMKYMTALHSKPEIIQQECVFGSDPLSEQSKTRGMEPPWGYQNRTLRSITSPLVAHRLKPIRQKTKKAVVSILDSEEVCVELVKEYASQEYVKEVLQISSDGNTITIYYPNGGRGFPLADRPPSPTDNISRYSFDNLPEKYWRKYQYASRFVQLVRSKSPKITYFTRYAKCILMENSPGADFEVWFYDGVKIHKTEDFIQVIEKTGKSYTLKSESEVNSLKEEIKMYMDHANEGHRICLALESIISEEERKTRSAPFFPIIIGRKPGSTSSPKALSPPPSVDSNYPTRERASFNRMVMHSAASPTQAPILNPSMVTNEGLGLTTTASGTDISSNSLKDCLPKSAQLLKSVFVKNVGWATQLTSGAVWVQFNDGSQLVVQAGVSSISYTSPNGQTTRYGENEKLPDYIKQKLQCLSSILLMFSNPTPNFH

SEQ ID NO: 7231 - protein, 465 aa, Homo sapiens
MGRKKIQITRIMDERNRQVTFTKRKFGLMKKAYELSVLCDCEIALIIFNSTNKLFQYASTDMDKVLLKYTEYNEPHESRTNSDIVETLRKKGLNGCDSPDPDADDSVGHSPESEDKYRKINEDIDLMISRQRLCAVPPPNFEMPVSIPVSSHNSLVYSNPVSSLGNPNLLPLAHPSLQRNSMSPGVTHRPPSAGNTGGLMGGDLTSGAGTSAGNGYGNPRNSPGLLVSPGNLNKNMQAKSPPPMNLGMNNRKPDLRVLIPPGSKNTMPSVNQRINNSQSAQSLATPVVSVATPTLPGQGMGGYPSAISTTYGTEYSLSSADLSSLSGFNTASALHLGSVTGWQQQHLHNMPPSALSQLGACTSTHLSQSSNLSLPSTQSLNIKSEPVSPPRDRTTTPSRYPQHTRHEAGRSPVDSLSSCSSSYDGSDREDHRNEFHSPIGLTRPSPDERESPSVKRMRLSEGWAT

SEQ ID NO: 7232 - protein, 241 aa, Homo sapiens
MQLKPMEINPEMLNKVLSRLGVAGQWRFVDVLGLEEESLGSVPAPACALLLLFPLTAQHENFRKKQIEELKGQEVSPKVYFMKQTIGNSCGTIGLIHAVANNQDKLGFEDGSVLKQFLSETEKMSPEDRAKCFEKNEAIQAAHDAVAQEGQCRVDDKVNFHFILFNNVDGHLYELDGRMPFPVNHGASSEDTLLKVIFGMHLFLMTLPRSAENSPSVSKEKSASLPWLSARQPNALWEGLC

SEQ ID NO: 7233 - protein, 293 aa, Homo sapiens
RRLLLRSVQLHDSGNYSCYRAGRPAGTVHLLVDVPPEEPQLSCFRKSPLSNVVCEWGPRSTPSLTTKAVLLVRKFQNSPAEDFQEPCQYSQESQKFSCQLAVPEGDSSFYIVSMCVASSVGSKFSKTQTFQGCGILQPDPPANITVTAVARNPRWLSVTWQDPHSWNSSFYRLRFELRYRAERSKTFTTWMVKDLQHHCVIHDAWSGLRHVVQLRAQEEFGQGEWSEWSPEAMGTPWTGFSPQTIPGGIWDPAGESRSPPAENEVSTPMQALTTNKDDDNILFRDSANATSLP

SEQ ID NO: 7234 - protein, 103 aa, Homo sapiens
RCPFLALSATISNPEHLTEWLQSVKWYWKQEDKIIENNTASKRHVGRQAGFPKDYLQVKQSYKVRLVLYGERYNDLEKHVCSIKHGDIHFDHFHPCAALTTDH

SEQ ID NO: 7235 - protein, 88 aa, Homo sapiens
MEADIITNLRCRLKEAEEERLKAAQYGLQLVESQNELQNQLDKCRNEMMTMTESYEQEKYTLQREVELKSRMLESLSCECEAIKQQQK

SEQ ID NO: 7236 - protein, 435 aa, Homo sapiens
MPKEKYDPPDPRRIYTIMSAEEVANGKKSHWAELEISGRVRSLSTSLWSLTHLTALHLNDNYLSRIPPDIAKLHNLVYLDLSSNKLRSLPAELGNMVSLRELLLNNNLLRVLPYELGRLFQLQTLGLKGNPLSQDILNLYQDPDGTRKLLNFMLDNLAVHPEQLPPRPWITLKERDQILPSASFTVMCYNVLCDKYATRQLYGYCPSWALNWEYRKKGIMEEIVNCDADIISLQEVETEQYFTLFLPALKERGYDGFFSPKSRAKIMSEQERKHVDGCAIFFKTEKFTLVQKHTVEFNQVAMANSDGSEAMLNRVMTKDNIGVAVVLEVHKELFGAGMKPIHAADKQLLIVANAHMHWDPEYSDVKLIQTMMFVSEVKNILEKASSRPGSPTADPNSIPLVLCADLNSLPDSGVVEYLSNGGVADNHKDFKELRA

SEQ ID NO: 7237 - protein, 173 aa, Homo sapiens
MSGCGLFLRTTAAARACRGLVVSTANRRLLRTSPPVRAFAKELFLGKIKKKEVFPFPEVSQDELNEINQFLGPVEKFFTEEAYICLIKIFLLAVDSRKIDQEGKIPDETLEKLKSLGLFGLQVPEEYGGLGFSNTMYSRLGEIISMDGSITVTLAAHQAIGLKGIILAGTEEQ

SEQ ID NO: 7238 - protein, 42 aa, Homo sapiens
MISASRAAAARLVGAAASRGPTAARHQDTHWLVTESVFSFLG

SEQ ID NO: 7239 - protein, 192 aa, Homo sapiens
MELEELGIREECGVFGCIASGEWPTQLDVPHVITLGLVGLQHRGQESAGIVTSDGSSVPTFKSHKGMGLVNHVFTEDNLKKLYVSNLGIGHTRYATTGKCELENCQPFVVETLHGKIAVAHNGELVNAARLRKKISYCLQPWSSVISIYILLAQESPTPVLGTSTSLWLVRNQATQQEVSASASWYWSVYKF

SEQ ID NO: 7240 - protein, 516 aa, Homo sapiens
MFSGGLKESQDSEVNFDNSIHPEVLELLLDYAYSSRVIINEENAESLLEAGDMLEFQDIRDACAEFLEKNLHPTNCLGMLLLSDAHQCTKLYELSWRMCLSNFQTIRKNEDFLQLPQDMVVQLLSSEELETEDERLVYESAINWISYDLKKRYCYLPELLQTVRLALLPAIYLMENVAMEELITKQRKSKEIVEEAIRCKLKILQNDGVVTSLCARPRKTGHALFLLGGQTFMCDKLYLVDQKAKEIIPKADIPSPRKEFSACAIGCKVYITGGRGSENGVSKDVWVYDTLHEEWSKAAPMLVARFGHGSAELKHCLYVVGGHTAATGCLPASPSVSLKQVEHYDPTINKWTMVAPLREGVSNAAVVSAKLKLFAFGGTSVSHDKLPKVQCYDQCENRWTVPATCPQPWRYTAAAVLGNQIFIMGGDTEFSACSAYKFNSETYQWTKVGDVTAKRMSCHAVASGNKLYVVGGYFGIQRCKTLDCYDPTLDVWNSITTVPYSLIPTAFVSTWKHLPS

SEQ ID NO: 7241 - protein, 95 aa, Homo sapiens
MPKAKGKTRRQKFGYSVNRKRLNRNARRKAAPRIECSHIRHAWDHAKSVRQNLAEMGLAVDPNRAVPLRKRKILLVSRALFSAGEGHGGGHRGEA

SEQ ID NO: 7242 - protein, 193 aa, Homo sapiens
NGVVHLIDKVISTITNNIQQIIEIEDTFETLRAAVAASGLNTMLEGNGQYTLLAPTNEAFEKIPSETLNRILGDPEALRDMLTINGKAIISNKDILATNGVIHYIDELLIPDSAKTLFELAAESDVSTAIDLFRQAGLGNHLSGSERLTLLAPLNSVFKDGTPPIDAHTRNLLRNHIIKDQLASKYLYHGQTL

SEQ ID NO: 7243 - protein, 167 aa, Homo sapiens
ITASFRRFGPLVVDWPHKAESKSYFPPKGYAFLLFQEESSVQALIDACIEEDGKLYLCVSSPTIKDKPVQIRPWNLSDSDFVMDGSQPLDPRKTIFVGGVPRPLRAVELAMIMDRLYGGVCYAGIDTDPELKYPKGAGRVAFSNQQSYIAAISARFVQLQHGDIDKR

SEQ ID NO: 7244 - protein, 833 aa, Homo sapiens
MEPAALRCAYFRYSDSTFTFTYVGGPRSVSYSVHVSEDYPDNTYVSSSENDEDVLVTTEPIPVIFHRIATELRKTNDINCCLSIKSKLQKENGEESRQNSTVEEDSEGDNDSEEFYYGGQVNYDGELHKHPQLEADLSAVREIYGPHAVSLREYGAIDDVDIDLHIDVSFLDEEIAVAWEVIRTEPIIVRLHCSLTQYLNGPVPTVDVFQISTKERFGLGHQLKKIMQTFVTQQWKQSKEKSNCLHNKKLSEKKVKSPLHLFSTLRRSPSYPPPGCGKSKSKLKSEQDGISKTHKLLRRTCSSTVKTDDVCVTKSHRTFGRSLSSDPRAEQAMTAIKSHKLLNRPCPAAVKSEECLTLKSHRLLTRSCSGDPRCEHNTNLKPHKLLSRSYSSNLRMEELYGLKNHKLLSKSYSSAPKSSKTELFKEPNAEGRRLSLTSGLIGILTPSSSSSSQLAPNGAKCIPVRDRGFLVQTIEFAEQRIPVLNEYCVVCDEPHVFQNGPMLRPTVCERELCVFAFQTLGVMNEAADEIATGAQVVDLLVSMCRSALESPRKVVIFEPYPSVVDPNDPQMLAFNPRKKNYDRVMKALDSITSIREMTQAPYLEIKKQMDKQDPLAHPLLQWVISSNRSHIVKLPVNRQLKFMHTPHQFLLLSSPPAKESNFRAAKKLFGSTFAFHGSHIENWHSILRNGLVVASNTRLQLHGAMYGSGIYLSPMSSISFGYSGMNKKQKVSAKDEPASSSKSSNTSQSQKKGQQSQFLQSRNLKCIALCEVITSSDLHKHGEIWVVPNTDHVCTRFFFVYEDGQVGDANINTQEGGIHKEILRVIGNQTATG

SEQ ID NO: 7245 - protein, 672 aa, Homo sapiens
MSALASRSAPAMQSSGSFNYARPKQFIAAQNLGPASGHGTPASSPSSSSLPSPMSPTPRQFGRAPVPPFAQPFGAEPEAPWGSSSPSPPPPPPPVFSPTAAFPVPDVFPLPPPPPPLPSPGQASHCSSPATRFGHSQTPAAFLSALLPSQPPPAAVNALGLPKGVTPAGFPKKASRTARIASDEEIQGTKDAVIQDLERKLRFKEDLLNNGQPRLTYEERMARRLLGADSATVFNIQEPEEETANQEYKVSSCEQRLISEIEYRLERSPVDESGDEVQYGDVPVENGMAPFFEMKLKHYKIFEGMPVTFTCRVAGNPKPKIYWFKDGKQISPKSDHYTIQRDLDGTCSLHTTASTLDDDGNYTIMAANPQGRISCTGRLMVQAVNQRGRSPRSPSGHPHVRRPRSRSRDSGDENEPIQERFFRPHFLQAPGDLTVQEGKLCRMDCKVSGLPTPDLSWQLDGKPVRPDSAHKMLVRENGVHSLIIEPVTSRDAGIYTCIATNRAGQNSFSLELVVAAKEAHKPPVFIEKLQNTGVADGYPVRLECRVLGVPPPQIFWKKENESLTHSTDRVSMHQDNHGYICLLIQGATKEDAGWYTVSAKNEAGIVSCTARLDVYTQWHQQSQSTKPKKVRPSASRYAALSDQGLDIKAAFQPEANPSHLTLNTALVESEDL

SEQ ID NO: 7246 - protein, 413 aa, Homo sapiens
MATAEVLNIGKKLYEGKTKEVYELLDSPGKVLLQSKDQITAGNAARKNHLEGKAAISNKITSCIFQLLQEAGIKTAFTRKCGETAFIAPQCEMIPIEWVCRRIATGSFLKRNPGVKEGYKFYPPKVELFFKDDANNDPQWSEEQLIAAKFCFAGLLIGQTEVDIMSHATQAIFEILEKSWLPQNCTLVDMKIEFGVDVTTKEIVLADVIDNDSWRLWPSGDRSQQKDKQSYRDLKEVTPEGLQMVKKNFEWVAERVELLLKSESQCRVVVLMGSTSDLGHCEKIKKACGNFGIPCELRVTSAHKGPDETLRIKAEYEGDGIPTVFVAVAGRSNGLGPVMSGNTAYPVISCPPLTPDWGVQDVWSSLRLPSGLGCSTVLSPEGSAQFAAQIFGLSNHLVWSKLRASILNTWISL

SEQ ID NO: 7247 - protein, 225 aa, Homo sapiens
MSQGILSPPAGLLSDDDVVVSPMFESTAADLGSVVRKNLLSDCSVVSTSLEDKQQVPSEDSMEKVKVYLRVRPLLPSELERQEDQGCVRIENVETLVLQAPKDSFALKSNERGIGQATHRFTFSQIFGPEVGQASFFNLTVKEMVKDVLKGQNWLIYTYGVTNSGKTHTIQGTIKDGGILPRSLALIFNSLQGQLHPTPDLKPLLSNEVIWLDSKQIRQEEMKKL

SEQ ID NO: 7248 - protein, 709 aa, Homo sapiens
MESMGMVYSVPSSCNGPTESTFSTSWKGDAFTYMTPSATSQSNQVNENGKNPSCGNSWVSLNKVPPLVPKEAATLLVARDNPAGCSGSAGYPERLIQQRHMPERPSKIGLLTSGTSRLETGPGGASRFRERSLSVPTDSGTTDVDYDEEQKANEACALPFASTSSEGSNSADNIASLSAQQEAQHRRQRSKSISLRKAKKKPSPPTRSVSLVKDEPGLLPEGGSALPKDQRPKSLCLSLEHQGHHSSHPDAQGHPAIPNHKDPESTQFSHHWYLTDWKSGDTYQSLSSSSTATGTTVIECTQVQGSSESLASPSTSRATTPSQLSIEVEAREISSPGRPPGLMSPSSGYSSQSETPTPTVSMSLTLGHLPPPSSSVRVRPVVPERKSSLPPTSPMEKFPKSRLSFDLPLTSSPNLDLSGMSISIRSKTKVSRHHSETNFGVKLAQKTNPNQPIMPMVTQSDLRSVRLRSVSKSEPEDDIESPEYAEEPRAEEVFTLPERKTKPPVAEKPPVARRPPSLVHKPPSVPEEYALTSPTLAMPPRSSIQHARPLPQDSYTVVRKPKPSSFPDGRSPGESTAPSSLVFTPFASSSDAFFSGTQQPPQGSVEDEGPKVRVLPERISLQSQEEAEKKKGKIPPPVPKKPSVLYLPLTSPTAQMEAYVAEPRLPLSPIITLEEDTKCPATGDDLQSLGQRVTSTPQADSEREASPLG

SEQ ID NO: 7249 - protein, 80 aa, Homo sapiens
MSSASGLRRGHPAGGEENMTETDAFYKREMFDPAEKYKMDHRRRGIALIFNHERFFWHLTLPERRGTCADRDNLTRSVNC

SEQ ID NO: 7250 - protein, 1026 aa, Homo sapiens
MRDFGFGVLQTAPLRSSSPGPLFCGEAYGPYAVGSVNPLPSATPFGPLSPPPLPVTGFLEAASPFSVPLGGGAGSPAAAASSSSPFLAHQQTMQDELLLGLTQQPARPLSGAAATEKLPDHHPGGGTIAGVTHLLPSQDFKPSLHHPSSSSASSCCCCRTSSPQDFSKRQQQQLSSQKRKEFSPPHLPHPPDSKPPPPPPPLHCPGRFSPPPPPAGPLLQPAQLAQRQQQQPPQQFSLLHQQHLSPQDFAPRQRPADLPPLPQLPPSPPAAPRRRHGGAGSPRKTPAAGEGSAAESPNAGLASSTPVNPAPGSMESPNHPLLNSPSNLLPGGALGAGAFSSLQSPDLPHPGGGGGGGGGGPPGGGGGGGSASPPPLPGFGTPWSVQTASPPPQPQQPPPTQPQQQPPPPQQPPQPQPQPPGSSATTPGGGSGGSLSAMPPPSPDSENGFYPGLPSSMNPAFFPSFSPVSPHGCTGLSVPTSGGGGGGFGGPFSATAVPPPPPPAMNIPQQQPPPPAAPQQPQSRRSPVSPQLQQQHQAAAAAFLQQRNSYNHHQPLLKQSPWSNHQSSGWGTGSMSWGAMHGRDHRRTGNMGIPGTMNQISPLKKPFSGNVIAPPKFTRSTPSLTPKSWIEDNVFRTDNNSNTLLPLQVRSSLQLPAWGSDSLQDSWCTAAGTSRIDQDRSRMYDSLNMHSLENSLIDIMRAEHDPLKGRLSYPHPGTDNLLMLNGRSSLFPIDDGLLDDGHSDQVGVLNSPTCYSAHQNGERIERFSRKVFVGGLPPDIDEDEITASFRRFGPLVVDWPHKAESKSYFPPKGYAFLLFQEESSVQALIDACIEEDGKLYLCVSSPTIKDKPVQIRPWNLSDSDFVMDGSQPLDPRKTIFVGGVPRPLRAVELAMIMDRLYGGVCYAGIDTDPELKYPKGAGRVAFSNQQSYIAAISARFVQLQHGDIDKRVEVKPYVLDDQMCDECQGARCGGKFAPFFCANVTCLQYYCEFCWANIHSRAGREFHKPLVKEGADRPRQIHFRWN

SEQ ID NO: 7251 - protein, 160 aa, Homo sapiens
MTEQMTLRGTLKGHNGWVTQIATTPQFPDMILSASRDKTIIMWKLTRDETNYGIPQRALRGHSHFVSDVVISSDGQFALSGSWDGTLRLWDLTTQIVSGSRDKTIKLWNTLGVCKYTVQDESHSEWVSCVRFSPNSSNPIIVSCGWDKLVKVWNLANCKL

SEQ ID NO: 7252 - protein, 124 aa, Homo sapiens
MGSKDHAVFFREMTQLILNEMPKAGYSSILNDFVESNFFVIDGDSLLVTCLGVKSFKWGQNLHFFYLVECYLVDLLSNGGQFTIVFFKDAEYAYFDFPELLSLRTALILHLQHNTNIDVQTEFS

SEQ ID NO: 7253 - protein, 37 aa, Homo sapiens
MGKVNVAKLRYMSRDDFRVLTAVRNPPFLFSLPLNTV

SEQ ID NO: 7254 - protein, 98 aa, Homo sapiens
MGSKDHAVFFREMTQLILNEMPKAGYSSILNDFVESNFFVIDGDSLLVTCLGVKSFKWGQNLHFFYLVECYLVDLLSNGGQFTIVFFKDAEYAYFDFP

SEQ ID NO: 7255 - protein, 821 aa, Homo sapiens
MYVCVEIITFIDCLIKITEHLGSTAALLKKEEKEICNLCGMHDECTPQQTMSSIQDTKAADIAARGELNVIETATVSPTNGEESHYTNQVQLEKNKTHMSSALVEKENNTSLNGRVLGQEESQNKMFPDNAENEDDKQIEHMTVENINGNREETHGIIQTTETEIQETSESPREEMTTSSIICDISKKYINSTLPNDSENIKHKNNIMEKEYLDVLSDVTGPQVSCYITAPSYVLQQLECRIINHMSSLIVGDNEELVSNVITIECSDKEKRVPFPIGIAIPFTARYRGNYRDIMVKVCDINLQSSYLNPNSLEGMKGGYKGTCASVKVYKLGIFSVVSCLKKESFTVTKKGLALKSSMDSRISLNYPPGVFTSPVLVQLKIQPVDPALVAHLKAQQDTFYSVQSTSPLIHIQHPSTYPFQKPVTLFLPCSPYLDKNNLGSEIDHKRRASATINRITPSYFNRTKIASIRKPRKNASECLKLLGFRSQDSGWCGLDDVVKTIQSGLVSVELYEHLERFIVLHLSSTMDNSHLVTFVKSLEEAMLSTTACIVLSHQKDNPHRIAVLVVPSKDLSQVLKDLHLEGFGGPPEPSRHFQVREGEQLLLRFTGNIFASSNGKDYGKDYTLIFHLQRKPRLELQIKEVDEFGNYSCPHYKGTIVVYKVPKGKIVPNLNQSLVINENHSQLPICKLPLKLPKHKKLINRPQSTKRVSKDPVEALWDNLLHWLAEELSEENAESLSSTLPLRRSTIQLIKLKNPDDLTEQIHEFLCFWKKSLPTFTDKLRLLARHLRKIGRSDLAEELKFKWENKVFTEPQQCFDVAPE

SEQ ID NO: 7256 - protein, 63 aa, Homo sapiens
MELPAVNLKVILLGHWLLTTWHKDCTPCRSWEGDVEVLIRAPQGLPHSEASALQLDFHLYHLF

SEQ ID NO: 7257 - protein, 163 aa, Homo sapiens
SSAETLESHPDIGKSTPQKTAEADPRRGVGSPPGRKKTTVSMPRSRKGDAASQFLVFCQKHRDEVVAEHPDASGEEIEELLRSQWSLLSEKQRARYNTKFALVAPVQAEEDSGNVNGKKRNHTKRIQDPTEDAEAEDTPRKRLRTDKHSLRKQRKICLMHVNH

SEQ ID NO: 7258 - protein, 160 aa, Homo sapiens
MKLIILEHYSQASEWAAKYIRNRIIQFNPGPEKYFTLGLPTGSTPLGCYKKLIEYYKNGDLSFKYVKTFNMDEYVGLPRDHPESYHSFMWNNFFKHIDIHPENTHILDGNAVDLQAECDAFEEKIKAAGGIELFVGGIGPDGHIAFNEPGSSLVSRTRVK

SEQ ID NO: 7259 - protein, 396 aa, Homo sapiens
MALRVTRNSKINAENKAKINMAGAKRVPTAPAATSKPGLRPRTALGDIGNKVSEQLQAKMPMKKEAKPSATGKVIDKKLPKPLEKVPMLVPVPVSEPVPEPEPEPEPEPVKEEKLSPEPILVDTASPSPMETSGCAPAEEDLCQAFSDVILAVNDVDAEDGADPNLCSEYVKDIYAYLRQLEEEQAVRPKYLLGREVTGNMRAILIDWLVQVQMKFRLLQETMYMTVSIIDRFMQNNCVPKKMLQLVGVTAMFIASKYEEMYPPEIGDFAFVTDNTYTKHQIRQMEMKILRALNFGLGRPLPLHFLRRASKIGEVDVEQHTLAKYLMELTMLDYDMVHFPPSQIAAGAFCLALKILDNGEWTVKNKYATSKHAKISTLPQLNSALVQDLAKAVAKV

SEQ ID NO: 7260 - protein, 701 aa, Homo sapiens
MPRTMIPPGECTYAGRKRRRPLQKQRPAVGAEKSNPSKRHRDRLNAELDHLASLLPFPPDIISKLDKLSVLRLSVSYLRVKSFFQVVQEQSSRQPAAGAPSPGDSCPLAGSAVLEGRLLLESLNGFALVVSAEGTIFYASATIVDYLGFHQTDVMHQNIYDYIHVDDRQDFCRQLHWAMDPPQVVFGQPPPLETGDDAILGRLLRAQEWGTGTPTEYSAFLTRCFICRVRCLLDSTSGFLTMQFQGKLKFLFGQKKKAPSGAMLPPRLSLFCIAAPVLLPSAAEMKMRSALLRAKPRADTAATADAKVKATTSLCESELHGKPNYSAGRSSRESGVLVLREQTDAGRWAQVPARAPCLCLRGGPDLVLDPKGGSGDREEEQHRMLSRASGVTGRRETPGPTKPLPWTAGKHSEDGARPRLQPSKNDPPSLRPMPRGSCLPCPCVQGTFRNSPISHPPSPSPSAYSSRTSRPMRDVGEDQVHPPLCHFPQRSLQHQLPQPGAQRFATRGYPMEDMKLQGVPMPPGDLCGPTLLLDVSIKMEKDSGCEGAADGCVPSQVWLGASDRSHPATFPTRMHLKTEPDSRQQVYISHLGHGVRGAQPHGRATAGRSRELTPFHPAHCACLEPTDGLPQSEPPHQLCARGRGEQSCTCRAAEAAPVVKREPLDSPQWATHSQGMVPGMLPKSALATLVPPQASGCTFLP

SEQ ID NO: 7261 - protein, 441 aa, Homo sapiens
MGRKKIQITRIMDERNRQVTFTKRKFGLMKKAYELSVLCDCEIALIIFNSTNKLFQYASTDMDKVLLKYTEYNEPHESRTNSDIVETLRKKGLNGCDSPDPDADDSVGHSPESEDKYRKINEDIDLMISRQRLCAVPPPNFEMPVSIPVSSHNSLVYSNPVSSLGNPNLLPLAHPSLQRNSMSPGVTHRPPSAGNTGGLMGGDLTSGAGTSAGNGYGNPRNSPGLLVSPGNLNKNMQAKSPPPMNLGMNNRKPDLRVLIPPGSKNTMPSVSEDVDLLLNQRINNSQSAQSLATPVVSVATPTLPGQGMGGYPSAISTTYGTEYSLSSADLSSLSGFNTASALHLGSVTGWQQQHLHNMPPSALSQLGDRTTTPSRYPQHTRHEAGRSPVDSLSSCSSSYDGSDREDHRNEFHSPIGLTRPSPDERESPSVKRMRLSEGWAT

SEQ ID NO: 7262 - protein, 116 aa, Homo sapiens
MAQSKLDCRSPVGLDCCNCCLDLAHRSGLQRGSSGENNNPGSPTVSNFRQLQEKLVFENLNTDKLNSIMRQDSLEPVLRDPCYLINEGICNRNIDQTMLSILLFFHSASGASVVAI

SEQ ID NO: 7263 - protein, 82 aa, Homo sapiens
YTLDGGDIINALCFSPNRYWLCAATGPSIKIWDLEGKIIVDELKQEVISTSSKAEPPQCTSLAWSADGQVSGSVLSGDSASS

SEQ ID NO: 7264 - protein, 853 aa, Homo sapiens
FQVSYFAFKFAKKDCPVSNINNSSIPSALPEPMTASEAAARKSQIKARITDTIGPTETSIAPRQRPKANSATTATPSVLTIQSSATPVKVLAPGEFGNHRPKGALRPGNGPEILLGQGPPQQPPQQHRVLQQLQQGDWRLQQLHLQHRHPHQQQQQQQQQQQQQQQQQQQQQQQQQQQHHHHHHHHLLQDAYMQQYQHATQQQQMLQQQFLMHSVYQPQPSASQYPTMMPQYQQAFFQQQMLAQHQPSQQQASPEYLTSPQEFSPALVSYTSSLPAQVGTIMDSSYSANRSVADKEAIANFTNQKNISNPPDMSGWNPFGEDNFSKLTEEELLDREFDLLRSNRLEERASSDKNVDSLSAPHNHPPEDPFGSVPFISHSGSPEKKAEHSSINQENGTANPIKNGKTSPASKDQRTGKKTSVQGQVQKGNDESESDFESDPPSPKSSEEEEQDDEEVLQGEQGDFNDDDTEPENLGHRPLLMDSEDEEEEEKHSSDSDYEQAKAKYSDMSSVYRDRSGSGPTQDLNTILLTSAQLSSDVAVETPKQEFDVFGAVPFFAVRAQQPQQEKNEKNLPQHRFPAAGLEQEEFDVFTKAPFSKKVNVQECHAVGPEAHTIPGYPKSVDVFGSTPFQPFLTSTSKSESNEDLFGLVPFDEITGSQQQKVKQRSLQKLSSRQRRTKQDMSKSNGKRHHGTPTSTKKTLKPTYRTPERARRHKKVGRRDSQSSNEFLTISDSKENISVALTDGKDRGNVLQPEESLLDPFGAKPFHSPDLSWHPPHQGLSDIRADHNTVLPGRPRQNSLHGSFHSADVLKMDDFGAVPFTELVVQSITPHQSQQSQPVELDPFGAAPFPSKQ

SEQ ID NO: 7265 - protein, 63 aa, Homo sapiens
MVEGPGCTLNGEKIRARVLPGQAVTGVRGSALRSLQGRALRLAASTVVVSPQDSFRNERLHHD

SEQ ID NO: 7266 - protein, 81 aa, Homo sapiens
IAGIENDEGFGAPAGSHAAPAQPGPTSGAGSEDMGTTVNGDVFQEANGPADGYAAIAQADRLTQEPESIRKWREEQRKRLS

SEQ ID NO: 7267 - protein, 147 aa, Homo sapiens
MTEQMTLRGTLKGHNGWVTQIATTPQFPDMILSASRDKTIIMWKLTRDETNYGIPQRALRGHSHFVSDVVISSDGQFALSGSWDGTLRLWDLTTGTTTRRFVGHTKDVLSVAFSSDNRQIVSGSRDKTIKLWNTLGVCKYTVQAGVQ

SEQ ID NO: 7268 - protein, 812 aa, Homo sapiens
MGMCSRQERIQKDIDVVIQKSRAEKDCLFADFRYSDSTFTFTYVGGPRSVSYSVHVSEDYPDNTYVSSSENDEDVLVTTEPIPVIFHRIATELRKTNDINCCLSIKSKLQKENGEESRQNSTVEEDSEGDNDSEEFYYGGQVNYDGELHKHPQLEADLSAVREIYGPHAVSLREYGAIDDVDIDLHIDVSFLDEEIAVAWEVIRTEPIIVRLHCSLTQYLNGPVPTVDVFQISTKERFGLGHQLKKIMQTFVTQQWKQSKEKSNCLHNKKLSEKKVKSPLHLFSTLRRSPSYPPPGCGKSKSKLKSEQDGISKTHKLLRRTCSSTVKTDDVCVTKSHRTFGRSLSSDPRAEQAMTAIKSHKLLNRPCPAAVKSEECLTLKSHRLLTRSCSGDPRCEHNTNLKPHKLLSRSYSSNLRMEELYGLKNHKLLSKSYSSAPKSSKTELFKEPNAEGRRLSLTSGLIGILTPSSSSSSQLAPNGAKCIPVRDRGFLVQTIEFAEQRIPVLNEYCVVCDEPHVFQNGPMLRPTVCERELCVFAFQTLGVMNEAADEIATGAQKKNYDRVMKALDSITSIREMTQAPYLEIKKQMDKQDPLAHPLLQWVISSNRSHIVKLPVNRQLKFMHTPHQFLLLSSPPAKESNFRAAKKLFGSTFAFHGSHIENWHSILRNGLVVASNTRLQLHGAMYGSGIYLSPMSSISFGYSGMNKKQKVSAKDEPASSSKSSNTSQSQKKGQQSQFLQSRNLKCIALCEVITSSDLHKHGEIWVVPNTDHVCTRFFFVYEDGQVGDANINTQEGGIHKEILRVIGNQTATG

SEQ ID NO: 7269 - protein, 505 aa, Homo sapiens
MSESKAKKIEIKDVDGQTLSKLIDYIYTAEIEVTEENVQVLLPAASLLQLMDVRQNCCDFLQSQLHPTNCLGIRAFADVHTCTDLLQQANAYAEQHFPEVMLGEEFLSLSLDQVCSLISSDKLTVSSEEKVFEAVISWINYEKETRLEHMAKLMEHVRLPLLPRDYLVQTVEEEALIKNNNTCKDFLIEAMKYHLLPLDQRLLIKNPRTKPRTPVSLPKVMIVVGGQAPKAIRSVECYDFEEDRWDQIAELPSRRCRAGVVFMAGHVYAVGGFNGSLRVRTVDVYDGVKDQWTSIASMQERRSTLGAAVLNDLLYAVGGFDGSTGLASVEAYSYKTNEWFFVAPMNTRRSSVGVGVVEGKLYAVGGYDGASRQCLSTVEQYNPATNEWIYVADMSTRRSGAGVGVLSGQLYATGGHDGPLVRKSVEVYDPGTNTWKQVADMNMCRRNAGVCAVNGLLYVVGGDDGSCNLASVEYYNPVTDKWTLLPTNMSTGRSYAGVAVIHKSL

SEQ ID NO: 7270 - protein, 183 aa, Homo sapiens
MAVYVGMLRLGRLCAGSSGVLGARAALSRSWQEARLQGVRFLSSREVDRMVSTPIGGLSYVQGCTKKHLNSKTVGQCLETTAQRVPEREALVVLHEDVRLTFAQLKEEVDKAASGLLSIGLCKGVCEPSLPGYGTGVCPQEGGLQGPCVPQAIQDPAILQRPEADLSRSGECPARGLEESEAP

SEQ ID NO: 7271 - protein, 173 aa, Homo sapiens
MDSFKVVLEGPAPWGFRLQGGKDFNVPLSISRLTPGGKAAQAGVAVGDWVLSIDGENAGSLTHIEAQNKIRACGERLSLGLSRAQPVQSKPQKASAPAADPPRYTFAPSVSLNKTARPFGAPPPADSAPQQNGQPLRPLVPDASKQRLMENTEDWRPRPGTGQSRSFRILAHL

SEQ ID NO: 7272 - protein, 139 aa, Homo sapiens
MESEDLSGRELTIDSIMNKVRDIKNKFKNEDLTDELSLNKISADTTDNSGTVNQIMMMANNPEDWLSLLLKLEKNSVPLSDALLNKLIGRYSQAIEALPPDKYGQNESFARIQVRFAELKAIQEPDDARDYFQMARANC

SEQ ID NO: 7273 - protein, 414 aa, Homo sapiens
MEKDKHSHFYNQKSDFRIEHSMLEELENKLIHSRKTERAKIQQQLAKIHNNVKKLQHQLKDVKPTPDFVEKLREMMEEIENAINTFKEEQRLIYEELIKEEKTTNNELSAISRKIDTWALGNSETEKAFRAISSKVPVDKVTPSTLPEEVLDFEKFLQQTGGRQGAWDDYDHQNFVKVRNKHKGKPTFMEEVLEHLPGKTQDEVQQHEKWYQKFLALEERKKESIQIWKTKKQQKREEIFKLKEKADNTPVLFHNKQEDNQKQKEEQRKKQKLAVEAWKKQKSIEMSMKCASQLKEEEEKEKKHQKERQRQFKLKLLLESYTQQKKEQEEFLRLEKEIREKAEKAEKRKNAADEISRFQERVENNVSRDPSRLYKPTKGWEERTKKIGPTGSGPLLHIPHRAIPTWRQGIQRRV

SEQ ID NO: 7274 - protein, 547 aa, Homo sapiens [sequence omitted]

SEQ ID NO: 7275 - protein, 555 aa, Homo sapiens
MRLIGMPKEKYDPPDPRRIYTIMSAEEVANGKKSHWAELEISGRVRSLSTSLWSLTHLTALHLNDNYLSRIPPDIAKLHNLVYLDLSSNKLRSLPAELGNMVSLRELLLNNNLLRVLPYELGRLFQLQTLGLKGNPLSQDILNLYQDPDGTRKLLNFMLDNLAVHPEQLPPRPWITLKERDQILPSASFTVMCYNVLCDKYATRQLYGYCPSWALNWEYRKKGIMEEIVNCDADIISLQEVETEQYFTLFLPALKERGYDGFFSPKSRAKIMSEQERKHVDGCAIFFKTEKFTLVQKHTVEFNQVAMANSDGSEAMLNRVMTKDNIGVAVVLEVHKELFGAGMKPIHAADKQLLIVANAHMHWDPEYSDVKLIQTMMFVSEVKNILEKASSRPGSPTADPNSIPLVLCADLNSLPDSGVVEYLSNGGVADNHKDFKELRYNECLMNFSCNGKNGSSEGRITHGFQLKSAYENNLMPYTNYTFDFKGVIDYIFYSKTHMNVLGVLGPLDPQWLVENNITGCPHPHIPSDHFSLLTQLELHPPLLPLVNGVHLPNRR

SEQ ID NO: 7276 - protein, 65 aa, Homo sapiens
MAGYKPVAIQTYPILGEKITQDTLYWNNYKTPVQIKEFGAVSKVDFSPQPPYNYAVTASSRIHIY

SEQ ID NO: 7277 - protein, 333 aa, Homo sapiens
MIPIEWVCRRIATGSFLKRNPGVKEGYKFYPPKVELFFKDDANNDPQWSEEQLIAAKFCFAGLLIGQTEVDIMSHATQAIFEILEKSWLPQNCTLVDMKIEFGVDVTTKEIVLADVIDNDSWRLWPSGDRSQQKDKQSYRDLKEVTPEGLQMVKKNFEWVAERVELLLKSESQCRVVVLMGSTSDLGHCEKIKKACGNFGIPCELRVTSAHKGPDETLRIKAEYEGDGIPTVFVAVAGRSNGLGPVMSGNTAYPVISCPPLTPDWGVQDVWSSLRLPSGLGCSTVLSPEGSAQFAAQIFGLSNHLVWSKLRASILNTWISLKQADKKIRECNL

SEQ ID NO: 7278 - protein, 175 aa, Homo sapiens
MALQLGRLSSGPCWLVARGGCGGPRAWSQCGGGGLRAWSQRSAAGRVCRPPGPAGTEQSRGLGHGSTSRGGPWVGTGLAAALAGLVGLATAAFGHVQRAEMLPKTSGTRATSLGRPEEEEDELAHRCSSFMAPPVTDLGELRRRPGDMKTKMELLILETQAQVCQALAQRKLQNK

SEQ ID NO: 7279 - protein, 260 aa, Homo sapiens
AYRKLLEGEEERLRLSPSPTSQRSRGRASSHSSQTQGGGSVTKKRKLESTESRSSFSQHARTSGRVAVEEVDEEGKFVRLRNKSNEDQSMGNWQIKRQNGDDPLLTYRFPPKFTLKAGQVVTIWAAGAGATHSPPTDLVWKAQNTWGCGNSLRTALINSTGEGSHCSSSGDPAEYNLRSRTVLCGTCGQPADKASASGSGAQVGGPISSGSSASSVTVTRSYRSVGGSGGGSFGDNLVTRSYLLGNSSPRTQSPQNCSIM

SEQ ID NO: 7280 - protein, 321 aa, Homo sapiens
MTEQMTLRGTLKGHNGWVTQIATTPQFPDMILSASRDKTIIMWKLTRDETNYGIPQRALRGHSHFVSDVVISSDGQFALSGSWDGTLRLWDLTTLSLDLEIKPSSYGIPWVCANTLSSLILSPRLECSSAISAHCKLCFPGSRHSPASASRVAGTTGACHQDESHSEWVSCVRFSPNSSNPIIVSCGWDKLVKVWNLANCKLKTNHIGHTGYLNTVTVSPDGSLCASGGKDGQAMLWDLNEGKHLYTLDGGDIINALCFSPNRYWLCAATGPSIKIWDLEGKIIVDELKQEVISTSSKAEPPQCTSLAWSADGQTLFAGYT

SEQ ID NO: 7281 - protein, 124 aa, Homo sapiens
MEPLASNIQVLLQAAEFLERREREAEHGYASLCPHRSPGPIHRRKKRPPQAPGAQDSGRRAQLKRCLERLKQQMPLGADCARYTTLSLLRRARMHIQKLEDQEQRARQLKERLRSKQQSLQRQL

SEQ ID NO: 7282 - protein, 1143 aa, Homo sapiens
MPRRAGSGQLPLPRGWEEARDYDGKVFYIDHNTRRTSWIDPRDRLTKPLSFADCVGDELPWGWEAGFDPQIGVYYIDHINKTTQIEDPRKQWRGEQEKMLKDYLSVAQDALRTQKELYHVKEQRLALALDEYVRLNDAYKEKSSSHTSLFSGSSSSTKYDPDILKAEISTTRLRVKKLKRELSQMKQELLYKEQGFETLQQIDKKMSGGQSGYELSEAKAILTELKSIRKAISSGEKEKQDLMQSLAKLQERFHLDQNIGRSEPDLRCSPVNSHLCLSRQTLDAGSQTSISGDIGVRSRSNLAEKVRLSLQYEEAKRSMANLKIELSKLDSEAWPGALDIEKEKLMLINEKEELLKELQFVTPQKRTQDELERLEAERQRLEEELLSVRGTPSRALAERLRLEERRKELLQKLEETTKLTTYLHSQLKSLSASTLSMSSGSSLGSLASSRGSLNTSSRGSLNSLSSTELYYSSQSDQIDVDYQYKLDFLLQEKSGYIPSGPITTIHENEVVKSPSQPGQSGLCGVAAAATGHTPPLAEAPKSVASLSSRSSLSSLSPPGSPLVLEGTFPMSSSHDASLHQFTADFEDYVEKSLPKRRVIHLLGEKTTCVSAAVSDESVAGDSGVYEAFVKQPSEMEDVTYSEEDVAIVETAQVQIGLRYNAKSSSFMVIIAQLRNLHAFLIPHTSKVYFRVAVLPSSTDVSCLFRTKVHPPTESILFNDVFRVAISQTALQQKTLRVDLCSVSKHRREECLAGTQISLADLPFSSEVFTLWYNLLPSKQMPCKKNEENEDSVFQPNQPLVDSIDLDAVSALLARTSAELLAVEQELAQEEEEESGQEEPRGPDGDWLTMLREASDEIVAEKEAEVKLPEDSSCTEDLSSCTSVPEMNEDGNRKESNCAKDLRSQPPTRIPTLVDKETNTDEAANDNMAVRPKERSSLSSRQHPFVRSSVIVRSQTFSPGERNQYICRLNRSDSDSSTLAKKSLFVRNSTERRSLRVKRTVCQSVLRRTTQECPVRTSLDLELDLQASLTRQSRLNDELQALRDLRQKLEELKAQGETDLPPGVLEDERFQRLLKQAEKQAEQSKEEQKQGLNAEKLMRQVSKDVCRLREQSQKVPRQVQSFREKIAYFTRAKISIPSLPADDV

SEQ ID NO: 7283 - protein, 84 aa, Homo sapiens
MASVVLALRTRTAVTSLLSPTPATALAVRYASKKSGGSSKNLGGKSSGRRQGIKKMEGHYVHAGNIIATQRHFRWHPGAHWRWK

SEQ ID NO: 7284 - protein, 122 aa, Homo sapiens
MAQSKLDCRSPVGLDCCNCCLDLAHRSGLQRGSSGENNNPGSPTVSNFRQLQEKLVFENLNTDKLNSIMRQDSLEPVLRDPCYLINEGICNRNIDQTMLSILLFFHSASGASVVAIDNKIEQ

SEQ ID NO: 7285 - protein, 142 aa, Homo sapiens
MRKSSSPSLSNCNSVLANKIFGIPLDELQQGGHPDNEVPFIVRHVVDYIEEHGGLEQQGLFQVNGNAETVEWLRQRYDSGEEVDLVKEADVPSAISLLRFFLQELPEPVIPGSLHIHLMQLSQDYNNEDEFGRKLRFLLQQL

SEQ ID NO: 7286 - protein, 43 aa, Homo sapiens
MNYLDRYLSCVPTRKAQLQLLGAVCMLLASKLRETTPLTIEKL

SEQ ID NO: 7287 - protein, 241 aa, Homo sapiens
GRKRVASPPGLQSPASHSAPGRVQPPAASSLPPLPASTQPKAPKGKSAGREKKVIHPYSRKAAQITREAHKQEKKEKLKNEKALRLNLVGEKLQWFQNHLDPQKKRYSKKDACELIERYLNRFSSELEQIELHNSIRDRQGRRHCSRETVIKQTMERERQQFEGYGLEIPDILNASNLKTFREWDFDLKKLPNIKMRKICANDAIPKTCKRKTIITVDQDLGELELNDESSDSDEEMTAVA

SEQ ID NO: 7288 - protein, 56 aa, Homo sapiens
MKFPGPLENQRLSFLLEKAITREAQMWKVNVRKMPSNQNSSTKGIGKRQFLWMFLI

SEQ ID NO: 7289 - protein, 472 aa, Homo sapiens
MPQTPPFSAMFDSSGYNRNLYQSAEDSCGGLYYHDNNLLSGSLEALIQHLVPNVDYYPDRTYIFTFLLSSRLFMHPYELMAKVCHLCVEHQRLSDPDSDKNQMRKIAPKILQLLTEWTETFPYDFRDERMMRNLKDLAHRIASGEETYRKNVQQMMQCLIRKLAALSQYEEVLAKISSTSTDRLTVLKTKPQSIQRDIITVCNDPYTLAQQLTHIELERLNYIGPEEFVQAFVQKDPLDNDKSCYSERKKTRNLEAYVEWFNRLSYLVATEICMPVKKKHRARMIEYFIDVARECFNIGNFNSLMAIISGMNMSPVSRLKKTWAKVKTAKFDILEHQMDPSSNFYNYRTALRGAAQRSLTAHSSREKIVIPFFSLLIKDIYFLNEGCANRLPNGHVNFEKFWELAKQVSEFMTWKQVECPFERDRKILQYLLTVPVFSEDALYLASYESEGPENHIEKDRWKSLRSSLLGRV

SEQ ID NO: 7290 - protein, 25 aa, Homo sapiens
MDLVKNHLMYAVREEVEILKEQIRE

SEQ ID NO: 7291 - protein, 155 aa, Homo sapiens
MLSPKDILRKDLKLVHGYPMTCAFASNWEKIEQFHSRPDDIVIATYPKSGTTWVSEIIDMILNDGDIEKCKRGFITEKVPMLEMTLPGLRTSGIEQLEKNPSPRIVKTHLPTDLLPKSFWENNCKMIYLARNAKDVSVSYYHFDLMNNLQPFPGT

SEQ ID NO: 7292 - protein, 443 aa, Homo sapiens
MSTELFSSTREEGSSGSGPSFRSNQRKMLNLLLERDTSFTVCPDVPRTPVGKFLGDSANLSILSGGTPKRCLDLSNLSSGEITATQLTTSADLDETGHLDSSGLQEVHLAGMNHDQHLMKCSPDNGNLVDSEMKYLGSPITTVPKLDKNPNLGEDQAEEISDELMEFSLKDQEAKVSRSGLYRSPSMPENLNRPRLKQVEKFKDNTIPDKVKKKYFSGQGKLRKGLCLKKTVSLCDITITQMLEEDSNQGHLIGDFSKVCALPTVSGKHQDLKYVNPETVAALLSGKFQGLIEKFYVIDCRYPYEYLGGHIQGALNLYSQEELFNFFLKKPIVPLDTQKRIIIVFHCEFSSERGPRMCRCLREEDRSLNQYPALYYPELYILKGGYRDFFPEYMELCEPQSYCPMHHQDHKTELLRCRSQSKVQEGERQLREQIALLVKDMSP

SEQ ID NO: 7293 - protein, 711 aa, Homo sapiens
MNRESSRSHAVFTITIESMEKSNEIVNIRTSLLNLVDLAGSERQKDTHAEGMRLKEAGNINRSLSCLGQVITALVDVGNGKQRHVCYRDSKLTFLLRDSLGGNAKTAIIANVHPGSRCFGETLSTLNFAQRAKLIKNKAVVNEDTQGNVSQLQAEVKRLKEQLAELASGQTPPESFLTRDKKKTNYMEYFQEAMLFFKKSEQEKKSLIEKVTQLEDLTLKKEKFIQSNKMIVKFREDQIIRLEKLHKESRGGFLPEEQDRLLSELRNEIQTLREQIEHHPRVAKYAMENHSLREENRRLRLLEPVKRAQEMDAQTIAKLEKAFSEISGMEKSDKNQQGFSPKAQKEPCLFANTEKLKAQLLQIQTELNNSKQEYEEFKELTRKRQLELESELQSLQKANLNLENLLEATKACKRQEVSQLNKIHAETLKIITTPTKAYQLHSRPVPKLSPEMGSFGSLYTQNSSILDNDILNEPVPPEMNEQAFEAISEELRTVQEQMSALQAKLDEEEHKNLKLQQHVDKLEHHSTQMQELFSSERIDWTKQQEELLSQLNVLEKQLQETQTKNDFLKSEVHDLRVVLHSADKELSSVKLEYSSFKTNQEKEFNKLSERHMHVQLQLDNLRLENEKLLESKACLQDSYDNLQEIMKFEIDQLSRNLQNFKKENETLKSDLNNLMELLEAEKERNNKLSLQFEEDKENSSKEILKVLEAVR

SEQ ID NO: 7294 - protein, 102 aa, Homo sapiens
MMEIFSETKDVFQLKDLEKIAPKEKGITAMSVKEVLQSLVDDGMVDCERIGTSNYYWAFPSKALHARKHKLEVLESQLSEGSQKHASLQKSIEKAKIGRCET

SEQ ID NO: 7295 - protein, 93 aa, Homo sapiens
MYGFCSVKDSQAALPKYVLINWVGEDVPDARKCACASHVAKVAEFFQGVDVIVNASSVEDIDAGAIGQRLSNGLARLSSPVLHRLRLREDENA

SEQ ID NO: 7296 - protein, 336 aa, Homo sapiens
LILDPCCQLPAYLSTCPGQSSSLAVTKTNSDILPPQKKTKPSQKVQGRGSHGCRQQRQARQKESTLRRQERKNAALVTRMKAQRPEECLKHIIVVLDPVLLQMEGGGQLLGALQTMECRCVIEAQAVPCSVTWRRRAGPSEGSLDSTMKGKETLQGFVTDITAKTAGKALSLVIVDQEKCFSAQNPPRRGKQGANKQTKKQQQRQPEASIGSMVSRVDAEEALVDLQLHTEAQAQIVQSWKELADFTCAFTKAVAEAPFKKLRDETTFSFCLESDWAGGVKVDLAGRGLALVWRRQIQQLNRVSLEMASAVVNAYPSPQLLVQAYQQCFSDKERQN

SEQ ID NO: 7297 - protein, 550 aa, Homo sapiens
MPKEKYDPPDPRRIYTIMSAEEVANGKKSHWAELEISGRVRSLSTSLWSLTHLTALHLNDNYLSRIPPDIAKLHNLVYLDLSSNKLRSLPAELGNMVSLRELLLNNNLLRVLPYELGRLFQLQTLGLKGNPLSQDILNLYQDPDGTRKLLNFMLDNLAVHPEQLPPRPWITLKERDQILPSASFTVMCYNVLCDKYATRQLYGYCPSWALNWEYRKKGIMEEIVNCDADIISLQEVETEQYFTLFLPALKERGYDGFFSPKSRAKIMSEQERKHVDGCAIFFKTEKFTLVQKHTVEFNQVAMANSDGSEAMLNRVMTKDNIGVAVVLEVHKELFGAGMKPIHAADKQLLIVANAHMHWDPEYSDVKLIQTMMFVSEVKNILEKASSRPGSPTADPNSIPLVLCADLNSLPDSGVVEYLSNGGVADNHKDFKELRYNECLMNFSCNGKNGSSEGRITHGFQLKSAYENNLMPYTNYTFDFKGVIDYIFYSKTHMNVLGVLGPLDPQWLVENNITGCPHPHIPSDHFSLLTQLELHPPLLPLVNGVHLPNRR

SEQ ID NO: 7298 - protein, 100 aa, Homo sapiens
MAGNKGRGRAAYTFNIEAVGFSKGEKLPDVVLKPPPLFPDTDYKPVPLKTGEGEEYMLALKQELRETMKRMPYFIETPEERQETGVLLFCSHWSHIPGFK

SEQ ID NO: 7299 - protein, 269 aa, Homo sapiens
ISLVSFLVERLLHIIIDDNKRTQIVTEIISEIRAPIVTVGVNNDPADVRKKELKMAEIKVKLIEAKEALENCITLQDFNRASELKEEIKALEDARINLLKETEQLEIKEVHIEKVQNDAETLQKCLILCYELLKQMSISTGLSATMNGIIESLILPGIISIHPVVRNLAVLCLGCCGLQNQDFARKHFVLLLQVLQIDDVTIKISALKAIFDQLMTFGIEPFKTKKIKTLHCEGTEINSDDEQESKEVEETATAKNVLKLLSDFLDSEV

SEQ ID NO: 7300 - protein, 399 aa, Homo sapiens
MGRKKIQITRIMDERNRQVTFTKRKFGLMKKAYELSVLCDCEIALIIFNSTNKLFQYASTDMDKVLLKYTEYNEPHESRTNSDIVETLRKKGLNGCDSPDPDADDSVGHSPESEDKYRKINEDIDLMISRQRLCAVPPPNFEMPVSIPVSSHNSLVYSNPVSSLGNPNLLPLAHPSLQRNSMSPGVTHRPPSAGNTGGLMGGDLTSGAGTSAGNGYGNPRNSPGLLVSPGNLNKNMQAKSPPPMNLGMNNRKPDLRVLIPPGSKNTMPSVSEDVDLLLNQRINNSQSAQSLATPVVSVATPTLPGQGMGGYPSAISTTYGTEYSLSSADLSSLSGFNTASALHLGSVTGWQQQHLHNMPPSALSQLGQNLFLLLETVPPPLRDTHNTRATRRGDLLLTA

SEQ ID NO: 7301 - protein, 119 aa, Homo sapiens
MISLIIPPKDQISRVAKMLADEFGTASNIKSRVNRLSVLGAITSVQQRLKLYNKVPPNGLVVYCGTIVTEEGKEKKVNIDFEPFKPINTSLYLCDNKFHTEALTALLSDDSKFGFIVID

SEQ ID NO: 7302 - protein, 41 aa, Homo sapiens
MALQLSREQGITLRGSAEIVAEFFLHPEKSLRKLSRMKSVQ

SEQ ID NO: 7303 - protein, 69 aa, Homo sapiens
MNGDSRAAVVTSPPPTTAPHKERYFDRVDENNPEYLRERNMAPDLRQDFNMMEQKKRVSMILQSPVLVW

SEQ ID NO: 7304 - protein, 69 aa, Homo sapiens
MQLKPMEINPEVSARCCPGWGSPASGASWTCWGWKRSLWARCQRLPARCCCCFPSRPSMRTSGKSRLKS

SEQ ID NO: 7305 - protein, 44 aa, Homo sapiens
MASMGTLAFDEYGRPFLIIKDQDRKSRLMGLEALKGQQLSPTDG

SEQ ID NO: 7306 - protein, 85 aa, Homo sapiens
MGKCRGLRTARKLRSHRRDQKWHDKQYKKAHLGTALKANPFGGASHAKGIVLEKVGVEAKQPNSAIRKCVRVQLIKNGKKERPRS

SEQ ID NO: 7307 - protein, 122 aa, Homo sapiens
MFQIDQATKQCSKMTLTQPWDPLDIPQNSTFEDQYSIGGPQEQITVQEWSDRKSARSYETWIGIYTVKDCYPVQETFTINYSVILSTRFFDIQLGIKDPSVFTPPSTCQMAQLEKMSEDCSW

SEQ ID NO: 7308 - protein, 134 aa, Homo sapiens
MGKCRGLRTARKLRSHRRDQKWHDKQYKKAHLGTALKANPFGGASHAKGIVLEKVGVEAKQPNSAIRKCVRVQLIKNGKKITAFVPNDGCLNFIEENDEVLVAGFGRKGHAVGDIPGVRFKSFHGYSGMVEMKL

SEQ ID NO: 7309 - protein, 149 aa, Homo sapiens
MEADIITNLRCRLKEAEEERLKAAQYGLQLVESQNELQNQLDKCRNEMMTMTESYEQEKYTLQREVELKSRMLESLSCECEAIKQQQKMHLEKLEEQLSRSHGQEVNELKTKIEKLKVELDEARLSEKQLKHQVDHQKELLSCKSEELR

SEQ ID NO: 7310 - protein, 176 aa, Homo sapiens
SEILRMERIILDKLNWDLHTATPLDFLHIMDSSQLIHCRELVAHHLSTLQSSLPLNSVYVYRPLKHTLVTCDKGVFRLHPSSVPGPDFSKDNSKPEVPVRGTAAFYHHLPAASGCKQTSTKRKVEEMEVDDFYDGIKRLYNEDNVSENVGSVCGTDLSRQEGHASPCPPLQPVSVM

SEQ ID NO: 7311 - protein, 572 aa, Homo sapiens
MAVYVGMLRLGRLCAGSSGVLGARAALSRSWQEARLQGVRFLSSREVDRMVSTPIGGLSYVQGCTKKHLNSKTVGQCLETTAQRVPEREALVVLHEDVRLTFAQLKEEVSVNPAYQAMELEYVLKKVGCKALVFPKQFKTQQYYNVLKQICPEVENAQPGALKSQRLPDLTTVISVDAPLPGTLLLDEVVAAGSTRQHLDQLQYNQQFLSCHDPINIQFTSGTTGSPKGATLSHYNIVNNSNILGERLKLHEKTPEQLRMILPNPLYHCLGSVAGTMMCLMYGATLILASPIFNGKKALEAISRERGTFLYGTPTMFVDILNQPDFSSYDISTMCGGVIAGSPAPPELIRAIINKINMKDLVVAYGTTENSPVTFAHFPEDTVEQKAESVGRIMPHTEARIMNMEAGTLAKLNTPGELCIRGYCVMLGYWGEPQKTEEAVDQDKWYWTGDVATMNEQGFCKIVGRSKDMIIRGGENIYPAELEDFFHTHPKVQEVQVVGVKDDRMGEEICACIRLKDGEETTVEEIKAFCKGKISHFKIPKYIVFVTNYPLTISGKIQKFKLREQMERHLNL

SEQ ID NO: 7312 - protein, 183 aa, Homo sapiens
MAEEGAVAVCVRVRPLNSREESLGETAQVYWKTDNNVIYQVDGSKSFNFDRVFHGNETTKNVYEEIAAPIIDSAIQGYNGTIFAYGQTASGKTYTMMGSEDHLGVIPRAIHDIFQKIKKRNVYVADLTEEVVYTSEMALKWITKGEKSRHYGETKMNQRSSRSHTIFRMILESREKGEPSNCE

SEQ ID NO: 7313 - protein, 86 aa, Homo sapiens
MTEQMTLRGTLKGHNGWVTQIATTPQFPDMILSASRDELKQEVISTSSKAEPPQCTSLAWSADGQTLFAGYTDNLVRVWQVTIGTR

SEQ ID NO: 7314 - protein, 65 aa, Homo sapiens
AAMYEIKVRSIPDHYFKGFWSEWSPSYYFRTPEINNSSGLSLSYGPVSPIIRRLWNIFVRNQEKI

SEQ ID NO: 7315 - protein, 215 aa, Homo sapiens
LLPSAAEMKMRSALLRAKPRADTAATADAKDREEEQHRMLSRASGVTGRRETPGPTKPLPWTAGKHSEDGARPRLQPSKNDPPSLRPMPRGSCLPCPCVQGTFRNSPISHPPSPSPSAYSSRTSRPMRDVGEDQVHPPLCHFPQRSLQHQLPQPGAQRFATRGYPMEDMKLQGVPMPPGDLCGPTLLLDVSIKMEKDSGCEGAADGCVPSQVWLG

SEQ ID NO: 7316 - protein, 244 aa, Homo sapiens
MALRVTRNSKINAENKAKINMAGAKRVPTAPAATSKPGLRPRTALGDIGNKVSEQLQAKMPMKKEAKPSATGKVIDKKLPKPLEKVPMLVPVPVSEPVPEPEPEPEPEPVKEEKLSPEPILVDTASPSPMETSGCAPAEEDLCQAFSDVILAVNDVDAEDGADPNLCSEYVKDIYAYLRQLENNCVPKKMLQLVGVTAMFIASKYEEMYPPEIGDFAFVTDNTYTKHQIRQMEMKILRALNFGL

SEQ ID NO: 7317 - protein, 233 aa, Homo sapiens
MTEQMTLRGTLKGHNGWVTQIATTPQFPDMILSASRDKTIIMWKLTRDETNYGIPQRALRGHSHFVSDVVISSDGQFALSGSWDGTLRLWDLTTGTTTRRFVGHTKDVLSVAFSSDNRQIVSGSRDKTIKLWNTLGVCKYTVQDESHSEWVSCVRFSPNSSNPIIVSCGWDKLVKVWNLANCKLKTNHIGHTGYLNTVTVSPDGSLCASGGKTLFAGYTDNLVRVWQVTIGTR

SEQ ID NO: 7318 - protein, 153 aa, Homo sapiens
MTEQMTLRGTLKGHNGWVTQIATTPQFPDMILSASRDKTIIMWKLTRDETNYGIPQRALRGHSHFVSDVVISSDGQFALSGSWDGTLRLWDLTTGTTTRRFVGHTKDVLSVAFSSDNRQIVSGSRDKTIKLWNTLGVCKYTVQSHSVAQAGVQ

SEQ ID NO: 7319 - protein, 242 aa, Homo sapiens
MMPLAEAGALAQGGGPSATEWACILRRKTPRHKQPTLLMVRASRRSGKTSAVLKAGRQSVSGRKNSTSKDLVTLGASSLREERGHPLHPRHRKAVHLRTRGRTRGWVQTLARMSRRTRGPVERAAAAAAAAAGGDAGHAPFPPPPAADGARAPRSPGQVTPRGLRLRLPRRESLLRGLCRPLRPLLGFRESDSAKPASLRLLQHTPSARRNYRIAGARLMRSNYPPPLSSAALRGAGPTRRN

SEQ ID NO: 7320 - protein, 287 aa, Homo sapiens
MDSFKVVLEGPAPWGFRLQGGKDFNVPLSISRLTPGGKAAQAGVAVGDWVLSIDGENAGSLTHIEAQNKIRACGERLSLGLSRAQPVQSKPQKASAPAADPPRYTFAPSVSLNKTARPFGAPPPADSAPQQNGQPLRPLVPDASKQRLMENTEDWRPRPGTGQSRSFRILAHLTGTEFMQDPDEEHLKKSRWLPGMRGTPGAASEAGALPRLPARDRTPANWTLLGEAALPIPTPVGPGIQLGSFHAPSHLPWGQQDPGWGVGPCQEAQPCRALNGRSCSQVPRTEA

SEQ ID NO: 7321 - protein, 185 aa, Homo sapiens
QAVRPKYLLGREVTGNMRAILIDWLVQVQMKFRLLQETMYMTVSIIDRFMQNNCVPKKMLQLVGVTAMFIASKYEEMYPPEIGDFAFVTDNTYTKHQIRQMEMKILRALNFGLGRPLPLHFLRRASKIGEVDVEQHTLAKYLMELTMLDYDMVHFPPSQIAAGAFCLALKILDNGEWLCSTWLRM

SEQ ID NO: 7322 - protein, 80 aa, Homo sapiens
MKFPGPLENQRLSFLLEKAITREAQMWKVNVRKMPSNQNVSPSQRDEVIQWLAKLKYQFNLYPETFALASSLLDRFLATV

SEQ ID NO: 7323 - protein, 71 aa, Homo sapiens
MTEQMTLRGTLKGHNGWVTQIATTPQFPDMILSASRDKTIIMWKLTRDETNYGIPQRAPPRGDLWAIPRMC

SEQ ID NO: 7324 - protein, 346 aa, Homo sapiens
MSRDPGSGGWEEAPRAAAALCTLYHEAGQRLRRLQDQLAARDALIARLRARLAALEGDAAPSLVDALLEQVARFREQLRRQEGGAAEAQMRQEIERLTERLEEKEREMQQLLSQPQHEREKEVVLLRRSMAEGERARAASDVLCRSLANETHQLRRTLTATAHMCQHLAKCLDERQHAQRNVGERSPDQSEHTDGHTSVQSVIEKLQEENRLLKQKVTHILAYKDDFMSERADRERAQSRIQELEEKVASLLHQVSWRQDSREPDAGRIHAGSKTAKYLAADALELMVPGGWRPGTGSQQPEPPAEGGHPGAAQRGQGDLQCPHCLQCFSDEQGEELLRHVAECCQ

SEQ ID NO: 7325 - protein, 48 aa, Homo sapiens
MATPPKRSCPSFSASSEGTRIKKISIEGNIGKEPPEMWDARLGCRGSG

SEQ ID NO: 7326 - protein, 102 aa, Homo sapiens
MGPRRLLLVAACFSLCGPLLSARTRARRPVTFRWGVPPPSRAQPMPLWTRSWRVQPACHGVLDMEEDGAEAPWGSLQSCVALVIVFLPGPPPKRKALTLLHQ

SEQ ID NO: 7327 - protein, 76 aa, Homo sapiens
MCDQCCVCQDLVDRTRSWLYAACSISYLGAMVSSNSALQFVNYPTQVLGKSCKPIPVMLLGVTLLKKKYPLAKYLC

SEQ ID NO: 7328 - protein, 82 aa, Homo sapiens
MTKGTSSFGKRRNKTHTLCRRCGSKAYHLQKSTCGKCGYPAKRKRKYNWSAKAKRRNTTGTGRMRHLKIVYRRFRYSLYVRS

SEQ ID NO: 7329 - protein, 970 aa, Homo sapiens
MQHKIVTSLDWRCCPGYSGPKCQLRAQEQQSLIHTNQAESHTAVGRGVAEQQQQQGCGDPEVMQKMTDQVNYQAMKLTLLQKKIDNISLTVNDVRNTYSSLEGKVSEDKSREFQSLLKGLKSKSINVLIRDIVREQFKIFQNDMQETVAQLFKTVSSLSEDLESTRQIIQKVNESVVSIAAQQKFVLVQENRPTLTDIVELRNHIVNVRQEMTLTCEKPIKELEVKQTHLEGALEQEHSRSILYYESLNKTLSKLKEVHEQLLSTEQVSDQKNAPAAESVSNNVTEYMSTLHENIKKQSLMMLQMFEDLHIQESKINNLTVSLEMEKESLRGECEDMLSKCRNDFKFQLKDTEENLHVLNQTLAEVLFPMDNKMDKMSEQLNDLTYDMEILQPLLEQGASLRQTMTYEQPKEAIVIRKKIENLTSAVNSLNFIIKELTKRHNLLRNEVQGRDDALERRINEYALEMEDGLNKTMTIINNAIDFIQDNYALKETLSTIKDNSEIHHKCTSDMETILTFIPQFHRLNDSIQTLVNDNQRYNFVLQVAKTLAGIPRDEKLNQSNFQKMYQMFNETTSQVRKYQQNMSHLEEKLLLTTKISKNFETRLQDIESKVTQTLIPYYISVKKGSVVTNERDQALQLQVLNSRFKALEAKSIHLSINFFSLNKTLHEVLTMCHNASTSVSELNATIPKWIKHSLPDIQLLQKGLTEFVEPIIQIKTQAALSNLTCCIDRSLPGSLANVVKSQKQVKSLPKKINALKKPTVNLTTVLIGRTQRNTDNIIYPEEYSSCSRHPCQNGGTCINGRTSFTCACRHPFTGDNCTIKLVEENALAPDFSKGSYRYAPMVAFFASHTYGMTIPGPILFNNLDVNYGASYTPRTGKFRIPYLGVYVFKYTIESFSAHISGFLVVDGIDKLAFESENINSEIHCDRVLTGDALLELNYGQEVWLRLAKGTIPAKFPPVTTFSGYLLYRT

SEQ ID NO: 7330 - protein, 125 aa, Homo sapiens
MKFPGPLENQRLSFLLEKAITREAQMWKVNVRKMPSNQNVSPSQRDEVIQWLAKLKYQFNLYPETFALASSLLDRFLATVKAHPKYLSCIAISCFFLAAKTVEEDERIPVLKVLARDSFCGCSSS

SEQ ID NO: 7331 - protein, 96 aa, Homo sapiens
YYDYYGYDYHNYRGGYEDPYYGYEDFQVGARGRGGRGARGAAPSRGRGAAPPRGRAGYSQRGGPGSARGVRGARGGAQQQRGRGGKGVEAGPDLLQ

SEQ ID NO: 7332 - protein, 182 aa, Homo sapiens
FLPQTAPRARACCSWGAGLPCPTRHSSSDPCLGSHFNTKKEGDLIAAQARLKDLEALLNSKEAALSTALSEKRTLEGELHDLRGQVAKLEAALGEAKKQLQDEMLRRVDAENRLQTMKEELDFQKNIYSEELRETKRRHETRLVEIDNGKQREFESRLADALQELRAQHEDQVEQYKKELEK

SEQ ID NO: 7333 - protein, 379 aa, Homo sapiens
EEGISLFSSLLNNKHFLIVFVHALEQQKDFAVRDRCSLASLLTIALHGKLEYYTSIMKELLVDLIDASAAKNPKLMLRRTESVVEKMLTNWMSICMYSCLRETVGEPFFLLLCAIKQQINKGSIDAITGKARYTLSEEWLLRENIEAKPRNLNVSFQGCGMDSLSVRAMDTDTLTQVKEKILEAFCKNVPYSQWPRAEDVDLEWFASSTQSYILRDLDDTSVVEDGRKKLNTLAHYKIPEGASLAMSLIDKKDNTLGRVKDLDTEKYFHLVLPTDELAEPKKSHRQSHRKKVLPEIYLTRLLSTKGTLQKFLDDLFKAILSIREDKPPLAVKYFFDFLEEQAEKRGISDPDTLHIWKTNRWRPSSPVLGEHPEEPPVCL

SEQ ID NO: 7334 - protein, 397 aa, Homo sapiens
MGKGRAADLKYIEACARRIVQNSNGYKIVTEKSTVPVRAAESIRRIFDANTKPNLNLQVLSNPEFLAEGTAIKDLKNPDRVLIGGDETPEGQRAVQALCAVYEHWVPREKILTTNTWSSELSKLAANAFLAQRISSINSISALCEATGADVEEVATAIGMDQRIGNKFLKASVGFGGSCFQKDVLNLVYLCEALNLPEVARYWQQVIDMNDYQRRRFASRIIDSLFNTVTDKKIAILGFAFKKDTGDTRESSSIYISKYLMDEGAHLHIYDPKVPREQIVVDLSHPGVSEDDQVSRLVTISKDPYEACDGAHAVVICTEWDMFKELDYERIHKKMLKPAFIFDGRRVLDGLHNELQTIGFQIETIGKKVSSKRIPYAPSGEIPKFSLQDPPNKKPKV

SEQ ID NO: 7335 - protein, 58 aa, Homo sapiens
KTLFELAAESDVSTAIDLFRQAGLGNHLSGSERLTLLAPLNSVFKGAHLSGPNHHPFL

SEQ ID NO: 7336 - protein, 42 aa, Homo sapiens
MATVEPETTPTPNPPTTEEEKTESNQEVANPEHYIKHPLQNR

SEQ ID NO: 7337 - protein, 376 aa, Homo sapiens
MIPCGWLMNKNEKHDDKLVMFTNQSEDSERCESMELDKKIQDLIERNASPHPKRFTPEAMPTHRNLCSLKTPGKTASMAHFVQGTSRMIAAESSTEHKECAEPSTRKNLMNSLEQKIRCLEKQRKELLEVNQQWDQQFRSMKELYERKVAELKTKLDAAERFLSTREKDPHQRQRKDDRQREDDRQRDLTRDRLQREEKEKERLNEELHELKEENKLLKGKNTLANKEKEHYECEIKRLNKALQDALNIKCSFSEDCLRKSRVEFCHEEMRTEMEVLKQQVQIYEEDFKKERSDRERLNQEKEELQQINETSQSQLNRLNSQIKACQMEKEKLEKQLKQMYCPPCNCGLVFHLQDPWVPTGPGAVQKQREHPVYPQ

SEQ ID NO: 7338 - protein, 685 aa, Homo sapiens
SEDCEVAGYRVLKGTEAVIIPYALHRDPRYFPNPEEFQPERFFPENAQGRHPYAYVPFSAGPRNCIGCLTQLYENAFFRGGDVASMYTPNAQYCQMRCTFHPRCLLFSFLPASSINDMEKRFGCFLKDSVTGTLPKVHRTGAVSGHSLKQCGHQISACHRDIYKGVDMRGVNFNVSKVSSVEECQKRCTSNIRCQFFSYATQTFHKAEYRNNCLLKYSPGGTPTAIKVLSNVESGFSLKPCALSEIGCHMNIFQHLAFSDVDVARVLTPDAFVCRTICTYHPNCLFFTFYTNVWKIESQRNVCLLKTSESGTPSSSTPQENTISGYSLLTCKRTLPEPCHSKIYPGVDFGGEELNVTFVKGVNVCQETCTKMIRCQFFTYSLLPEDCKEEKCKCFLRLSMDGSPTRIAYGTQGSSGYSLRLCNTGDNSVCTTKTSTRIVGGTNSSWGEWPWQVSLQVKLTAQRHLCGGSLIGHQWVLTAAHCFDGLPLQDVWRIYSGILNLSDITKDTPFSQIKEIIIHQNYKVSEGNHDIALIKLQAPLNYTEFQKPICLPSKGDTSTIYTNCWVTGWGFSKEKGEIQNILQKVNIPLVTNEECQKRYQDYKITQRMVCAGYKEGGKDACKGDSGGPLVCKHNGMWRLVGITSWGEGCARREQPGVYTKVAEYMDWILEKTQSSDGKAQMQSPA

SEQ ID NO: 7339 - protein, 58 aa, Homo sapiens
MQLKPMEINPEMLNKVLSRLGVAGQWRFVDVLGLEEESLGSVPAPACALLLLFPLTAQ

SEQ ID NO: 7340 - protein, 82 aa, Homo sapiens
AMKTLLLKERQEKLQLEMHLRDEICNEMVEQMQQREQWCSEHLDTQKELLEEMYEEKLNILKESLTSFYQEEIQSCISIRKC

SEQ ID NO: 7341 - protein, 101 aa, Homo sapiens
MLWDLNEGKHLYTLDGGDIINALCFSPNRYWLCAATGPSIKIWDLEGKIIVDELKQEVISTSSKAEPPQCTSLAWSADGQTLFAGYTDNLVRVWQVTIGTR

SEQ ID NO: 7342 - protein, 207 aa, Homo sapiens
MQLKPMEINPEMLNKVLSRLGVAGQWRFVDVLGLEEESLGSVPAPACALLLLFPLTAQHENFRKKQIEELKGQEVSPKVYFMKQTIGNSCGTIGLIHAVANNQDKLGFEDGSVLKQFLSETEKMSPEDRAKCFEKNEVDDKVNFHFILFNNVDGHLYELDGRMPFPVNHGASSEDTLLKDAAKVCREFTEREQGEVRFSAVALCKAA

SEQ ID NO: 7343 - protein, 317 aa, Homo sapiens [sequence omitted]

SEQ ID NO: 7344 - protein, 232 aa, Homo sapiens
MMQCLIRKLAALSQYEEVLAKISSTSTDRLTVLKTKPQSIQRDIITVCNDPYTLAQQLTHIELERLNYIGPEEFVQAFVQKDPLDNDKSCYSERKKTRNLEAYVEWFNRLSYLVATEICMPVKKKHRARMIEYFIDVARECFNIGNFNSLMAIISGMNMSPVSRLKKTWAKVKTAKFDILEHQMDPSSNFYNYRTALRGAAQRSLTAHSSREKIVIPFFSLLIKDIYFLNEG

SEQ ID NO: 7345 - protein, 557 aa, Homo sapiens
MRGRGMPTDVMHQNIYDYIHVDDRQDFCRQLHWAMDPPQVVFGQPPPLETGDDAILGRLLRAQEWGTGTPTEYSAFLTRCFICRVRCLLDSTSGFLTMQFQGKLKFLFGQKKKAPSGAMLPPRLSLFCIAAPVLLPSAAEMKMRSALLRAKPRADTAATADAKVKATTSLCESELHGKPNYSAGRSSRESGVLVLREQTDAGRWAQVPARAPCLCLRGGPDLVLDPKGGSGDREEEQHRMLSRASGVTGRRETPGPTKPLPWTAGKHSEDGARPRLQPSKNDPPSLRPMPRGSCLPCPCVQGTFRNSPISHPPSPSPSAYSSRTSRPMRDVGEDQVHPPLCHFPQRSLQHQLPQPGAQRFATRGYPMEDMKLQGVPMPPGDLCGPTLLLDVSIKMEKDSGCEGAADGCVPSQVWLGASDRSHPATFPTRMHLKTEPDSRQQVYISHLGHGVRGAQPHGRATAGRSRELTPFHPAHCACLEPTDGLPQSEPPHQLCARGRGEQSCTCRAAEAAPVVKREPLDSPQWATHSQGMVPGMLPKSALATLVPPQASGCTFLP

SEQ ID NO: 7346 - protein, 777 aa, Homo sapiens
MPQAQKKTTSVSLTIGSSSPKTGVTTAVIQPLSVPVQQVHSPTSYLCRPDGTTTAYFPPVFTKELQNTAVAEGQVVVLECRVRGAPPLQVQWFRQGSEIQDSPDFRILQKKPRSTAEPEEICTLVIAETFPEDAGIFTCSARNDYGSATSTAQLVVTSANTENCSYESMGESNNDHFQHFPPPPPILETSSLELASKKPSEIQQVNNPELGLSRAALQMQFNAAERETNGVHPSRGVNGLINGKANSNKSLPTPAVLLSPTKEPPPLLAKPKLGFPKKASRTARIASDEEIQGTKDAVIQDLERKLRFKEDLLNNGQPRLTYEERMARRLLGADSATVFNIQEPEEETANQEYKVSSCEQRLISEIEYRLERSPVDESGDEVQYGDVPVENGMAPFFEMKLKHYKIFEGMPVTFTCRVAGNPKPKIYWFKDGKQISPKSDHYTIQRDLDGTCSLHTTASTLDDDGNYTIMAANPQGRISCTGRLMVQAVNQRGRSPRSPSGHPHVRRPRSRSRDSGDENEPIQERFFRPHFLQAPGDLTVQEGKLCRMDCKVSGLPTPDLSWQLDGKPVRPDSAHKMLVRENGVHSLIIEPVTSRDAGIYTCIATNRAGQNSFSLELVVAAKEAHKPPVFIEKLQNTGVADGYPVRLECRVLGVPPPQIFWKKENESLTHSTDRVSMHQDNHGYICLLIQGATKEDAGWYTVSAKNEAGIVSCTARLDVYTQWHQQSQSTKPKKVRPSASRYAALSDQGLDIKAAFQPEANPSHLTLNTALVESEDL

SEQ ID NO: 7347 - protein, 197 aa, Homo sapiens
DGTLRLWDLTTGTTTRRFVGHTKDVLSVAFSSDNRQIVSGSRDKTIKLWNTLGVCKYTVQDESHSEWVSCVRFSPNSSNPIIVSCGWDKLVKDGQAMLWDLNEGKHLYTLDGGDIINALCFSPNRYWLCAATGPSIKIWDLEGKIIVDELKQEVISTSSKAEPPQCTSLAWSADGQTLFAGYTDNLVRVWQVTIGTR

SEQ ID NO: 7348 - protein, 60 aa, Homo sapiens
MEADIITNLRCRLKEAEEERLKAAQYGLQLVESQNELQNQLDKCRNEMMTMTERLLDLTC

SEQ ID NO: 7349 - protein, 74 aa, Homo sapiens
MPLGADCARYTTLSLLRRARMHIQKLEDQEQRARQLKERLRSKQQSLQRQLEQLRGLAGAAERERLRADSLDSS

SEQ ID NO: 7350 - protein, 170 aa, Homo sapiens
MSEEARFCFSPGENSKTMSTELFSSTREEGSSGSGPSFRSNQRKMLNLLLERDTSFTVCPDVPRTPVGKFLGDSANLSILSGGTPKRCLDLSNLSSGEITATQLTTSADLDETGHLDSSGLQEVHLAGMNHDQHLMKCSPAQLLCSTPNGLDRGHRKRDAMCSSSANKEN

SEQ ID NO: 7351 - protein, 369 aa, Homo sapiens
MNKNEKHDDKLVMFTNQSEDSERCESMELDKKIQDLIERNASPHPKRFTPEAMPTHRNLCSLKTPGKTASMAHFVQGTSRMIAAESSTEHKECAEPSTRKNLMNSLEQKIRCLEKQRKELLEVNQQWDQQFRSMKELYERKVAELKTKLDAAERFLSTREKDPHQRQRKDDRQREDDRQRDLTRDRLQREEKEKERLNEELHELKEENKLLKGKNTLANKEKEHYECEIKRLNKALQDALNIKCSFSEDCLRKSRVEFCHEEMRTEMEVLKQQVQIYEEDFKKERSDRERLNQEKEELQQINETSQSQLNRLNSQIKACQMEKEKLEKQLKQMYCPPCNCGLVFHLQDPWVPTGPGAVQKQREHPVYPQ

SEQ ID NO: 7352 - protein, 124 aa, Homo sapiens
MAQSKLDCRSPVGLDCCNCCLDLAHRSGLQRGSSGENNNPGSPTVSNFRQLQEKLVFENLNTDKLNSIMRQDSLEPVLRDPCYLINEGICNRNIDQTMLSILLFFHSASGASVVAIDNKIEQAM

SEQ ID NO: 7353 - protein, 249 aa, Homo sapiens
MSTELFSSTREEGSSGSGPSFRSNQRKMLNLLLERDTSFTVCPDVPRTPVGKFLGDSANLSILSGGTPKRCLDLSNLSSGEITATQLTTSADLDETGHLDSSGLQEVHLAGMNHDQHLMKCSPAQLLCSTPNGLDRGHRKRDAMCSSSANKENDNGNLVDSEMKYLGSPITTVPKLDKNPNLGEDQAEEISDELMEFSLKDQEAKVSRSGLYRSPSMPENLNRPRLKQVEKFKDNTIPDKVKKKYFSGQ

SEQ ID NO: 7354 - protein, 97 aa, Homo sapiens
REGQSRAKVLSNMIKQKRKEKAGKWEVPLPKVRAQGETEVLKVIRTGKRKKKAWKRMVTKVCFVGDGFTRKPPKYERFIRPMENMPRLPTILKMMDV

SEQ ID NO: 7355 - protein, 23 aa, Homo sapiens
MSEVSCKKRDDYLEWPEYFMAVA

SEQ ID NO: 7356 - protein, 55 aa, Homo sapiens
MFEEKASSPSGKMGGEEKPIGAGEEKQKEGGKKKNKEGSGDGGRAERLTQRVSAE

SEQ ID NO: 7357 - protein, 230 aa, Homo sapiens
MWLFFPLCYHPPTPLSWQELEGERASSCAHKRSASWGSTDHRKEISKLKQQLQRTKLSRSGKEKERGSPLLGDHAVRGALRASPPSFPSGSPVLRLSPCLHRSLEGLNQELEEVFVKEQGEEELLRILDIPDGHRAPAPPQSGSCDHPLLLLEPGNLASSPSMSLASPQPCGLASHEEHRGAAEELASTPNDKASSPGHPAFLEDGSPSPVLAFAASPRPNHSYIFKREP

SEQ ID NO: 7358 - protein, 95 aa, Homo sapiens
MPGSLPLNAEACWPKDVGIVALEIYFPSQYVDQAELEKYDGVDAGKYTIGLGQAKMGFCTDREDINSLCMTVVQNLMERNNLSYDCIGRLEVGTE

SEQ ID NO: 7359 - protein, 58 aa, Homo sapiens
MLRSGPASGPSVPTGRAMPSRRVARPPAAPELGALGSPDLSSLSLAVSRSTGSSSTDA

SEQ ID NO: 7360 - protein, 77 aa, Homo sapiens
MGSKDHAVFFREMTQLILNEMPKAGYSSILNDFVESNFFVIDGDSLLVTCLGVKSFKWGQNLHFFYLVECYLVDLLS

SEQ ID NO: 7361 - protein, 414 aa, Homo sapiens
KEENTIILQQLLPLRTKVAKLLGYSTHADFVLEMNTAKSTSRVTAFLDDLSQKLKPLGEAEREFILNLKKKECKDRGFEYDGKINAWDLYYYMTQTEELKYSIDQEFLKEYFPIEVVTEGLLNTYQELLGLSFEQMTDAHVWNKSVTLYTVKDKATGEVLGQFYLDLYPREGKYNHAACFGLQPGCLLPDGSRMMAVAALVVNFSQPVAGRPSLLRHDETDFARFSGTNVETDFVEVPSQMLENWVWDVDSLRRLSKHYKDGSPIADDLLEKLVASRLVNTGLLTLRQIVLSKVDQSLHTNTSLDAASEYAKYCSEILGVAATPGTNMPATFGHLAGGYDGQYYGYLWSEVFSMDMFYSCFKKEGIMNPEVGMKYRNLILKPGGSLDGMDMLHNFLKREPNQKAFLMSRGLHAP

SEQ ID NO: 7362 - protein, 199 aa, Homo sapiens
MEFSIKQSPLSVQSVVKCIKMKQAPEILGSANGKTPSCEVNRECSVFLSKAQLSSSLQEGVMQKFNGHDALPFIPADKLKDLTSRVFNGEPGAHDAKLRFESQEMKGIGTPPNTTPIKNGSPEIKLKITKTYMNGKPLFESSICGDSAADVSQSEENGQKPENKARRNRKRSIKYDSLLEQGLVEAALVSKISSPSDKK

SEQ ID NO: 7363 - protein, 175 aa, Homo sapiens
MESEDLSGRELTIDSIMNKVRDIKNKFKNEDLTDELSLNKISADTTDNSGTVNQIMMMANNPEDWLSLLLKLEKNSVPLSDALLNKLIGRYSQAIEALPPDKYGQNESFARIQVRFAELKAIQEPDDARDYFQMARANCKKFAFVHISFAQFELSQGNVKKSKQLLQKAVERGAV

SEQ ID NO: 7364 - protein, 150 aa, Homo sapiens
MPKAKGKTRRQKFGYSVNRKRLNRNARRKAAPRIECSHIRHAWDHAKSVRQNLAEMGLAVDPNRAVPLRKRKVKAMEVDIEERPKELVRKPYVLNDLEAEASLPEKKGNTLSRDLIDYVRYMVENHGEDYKVSGSGPVGWLGRRPGPFAA

SEQ ID NO: 7365 - protein, 158 aa, Homo sapiens
MEADIITNLRCRLKEAEEERLKAAQYGLQLVESQNELQNQLDKCRNEMMTMTESYEQEKYTLQREVELKSRMLESLSCECEAIKQQQKMHLEKLEEQLSRSHGQEVNELKTKIEKLKVELDEARLSEKQLKHQVDHQKELLSCKSEELRVMSERVQES

SEQ ID NO: 7366 - protein, 248 aa, Homo sapiens
GVGGTQRRGQTFTDPPYVHGGWIEVSTAKKEDINLSVRKLLNRHNIVFGDYTWTEFDEPFLTRNVQSVSIIDTELKVKDSQPIDLSACTVALHIFQLNEDGPSSENLEEETENIIAANHWVLPAAEFHGLWDSLVYDVEVKSHLLDYVMTTLLFSDKNVNSNLITWNRVVLLHGPPGTGKTSLCKALAQKLTIRLSSRYRYGQLIEINSHSLFSKWFSESGKLVTKMFQKIQDLIDDKDALVFVLIDE

SEQ ID NO: 7367 - protein, 73 aa, Homo sapiens
MTCAFASNWEKIEQFHSRPDDIVIATYPKSGTTWVSEIIDMILNDGDIEKCKRGFITEKVPMLEMTLPGLRTS

SEQ ID NO: 7368 - protein, 938 aa, Homo sapiens
MATCIGEKIEDFKVGNLLGKGSFAGVYRAESIHTGLEVAIKMLYNYFEDSNYVYLVLEMCHNGEMNRYLKNRVKPFSENEARHFMHQIITGMLYLHSHGILHRDLTLSNLLLTRNMNIKIADFGLATQLKMPHEKHYTLCGTPNYISPEIATRSAHGLESDVWSLGCMFYTLLIGRPPFDTDTVKNTLNKVVLADYEMPSFLSIEAKDLIHQLLRRNPADRLSLSSVLDHPFMSRNSSTKSKDLGTVEDSIDSGHATISTAITASSSTSISGSLFDKRRLLIGQPLPNKMTVFPKNKSSTDFSSSGDGNSFYTQWGNQETSNSGRGRVIQDAEERPHSRYLRRAYSSDRSGTSNSQSQAKTYTMERCHSAEMLSVSKRSGGGENEERYSPTDNNANIFNFFKEKTSSSSGSFERPDNNQALSNHLCPGKTPFPFADPTPQTETVQQWFGNLQINAHLRKTTEYDSISPNRDFQGHPDLQKDTSKNAWTDTKVKKNSDASDNAHSVKQQNTMKYMTALHSKPEIIQQECVFGSDPLSEQSKTRGMEPPWGYQNRTLRSITSPLVAHRLKPIRQKTKKAVVSILDSEEVCVELVKEYASQEYVKEVLQISSDGNTITIYYPNGGRGFPLADRPPSPTDNISRYSFDNLPEKYWRKYQYASRFVQLVRSKSPKITYFTRYAKCILMENSPGADFEVWFYDGVKIHKTEDFIQVIEKTGKSYTLKSESEVNSLKEEIKMYMDHANEGHRICLALESIISEEERKTRSAPFFPIIIGRKPGSTSSPKALSPPPSVDSNYPTRERASFNRMVMHSAASPTQAPILNPSMVTNEGLGLTTTASGTDISSNSLKDCLPKSAQLLKSVFVKNVGWATQLTSGAVWVQFNDGSQLVVQAGVSSISYTSPNGQTTRYGENEKLPDYIKQKLQCLSSILLMFSNPTPNFH

SEQ ID NO: 7369 - protein, 126 aa, Homo sapiens
MSKKKGLSAEEKRTRMMEIFSETKDVFQLKDLEKIAPKEKGITAMSVKEVLQSLVDDGMVDCERIGTSNYYWAFPSKALHARKHKLEVLESQDPGCCFHEIIKVSYYRKFWLGAVAHACNPSTLGG

SEQ ID NO: 7370 - protein, 198 aa, Homo sapiens
FRYLVMEIRKILAKISICFQGHRICLALESIISEEERKTRSAPFFPIIIGRKPGSTSSPKALSPPPSVDSNYPTRERASFNRMVMHSAASPTQAPILNPSMVTNEGLGLTTTASGTDISSNSLKDCLPKSAQLLKSVFVKNVGWATQLTSGAVWVQFNDGSQLVVQAGVSSISYTSPNGQTTRYGENEKLPDYIKQKL

SEQ ID NO: 7371 - protein, 874 aa, Homo sapiens
MANLKIELSKLDSEAWPGALDIEKEKLMLINEKEELLKELQFVTPQKRTQDELERLEAERQRLEEELLSVRGTPSRALAERLRLEERRKELLQKLEETTKLTTYLHSQLKSLSASTLSMSSGSSLGSLASSRGSLNTSSRGSLNSLSSTELYYSSQSDQIDVDYQYKLDFLLQEKSGYIPSGPITTIHENEVVKSPSQPGQSGLCGVAAAATGHTPPLAEAPKSVASLSSRSSLSSLSPPGSPLVLEGTFPMSSSHDASLHQFTADFEDCELSSHFADISLIENQILLDSDSGGASQSLSEDKDLNECAREPLYEGTADVEKSLPKRRVIHLLGEKTTCVSAAVSDESVAGDSGVYEAFVKQPSEMEDVTYSEEDVAIVETAQVQIGLRYNAKSSSFMVIIAQLRNLHAFLIPHTSKVYFRVAVLPSSTDVSCLFRTKVHPPTESILFNDVFRVAISQTALQQKTLRVDLCSVSKHRREECLAGTQISLADLPFSSEVFTLWYNLLPSKQMPCKKNEENEDSVFQPNQPLVDSIDLDAVSALLARTSAELLAVEQELAQEEEEESGQEEPRGPDGDWLTMLREASDEIVAEKEAEVKLPEDSSCTEDLSSCTSVPEMNEDGNRKESNCAKDLRSQPPTRIPTLVDKETNTDEAANDNMAVRPKERSSLSSRQHPFVRSSVIVRSQTFSPGERNQYICRLNRSDSDSSTLAKKSLFVRNSTERRSLRVKRTVCQSVLRRTTQECPVRTSLDLELDLQASLTRQSRLNDELQALRDLRQKLEELKAQGETDLPPGVLEDERFQRLLKQAEKQAEQSKEEQKQGLNAEKLMRQVSKDVCRLREQSQKVPRQVQSFREKIAYFTRAKISIPSLPADDV

SEQ ID NO: 7372 - protein, 56 aa, Homo sapiens
MFEEKASSPSGKMGGEEKPIGAGEEKQKEGGKKKNKEGSGDGGRAESRPGRQHRYC

SEQ ID NO: 7373 - protein, 199 aa, Homo sapiens
MANLLKTVVTGCSCPLLSNLGSCKGLRVKKDFLRTFYTHQELWCKAPVKPGIPYKQLTVGVPKEIFQNEKRVALSPAGVQNLVKQGFNVVVESGAGEASKFSDDHYRVAGAQIQGAKEVLASDLVVKVRAPMVNPTLGVHEADLLKTSGTLISFIYPAQNPELLNKLSQRKTTVLAMDQVPRVTIAQGYDALSSMANIA

SEQ ID NO: 7374 - protein, 246 aa, Homo sapiens
GTTTRRFVGHTKDVLSVAFSSDNRQIVSGSRDKTIKLWNTLGVCKYTVQDESHSEWVSCVRFSPNSSNPIIVSCGWDKLVKVWNLANCKLKTNHIGHTGYLNTVTVSPDGSLCASGGKDGQAMLWDLNEGKHLYTLDGGDIINALCFSPNRYWLCAATGPSIKIWDLEGKIIVDELKQEVISTSSKAEPPQCTSLAWSADGQEYITTTYKLAVEMRAVSYSLPGVVAHAYWRLRWEDLLNCRGLRL

SEQ ID NO: 7375 - protein, 230 aa, Homo sapiens
SLHPGSLLKDLDTEKYFHLVLPTDELAEPKKSHRQSHRKKVLPEIYLTRLLSTKGTLQKFLDDLFKAILSIREDKPPLAVKYFFDFLEEQAEKRGISDPDTLHIWKTNSLPLRFWVNILKNPQFVFDIDKTDHIDACLSVIAQAFIDACSISDLQLGKDSPTNKLLYAKEIPEYRKIVQRYYKQIQDMTPLSEQEMNAHLAEESRKYQNEFNTNVAMAEIYKYAKRYRPQ

SEQ ID NO: 7376 - protein, 100 aa, Homo sapiens
MYKETVYSAFNLLMHYPPPSGAGQHPQPQPPLVSGPRSQCRPVLAASLTSTRPISPPTVSPNSLSTNISTAHIPPLHLRTSARSKFTGLCRPLTSLASTP

SEQ ID NO: 7377 - protein, 147 aa, Homo sapiens
MYKETVYSAFNLLMHYPPPSGAGQHPQPQPPLHKANQPPHGVPQLSLYEHFNSPHPTPAPADISQKQVHRPLQTPDLSGFYSLTSGSMGQLPHTVSWFTHPSLMLGSGVPGHPAAIPHPAIVPPSGKQELQPFDRNLKTQAESKAEK

SEQ ID NO: 7378 - protein, 119 aa, Homo sapiens [sequence omitted]

SEQ ID NO: 7379 - protein, 196 aa, Homo sapiens
YKPPALKKSNSPGTASSGSSRLPQPSGAGKTVVGVPSGKVSSSSSSLGNKLQTLSPSHKGIAAPHAGNMDKLGPPLRTGRLVQRLYDSDTKSDSAIKRHELLPIYKANVKPRNSTPPSLARNPAPGVLTNKRKTYTESYIARPDGDCASSLNGGNIKGIEGHSPGNLPKFCHECGTKYPVEWAKFCCECGIRRMIL

SEQ ID NO: 7380 - protein, 81 aa, Homo sapiens
MSSPASTPSRRGSRRGRATPAQTPRSEDARSSPSQRRRGEDSTSTGELQPMPTSPGVDLQSPAAQDVLFSSPPQMHSSVHH

SEQ ID NO: 7381 - protein, 153 aa, Homo sapiens
MYKETVYSAFNLLMHYPPPSGAGQHPQPQPPLHKANQPPHGVPQLSLYEHFNSPHPTPAPADISQKQVHRPLQTPDLSGFYSLTSGSMGQLPHTVSWPSPPLYPLSPSCGYRQHFPAPTAAPGAPYPRFTHPSLMLGSGVPGHPAAIPHPAIV

SEQ ID NO: 7382 - protein, 582 aa, Homo sapiens
DMAVNEIFFDRYPDSILEHQIQVRPFNALKTKNMRNLNPEDIDQLITISGMVIRTSQLIPEMQEAFFQCQIKLQESPEDMPAGQTPHTVILFAHNDLVDKVQPGDRVNVTGIYRAVPIRVNPRVSNVKSVYKTHIDVIHYRKTDAKRLHGLDEEAEQKLFSEKRVELLKELSRKPDIYERLASALAPSIYEHEDIKKGILLQLFGGTRKDFSHTGRGKFRAEINILLCGDPGTSKSQLLQYVYNLVPRGQYTSGKGSSAVGLTAYVMKDPETRQLVLQTGALVLSDNGICCIDEFDKMNESTRSVLHEVMEQQTLSIAKAGIICQLNARTSVLAAANPIESQWNPKKTTIENIQLPHTLLSRFDLIFLLLDPQDEAYDRRLAHHLVALYYQSEEQAEEELLDMAVLKDYIAYAHSTIMPRLSEEASQALIEAYVDMRKIGSSRGMVSAYPRQLESLIRLAEAHAKVRLSNKVEAIDVEEAKRLHREALKQSATDPRTGIVDISILTTGMSATSRKRKEELAEALKKLILSKGKTPALKYQQLFEDIRGQSDIAITKDMFEEALRALADDDFLTVTGKTVRLL

SEQ ID NO: 7383 - protein, 151 aa, Homo sapiens
MQKLGFGTGVNVYLMKRSPRGLSHSPWAVKKINPICNDHYRSVYQKRLMDEAKILKSLHHPNIVGYRAFTEANDGSLCLAMEYGGEKSLNDLIEERYKASQDPFPAAIILKVALNMARGLKYLHQEKKLLHGDIKSSNVVIKGDFETIKIC

SEQ ID NO: 7384 - protein, 170 aa, Homo sapiens
MPPSRLGVGRVSSGLSFPAARRLHAGQIPSLQPPPGPRPFPAPRSRARTLPGSSRPLRGRAWPGPPRRVPARRRSSPQPRQGGGQSDRLLIKGGKIVNDDQSFYADIYMEDGLIKQIGENLIVPGGVKTIEAHSRMVIPGGIDVHTRFQMPDQGMTSADDFFQGTKAALA

SEQ ID NO: 7385 - protein, 147 aa, Homo sapiens
GVPGHPAAIPHPAIVPPSGKQELQPFDRNLKTQAESKAEKEAKKPTIKKPLNAFMLYMKEMRAKVIAECTLKESAAINQILGRRWHALSREEQAKYYELARKERQLHMQLYPGWSARDNYGKKKRRSREKHQESTTDGIPACTILSP

SEQ ID NO: 7386 - protein, 677 aa, Homo sapiens
MAERKQSGKAAEDEEVPAFFKNLGSGSPKPRQKFCGMFCPVEGSSENKTIDFDSLSVGRGSGQVVAQQRDVAHLGPDPQPPYSRQGRRAGGEPSVESGRKVEIRRASGKEALQNINDQSDRLLIKGGKIVNDDQSFYADIYMEDGLIKQIGENLIVPGGVKTIEAHSRMVIPGGIDVHTRFQMPDQGMTSADDFFQGTKAALAGGTTMIIDHVVPEPGTSLLAAFDQWREWADSKSCCDYSLHVDISEWHKGIQEEMEALVKDHGVNSFLVYMAFKDRFQLTDCQIYEVLSVIRDIGAIAQVHAENGDIIAEEQQRILDLGITGPEGHVLSRPEEVEAEAVNRAITIANQTNCPLYITKVMSKSSAEVIAQARKKGTVVYGEPITASLGTDGSHYWSKNWAKAAAFVTSPPLSPDPTTPDFLNSLLSCGDLQVTGSAHCTFNTAQKAVGKDNFTLIPEGTNGTEERMSVIWDKAVVTGKMDENQFVAVTSTNAAKVFNLYPRKGRIAVGSDADLVIWDPDSVKTISAKTHNSSLEYNIFEGMECRGSPLVVISQGKIVLEDGTLHVTEGSGRYIPRKPFPDFVYKRIKARSRLAELRGVPRGLYDGPVCEVSVTPKTVTPASSAKTSPAKQQAPPVRNLHQSGFSLSGAQIDDNIPRRTTQRIVAPPGGRANITSLG

SEQ ID NO: 7387 - protein, 75 aa, Homo sapiens
MTDVFLICFSVVNPASFQNVKEEWVPELKEYAPNVPFLLIGTQIDLRDDPKTLARLNDMKEKPICVEQGQKLAKE

SEQ ID NO: 7388 - protein, 133 aa, Homo sapiens
MAALTPRKRKQDSLKCDSLLHFTENLFPSPNKKHCFYQNSDKNEENLHCSQQEHFVLSALKTTEINRLPSANQGSPFKSALSTVSFYNQNKWYLNPLERKLIKESRSTCLKTNDEDKSFPIVTEKMQGKPVCS

SEQ ID NO: 7389 - protein, 139 aa, Homo sapiens
ADCSTNNPSQAKLRRELDESLQVAERLTRKYNELLKSYQWKMLNTSSLLEQLNEQFNWVSRLANLTQGEDQYYLRVTTVASHTSDSDVPSGVTEVVVKLFDSDPITVTVPVEVSRKNPKFMETVAEKALQEYRKKHREE

SEQ ID NO: 7390 - protein, 724 aa, Homo sapiens
MSAEGYQYRALYDYKKEREEDIDLHLGDILTVNKGSLVALGFSDGQEARPEEIGWLNGYNETTGERGDFPGTYVEYIGRKKISPPTPKPRPPRPLPVAPGSSKTEADVEQQALTLPDLAEQFAPPDIAPPLLIKLVEAIEKKGLECSTLYRTQSSSNLAELRQLLDCDTPSVDLEMIDVHVLADAFKRYLLDLPNPVIPAAVYSEMISLAPEVQSSEEYIQLLKKLIRSPSIPHQYWLTLQYLLKHFFKLSQTSSKNLLNARVLSEIFSPMLFRFSAASSDNTENLIKVIEILISTEWNERQPAPALPPKPPKPTTVANNGMNNNMSLQDAEWYWGDISREEVNEKLRDTADGTFLVRDASTKMHGDYTLTLRKGGNNKLIKIFHRDGKYGFSDPLTFSSVVELINHYRNESLAQYNPKLDVKLLYPVSKYQQDQVVKEDNIEAVGKKLHEYNTQFQEKSREYDRLYEEYTRTSQEIQMKRTAIEAFNETIKIFEEQCQTQERYSKEYIEKFKREGNEKEIQRIMHNYDKLKSRISEIIDSRRRLEEDLKKQAAEYREIDKRMNSIKPDLIQLRKTRDQYLMWLTQKGVRQKKLNEWLGNENTEDQYSLVEDDEDLPHHDEKTWNVGSSNRNKAENLLRGKRDGTFLVRESSKQGCYACSVVVDGEVKHCVINKTATGYGFAEPYNLYSSLKELVLHYQHTSLVQHNDSLNVTLAYPVYAQQRR

SEQ ID NO: 7391 - protein, 55 aa, Homo sapiens
RGIVNGAAPELPVPTGGPAVGAREQALAVSRNYLSQPRLSYTISPISFVTFVTSA

SEQ ID NO: 7392 - protein, 131 aa, Homo sapiens
EISEVDCKDALEMICNLESEGDEKSALVLCTAFLSRQLQQGDMYCAWELTLFWSKLQQRVEPSIQVYLERCRQLSLLTKTVYHIFFLIKVINSERWGLTILPRFISNSWAQVILRALAFQSGGITGMSHHT

SEQ ID NO: 7393 - protein, 61 aa, Homo sapiens
MAFKDTGKTPVEPEVAIHRIRITLTSRNVKSLEKVCADLIRGAKEKNLKVKGPVRMPTKVK

SEQ ID NO: 7394 - protein, 49 aa, Homo sapiens
MRGCAADDIMDPTSLAETQEDHNGGQKQLSPQKVTLYLRPGQAAAFNVT

SEQ ID NO: 7395 - protein, 176 aa, Homo sapiens
MMVNCHAHFWTTKAFLPTMLEINHGHIVTVASSLGLFSTAGVEDYCASKFGVVGFHESLSHELKAAEKDGIKTTLVCPYLVDTGMFRGCRIRKEIEPFLPPLKPDYCVKQAMKAILTDQPMICTPRLMYIVTFMKSILPFEAVVCMYRFLGADKCMYPFIAQRKQATNNNEAKNGI

SEQ ID NO: 7396 - protein, 61 aa, Homo sapiens; identical to SEQ ID NO: 7393

SEQ ID NO: 7397 - protein, 120 aa, Homo sapiens
MFYAHFVLSKRGPLAKIWLAAHWDKKLTKAHVFECNLESSVESIISPKVKMALRTSGHLLLGVVRIYHRKAKYLLADCNEAFIKIKMAFRPGVVDLPEENREAAYNAITLPEEFHDFDQP

SEQ ID NO: 7398 - protein, 155 aa, Homo sapiens
LMQNWDAAMEDLTRLKETIDNNSVSSPLQSLQQRTWLIHWSLFVFFNHPKGRDNIIDLFLYQPHMLADKLNMTPEEAERWIVNLIRNARLDAKIDSKLGHVVMGNNAVSPYQQVIEKTKSLSFRSQMLAMNIEKKLNQNSRSEAPNWATQDSGFY

SEQ ID NO: 7399 - protein, 355 aa, Homo sapiens
MPFLGQDWRSPGQNWVKTADGWKRFLDEKSGSFVSDLSSYCNKEVYNKENLFNSLNYDVAAKKRKKDMLNSKTKTQYFHQEKWIYVHKGSTKERHGYCTLGEAFNRLDFSTAILDSRRFNYVVRLLELIAKSQLTSLSGIAQKNFMNILEKVVLKVLEDQQNIRLIRELLQTLYTSLCTLVQRVGKSVLVGNINMWVYRMETILHWQQQLNNIQITRPAFKGLTFTDLPLCLQLNIMQRLSDGRDLVSLGQAAPDLHVLSEDRLLWKKLCQYHFSERQIRKRLILSDKGQLDWKKMYFKLVRCYPRKEQYGDTLQLCKHCHILSWKGTDHPCTANNPESCSVSLSPQDFINLFKF

SEQ ID NO: 7400 - protein, 184 aa, Homo sapiens
MLEFHFEGEEQPLSMMKKFLKSSWVRIGFVPEEERNVLRRRKGTNISETSLIGTAACTSTSSQNDPEVIIVGAGVLGSALAAVLSRDGRKVTVIERDLKEPDRIVGEFLQPGGYHVLKDLGLGDTVEGLDAQVVNGYMIHDQESKSEVQIPYPLSENNQVQSGRAFHHGRFIMSLRKAAMAEPK

SEQ ID NO: 7401 - protein, 135 aa, Homo sapiens
MLQINQVKVGNEVATGTGPNKKIAKKNAAEAMLLQLGYKASTNLQDQLEKTGENKGWSGPKPGFPEPTNNTPKGILHLSPDVYQEMEASRHKVISGTTLGYLSPKDMNQPSSSFFSISPTSNSSATIARELLMNG

SEQ ID NO: 7402 - protein, 417 aa, Homo sapiens
MPQPSVSGMDPPFGDAFRSHTFSEQTLMSTDLLANSSDPDFMYELDREMNYQQNPRDNFLSLEDCKDIENLESFTDVLDNEGALTSNWEQWDTYCEDLTKYTKLTSCDIWGTKEVDYLGLDDFSSPYQDEEVISKTPTLAQLNSEDSQSVSDSLYYPDSLFSVKQNPLPSSFPGKKITSRAAAPVCSSKTLQAEVPLSDCVQKASKPTSSTQIMVKTNMYHNEKVNFHVECKDYVKKAKVKINPVQQSRPLLSQIHTDAAKENTCYCGAVAKRQEKKGMEPLQGHATPALPFKETQELLLSPLPQEGPGSLAAGESSSLSASTSVSDSSQKKEEHNYSLFVSDNLGEQPTKCSPEEDEEDEEDVDDEDHDEGFGSEHELSENEEEEEEEEDYEDDKDDDISDTFSEPGIIMLASLPD

SEQ ID NO: 7403 - protein, 888 aa, Homo sapiens
MARRSSFQSCQIISLFTFAVGVNICLGFTAHRIKRAEGWEEGPPTVLSDSPWTNISGSCKGRCFELQEAGPPDCRCDNLCKSYTSCCHDFDELCLKTARGWECTKDRCGEVRNEENACHCSEDCLARGDCCTNYQVVCKGESHWVDDDCEEIKAAECPAGFVRPPLIIFSVDGFRASYMKKGSKVMPNIEKLRSCGTHSPYMRPVYPTKTFPNLYTLATGLYPESHGIVGNSMYDPVFDATFHLRGREKFNHRWWGGQPLWITATKQGVKAGTFFWSVVIPHERRILTILQWLTLPDHERPSVYAFYSEQPDFSGHKYGPFGPEMTNPLREIDKIVGQLMDGLKQLKLHRCVNVIFVGDHGMEDVTCDRTEFLSNYLTNVDDITLVPGTLGRIRSKFSNNAKYDPKAIIANLTCKKPDQHFKPYLKQHLPKRLHYANNRRIEDIHLLVERRWHVARKPLDVYKKPSGKCFFQGDHGFDNKVNSMQTVFVGYGSTFKYKTKVPPFENIELYNVMCDLLGLKPAPNNGTHGSLNHLLRTNTFRPTMPEEVTRPNYPGIMYLQSDFDLGCTCDDKVEPKNKLDELNKRLHTKGSTEAETRKFRGSRNENKENINGNFEPRKERHLLYGRPAVLYRTRYDILYHTDFESGYSEIFLMPLWTSYTVSKQAEVSSVPDHLTSCVRPDVRVSPSFSQNCLAYKNDKQMSYGFLFPPYLSSSPEAKYDAFLVTNMVPMYPAFKRVWNYFQRVLVKKYASERNGVNVISGPIFDYDYDGLHDTEDKIKQYVEGSSIPVPTHYYSIITSCLDFTQPADKCDGPLSVSSFILPHRPDNEESCNSSEDESKWVEELMKMHTARVRDIEHLTSLDFFRKTSRSYPEILTLKTYLHTYESEI

SEQ ID NO: 7404 - protein, 645 aa, Homo sapiens
MNKYFFYILENCGFDSSKDPREEGHLFQKLVFQQAVLGSLFFAGRGDIQPQLDSALQDVNDKYLLLEETEKQAVRKALIEERGRFCTFISMLRPVIEEEISMLGEITHLQTISEDLKSLTMDPHKLPSSSEQVILDLKGSDYSWSYQTPPSSPSTTMSRKSSVCSSLNSVNSSDSRSSGSHSHSPSSHYRYRSSNLAQQAPVRLSSVSSHDSGFISQDAFQSKSPSPMPPEAPNQLSNGFSHYSLSSESHVGPTGAGLFPHCLPASRLLPRVTSVHLPDYAHYYTIGPGMFPSSQIPSWKDWAKPGPYDQPLVNTLQRRKEKREPDPNGGGPTTASGPPAAAEEAQRPRSMTVSAATRPGEEMEACEELALALSRGLQLDTQRSSRDSLQCSSGYSTQTTTPCCSEDTIPSQVSDYDYFSVSGDQEADQQEFDKSSTIPRNSDISQSYRRMFQAKRPASTAGLPTTLGPAMVTPGVATIRRTPSTKPSVRRGTIGAGPIPIKTPVIPVKTPTVPDLPGVLPAPPDGPEERGEHSPESPSVGEGPQGVTSMPSSMWSGQASVNPPLPGPKPSIPEEHRQAIPESEAEDQEREPPSATVSPGQIPESDPADLSPRDTPQGEDMLNAIRRGVKLKKTTTNDRSAPRFS

SEQ ID NO: 7405 - protein, 207 aa, Homo sapiens
GTLRSCFSWSGGLGDFSRTPSPSPSTALQQFRRKSDSPTSLPENNMSDVSQLKSEESSDDESHPLREEACSSQSQESGEFSLQSSNASKLSQCSSKDSDSEVPGLYKSSSADSLSTTKIKPLGPARASGLSKKPASIQKRKHHNAENKPGLQIKLNELWKNFGFKKDSEKLPPCKKPLSPVRDNIQLTPEAEEDIFNKPECGRVQRA

SEQ ID NO: 7406 - protein, 407 aa, Homo sapiens
MDSELMHSIVGSYHKPPERVFVPSFTQNEPSQNCHPANLEVTSPKILHSPNSQALILALKTLQEKIHRLELERTQAEDNLNILSREAAQYKKALENETNERNLAHQELIKQKKDISIQLSSAQSRCTLLEKQLEYTKRMVLNVEREKNMILEQQAQLQREKEQDQMKLYAKLEKLDVLEKECFRLTTTQKTAEDKIKHLEEKLKEEEHQRKLFQDKASEKTKCIKRRPPWQICSKFGALPFVAEKPSRTTSWCKAIPPDSEKSISICDNLSELLMAMQDELDQMSMEHQELLKQMKETESHSVCDDIECELECLLKKMEIKGEQISKLKKHQDSVCKLQQKVQNSKMSEASGIQQEDSYPKGSKNIKNSPRKCLTDTNLFQKNSSFHPIRVHNLQMKLRRDDIMWEQ

SEQ ID NO: 7407 - protein, 124 aa, Homo sapiens
MWGACKVKVHDSLATISITLRRYLRLGATMAKSKFEYVRDFEADDTCLAHCWVVVRLDGRNFHRFAEKHNFAKPNDSRALQLMTKCAQTVMEELEDIVIAYGQSDEYSFVFKRKTNWFKRRARL

SEQ ID NO: 7408 - protein, 92 aa, Homo sapiens
MEARLNAALREKTSLSANNATLEKQLIELTRTNELLKSKFSENGNQKNLRILSLELMKLRNKRETKMRGMMAKQEGMEMKLQVTQRSLEESQ

SEQ ID NO: 7409 - protein, 187 aa, Homo sapiens
MAALTPRKRKQDSLKCDSLLHFTENLFPSPNKKHCFYQNSDKNEENLHCSQQEHFVLSALKTTEINRLPSANQGSPFKSALSTVSFYNQNKWYLNPLERKLIKESRSTCLKTNDEDKSFPIVTEKMQGKPVCSKKNNKKPQKSLTAKYQPKYRHIKPVSRNSRNSKQNRVIYKPIVEKENNCHSAEN

SEQ ID NO: 7410 - protein, 63 aa, Homo sapiens
MEGISNFKTPSKLSEKKKSVLCSTPTINIPASPFMQKLGFGTGVNVYLMKSICTKKRNCFMET

SEQ ID NO: 7411 - protein, 291 aa, Homo sapiens
MPVSFEVIKESGPPHMKSFVTRVSVGEFSAEGEGNSKKLSKKRAATTVLQELKKLPPLPVVEKPKLFFKKRPKTIVKAGPEYGQGMNPISRLAQIQQAKKEKEPDYVLLSERGMPRRREFVMQVKVGNEVATGTGPNKKIAKKNAAEAMLLQLGYKASTNLQDQLEKTGENKGWSGPKPGFPEPTNNTPKGILHLSPDVYQEMEASRHKVISGTTLGYLSPKDMNQPSSSFFSISPTSNSSATIARELLMNGTSSTAEAIGLKGSSPTPPCSPVQPSKQLEYLARIQGFQV

SEQ ID NO: 7412 - protein, 101 aa, Homo sapiens
MEARLNAALREKTSLSANNATLEKQLIELTRTNELLKSKFSENGNQKNLRILSLELMKLRNKRETKMRGMMAKQEGMEMKLQVTQRSLEESQGKIAQLEGK

SEQ ID NO: 7413 - protein, 44 aa, Homo sapiens
MFLTYMETVTKELVSWMRGHESSVFSISVHASGKYAITTSSDTA

SEQ ID NO: 7414 - protein, 333 aa, Homo sapiens
MEGISNFKTPSKLSEKKKSVLCSTPTINIPASPFMQKLGFGTGVNVYLMKRSPRGLSHSPWAVKKINPICNDHYRSVYQKRLMDEAKILKSLHHPNIVGYRAFTEANDGSLCLAMEYGGEKSLNDLIEERYKASQDPFPAAIILKVALNMARGLKYLHQEKKLLHGDIKSSNVVIKGDFETIKICDVGVSLPLDENMTAPAFITILLVSVTDPEACYIGTEPWKPKEAVEENGVITDKADIFAFGLTLWEMMTLSIPHINLSNDDDDEDKTFDESDFDDEAYYAALGTRPPINMEELDESYQKVIELFSVCTNEDPKDRPSAAHIVEALETDV

SEQ ID NO: 7415 - protein, 108 aa, Homo sapiens
MEAVLTEELDEEEQLLRRHRKEKKELQAKIQGMKNAVPKNDKKRRKQLTEDVAKLEKEMEQKHREELEQLKLTTKENKIDSVAVNISNLVLENQPPRISKAQKRRVPG

SEQ ID NO: 7416 - protein, 82 aa, Homo sapiens
MANCERTFIAIKPDGVQRGLVGEIIKRFEQKGFRLVGLKFMQASEDLLKEHYVDLKDRPFFAGLVKYMHSGPVVAMLPDFLL

SEQ ID NO: 7417 - protein, 49 aa, Homo sapiens
MAGNFWQSSHYLQWILDKQDLLKERQKDLKFLSEEEYWKLQIFFTNGIL

SEQ ID NO: 7418 - protein, 59 aa, Homo sapiens
MEDSMDMDMSPLRPQNYLFDYHFKVDNDENEHQLSLRTVSLGAGAKDELHIVEAEAMNY

SEQ ID NO: 7419 - protein, 1285 aa, Homo sapiens
MQSNMVRKKNPPLRNVASEGEGQILEPIGTESKVSGKNKEFSADQMSENTDQSDAAELNHKEEHSLHVQDPSSSSKKDLKSAVLSEKAGFNYESPSKGGNFPSFPHDEVTDRNMLAFSSPAAGGVCEPLKSPQRAEADDPQDMACTPSGDSLETKEDQKMSPKATEETGQAQSGQANCQGLSPVSVASKNPQVPSDGGVRLNKSKTDLLVNDNPDPAPLSPELQDFKCNICGYGYYGNDPTDLIKHFRKYHLGLHNRTRQDAELDSKILALHNMVQFSHSKDFQKVNRSVFSGVLQDINSSRPVLLNGTYDVQVTSGGTFIGIGRKTPDCQGNTKYFRCKFCNFTYMGNSSTELEQHFLQTHPNKIKASLPSSEVAKPSEKNSNKSIPALQSSDSGDLGKWQDKITVKAGDDTPVGYSVPIKPLDSSRQNGTEATSYYWCKFCSFSCESSSSLKLLEHYGKQHGAVQSGGLNPELNDKLSRGSVINQNDLAKSSEGETMTKTDKSSSGAKKKDFSSKGAEDNMVTSYNCQFCDFRYSKSHGPDVIVVGPLLRHYQQLHNIHKCTIKHCPFCPRGLCSPEKHLGEITYPFACRKSNCSHCALLLLHLSPGAAGSSRVKHQCHQCSFTTPDVDVLLFHYESVHESQASDVKQEANHLQGSDGQQSVKESKEHSCTKCDFITQVEEEISRHYRRAHSCYKCRQCSFTAADTQSLLEHFNTVHCQEQDITTANGEEDGHAISTIKEEPKIDFRVYNLLTPDSKMGEPVSESVVKREKLEEKDGLKEKVWTESSSDDLRNVTWRGADILRGSPSYTQASLGLLTPVSGTQEQTKTLRDSPNVEAAHLARPIYGLAVETKGFLQGAPAGGEKSGALPQQYPASGENKSKDESQSLLRRRRGSGVFCANCLTTKTSLWRKNANGGYVCNACGLYQKLHSTPRPLNIIKQNNGEQIIRRRTRKRLNPEALQAEQLNKQQRGSNEEQVNGSPLERRSEDHLTESHQREIPLPSLSKYEAQGSLTKSHSAQQPVLVSQTLDIHKRMQPLHIQIKSPQESTGDPGNSSSVSEGKGSSERGSPIEKYMRPAKHPNYSPPGSPIEKYQYPLFGLPFVHNDFQSEADWLRFWSKYKLSVPGNPHYLSHVPGLPNPCQNYVPYPTFNLPPHFSAVGSDNDIPLDLAIKHSRPGPTANGASKEKTKAPPNVKNEGPLNVVKTEKVDRSTQDELSTKCVHCGIVFLDEVMYALHMSCHGDSGPFQCSICQHLCTDKYDFTTHIQRGLHRNNAQVEKNGKPKE

SEQ ID NO: 7420 - protein, 172 aa, Homo sapiens
LQTGLEISKIIMSSVSNLKHSKEKKKSSKKTKCIKRRPPWQICSKFGALPFVAEKMRQHRDPHILQKPFNVTETRCLPKPSRTTSWCKAIPPDSEKSISICDNLSELLMAMQDELDQMSMEHQELLKQMKETESHSVCDDIECELECLLKKMEIKGEQISKLKKHQDSVRRL

SEQ ID NO: 7421 - protein, 542 aa, Homo sapiens
WSYQTPPSSPSTTMSRKSSVCSSLNSVNSSDSRSSGSHSHSPSSHYRYRSSNLAQQAPVRLSSVSSHDSGFISQDAFQSKSPSPMPPEAPNQNSSSSASSEASETCQSVSECSSPTSVSSGSTMGAWVSTEKLSNGFSHYSLSSESHVGPTGAGLFPHCLPASRLLPRVTSVHLPDYAHYYTIGPGMFPSSQIPSWKDWAKPGPYDQPLVNTLQRRKEKREPDPNGGGPTTASGPPAAAEEAQRPRSMTVSAATRPGEEMEACEELALALSRGLQLDTQRSSRDSLQCSSGYSTQTTTPCCSEDTIPSQVSDYDYFSVSGDQEADQQEFDKSSTIPRNSDISQSYRRMFQAKRPASTAGLPTTLGPAMVTPGVATIRRTPSTKPSVRRGTIGAGPIPIKTPVIPVKTPTVPDLPGVLPAPPDGPEERGEHSPESPSVGEGPQGVTSMPSSMWSGQASVNPPLPGPKPSIPEEHRQAIPESEAEDQEREPPSATVSPGQIPESDPADLSPRDTPQGEDMLNAIRRGVKLKKTTTNDRSAPRFS

SEQ ID NO: 7422 - protein, 180 aa, Homo sapiens
MAHAMENSWTISKEYHIDEEVGFALPNPQENLPDFYNDWMFIAKHLPDLIESGQLRERVEKLNMLSIDHLTDHKSQRLARLVLGCITMAYVWGKGHGDVRKVLPRNIAVPYCQLSKKLELPPILVYADCVLANWKKKDPNKPLTYENMDVLFSFRDGDCSKGFFLVSLLVEIAAASAIKV

SEQ ID NO: 7423 - protein, 398 aa, Homo sapiens
MKALQALQNEPIPERSPQNGESGKDVDDDKDANKSEISLVFEIALKRNMPVSFEVIKESGPPHMKSFVTRVSVGEFSAEGEGNSKKLSKKRAATTVLQELKKLPPLPVVEKPKLFFKKRPKTIVKAGPEYGQGMNPISRLAQIQQAKKEKEPDYVLLSERGMPRRREFVMQVKVGNEVATGTGPNKKIAKKNAAEAMLLQLGYKASTNLQDQLEKTGENKGWSGPKPGFPEPTNNTPKGILHLSPDVYQEMEASRHKVISGTTLGYLSPKDMNQPSSSFFSISPTSNSSATIARELLMNGTSSTAEAIGLKGSSPTPPCSPVQPSKQLEYLARIQGFQAALSALKQFSEQGLDPIDGAMNIEKGSLEKQAKHLREKADNNQAPPGSIAQDCKKSNSAV

SEQ ID NO: 7424 - protein, 43 aa, Homo sapiens
MNPSAPSYPMASLYVGDLHPDVTEAMLYEKFSPAGPILSIRVC

SEQ ID NO: 7425 - protein, 147 aa, Homo sapiens
MVMIFTLVTAVQEKLNEIVDQIKTRREEEKKQKEKEAEEAEKQLFHGTPVTIENFLNWKAKFDAELLEIKKKRMKEEEQAGKNKLSGKQLFETDHNLDTSDIQFLEDAGNNVEVDESLFQEMDDLELEDDEDDPDYNPADPESDSAD

SEQ ID NO: 7426 - protein, 352 aa, Homo sapiens
MFEDPETTRQMQSTRDGRMLFDYLADKHGFRQEYLDTLYRYAKFQYECGNYSGAAEYLYFFRVLVPATDRNALSSLWGKLASEILMQNWDAAMEDLTRLKETIDNNSVSSPLQSLQQRTWLIHWSLFVFFNHPKGRDNIIDLFLYQPQYLNAIQTMCPHILRYLTTAVITNKDVRKRRQVLKDLVKVIQQESYTYKDPITEFVECLYVNFDFDGAQKKLRECESVLVNDFFLVACLEDFIENARLFIFETFCRIHQCISINMLADKLNMTPEEAERWIVNLIRNARLDAKIDSKLGHVVMGNNAVSPYQQVIEKTKSLSFRSQMLAMNIEKKLNQNSRSEAPNWATQDSGFY

SEQ ID NO: 7427 - protein, 154 aa, Homo sapiens
NQAAKEDTVVLKIGSVAMAPQADNPLGRSVLRKDIYHIRRHQERRAILTPVLTDFSVRITGAPAVIFTKVVSPENLHTEEILVCGHSLEVNITTNLDFFLSVAQVQLLHQLIVANMTGLEPSNKAAEISKQEQKKVDIFDGGMAETSSRYSGAQ

SEQ ID NO: 7428 - protein, 1286 aa, Homo sapiens
MTGEVGSEVHLEINDPNVISQEEADSPSDSGQGSYETIGPLSEGDSDEEIFVSKKLKNRKVLQDSDSETEDTNASPEKTTYDSAEEENKENLYAGKNTKIKRIYKTVADSDESYMEKSLYQENLEAQVKPCLELSLQSGNSTDFTTDRKSSKKHIHDKEGTAGKAKVKSKRRLEKEERKMEKIRQLKKKETKNQEDDVEQPFNDSGCLLVDKDLFETGLEDENNSPLEDEESLESIRAAVKNKVKKHKKKEPSLESGVHSFEEGSELSKGTTRKERKAARLSKEALKQLHSETQRLIRESALNLPYHMPENKTIHDFFKRKPRPTCHGNAMALLKSSKYQSSHHKEIIDTANTTEMNSDHHSKGSEQTTGAENEVETNALPVVSKETQIITGSDESCRKDLVKNEELEIQEKQKQSDIRPSPGDSSVLQQESNFLGNNHSEECQVGGLVAFEPHALEGEGPQNPEETDEKVEEPEQQNKSSAVGPPEKVRRFTLDRLKQLGVDVSIKPRLGADEDSFVILEPETNRELEALKQRFWKHANPAAKPRAGQTVNVNVIVKDMGTDGKEELKADVVPVTLAPKKLDGASHTKPGEKLQVLKAKLQEAMKLRRFEERQKRQALFKLDNEDGFEEEEEEEEEMTDESEEDGEEKVEKEEKEEELEEEEEKEEEEEEEGNQEDSSSKMGYFPTEEKSETDENSGKQPSKLDEDDSCSLLTKESSHNSSFELIGSTIPSYQPCNRQTGRGTSFFPTAGGFRSPSPGLFRASLVSSASKSSGKLSEPSLPIEDSQDLYNASPEPKTLFLGAGDFQFCLEDDTQSQLLDADGFLNVRNHRNQYQALKPRLPLASMDENAMDANMDELLDLCTGKFTSQAEKHLPRKSDKKENMEELLNLCSGKFTSQDASTPASSELNKQEKESSMGDPMEEALALCSGSFPTDKEEEDEEEEFGDFRLVSNDNEFDSDEDEHSDSGNDLALEDHEDDDEEELLKRSEKLKRQMRLRKYLEDEAEVSGSDVGSEDEYDGEEIDEYEEDVIDEVLPSDEELQSQIKKIHMKTMLDDDKRQLRLYQERYLADGDLHSDGPGRMRKFRWKNIDDASQMDLFHRDSDDDQTEEQLDESEARWRKERIEREQWLRDMAQQGKITAEEEEEIGEDSQFMILAKKVTAKALQKNASRPMVIQESKSLLRNPFEAIRPGSAQQVKTGSLLNQPKAVLQKLAALSDHNPSAPRNSRNFVFHTLSPVKAEAAKESSKSQVKKRGPSFMTSPSPKHLKTDDSTSGLTRSIFKYLES

SEQ ID NO: 7429 - protein, 372 aa, Homo sapiens
MTLRAAVFDLDGVLALPAVFGVLGRTEEALALPRGLLNDAFQKGGPEGATTRLMKGEITLSQPRVRLHFVELGSGPAVCLCHGFPESWYSWRYQIPALAQAGYRVLAMDMKGYGESSAPPEIEEYCMEVLCKEMVTFLDKLGLSQAVFIGHDWGGMLVWYMALFYPERVRAVASLNTPFIPANPNMSPLESIKANPVFDYQLYFQEPGVAEAELEQNLSRTFKSLFRASDESVLSMHKVCEAGGLFVNSPEEPSLSRMVTEEEIQFYVQQFKKSGFRGPLNWYRNMERNWKWACKSLGRKILIPALMVTAEKDFVLVPQMSQHMEDWIPHLKRGHIEDCGHWTQMDKPTEVNQILIKWLDSDARNPPVVSKM

SEQ ID NO: 7430 - protein, 923 aa, Homo sapiens
MLENYRNLVSLAMCSHFTQDFLPVQGIEDSFHKLILRRYEKCGHDNLQLRKGCKSMNVCKVQKGVYNGINKCLSNTQSKIFQCNARVKVFSKFANSNKDKTRHTGEKHFKCNECGKSFQKFSDLTQHKGIHAGEKPYTCEERGKDFGWYTDLNQHKKIHTGEKPYKCEECGKAFNRSTNLTAHKRIHNREKAYTGEDRDRAFGWSTNLNEYKKIHTGDKPYKCKECGKAFMHSSHLNKHEKIHTGEKPYKCKECGKVISSSSSFAKHKRIHTGEKPFKCLECGKAFNISTTLTKHRRIHTGEKPYTCEVCGKAFRQSANLYVHRRIHTGEKPYTCGECGKTFRQSANLYVHRRIHTGEKPYKCEDCGKAFGRYTALNQHKKIHTGEKPYKCEECGKAFNSSTNLTAHKRIHTREKPYTCEDRGRAFGLSTNLNEYKKIHTGDKPYKCKECGKAFIHSLHLNKHEKIHTGKKPYKCKQCGKVITSSSSFAKHKRIHTGEKPFECLECGKAFTSSTTLTKHRRIHTGEKPYTCEVCGKAFRQSAILYVHRRIHTGEKPYTCEECGKTFRQSANLYVHRRIHTGEKPYKCEECGKAFGRYTDLNQHKKIHTGEKLYKCEECGKDFVWYTDLNQQKKIYTGEKPYKCEECGKAFAPSTDLNQHTKILTGEQSYKCEECGKAFGWSIALNQHKKIHTGEKPYKCEECGKAFSRSRNLTTHRRVHTREKPYKCEDRGRSFGWSTNLNEYKKIHTGDKLYKCKECGKVFKQSSHLNRHEKIHTGKKPYKCKECGKVITSSSSFAKHKRIHTGEKPFKCLECGKAFTSSTTLTKHRRIHTGEKPYTCEECGKAFRQSAILYVHRRIHTGEKPYTCGECGKTFRQSANLYAHKKIHTGEKPYTCGDCGKTFRQSANLYAHKKIHTGDKTIQV

SEQ ID NO: 7431 - protein, 141 aa, Homo sapiens
MKGEDDALSDKHGCPAYVSPEILNTTGTYSGKAADVWSLGVMLYTLLVGRYPFHDSDPSALFSKIRRGQFCIPEHISPKARCLIRSLLRREPSERLTAPEILLHPWFESVLEPGYIDSEIGTSDQIVPEYQEDSDISSFFC

SEQ ID NO: 7432 - protein, 1035 aa, Homo sapiens
MVRKKNPPLRNVASEGEGQILEPIGTESKVSGKNKEFSADQMSENTDQSDAAELNHKEEHSLHVQDPSSSTAGGVCEPLKSPQRAEADDPQDMACTPSGDSLETKEDQKMSPKATEETGQAQSGQANCQGLSPVSVASKNPQVPSDGGVRLNKSKTDLLVNDNPDPAPLSPELQDFKCNICGYGYYGNDPTDLIKHFRKYHLGLHNRTRQDAELDSKILALHNMVQFSHSKDFQKVNRSVFSGVLQDINSSRPVLLNGTYDVQVTSGGTFIGIGRKTPDCQGNTKYFRCKFCNFTYMGNSSTELEQHFLQTHPNKIKASLPSSEVAKPSEKNSNKSIPALQSSDSGDLGKWQDKITVKAGDDTPVGYSVPIKPLDSSRQNDVLLFHYESVHESQASDVKQEANHLQGSDGQQSVKESKEHSCTKCDFITQVEEEISRHYRRAHSCYKCRQCSFTAADTQSLLEHFNTVHCQEQDITTANGEEDGHAISTIKEEPKIDFRVYNLLTPDSKMGEPVSESVVKREKLEEKDGLKEKVWTESSSDDLRNVTWRGADILRGSPSYTQASLGLLTPVSGTQEQTKTLRDSPNVEAAHLARPIYGLAVETKGFLQGAPAGGEKSGALPQQYPASGENKSKDESQSLLRRRRGSGVFCANCLTTKTSLWRKNANGGYVCNACGLYQKLHSTPRPLNIIKQNNGEQIIRRRTRKRLNPEALQAEQLNKQQRGSNEEQVNGSPLERRSEDHLTESHQREIPLPSLSKYEAQGSLTKSHSAQQPVLVSQTLDIHKRMQPLHIQIKSPQESTGDPGNSSSVSEGKGSSERGSPIEKYMRPAKHPNYSPPGSPIEKYQYPLFGLPFVHNDFQSEADWLRFWSKYKLSVPGNPHYLSHVPGLPNPCQNYVPYPTFNLPPHFSAVGSDNDIPLDLAIKHSRPGPTANGASKEKTKAPPNVKNEGPLNVVKTEKVDRSTQDELSTKCVHCGIVFLDEVMYALHMSCHGDSGPFQCSICQHLCTDKYDFTTHIQRGLHRNNAQVEKNGKPKE

SEQ ID NO: 7433 - protein, 290 aa, Homo sapiens
MAALTPRKRKQDSLKCDSLLHFTENLFPSPNKKHCFYQNSDKNEENLHCSQQEHFVLSALKTTEINRLPSANQGSPFKSALSTVSFYNQNKWYLNPLERKLIKESRSTCLKTNDEDKSFPIVTEKMQGKPVCSKKNNKKPQKSLTAKYQPKYRHIKPVSRNSRNSKQNRVIYKPIVEKENNCHSAENNSNAPRVLSQKIKPQVTLQGGAAFFVRKKSSLRKSSLENEPSLGRTQKSKSEVIEDSDVETVSEKKTFATRQVPKCLVLEEKLKIGLLSASSKNKEKLIKIFR

SEQ ID NO: 7434 - protein, 61 aa, Homo sapiens
MNPSAPSYPMASLYVGDLHPDVTEAMLYEKFSPAGPILSIRVCRDMITRRSLGYAYVNFQQ

SEQ ID NO: 7435 - protein, 404 aa, Homo sapiens
MPNPRPGKPSAPSLALGPSPGASPSWRAAPKASDLLGARGPGGTFQGRDLRGGAHASSSSLNPMPPSQLQLPTLPLVMVAPSGARLGPLPHLQALLQDRPHFMHQLSTVDAHARTPVLQVHPLESPAMISLTPPTTATGVFSLKARPGLPPGINVASLEWVSREPALLCTFPNPSAPRKDSTLSAVPQSSYPLLANGVCKWPGCEKVFEEPEDFLKHCQADHLLDEKGRAQCLLQREMVQSLEQQASSDKGSCCIVAAGSQGPVVPAWSGPREAPDSLFAVRRHLWGSHGNSTFPEFLHNMDYFKFHNMRPPFTYATLIRWAILEAPEKQRTLNEIYHWFTRMFAFFRNHPATWKNAIRHNLSLHKCFVRVESEKGAVWTVDELEFRKKRSQRPSRCSNPTPGP

SEQ ID NO: 7436 - protein, 175 aa, Homo sapiens
KEHKVDKNEAFSSEDSLGENKTISPKSTVYPIFSASSVNSKRSLGEEQFSVGSVNFMKQTNIQKNTNTRDTSKKTKDQLIIDAGQKHFGATVCKSCGMIYTASNPEDEMQHVQHHHRFLEGIKYVGWKKERVVAEFWDGKIVLVLPHDPSFAIKKAFRVLSEPIGPESPSSTECP

SEQ ID NO: 7437 - protein, 75 aa, Homo sapiens
MSRRSSRLQAKQQPQPSQTESPQEAQIIQAKKRKTTQDVKKRREEVTKKHQYEIRLGMFKRSLAKHVKKGEQICS

SEQ ID NO: 7438 - protein, 320 aa, Homo sapiens
MKALQALQNEPIPERSPQNGESGKDVDDDKDANKSEISLVFEIALKRNMPVSFEVIKESGPPHMKSFVTRVSVGEFSAEGEGNSKKLSKKRAATTVLQELKKLPPLPVVEKPKLFFKKRPKTIVKAGPEYGQGMNPISRLAQIQQAKKEKEPDYVLLSERGMPRRREFVMQVKVGNEVATGTGPNKKIAKKNAAEAMLLQLGYKASTNLQDQLEKTGENKGWSGPKPGFPEPTNNTPKGILHLSPDVYQEMEASRHKVISGTTLGYLSPKDMNQPSSSFFSISPTSNSSATIARELLMNGTSSTAEAIGLKGSSPTPPCS

SEQ ID NO: 7439 - protein, 129 aa, Homo sapiens
MDVLVSECSARLLQQEEEIKSLTAEIDRLKNCGCLGASPNLEQLQEENLKLKYRLNILRKSLQAERNKPTKNMINIISRLQEVFGHAIKAAYPDLENPPLLVTPSQQAKFGDYQCNSAMGISQVLLMST

SEQ ID NO: 7440 - protein, 38 aa, Homo sapiens
MNPSAPSYPMASLYVGDLHPDVTEAMLYEKFSPAGPIL

SEQ ID NO: 7441 - protein, 206 aa, Homo sapiens
MHSYVRSRKRLREEEAARLFKQIVSAVAHCHQSAIVLGDLKLRKFVFSTEERTQLRLESLEDTHIMKGEDDALSDKHGCPAYVSPEILNTTGTYSGKAADVWSLGVMLYTLLVGRYPFHDSDPSALFSKIRRGQFCIPEHISPKARCLIRSLLRREPSERLTAPEILLHPWFESVLEPGYIDSEIGTSDQIVPEYQEDSDISSFFC

SEQ ID NO: 7442 - protein, 755 aa, Homo sapiens
MEAVIEKECSALGGLFQTIISDMKGSYPVWEDFINKAGKLQSQLRTTVVAAAAFLDAFQKVADMATNTRGGTREIGSALTRMCMRHRSIEAKLRQFSSALIDCLINPLQEQMEEWKKVANQLDKDHAKEYKKARQEIKKKSSDTLKLQKKAKKGRGDIQPQLDSALQDVNDKYLLLEETEKQAVRKALIEERGRFCTFISMLRPVIEEEISMLGEITHLQTISEDLKSLTMDPHKLPSSSEQVILDLKGSDYSWSYQTPPSSPSTTMSRKSSVCSSLNSVNSSDSRSSGSHSHSPSSHYRYRSSNLAQQAPVRLSSVSSHDSGFISQDAFQSKSPSPMPPEAPNQLSNGFSHYSLSSESHVGPTGAGLFPHCLPASRLLPRVTSVHLPDYAHYYTIGPGMFPSSQIPSWKDWAKPGPYDQPLVNTLQRRKEKREPDPNGGGPTTASGPPAAAEEAQRPRSMTVSAATRPGEEMEACEELALALSRGLQLDTQRSSRDSLQCSSGYSTQTTTPCCSEDTIPSQVSDYDYFSVSGDQEADQQEFDKSSTIPRNSDISQSYRRMFQAKRPASTAGLPTTLGPAMVTPGVATIRRTPSTKPSVRRGTIGAGPIPIKTPVIPVKTPTVPDLPGVLPAPPDGPEERGEHSPESPSVGEGPQGVTSMPSSMWSGQASVNPPLPGPKPSIPEEHRQAIPESEAEDQEREPPSATVSPGQIPESDPADLSPRDTPQGEDMLNAIRRGVKLKKTTTNDRSAPRFS

SEQ ID NO: 7443 - protein, 129 aa, Homo sapiens
MNPSAPSYPMASLYVGDLHPDVTEAMLYEKFSPAGPILSIRVCRDMITRRSLGYAYVNFQQPADAERALDTMNFDVIKGKPVRIMWSQRDPSLRKSGVGNIFIKNLDKSIDNKALYDTFSAFGNILSCK

SEQ ID NO: 7444 - protein, 721 aa, Homo sapiens
MTEGTCLRRRGGPYKTEPATDLGRWRLNCERGRQTWTYLQDERAGREQTGLEAYALGLDTKNYFKDLPKAHTAFEGALNGMTFYVGLQAEDGHWTGDYGGPLFLLPGLLITCHVARIPLPAGYREEIVRYLRHIEDKSTVFGTALNYVSLRILGVGPDDPDLVRARNILHKKGGAVAIPSWGKFWLAVLNVYSWEGLNTLFPEMWLFPDWAPAHPSTLWCHCRQVYLPMSYCYAVRLSAAEDPLVQSLRQELYVEDFASIDWLAQRNNVAPDELYTPHSWLLRVVYALLNLYEHHHSAHLRQRAVQKLYEHIVADDRFTKSISIGPISKTINMLVRWYVDGPASTAFQEHVSRIPDYLWMGLDGMKMQGTNGSQIWDTAFAIQALLEAGGHHRPEFSSCLQKAHEFLRLSQVPDNPPDYQKYYRQMRKGGFSFSTLDCGWIVSDCTAEALKAVLLLQEKCPHVTEHIPRERLCDAVAVLLNMRNPDGGFATYETKRGGHLLELLNPSEVFGDIMIDYTYVECTSAVMQALKYFHKRFPEHRAAEIRETLTQGLEFCRRQQRADGSWEGSWGVCFTYGTWFGLEAFACMGQTYRDGTACAEVSRACDFLLSRQMADGGWGEDFESCEERRYLQSAQSQIHNTCWAMMGLMAVRHPDIEAQERGVRCLLEKQLPNGDWPQENIAGVFNKSCAISYTSYRNIFPIWALGRFSQLYPERALAGHP

SEQ ID NO: 7445 - protein, 189 aa, Homo sapiens
KDDQKKSLSTGELEEVNEKLRDTADGTFLVRDASTKMHGDYTLTLRKGGNNKLIKIFHRDGKYGFSDPLTFSSVVELINHYRNESLAQYNPKLDVKLLYPVSKYQQDQVVKEDNIEAVGKKLHEYNTQFQEKSREYDRLYEEYTRTSQEIQMKRTAIEAFNETIKIFEEQCQTQERYSKEYIEKFKREG

SEQ ID NO: 7446 - protein, 902 aa, Homo sapiens
MVRKKNPPLRNVASEGEGQILEPIGTESKVSGKNKEFSADQMSENTDQSDAAELNHKEEHSLHVQDPSSSSKKDLKSAVLSEKAGFNYESPSKGGNFPSFPHDEVTDRNMLAFSSPAAGGVCEPLKSPQRAEADDPQDMACTPSGDSLETKEDQKMSPKATEETGQAQSGQANCQGLSPVSVASKNPQVPSDGGVRLNKSKTDLLVNDNPDPAPLSPELQDFKCNICGYGYYGNDPTDLIKHFRKYHLGLHNRTRQDAELDSKILALHNMVQFSHSKDFQKVNRSVFSGVLQDINSSRPVLLNGTYDVQVTSGGTFIGIGRKTPDCQGNTKYFRCKFCNFTYMGNSSTELEQHFLQTHPNKIKASLPSSEVAKPSEKNSNKSIPALQSSDSGDLGKWQDKITVKAGDDTPVGYSVPIKPLDSSRQNGTEATSYYWCKFCSFSCESSSSLKLLEHYGKQHGAVQSGGLNPELNDKLSRGSVINQNDLAKSSEGETMTKTDKSSSGAKKKDFSSKGAEDNMVTSYNCQFCDFRYSKSHGPDVIVVGPLLRHYQQLHNIHKCTIKHCPFCPRGLCSPEKHLGEITYPFACRKSNCSHCALLLLHLSPGAAGSSRVKHQCHQCSFTTPDVDVLLFHYESVHESQASDVKQEANHLQGSDGQQSVKESKEHSCTKCDFITQVEEEISRHYRRAHSCYKCRQCSFTAADTQSLLEHFNTVHCQEQDITTANGEEDGHAISTIKEEPKIDFRVYNLLTPDSKMGEPVSESVVKREKLEEKDGLKEKVWTESSSDDLRNVTWRGADILRGSPSYTQASLGLLTPVSGTQEQTKTLRDSPNVEAAHLARPIYGLAVETKGFLQGAPAGGEKSGALPQQYPASGENKSKDESQSLLRVFESAWMTPEEQFSL

SEQ ID NO: 7447 - protein, 203 aa, Homo sapiens
FTHPSLMLGSGVPGHPAAIPHPAIVPPSGKQELQPFDRNLKTQAESKAEKEAKKPTIKKPLNAFMLYMKEMRAKVIAECTLKESAAINQILGRRWHALSREEQAKYYELARKERQLHMQLYPGWSARDNYGKKKRRSREKHQESTTGGKRNAFELLTSPAEPAPTSPGLSTALSLPTPGPPQAPRSTLQSTQVQQQESQRQVA

SEQ ID NO: 7448 - protein, 108 aa, Homo sapiens
MKDAHGVVIVFNADIPSHRKEMEMWYSCFVQQPSLQDTQCMLIAHHKPGSGDDKGSLSLSPPLNKLKLVHSNLEDDPEEIRMEFIKYLKSIINSMSESRDREEMSIMT

SEQ ID NO: 7449 - protein, 233 aa, Homo sapiens
MGDGAVKQGFLYLQQQQTFGKKWRRFGASLYGGSDCALARLELQEGPEKPRRCEAARKVIRLSDCLRVAEAGGEASSPRDTSAFFLETKERLYLLAAPAAERGDWVQAICLLAFPGQRKELSGPEGKQSRPCMEENELYSSAVTVGPHKEFAVTMRPTEASERCHLRGSYTLRAGESALELWGGPEPGTQLYDWPYRFLRRFGRDKAVAASLERATLSSKPGKAMRSSWPWKR

SEQ ID NO: 7450 - protein, 537 aa, Homo sapiens
MGSVSSLISGHSFHSKHCRASQYKLRKSSHLKKLNRYSDGLLRFGFSQDSGHGKSSSKMGKSEDFFYIKVSQKARGSHHPDYTALSSGDLGGQAGVDFDPSTPPKLMPFSNQLEMGSEKGAVRPTAFKPVLPRSGAILHSSPESASHQLHPAPPDKPKEQELKPGLCSGALSDSGRNSMSSLPTHSTSSSYQLDPLVTPVGPTSRFGGSAHNITQGIVLQDSNMMSLKALSFSDGGSKLGHSNKADKGPSCVRSPISTDECSIQELEQKLLEREGALQKLQRSFEEKELASSLAYEERPRRCRDELEGPEPKGGNKLKQASQKSQRAQQVLHLQVLQLQQEKRQLRQELESLMKEQDLLETKLRSYEREKTSFGPALEETQWEVCQKSGEISLLKQQLKESQTEVNAKASEILGLKAQLKDTRGKLEGLELRTQDLEGALRTKGLELEVCENELQRKKNEAELLREKHERLVWKEEKEKVIQYQKQLQQSYVAMYQRNQRLEKALQQLARGDSAGEPLEVDLEGADIPYEDIIATEI

SEQ ID NO: 7451 - protein, 68 aa, Homo sapiens
MNGEAICSALPTIPYHKLADLRYLSRGASGTVSSARHADWRVQVAVKHLHIHTPLLDRKLNILMLLGH

SEQ ID NO: 7452 - protein, 195 aa, Homo sapiens
MAGARRLELGEALALGSGWRHACHALLYAPDPGMLFGRIPLRYAILMQMRFDGRLGFPGGFVDTQDRSLEDGLNRELREELGEAAAAFRVERTDYRSSHVGSGPRVVAHFYAKRLTLEELLAVEAGATRAKDHGLEVLGLVRVPLYTLRDGVGGLPTFLENSFIGSAREQLLEALQDLGLLQSGSISGLKIPAHH

SEQ ID NO: 7453 - protein, 78 aa, Homo sapiens
MAHAMENSWTISKEYHIDEEVGFALPNPQENLPDFYNDWMFIAKHLPDLIESGQLRERVEKLNMLSIDHLTDHKSQRL

SEQ ID NO: 7454 - protein, 139 aa, Homo sapiens
MVLLSTLGIVFQGEGPPISSCDTGTMANCERTFIAIKPDGVQRGLVGEIIKRFEQKGFRLVGLKFMQASEDLLKEHYVDLKDRPFFAGLVKYMHSGPVVAMVWEGLNVVKTGRVMLGETNPADSKPGTIRGDFCIQVGR

SEQ ID NO: 7455 - protein, 45 aa, Homo sapiens
MAEYDLTTRIAHFLDRHLVFPLLEFLSVKEVVSAMWMEKHIGVYY

SEQ ID NO: 7456 - protein, 64 aa, Homo sapiens
MVVLRSSLELHNHSAASATGSLDLSSDFLSLEHIGRRRLRSAGAAQKKPAATTAKAGAVGQTAG

SEQ ID NO: 7457 - protein, 46 aa, Homo sapiens
MAFKDTGKTPVEPEVAIHRIRITLTSRNVKSLEKDFENHYKKNSLW

SEQ ID NO: 7458 - protein, 142 aa, Homo sapiens
MAFKDTGKTPVEPEVAIHRIRITLTSRNVKSLEKVCADLIRGAKEKNLKVKGPVRMPTKTLRITTRKTPCGEGSKTWDRFQMRIHKRLIDLHSPSEIVKQITSISIEPGVELIESTDAEPMDTEGQQYTLRSVFESPGTCPF

SEQ ID NO: 7459 - protein, 184 aa, Homo sapiens
LDFFRVVENQPPATMPLNVSFTNRNYDLDYDSVQPYFYCDEEENFYQQQQQSELQPPAPSEDIWKKFELLPTPPLSPSRRSGLCSPSYVAVTPFSLRGDNDGGGGSFSTADQLEMVTELLGGDMVNQSFICDPDDETFIKNIIIQDCMWSGFSAAAKLVSEKLASYQAARKDSGSPNPARGHSV

SEQ ID NO: 7460 - protein, 55 aa, Homo sapiens
MVSWMICRLVVLVFGMLCPAYASYKAVKTKNIREYVSVGVWVRWMMYWIVFALFM

SEQ ID NO: 7461 - protein, 311 aa, Homo sapiens
LESLSCECEAIKQQQKMHLEKLEEQLSRSHGQEVNELKTKIEKLKVELDEARLSEKQLKHQVDHQKELLSCKSEELRVMSERVQESMSSEMLALQIELTEMESMKTTLKEEVNELQYRQEQLELLITNLMRQVDRLKEEKEEREKEAVSYYNALEKARVANQDLQVQLDQALQQALDPNSKGNSLFAEVEDRRAAMERQLISMKVKYQSLKKQNVFNREQMQRMKMKGSQTEFEQQERLLAMLEQKNGEIKHLLGEIRNLEKFKNLYDSMESKPSVDSGTLEDNTYYTDLLQMKLDNLNKEIESTKGELSI

SEQ ID NO: 7462 - protein, 498 aa, Homo sapiens
MEDVTCDRTEFLSNYLTNVDDITLVPGTLGRIRSKFSNNAKYDPKAIIANLTCKKPDQHFKPYLKQHLPKRLHYANNRRIEDIHLLVERRWHVARKPLDVYKKPSGKCFFQGDHGFDNKVNSMQTVFVGYGSTFKYKTKVPPFENIELYNVMCDLLGLKPAPNNGTHGSLNHLLRTNTFRPTMPEEVTRPNYPGIMYLQSDFDLGCTCDDKNKLDELNKRLHTKGSTEERHLLYGRPAVLYRTRYDILYHTDFESGYSEIFLMPLWTSYTVSKQAEVSSVPDHLTSCVRPDVRVSPSFSQNCLAYKNDKQMSYGFLFPPYLSSSPEAKYDAFLVTNMVPMYPAFKRVWNYFQRVLVKKYASERNGVNVISGPIFDYDYDGLHDTEDKIKQYVEGSSIPVPTHYYSIITSCLDFTQPADKCDGPLSVSSFILPHRPDNEESCNSSEDESKWVEELMKMHTARVRDIEHLTSLDFFRKTSRSYPEILTLKTYLHTYESEI

SEQ ID NO: 7463 - protein, 409 aa, Homo sapiens
MWRVIEPPCPGAPSTENGKSVHWKLGADKEVWVWVMGEHHLDKPYDVLCNEIIAERARLKAEQEAEEPRKTHSEEFTNSLKTKSQYHDLQAPDNQQTKDIWKKVAEKEELEQGSRPAPTLEEEKIRSLSSSSRNIQQMLADSINRMKAYAFHQKKESMKKKQDEEINQIEEERTKQICKSWKEDSEWQASLRKSKAADEKRRSLAKQAREDYKRLSLGAQKGRGGERLQSPLRVPQKPERPPLPPKPQFLNSGAYPQKPLRNQGVVRTLSSSAQEDIIRWFKEEQLPLRAGYQKTSDTIAPWFHGILTLKKANELLLSTGMPGSFLIRVSERIKGYALSYLSEDGCKHFLIDASADAYSFLGVDQLQHATLADLVEYHKEEPITSLGKELLLYPCGQQDQLPDYLELFE

SEQ ID NO: 7464 - protein, 63 aa, Homo sapiens
MVVLRSSLELHNHSAASATGSLDLSSDFLSLEHIGRRRLRSAGAAQKKPAATTAKAGVRWVIS

SEQ ID NO: 7465 - protein, 82 aa, Homo sapiens
MSYVFVNDSSQTNVPLLQACIDGDFNYSKRLLESGFDPNIRDSRGRTGLHLAAARGNVDICQLLHKFGADLLATDYQGNTAL

SEQ ID NO: 7466 - protein, 68 aa, Homo sapiens
MSGVSEPLSRVKLGTLRRPEGPAEPMVVVPVDVEKEDVRILKVCFYSNSFNPGKNFKLVKCTVQTEIR

SEQ ID NO: 7467 - protein, 143 aa, Homo sapiens
MQHVGIMHKANQPPHGVPQLSLYEHFNSPHPTPAPADISQKQVHRPLQTPDLSGFYSLTSGSMGQLPHTVSWFTHPSLMLGSGVPGHPAAIPHPAIVPPSGKQELQPFDRNLKTQAESKAEKEAKKPTIKKPLNAFMLYMKEM

SEQ ID NO: 7468 - protein, 62 aa, Homo sapiens
MMVNCHAHFWTTKAFLPTMLEINHGHIVTVASSLGLFSTAGVEDYCASKFGVVGFHESLSHE

SEQ ID NO: 7469 - protein, 75 aa, Homo sapiens
MNPSAPSYPMASLYVGDLHPDVTEAMLYEKFSPAGPILSIRVCRDMITRRSLGYAYVNFQQPADAERALDTMNFD

SEQ ID NO: 7470 - protein, 71 aa, Homo sapiens
YSAFNLLMHYPPPSGAGQHPQPQPPLHKANQPPHGVPQLSLYEHFNSPHPTPAPADISQKQGTSLGWGGAQ

SEQ ID NO: 7471 - protein, 123 aa, Homo sapiens
MSEGNAAGEPSTPGGPRPLLTGARGLIGRRPAPPLTPGRLPSIRSRDLTLGGVKKKTFTPNIISRKIKEEPKEEVTVKKEKRERDRDRQREGHGRGRGRPEVIQSHSIFEQGPAEMMKKKVPR

SEQ ID NO: 7472 - protein, 134 aa, Homo sapiens
MAPRKGKEKKEEQVISLGPQVAEGENVFGVCHIFASFNDTFVHVTDLSGKETICRVTGGMKVKADRDESSPYAAMLAAQDVAQRCKELGITALHIKLRATGGNRTKTPGPGAQSALRALARSGMKIGRIEKTVG

SEQ ID NO: 7473 - protein, 99 aa, Homo sapiens
MYRISQLMSTPVASSSRLEREYAGELSPTCIFPSFTCDSLDGYHSFECGSIDPLTGSHYTCRRSPRLLTNGYYIWTEDSFLCDKDGNITLNPSQTSVMY

SEQ ID NO: 7474 - protein, 56 aa, Homo sapiens
MASRKEGTGSTATSSSSTAGAAGKGKGKGGSGDSAVKQVQIDGLGNAFKYVDRKYC

SEQ ID NO: 7475 - protein, 163 aa, Homo sapiens
RGEMPRNLREYMVEKIYPQIPDHLKEPFLEATDNSHLRSMPASFLPPSSVKKRGVLLLGDAYNMRHPLTGGGMTVAFKDIKLWRKLLKGIPDLYDDAAIFEAKKSFYWARKTSHSFVVNILAQALYELFSATDDSLHQLRKACFLYFKLGGECVAGPVGLLSV

SEQ ID NO: 7476 - protein, 47 aa, Homo sapiens
MAHAMENSWTISKEYHIDEEVGFALPNPQENLPDFYNDWMFIAKHLP

SEQ ID NO: 7477 - protein, 167 aa, Homo sapiens
MYKETVYSAFNLLMHYPPPSGAGQHPQPQPPLHKANQPPHGVPQLSLYEHFNSPHPTPAPADISQKQVHRPLQTPDLSGFYSLTSGSMGQLPHTVSWPSPPLYPLSPSCGYRQHFPAPTAAPGAPYPRFTHPSLMLGSGVPGHPAAIPHPAIVPPSGKQELQPFDRN

SEQ ID NO: 7478 - protein, 73 aa, Homo sapiens
FLDRHLVFPLLEFLSVKEIYNEKELLQGKLDLLSDTNMVDFAMDVYKNLYSDDIPHGMVGCSLTTWRTSMVLG

SEQ ID NO: 7479 - protein, 99 aa, Homo sapiens
MPRGSRSAASRPASRPSPRPFGPAGAHGSDGDHGRRGSRGLGCGTRHGQRPDRSLQRGELGALPACCPAGPHPRCPPAPADGALRLRDQAVPGLFHHSE

SEQ ID NO: 7480 - protein, 501 aa, Homo sapiens
MRNNMTASMFDLSMKDKSRNPFGKLKDKIKGKNKDSGSDTASAIIPSTTPSVDSDDESVVKDKKKKSKIKTLLSKSNLQKTPLSQSMSVLPTSKPEKVLLRPGDFQSQWDEDDNEDESSSASDVMSHKRTASTDLKQLNQVNFTLPKKEGLSFLGGLRSKNDVLSRSNVCINGNHVYLEQPEAKGEIKDSSPSSSPSPKGFRKKHLFSSTENLAAGSWKEPAEGGGLSSDRQLSESSTKDSLKSMTLPSYRPAPLVSGDLRENMAPANSEATKEAKESKKPESRRSSLLSLMTGKKDVAKGSEGENPLTVPGREKEGMLMGVKPGEDASGPAEDLVRRSEKDTAAVVSRQGSSLNLFEDVQITEPEAEPESKSEPRPPISSPRAPQTRAVKPRLHPVKPMNAMATKVANCSLGTATIISENLNNEVMMKKYSPSDPAFAYAQLTHDELIQLVLKQKETISKKEFQVRELEDYIDNLLVRVMEETPNILRIPTQVGKKAGKM

SEQ ID NO: 7481 - protein, 118 aa, Homo sapiens
MNPSAPSYPMASLYVGDLHPDVTEAMLYEKFSPAGPILSIRVCRDMITRRSLGYAYVNFQQPADAERALDTMNFDVIKGKPVRIMWSQRDPSLRKSGVGNIFIKNLDKSIDNKALYDT

SEQ ID NO: 7482 - protein, 113 aa, Homo sapiens
MDVLVSECSARLLQQEEEIKSLTAEIDRLKNCGCLGASPNLEQLQEENLKLKYRLNILRKSLQAERNKPTKNMINIISRLQEVFGHAIKAAYPDLENPPLLVTPNAQNQGTES

SEQ ID NO: 7483 - protein, 513 aa, Homo sapiens
MMMPVVDPVVREKQLQQELLLIQQQQQIQKQLLIAEFQKQHENLTRQHQAQLQEHIKELLAIKQQQELLEKEQKLEQQRQEQEVERHRREQQLPPLRGKDRGRERAVASTEVKQKLQEFLLSKSATKDTPTNGKNHSVSRHPKLWAAHHTSLDQSSPPLSGTSPSYKYTLPGAQDAKDDFPLRKTESSVSSSSPGSGPSSPNNGPTGSVTENETSVLPPTPHAEQMVSQQRILIHEDSMNLLSLYTSPSLPNITLGLPAVPSQLNASNSLKEKQKCETQTLRQGVPLPGQYGGSIPASSSHPHVTLEGKPPNSSHQALLQHLLLKEQMRQQKLLVAGGVPLHPQSPLATKERISPGIRGTHKLPRHRPLNRTQSAPLPQSTLAQLVIQQQHQQFLEKQKQYQQQIHMNKLLSKSIEQLKQPGSHLEEAEEELQGDQAMQEDRAPSSGNSTRSDSSACVDDTLGQVGAVKVKEEPVDSDEDAQIQEMESGEQAAFMQQVIGKDLAPGFVIKVII

SEQ ID NO: 7484 - protein, 55 aa, Homo sapiens
MPRGSRSAASRPARPPPPLPPSPCRWGPAPTRSGSSWTVPPLRVTCPCVRASARP

SEQ ID NO: 7485 - protein, 151 aa, Homo sapiens
EPQMRSILLDWLLEVCEVYTLHRETFYLAQDFFDRFMLTQKDINKNMLQLIGITSLFIASKLEEIYAPKLQEFAYVTDGACSEEDILRMELIILKALKWELCPVTIISWLNLFLQVDALKDAPKVLLPQYSQETFIQIAQLFSHFSYLLDQ

SEQ ID NO: 7486 - protein, 361 aa, Homo sapiens
MHGDYTLTLRKGGNNKLIKIFHRDGKYGFSDPLTFSSVVELINHYRNESLAQYNPKLDVKLLYPVSKYQQDQVVKEDNIEAVGKKLHEYNTQFQEKSREYDRLYEEYTRTSQEIQMKRTAIEAFNETIKIFEEQCQTQERYSKEYIEKFKREGNEKEIQRIMHNYDKLKSRISEIIDSRRRLEEDLKKQAAEYREIDKRMNSIKPDLIQLRKTRDQYLMWLTQKGVRQKKLNEWLGNENTEDQYSLVEDDEDLPHHDEKTWNVGSSNRNKAENLLRGKRDGTFLVRESSKQGCYACSVVVDGEVKHCVINKTATGYGFAEPYNLYSSLKELVLHYQHTSLVQHNDSLNVTLAYPVYAQQRR

SEQ ID NO: 7487 - protein, 117 aa, Homo sapiens
MLFRFSAASSDNTENLIKVIEILISTEWNERQPAPALPPKPPKPTTVANNGMNNNMSLQDAEWYWGDISREEVNEKLRDTADGTFLVRDASTKMHGDYTLTLRKGGNNKLIKIFHRD

SEQ ID NO: 7488 - protein, 170 aa, Homo sapiens
EYDLTTRIAHFLDRHLVFPLLEFLSVKEIYNEKELLQGKLDLLSDTNMVDFAMDVYKNLYSDDIPHALREKRTTVVAQLKQLQAETEPIVKMFEDPETTRQMQSTRDGRMLFDYLADKHGFRQEYLDTLYRYAKFQYECGNYSGAAEYLYFFRVLMESCYVAQADLKLLA

SEQ ID NO: 7489 - protein, 66 aa, Homo sapiens
MALRAMRGIVNGAAPELPVPTGGPAVGAREQALAVSRNYLSQPRLTYKTVSGVNGPLVILDHVKVC

SEQ ID NO: 7490 - protein, 1039 aa, Homo sapiens
IKHGVMVDATTRMGYTPLHVASHYGNIKLVKFLLQHQADVNAKTKLGYSPLHQAAQQGHTDIVTLLLKNGASPNEVSSDGTTPLAIAKRLGYISVTDVLKVVTDETSFVLVSDKHRMSFPETVDEILDVSEDEGTAHITIMGEELISFKAERRDSRDVDEEKELLDFVPKLDQVVESPAIPRIPCAMPETVVIRSEEQEQASKEYDEDSLIPSSPATETSDNISPVASPVHTGFLVSFMVDARGGSMRGSRHNGLRVVIPPRTCAAPTRITCRLVKPQKLSTPPPLAEEEGLASRIIALGPTGAQFLSPVIVEIPHFASHGRGDRELVVLRSENGSVWKEHRSRYGESYLDQILNGMDEELGSLEELEKKRVCRIITTDFPLYFVIMSRLCQDYDTIGPEGGSLKSKLVPLVQATFPENAVTKRVKLALQAQPVPDELVTKLLGNQATFSPIVTVEPRRRKFHRPIGLRIPLPPSWTDNPRDSGEGDTTSLRLLCSVIGGTDQAQWEDITGTTKLVYANECANFTTNVSARFWLSDCPRTAEAVNFATLLYKELTAVPYMAKFVIFAKMNDPREGRLRCYCMTDDKVDKTLEQHENFVEVARSRDIEVLEGMSLFAELSGNLVPVKKAAQQRSFHFQSFRENRLAMPVKVRDSSREPGGSLSFLRKAMKYEDTQHILCHLNITMPPCAKGSGAEDRRRTPTPLALRYSILSESTPGSLSGTEQAEMKMAVISEHLGLSWAELARELQFSVEDINRIRVENPNSLLEQSVALLNLWVIREGQNANMENLYTALQSIDRGEIVNMLEGSGRQSRNLKPDRRHTDRDYSLSPSQMNGHQRGQARITHSPTVSQVTERSQDRLQDWDADGSIVSYLQDAAQGSWQEEVTQGPHSFQGTSTMTEGLEPGGSQEYEKVLVSVSEHTWTEQPEAESSQADRDRRQQGQEEQVQEAKNTFTQVVQGNEFQNIPGEQVTEEQFTDEQGNIVTKKIIRKVVRQIDLSSADAAQEHEEVELRGSGLQPDLIEGRKGAQIVKRASLKRGKQ

SEQ ID NO: 7491 - protein, 269 aa, Homo sapiens
MYKETVYSAFNLLMHYPPPSGAGQHPQPQPPLHKANQPPHGVPQLSLYEHFNSPHPTPAPADISQKQVHRPLQTPDLSGFYSLTSGSMGQLPHTVSWFTHPSLMLGSGVPGHPAAIPHPAIVPPSGKQELQPFDRNLKTQAESKAEKEAKKPTIKKPLNAFMLYMKEMRAKVIAECTLKESAAINQILGRRWHALSREEQAKYYELARKERQLHMQLYPGWSARDNYGKKKRRSREKHQESTTETNWPRELKDGNGQESLSMSSSSSPA

SEQ ID NO: 7492 - protein, 109 aa, Homo sapiens
MIHSLFLINSSGDIFLEKHWKSVVSRSVCDYFFEAQERATEAENVPPVIPTPHHYLLSVYRHKIFFVAVIQTEVPPLFVIEFLHRVVDTFQYYCSGISVLMQHTGPFAQ

SEQ ID NO: 7493 - protein, 453 aa, Homo sapiens
LDFFRVVENQPPATMPLNVSFTNRNYDLDYDSVQPYFYCDEEENFYQQQQQSELQPPAPSEDIWKKFELLPTPPLSPSRRSGLCSPSYVAVTPFSLRGDNDGGGGSFSTADQLEMVTELLGGDMVNQSFICDPDDETFIKNIIIQDCMWSGFSAAAKLVSEKLASYQAARKDSGSPNPARGHSVCSTSSLYLQDLSAAASECIDPSVVFPYPLNDSSSPKSCASQDSSAFSPSSDSLLSSTESSPQGSPEPLVLHEETPPTTSSDSEEEQEDEEEIDVVSVEKRQAPGKRSESGSPSAGGHSKPPHSPLVLKRCHVSTHQHNYAAPPSTRKDYPAAKRVKLDSVRVLRQISNNRKCTSPRSSDTEENVKRRTHNVLERQRRNELKRSFFALRDQIPELENNEKAPKVVILKKATAYILSVQAEEQKLISEEDLLRKRREQLKHKLEQLRNSCA

SEQ ID NO: 7494 - protein, 91 aa, Homo sapiens
MYRISQLMSTPVASSSRLEREYAGELSPTCIFPSFTCDSLDGYHSFECGSIDPLTGSHYTCRRSPRLLTNGYYIWTEDSFLCDKDGNITLN

SEQ ID NO: 7495 - protein, 803 aa, Homo sapiens
MGIQGLLQFIKEASEPIHVRKYKGQVVAVDTYCWLHKGAIACAEKLAKGEPTDRYVGFCMKFVNMLLSHGIKPILVFDGCTLPSKKEVERSRRERRQANLLKGKQLLREGKVSEARECFTRSINITHAMAHKVIKAARSQGVDCLVAPYEADAQLAYLNKAGIVQAIITEDSDLLAFGCKKVILKMDQFGNGLEIDQARLGMCRQLGDVFTEEKFRYMCILSGCDYLSSLRGIGLAKACKVLRLANNPDIVKVIKKIGHYLKMNITVPEDYINGFIRANNTFLYQLVFDPIKRKLIPLNAYEDDVDPETLSYAGQYVDDSIALQIALGNKDINTFEQIDDYNPDTAMPAHSRSHSWDDKTCQKSANVSSIWHRNYSPRPESGTVSDAPQLKENPSTVGVERVISTKGLNLPRKSSIVKRPRSAELSEDDLLSQYSLSFTKKTKKNSSEGNKSLSFSEVFVPDLVNGPTNKKSVSTPPRTRNKFATFLQRKNEESGAVVVPGTRSRFFCSSDSTDCVSNKVSIQPLDETAVTDKENNLHESEYGDQEGKRLVDTDVARNSSDDIPNNHIPGDHIPDKATVFTDEESYSFESSKFTRTISPPTLGTLRSCFSWSGGLGDFSRTPSPSPSTALQQFRRKSDSPTSLPENNMSDVSQLKSEESSDDESHPLREEACSSQSQESGEFSLQSSNASKLSQCSSKDSDSEESDCNIKLLDSQSDQTSKLRLSHFSKKDTPLRNKVPGLYKSSSADSLSTTKIKPLGPARASGLSKKPASIQKRKHHNAENKPGLQIKLNELWKNFGFKKF

SEQ ID NO: 7496 - protein, 349 aa, Homo sapiens
MEPCAAWSPRGGRENVMDIGLTNEKPNPELSYSGSFQPAPGNKTVTYLGKFAFDSPSNWCQDNIISLMSAGILGVPPASGALSTQTSTASMVQPPQGDVEAMYPALPPYSNCGDLYSEPVSFHDPQGNPGLAYSPQDYQSAKPALDSNLFPMIPDYNLYHHPNDMGSIPEHKPFQGMDPIRVNPPPITPLETIKAFKDKQIHPGFGSLPQPPLTLKPIRPRKYPNRPSKTPLHERPHACPAEGCDRRFSRSDELTRHLRIHTGHKPFQCRICMRSFSRSDHLTTHIRTHTGEKPFACEFCGRKFARSDERKRHAKIHLKQKEKKAEKGGAPSASSAPPVSLAPVVTTCA

SEQ ID NO: 7497 - protein, 140 aa, Homo sapiens
MSSPASTPSRRGSRRGRATPAQTPRSEDARSSPSQRRRGEDSTSTGELQPMPTSPGVDLQSPAAQDVLFSSPPQMHSSAIPLDFDVSSPLTYGTPSSRVEGTPRSGVRGTPVRQRPDLGSAQKGLQVDLQSDGAAAEDIV

SEQ ID NO: 7498 - protein, 777 aa, Homo sapiens
MQCLGIRSRSRSRELYLQERSLKVAALNGRRLGLQDDEDLQALLKGSQLLKVKSSSWRRERFYKLQEDCKTIWQESRKVMRTPESQLFSIEDIQEVRMGHRTEGLEKFARDVPEDRCFSIVFKDQRNTLDLIAPSPADAQHWVLGLHKIIHHSGSMDQRQKLQHWIHSCLRKADKNKDNKMSFKELQNFLKELNIQVDDSYARKIFRECDHSQTDSLEDEEIEAFYKMLTQRVEIDRTFAEAAGSGETLSVDQLVTFLQHQQREEAAGPALALSLIERYEPSETAKAQRQMTKDGFLMYLLSADGSAFSLAHRRVYQDMGQPLSHYLVSSSHNTYLLEDQLAGPSSTEAYIRALCKGCRCLELDCWDGPNQEPIIYHGYTFTSKILFCDVLRAIRDYAFKASPYPVILSLENHCTLEQQRVMARHLHAILGPMLLNRPLDGVTNSLPSPEQLKGKILLKGKKLGGLLPPGGEGGPEATVVSDEDEAAEMEDEAVRSRVQHKPKEDKLRLAQELSDMVIYCKSVHFGGFSSPGTPGQAFYEMASFSENRALRLLQESGNGFVRHNVGHLSRIYPAGWRTDSSNYSPVEMWNGGCQIVALNFQTPGPEMDVYQGRFQDNGACGYVLKPAFLRDPNGTFNPRALAQGPWWARKRLNIRVISGQQLPKVNKNKNSIVDPKVTVEIHGVSRDVASRQTAVITNNGFNPWWDTEFAFEVVVPDLALIRFLVEDYDASSKNDFIGQSTIPLNSLKQGYRHVHLMSKNGDQHPSATLFVKISLQD

SEQ ID NO: 7499 - protein, 103 aa, Homo sapiens
MSYVFVNDSSQTNVPLLQACIDGDFNYSKRLLESGFDPNIRDSRGRTGLHLAAARGNVDICQLLHKFGADLLATDYQGNTALHLCGHVDTIQFLVSNGLKIDI

SEQ ID NO: 7500 - protein, 403 aa, Homo sapiens [sequence omitted]

SEQ ID NO: 7501 - protein, 162 aa, Homo sapiens
TGENKGWSGPKPGFPEPTNNTPKGILHLSPDVYQEMEASRHKVISGTTLGYLSPKDMNQPSSSFFSISPTSNSSATIARELLMNGTSSTAEAIGLKGSSPTPPCSPVQPSKQLEYLARIQGFQVHYCDRQSGKECVTCLTLAPVQMTFHAIGSSIEASHDQV

SEQ ID NO: 7502 - protein, 124 aa, Homo sapiens
MFYAHFVLSKRGPLAKIWLAAHWDKKLTKAHVFECNLESSVESIISPKVKMALRTSGHLLLGVVRIYHRKAKYLLADCNEAFIKIKMAFRPGVVDLPEENREAAYNAITLPEEFHDFDQPLPDL

SEQ ID NO: 7503 - protein, 185 aa, Homo sapiens
KRQEPEPEQPPRPEPHELGPLNGDTAITVQLCASEEAERHQKDITRILQQHEEEKKKWAQQVEKERELELRDRLDEQQRVLEGKNEEALQVLRASYEQEKEALTHSFREASSTQQETIDRLTSQLEAFQAKMKRVEESILSRNYKKHIQDYGSPSQFWEQELESLHFVIEMKNERIHELDRKRKI

SEQ ID NO: 7504 - protein, 103 aa, Homo sapiens
MSDSKCDSQFYSVQVADSTFTVLKRYQQLKPIGSGAQGIVCAAFDTVLGINVAVKKLSRPFQNQTHAKRAYRELVLLKCVNHKNIISLLNVFTPQKTLEEFQD

SEQ ID NO: 7505 - protein, 122 aa, Homo sapiens
MYKETVYSAFNLLMHYPPPSGAGQHPQPQPPLHKANQPPHGVPQLSLYEHFNSPHPTPAPADISQKQVHRPLQTPDLSGFYSLTSGSMGQLPHTVSWFTHPSLMLGSGVPGHPAAIPHPAIV

SEQ ID NO: 7506 - protein, 365 aa, Homo sapiens
MERLQKAKMDNQVLGYKDLAAIPKDKAILDIERPDLMIYEPHFTYSLLEHVELPRSREVWADSRSPGIISQASAPRTTGTPRTSLPHFHHPETSRPDSNIYKKPPIYKQRESVGGSPQTKHLIEDLIIESSKFPAAQPPDPNQPAKIETDYWPCPPSLAVVETEWRKRKASRRGAEEEEEEEDDDSGEEMKALRERQREELSKVTSNLGKMILKEEMEKSLPIRRKTRSLPDRTPFHTSLHQGTSKSSSLPAYGRTTLSRLQSTEFSPSGSETGSPGLQNGEGQRGRMDRGNSLPCVLEQKIYPYEMLVVTNKGRTKLPPGVDRMRLERHLSAEDFSRVFAMSPEEFGKLALWKRNELKKKASLF

SEQ ID NO: 7507 - protein, 56 aa, Homo sapiens
MAEYDLTTRIAHFLDRHLVFPLLEFLSVKEERWRGFYLYTALPRKGKRWFVGTHKK

SEQ ID NO: 7508 - protein, 95 aa, Homo sapiens
MAKPAQGAKYRGSIHDFPGFDPNQDAEALYTAMKGFGSDKEAILDIITSRSNRQRQEVCQSYKSLYGKDLIADLKYELTGKFERLIVGGLSDVGT

SEQ ID NO: 7509 - protein, 189 aa, Homo sapiens
MEDYTKIEKIGEGTYGVVYKGRHKTTGQVVAMKKIRLESEEEGVPSTAIREISLLKELRHPNIVSLQDVLMQDSRLYLIFEFLSMDLKKYLDSIPPGQYMDSSLVKSYLYQILQGIVFCHSRRVLHRDLKPQNLLIDDKGTIKLADFGLARAFGIPIRVYTHEVVTLWYRSPEVLLGSARYSTPVDIWS

SEQ ID NO: 7510 - protein, 128 aa, Homo sapiens
MKFNPFVTSDRSKNRKRHFNAPSHVRRKIMSSPLSKELRQKYNVRSMPIRKDDEVQVVRGHYKGQQIGKVVQVYRKKYVIYIERVQREKANGTTVHVGIHPSKVVITRLKLDKDRKKILERKAKSRQV

SEQ ID NO: 7511 - protein, 75 aa, Homo sapiens
MVDFAMDVYKNLYSDDIPHALREKRTTVVAQLKQLQAETEPIVKMFEDPETTRQMQSTRDGRMLFDYLADKHGFR

SEQ ID NO: 7512 - protein, 439 aa, Homo sapiens
MRNNMTASMFDLSMKDKSRNPFGKLKDKIKGKNKDSGSDTASAIIPSTTPSVDSDDESVVKDKKKKSKIKTLLSKSNLQKTPLSQSMSVLPTSKPEKVLLRPGDFQSQWDEDDNEDESSSASDVMSHKRTASTDLKQLNQVNFTLPKKEGLSFLGGLRSKNDVLSRSNVCINGNHVYLEQPEAKGEIKDSSPSSSPSPKGFRKKHLFSSTENLAAGSWKEPAEGGGLSSDRQLSESSTKDSLKSMTLPSYRPAPLVSGDLRENMAPANSEATKEAKESKKPESRRSSLLSLMTGKKDVAKGSEGENPLTVPGREKEGMLMGVKPGEDASGPAEDLVRRSEKDTAAVVSRQGSSLNLFEDVQITEPEAEPESKSEPRPPISSPRAPQTRAVKPRLHPVKPMNAMATKVANCSLGTATIISENLNNEVMMKVCPLRSWCVR

SEQ ID NO: 7513 - protein, 75 aa, Homo sapiens
MAEYDLTTRIAHFLDRHLVFPLLEFLSVKEIYNEKELLQGKLDLLSDTNMVDFAMDVYKNLYSDDIPHVLFCIFN

SEQ ID NO: 7514 - protein, 213 aa, Homo sapiens
STKYRTEKIYPTATGEKEENVKKNRYKDILPFDHSRVKLTLKTPSQDSDYINANFIKGVYGPKAYVATQGPLANTVIDFWRMIWEYNVVIIVMACREFEMGREDEQARTDYFIRTLLLEFQNESRRLYQFHYVNWPDHDVPSSFDSILDMISLMRKYQEHEDVPICIHCSAGCGRTGAICAIDYTWNLLKAGKIPEEFNVFNLIQEMRTQRHS

SEQ ID NO: 7515 - protein, 151 aa, Homo sapiens
MRPTEASERCHLRGSYTLRAGESALELWGGPEPGTQLYDWPYRFLRRFGRDKVTFSFEAGRRCVSGEGNFEFETRQGNEIFLALEEAISAQKNAAPATPQPQPATIPASLPRPDSPYSRPHDSLPPPSPTTPVPAPRPRGQEGEYAVPFDA

SEQ ID NO: 7516 - protein, 85 aa, Homo sapiens
MSYVFVNDSSQTNVPLLQACIDGDFNYSKRLLESGFDPNIRDSRGRTGLHLAAARGNVDICQLLHKFGADLLATDYQGNTALHLC

SEQ ID NO: 7517 - protein, 691 aa, Homo sapiens
MQSNMVRKKNPPLRNVASEGEGQILEPIGTESKVSGKNKEFSADQMSENTDQSDAAELNHKEEHSLHVQDPSSSSKKDLKSAVLSEKAGFNYESPSKGGNFPSFPHDEVTDRNMLAFSSPAAGGVCEPLKSPQRAEADDPQDMACTPSGDSLETKEDQKMSPKATEETGQAQSGQANCQGLSPVSVASKNPQVPSDGGVRLNKSKTDLLVNDNPDPAPLSPELQDFKCNICGYGYYGNDPTDLIKHFRKYHLGLHNRTRQDAELDSKILALHNMVQFSHSKDFQKVNRSVFSGVLQDINSSRPVLLNGTYDVQVTSGGTFIGIGRKTPDCQGNTKYFRCKFCNFTYMGNSSTELEQHFLQTHPNKIKASLPSSEVAKPSEKNSNKSIPALQSSDSGDLGKWQDKITVKAGDDTPVGYSVPIKPLDSSRQNDVLLFHYESVHESQASDVKQEANHLQGSDGQQSVKESKEHSCTKCDFITQVEEEISRHYRRAHSCYKCRQCSFTAADTQSLLEHFNTVHCQEQDITTANGEEDGHAISTIKEEPKIDFRVYNLLTPDSKMGEPVSESVVKREKLEEKDGLKEKVWTESSSDDLRNVTWRGADILRGSPSYTQASLGLLTPVSGTQEQTKTLRDSPNVEAAHLARPIYGLAVETKGFLQGAPAGGEKSGALPQQYPASGENKSKDESQSLLR

SEQ ID NO: 7518 - protein, 283 aa, Homo sapiens
QLEEFLNQSSPFYFWMNGDRIDSLLENDRQQTHMLDVMQDHFSRASSIIDELFQDRFFTREPQDTYHYLPFSLPHRRPHFFFPKSRIVRSLMPFSPYEPLNFHAMFQPFLEMIHEAQQAMDIHFHSPAFQHPPTEFIREGDDDRTVCREIRHNSTGCLRMKDQCDKCREILSVDCSTNNPSQAKLRRELDESLQVAERLTRKYNELLKSYQWKMLNTSSLLEQLNEQFNWVSRLANLTQGEDQYYLRVTTVASHTSDSDVPSGVTEVVVKLFDSDPITVTVPV

SEQ ID NO: 7519 - protein, 226 aa, Homo sapiens
MAEYDLTTRIAHFLDRHLVFPLLEFLSVKEVPATDRNALSSLWGKLASEILMQNWDAAMEDLTRLKETIDNNSVSSPLQSLQQRTWLIHWSLFVFFNHPKGRDNIIDLFLYQPQYLNAIQTMCPHILRYLTTAVITNKDVRKRRQVLKDLVKVIQQESYTYKDPITEFVECLYVNFDFDGAQKKLRECESVLVNDFFLVACLEDFIENARLFIFETFCRIHQCISI

SEQ ID NO: 7520 - protein, 26 aa, Homo sapiens
ENIQLPHTLLSRLAVAGEWFLHTLDS

SEQ ID NO: 7521 - protein, 1427 aa, Homo sapiens
MLESYVTPILMSYVNRYIKNLKPSDLQLSLWGGDVVLSKLELKLDVLEQELKLPFTFLSGHIHELRIHVPWTKLGSEPVVITINTMECILKLKDGIQDDHESCGSNSTNRSTAESTKSSIKPRRMQQAAPTDPDLPPGYVQSLIRRVVNNVNIVINNLILKYVEDDIVLSVNITSAECYTVGELWDRAFMDISATDLVLRKVINFSDCTVCLDKRNASGKIEFYQDPLLYKCSFRTRLHFTYENLNSKMPSVIKIHTLVESLKLSITDQQLPMFIRIMQLGIALYYGEIGNFKEGEIEDLTCHNKDMLGNITGSEDETRIDMQYPAQHKGQELYSQQDEEQPQGWVSWAWSFVPAIVSYDDGEEDFVGNDPASTMHQQKAQTLKDPIVSIGFYCTKATVTFKLTEMQVESSYYSPQKVKSKEVLCWEQEGTTVEALMMGEPFFDCQIGFVGCRAMCLKGIMGVKDFEENMNRSETEACFFICGDNLSTKGFTYLTNSLFDYRSPENNGTRAEFILDSTHHKETYTEIAGMQRFGAFYMDYLYTMENTSGKGSTNQQDFSSGKSEDLGTVQEKSTKSLVIGPLDFRLDSSAVHRILKMIVCALEHEYEPYSRLKSDIKDENETILNPEEVALLEEYIPTRHTSVTLLKCTCTISMAEFNLLDHLLPVIMGEKNSSNFMNTTNFQSLRPLPSIRILVDKINLEHSVPMYAEQLVHVVSSLTQPSDNLLHYCYVHCYLKIFGFQAGLTSLDCSGSYCLPVPVIPSFSTALYGKLLKLPTCWTKRSQIAITEGIFELPNLTIQATRAQTLLLQAIYQSWSHLGNVSSSAVIEALINEIFLSIGVKSKNPLPTLEGSIQNVELKYCSTSLVKCASGTMGSIKICAKAPVDSGKEKLIPLLQGPSDTKDLHSTKWLNESRKPESLLAPDLMAFTIQVPQYIDYCHNSGAVLLCSIQGLAVNIDPILYTWLIYQPQKRTSRHMQQQPVVAVPLVMPVCRRKEDEVSIGSAPLAKQQSYQASEYASSPVKTKTVTESRPLSVPVKAMLNISESCRSPEERMKEFIGIVWNAVKHLTLQLEVQSCCVFIPNDSLPSPSTIVSGDIPGTVRSWYHGQTSMPGTLVLCLPQIKIISAGHKYMEPLQEIPFVIPRPILEEGDAFPWTISLHNFSIYTLLGKQVTLCLVEPMGCTSTLAVTSQKLLATGPDTRHSFVVCLHVDLESLEIKCSNPQVQLFYELTDIMNKVWNKIQKRGNLNLSPTSPETMAGPVPTSPVRSSIGTAPPDTSTCSPSADIGTTTEGDSIQAGEESPFSDSVTLEQTTSNIGGTSGRVSLWMQWVLPKITIKLFAPDPENKGTEVCMVSELEDLSASIDVQDVYTKVKCKIESFNIDHYRSRPGEGWQSGHFEGVFLQCKEKSVPWGRVLVFGAMWRCLPFLY

SEQ ID NO: 7522 - protein, 37 aa, Homo sapiens
MRGCAADDIMDPTSLAETQEDHNGGQKQLSPQKVTLY

SEQ ID NO: 7523 - protein, 46 aa, Homo sapiens
MASRKEGTGSTATSSSSTAGAAGKGKGKGGSGDSAVKQVQIDGLFS

SEQ ID NO: 7524 - protein, 503 aa, Homo sapiens
MFCQRKDTGQKKTLDKKDGRRMSFQKPKGTIEYTVESRDSLNSIALKFDTTPNELVQLNKLFSRAVVTGQVLYVPDPEYVSSVESSPSLSPVSPLSPTSSEAEFDKTTNPDVHPTEATPSSTFTGIRPARVVSSTSEEEEAFTEKFLKINCKYITSGKGTVSGVLLVTPNNIMFDPHKNDPLVQENGCEEYGIMCPMEEVMSAAMYKEILDSKIKESLPIDIDQLSGRDFCHSKKMTGSNTEEIDSRIRDAGNDSASTAPRSTEESLSEDVFTESELSPIREELVSSDELRQDKSSGASSESVQTVNQAEVESLTVKSESTGTPGHLRSDTEHSTNEVGTLCHKTDLNNLEMAIKEDQIADNFQGISGPKEDSTSIKGNSDQDSFLHENSLHQEESQKENMPCGETAEFKQKQSVNKGKQGKEQNQDSQTEAEELRKLWKTHTMQQTKQQRENIQQVSQKEAKHKITSADGHIESKCYRVNEVSSSNCMVSPSFLTDSKAAVP

SEQ ID NO: 7525 - protein, 1479 aa, Homo sapiens
MSSGNASYRCSMSSSADFSDEDDFSQKSGSASPAPGDTLPWNLPKHERSKRKIQGGSVLDPAERAVLRIADERDKVQKKTFTKWINQHLMKVRKHVNDLYEDLRDGHNLISLLEVLSGDTLPREKGRMRFHRLQNVQIALDYLKRRQVKLVNIRNDDITDGNPKLTLGLIWTIILHFQISDIHVTGESEDMSAKERLLLWTQQATEGYAGIRCENFTTCWRDGKLFNAIIHKYRPDLIDMNTVAVQSNLANLEHAFYVAEKIGVIRLLDPEDVDVSSPDEKSVITYVSSLYDAFPKVPEGGEGIGANDVEVKWIEYQNMVNYLIQWIRHHVTTMSERTFPNNPVELKALYNQYLQFKETEIPPKETEKSKIKRLYKLLEIWIEFGRIKLLQGYHPNDIEKEWGKLIIAMLEREKALRPEVERLEMLQQIANRVQRDSVICEDKLILAGNALQSDSKRLESGVQFQNEAEIAGYILECENLLRQHVIDVQILIDGKYYQADQLVQRVAKLRDEIMALRNECSSVYSKGRILTTEQTKLMISGITQSLNSGFAQTLHPSLTSGLTQSLTPSLTSSSMTSGLSSGMTSRLTPSVTPAYTPGFPSGLVPNFSSGVEPNSLQTLKLMQIRKPLLKSSLLDQNLTEEEINMKFVQDLLNWVDEMQVQLDRTEWGSDLPSVESHLENHKNVHRAIEEFESSLKEAKISEIQMTAPLKLTYAEKLHRLESQYAKLLNTSRNQERHLDTLHNFVSRATNELIWLNEKEEEEVAYDWSERNTNIARKKDYHAELMRELDQKEENIKSVQEIAEQLLLENHPARLTIEAYRAAMQTQWSWILQLCQCVEQHIKENTAYFEFFNDAKEATDYLRNLKDAIQRKYSCDRSSSIHKLEDLVQESMEEKEELLQYKSTIANLMGKAKTIIQLKPRNSDCPLKTSIPIKAICDYRQIEITIYKDDECVLANNSHRAKWKVISPTGNEAMVPSVCFTVPPPNKEAVDLANRIEQQYQNVLTLWHESHINMKSVVSWHYLINEIDRIRASNVASIKTMLPGEHQQVLSNLQSRFEDFLEDSQESQVFSGSDITQLEKEVNVCKQYYQELLKSAEREEQEESVYNLYISEVRNIRLRLENCEDRLIRQIRTPLERDDLHESVFRITEQEKLKKELERLKDDLGTITNKCEEFFSQAAASSSVPTLRSELNVVLQNMNQVYSMSSTYIDKLKTVNLVLKNTQAAEALVKLYETKLCEEEAVIADKNNIENLISTLKQWRSEVDEKRQVFHALEDELQKAKAISDEMFKTYKERDLDFDWHKEKADQLVERWQNVHVQIDNRLRDLEGIGKSLKYYRDTYHPLDDWIQQVETTQRKIQENQPENSKTLATQLNQQKMLVSEIEMKQSKMDECQKYAEQYSATVKDYELQTMTYRAMVDSQQKSPVKRRRMQSSADLIIQEFMDLRTRYTALVTLMTQYIKFAGDSLKRLEEEEKSLEEEK

SEQ ID NO: 7526 - protein, 137 aa, Homo sapiens
MHGDYTLTLRKGGNNKLIKIFHRDGKYGFSDPLTFSSVVELINHYRNESLAQYNPKLDVKLLYPVSKYQQDQVVKEDNIEAVGKKLHEYNTQFQEKSREYDRLYEEYTRTSQEIQMKRTAIEAFNETIKIFEEQCQT

SEQ ID NO: 7527 - protein, 121 aa, Homo sapiens
MPLPKVGGGFGGERSSLYTQYLSCTGILLLEYSYGKTFSSAIKALDGRSQVSTPRFGKTFDAPPALPKATRKALGTVNRATEKSVKTKGPLKQKQPSFSAKKMTEKTVKAKSSVPASDDAY

SEQ ID NO: 7528 - protein, 110 aa, Homo sapiens
MAKPAQGAKYRGSIHDFPGFDPNQDAEALYTAMKGFGSDKEAILDIITSRSNRQRQEVCQSYKSLYGKDLIADLKYELTGKFERLIVGLMRPPAYCDAKEIKDAISGIGT

SEQ ID NO: 7529 - protein, 536 aa, Homo sapiens
MEDGLIKQIGENLIVPGGVKTIEAHSRMVIPGGIDVHTRFQMPDQGMTSADDFFQGTKAALAGGTTMIIDHVVPEPGTSLLAAFDQWREWADSKSCCDYSLHVDISEWHKGIQEEMEALVKDHGVNSFLVYMAFKDRFQLTDCQIYEVLSVIRDIGAIAQVHAENGDIIAEEQQRILDLGITGPEGHVLSRPEEVEAEAVNRAITIANQTNCPLYITKVMSKSSAEVIAQARKKGTVVYGEPITASLGTDGSHYWSKNWAKAAAFVTSPPLSPDPTTPDFLNSLLSCGDLQVTGSAHCTFNTAQKAVGKDNFTLIPEGTNGTEERMSVIWDKAVVTGKMDENQFVAVTSTNAAKVFNLYPRKGRIAVGSDADLVIWDPDSVKTISAKTHNSSLEYNIFEGMECRGSPLVVISQGKIVLEDGTLHVTEGSGRYIPRKPFPDFVYKRIKARSRLAELRGVPRGLYDGPVCEVSVTPKTVTPASSAKTSPAKQQAPPVRNLHQSGFSLSGAQIDDNIPRRTTQRIVAPPGGRANITSLG

SEQ ID NO: 7530 - protein, 301 aa, Homo sapiens
DEAEVGTGRAGGPGTGARRETPLTRGKEVAGGQDGIGEEVLKMSTEEIIQRTRLLDSEIKIMKSEVLRVTHELQAMKDKIKENSEKIKVNKTLPYLVSNVIELLDVDPNDQEEDGANIDLDSQRKGKCAVIKTSTRQTYFLPVIGLVDAEKLKPGDLVGVNKDSYLILETLPTEYDSRVKAMEVDERPTEQYSDIGGLDKQIQELVEAIVLPMNHKEKFENLGIQPPKGVLMYGPPGTGKTLLARACAAQTKATFLKLAGPQLVQMFIGDGAKLVRDAFALAKEKAPSIIFIDELDAIGTK

SEQ ID NO: 7531 - protein, 336 aa, Homo sapiens
MGAVSCRQGQHTQQGEHTRVAVPHKQGGNIRGPWARGWKSLWTGLGTIRSDLEELWELRGHHYLHQESLKPAPVLVEKPLPEWPVPQFINLFLPEFPIRPIRGQQQLKILGLVAKGSFGTVLKVLDCTQKAVFAVKVVPKVKVLQRDTVRQCKEEVSIQVCTESWKGLWEELGHRWQKEEMALKHMQAELQQQQAVLAKEVRDLKETLEFADQENQVAHLELGQVECQLKTTLEVLRERSLQCENLKDTVENLTAKLASTIADNQEQDLEKTRQYSQKLGLLTEQLQSLTLFLQTKLKEKTEQETLLLSTACPPTQEHPLPNDRTFLGSILTAVAD

SEQ ID NO: 7532 - protein, 1668 aa, Homo sapiens
MGKPLSRPDCLRRNPSCLGKGEEEDGYIEDCYVPQRSIYDTMRINEQIDQGSKLNQTSKSTMEKMEGSTISSNGTLGAASNVFESRAPEGKKLDERIIFDALKLSSDVQKSAPVPPRRRPNAERKDNVNRRSWKSFMPPNFPEFAERIEASLSEVSEAGASNPSLQEKKESSSALTESSGHLDHREPQSESVTLEHVSKSIGIPEVQDFKNLSGDCQDFRFQQHSANPPHEFQPVESEAVATSGNTDVMQESRFSSATWPRATKSLAKGGFSEKQHPLGDTACTVEMPPLSPCLSEELLDPELHVLITPSLREKTESELKFEEDERWIMMEAEGEWEEEKLSDREKTFLMADEKNSLADIFEEREQANTAVVEDGSDCLAAVLRTFGHLSLGQICCPDDPQPAKDQLATVPKDIPLDCDCVLTGEDILGEVANRTAQGLEGLVSDSACTVGTIDAEQLSDTDSVQMFLELEKECLCEEGVTPLVELQNQISSEGLAASQDAENLLVISHFSGAALEKEQHLGLLHVRAKDYDTRLDCGYFNTLDSSQVPNAVELIAHVDIMRDTSTVSKEECEKVPFSPRTAEFKSRQPADLDSLEKLDPGGLLNSDHRVSHEEKLSGFIASELAKDNGSLSQGDCSQTEGNGEECIERVTFSFAFNHELTDVTSGPEVEVLYESNLLTDEIHLESGNVTVNQENNSLTSMGNVVTCELSVEKVCDEDGEAKELDYQATLLEDQAPAHFHRNFPEQVFQDLQRKSPESEILSLHLLVEELRLNPDGVETVNDTKPELNVASSEGGEMERRDSDSFLNIFPEKQVTKAGNTEPVLEEWIPVLQRPSRTAAVPTVKDALDAALPSPEEGTSIAAVPAPEGTAVVAALVPFPHEDILVASIVSLEEEDVTAAAVSAPERATVPAVTVSVPEGTAAVAAVSSPEETAPAVAAAITQEGMSAVAGFSPEWAALAITVPITEEDGTPEGPVTPATTVHAPEEPDTAAVRVSTPEEPASPAAAVPTPEEPTSPAAAVPTPEEPTSPAAAVPPPEEPTSPAAAVPTPEEPTSPAAAVPTPEEPTSPAAAVPTPEEPTSPAAAVPTPEEPTSPAAAVPTPEEPTSPAAAVPTPEEPASPAAAVPTPEEPASPAAAVPTPEEPAFPAPAVPTPEESASAAVAVPTPEESASPAAAVPTPAESASFAAVVATLEEPTSPAASVPTPAAMVATLEEFTSPAASVPTSEEPASLAAAVSNPEEPTSPAAAVPTLEEPTSSAAAVLTPEELSSPAASVPTPEEPASPAAAVSNLEEPASPAAAVPTPEVAAIPAASVPTPEVPAIPAAAVPPMEEVSPIGVPFLGVSAHTDSVPISEEGTPVLEEASSTGMWIKEDLDSLVFGIKEVTSTVLHGKVPLAATAGLNSDEMFQKEQVDPLQMKLQQVNGLGQGLIQSAGKDCDVQGLEHDMEEINARWNTLNKKVAQRIAQLQEALLHCGKFQDALEPLLSWLADTEELIANQKPPSAEYKVVKAQIQEQKLLQRLLDDRKATVDMLQAEGGRIAQSAELADREKITGQLESLESRWTELLSKAAARQKQLEDILVLAKQFHETAEPISDFLSVTEKKLANSEPVGTQTAKIQQQIIRHKALEEDIENHATDVHQAVKIGQSLSSLTSPAEQGVLSEKIDSLQA

SEQ ID NO: 7533 - protein, 488 aa, Homo sapiens
MENLTKHSIECSSFRGDWECKNQFERKQGSQEGHFSEMIFTPEDMPTFSIQHQRIHTDEKLLECKECGKDFSFVSVLVRHQRIHTGEKPYECKECGKAFGSGANLAYHQRIHTGEKPFECKECGKAFGSGSNLTHHQRIHTGEKPYECKECGKAFSFGSGLIRHQIIHSGEKPYECKECGKSFSFESALIRHHRIHTGEKPYECIDCGKAFGSGSNLTQHRRIHTGEKPYECKACGMAFSSGSALTRHQRIHTGEKPYICNECGKAFSFGSALTRHQRIHTGEKPYVCKECGKAFNSGSDLTQHQRIHTGEKPYECKECEKAFRSGSKLIQHQRMHTGEKPYECKECGKTFSSGSDLTQHHRIHTGEKPYECKECGKAFGSGSKLIQHQLIHTGERPYECKECGKSFSSGSALNRHQRIHTGEKPYECKECGKAFYSGSSLTQHQRIHTGEKLYECKNCGKAYGRDSEFQQHKKSHNGKKLCELETIN

SEQ ID NO: 7534 - protein, 101 aa, Homo sapiens
MESPASSQPASMPQSKGNSLSANPWPSAQREQSSQLARVRRRPGQRRLPAAGGCRGQSIYHPGLRGAWSPPIQPICASALDREAGHIHGDHLWATTGPHLR

SEQ ID NO: 7535 - protein, 906 aa, Homo sapiens
FAPVICKRTCLKGQCRDSCQQGSNMTLIGENGHSTDTLTGSGFRVADKPEEKSLCFRLVSPEHQCQHPLTTRLTRQLCCCSVGKAWGARCQRCPTDGTAAFKEICPAGKGYHILTSHQTLTIQGESDFSLFLHPDGPPKPQQLPESPSQAPPPEDTEEERGVTTDSPVSEERSVQQSHPTATTTPARPYPELISRPSPPTMRWFLPDLPPSRSAVEIAPTQVTETDECRLNQNICGHGECVPGPPDYSCHCNPGYRSHPQHRYCVDVNECEAEPCGPGRGICMNTGGSYNCHCNRGYRLHVGAGGRSCVDLNECAKPHLCGDGGFCINFPGHYKCNCYPGYRLKASRPPVCEDIDECRDPSSCPDGKCENKPGSFKCIACQPGYRSQGGGACRDVNECAEGSPCSPGWCENLPGSFRCTCAQGYAPAPDGRSCLDVDECEAGDVCDNGICSNTPGSFQCQCLSGYHLSRDRSHCEDIDECDFPAACIGGDCINTNGSYRCLCPQGHRLVGGRKCQDIDECSQDPSLCLPHGACKNLQGSYVCVCDEGFTPTQDQHGCEEVEQPHHKKECYLNFDDTVFCDSVLATNVTQQECCCSLGAGWGDHCEIYPCPVYSSAEFHSLCPDGKGYTQDNNIVNYGIPAHRDIDECMLFGSEICKEGKCVNTQPGYECYCKQGFYYDGNLLECVDVDECLDESNCRNGVCENTRGGYRCACTPPAEYSPAQRQCLSPEEMERAPERRDVCWSQRGEDGMCAGPLAGPALTFDDCCCRQGRGWGAQCRPCPPRGAGSHCPTSQSESNSFWDTSPLLLGKPPRDEDSSEEDSDECRCVSGRCVPRPGGAVCECPGGFQLDASRARCVDIDECRELNQRGLLCKSERCVNTSGSFRCVCKAGFARSRPHGACVPQRRR

SEQ ID NO: 7536 - protein, 153 aa, Homo sapiens
MDSFKVVLEGPAPWGFRLQGGKDFNVPLSISRLTPGGKAAQAGVAVGDWVLSIDGENAGSLTHIEAQNKIRACGERLSLGLSRAQPVQSKPQKASAPAADPPRYTFAPSVSLNKTARPFGAPPPADSAPQQNGCRPLTNSRSDRWSQMPASSG

SEQ ID NO: 7537 - protein, 128 aa, Homo sapiens
MVAMAEAEAGVAVEVRGLPPAVPDELLTLYFENRRRSGGGPVLSWQRLGCGGVLTFREPADAERVLAQADHELHGAQLSLRPAPPRAPARLLLQGLPPGTTPQRLEQHVQALLRASGLPVQPCCALAS

SEQ ID NO: 7538 - protein, 214 aa, Homo sapiens
MRPKTGQVGCETPEELGPGPRQRWPLLLLGLAMVAHGLLRPMVAPQSGDPDPGASVGSSRSSLRSLWGRLLLQPSPQRADPRCWPRGFWSEPQSLCYVFGTGTKVTVLGQPKANPTVTLFPPSSEELQANKATLVCLISDFYPGAVTVAWKADGSPVKAGVETTKPSKQSNNKYAASSYLSLTPEQWKSHRSYSCQVTHEGSTVEKTVAPTECS

SEQ ID NO: 7539 - protein, 129 aa, Homo sapiens
MDDKKKKRSPKPCLAQPAQAPGTLRRVPVPTSHSGSLALGLPHLPSPKQRAKFKRVGKEKCRPVLAGGGSGSAGTPLQHSFLTEVTDVYEMEGGLLNLLNDFHSGRLQAFGEASPAALQPGCVWGGGGR

SEQ ID NO: 7540 - protein, 121 aa, Homo sapiens
MQDYNKDDMSYRRISAVEPKTALPFNRFLPNKSRQPSYVPAPLRKKKPDKHEDNRRSWASPVYTEADGTFSRLFQKIYGENGSKSMSDVSAEDVQNLRQLRYEEMQKIKSQLKEQDQKWQD

SEQ ID NO: 7541 - protein, 107 aa, Homo sapiens
MLRSCAARLRTLGALCLPPVGRRLPGSEPRPELRSFSSEEVILKDCSVPNPSWNKDLRLLFDQFMKKCEDGSWKRLPSYKRTPTEWIQDFKTHFLAWLMAGRCGSRL

SEQ ID NO: 7542 - protein, 70 aa, Homo sapiens
MNGPEDLPKSYDYDLIIIGGGSGGLAAAKEAAQYGKKVMVLDFVTPTPLGTRWGLGGTCVNVGCIPKKLM

SEQ ID NO: 7543 - protein, 71 aa, Homo sapiens
MPVKKKRKSPGVAAAVAEDGGLKKCKISRYHLPPPFKLPSSLLCWTTGGKGVGPGLPGWGWRQLLQIPTPC

SEQ ID NO: 7544 - protein, 128 aa, Homo sapiens
MADSSGQQAPDYRSILSISDEAARAQALNEHLSTRSYVQGYSLSQADVDAFRQLSAPPADPQLFHVARWFRHIEALLGSPCGKGQPCRLQASKGRRVQPQWSPPAGTQPCRLHLYNSLTRNKCFLHFL

SEQ ID NO: 7545 - protein, 87 aa, Homo sapiens
AVGEAGSWRAGAASRPSWPGRNSAGKWPAGNTGPPRALHPRLWGLAPARASDSDKGDPDFQLLEEGCGRESATPFLIWASALMWHGS

SEQ ID NO: 7546 - protein, 66 aa, Homo sapiens
MAAIRKKLVIVGDGACGKTCLLIVFSKDQFPEVYVPTVFENYIADIEVDGKQTGSVTWAESLCLWV

SEQ ID NO: 7547 - protein, 265 aa, Homo sapiens
TSKTSNIRANFENLAKEKEQEDRRKAEAERAQRMAKERQEQEEARRKLEEQARAKTQTPPVSPAPQPTEERLPSSPVYEDAASFKAELSYRGPVSGTEPEPVYSMEAADYREASSQQGLAYATEAVYESAEAPGHYPAEDSTYDEYENDLGITAVALYDYQAAGDDEISFDPDDIITNIEMIDDGWWRGVCKGRFRELAFSCVRVALVPIKCSRDLPGQARGLRKLISFLRSREAGPVPSCSQVGGVSFQKVTWKCLGTWVPECP

SEQ ID NO: 7548 - protein, 35 aa, Homo sapiens
MVALRGLGSGLQPWCPLDLRLEWVDTVWELDFTET

SEQ ID NO: 7549 - protein, 187 aa, Homo sapiens
MATNFLAHEKIWFDKFKYDDAERRFYEQMNGPVAGASRQSSGPGASSGTSGDHGELVVRIASLEVENQSLRGVVQELQQAISKLEARLNVLEKSSPGHRATAPQTQHVSPMRQVEPPAKKPATPAEDDEDDDIDLFGSDNEEEDKEAAQLREERLRQYAEKKAKKPALVAKSSILLDVKPWDDETDM

SEQ ID NO: 7550 - protein, 52 aa, Homo sapiens
MVYWTGDIPAHDVWHQTRQDQLRALTTVTALVRKFLGPVPVYPAVGNHESTP

SEQ ID NO: 7551 - protein, 206 aa, Homo sapiens
MAVPFVEDWDLVQTLGEGAYGEVQLAVNRVTEEAVAVKIVDMKRAVDCPENIKKEICINKMLNHENVVKFYGHRREGNIQYLFLEYCSGGELFDRIEPDIGMPEPDAQRFFHQLMAGVVYLHGIGITHRDIKPENLLLDERDNLKISDFGLATVFRYNNRERLLNKMCGTLPYVAPELLKRREFHAEPVDVWSCGIVLTAMLAGEL

SEQ ID NO: 7552 - protein, 181 aa, Homo sapiens
YKIANNPTTDKENKKWSYGFYLIHTQGQNGLEFYCKTKDLKKKWLEQFEMALSNIRPDYADSNFHDFKMHTFTRVTSCKVCQMLLRGTFYQGYLCFKCGARAHKECLGRVDNCGRVNSGGLPKMQVIRNYSGTPPPALHEGPPLQLQAGDTVELLKGDAHSLFWQGRNLASGEVGFFPSDA

SEQ ID NO: 7553 - protein, 113 aa, Homo sapiens
MIGSGHLQSLQRLIDSQMETSCQITFEFVDQEQLKDPVCYLKKAFLLVQDIMEDTMRFRDNTPNAIAIVQLQELSLRLKSCFTKDYEEHDKACVRTFYETPLQLLEKVKNVFN

SEQ ID NO: 7554 - protein, 91 aa, Homo sapiens
MKHYHLKRNQSFCPTVNLDKLWTLVSEQTRVNAAKNKTGAAPIIDVVRSGYYKVLGKGKLPKQPVIVKAKFFSRRAEEKIKSVGGACVLVA

SEQ ID NO: 7555 - protein, 135 aa, Homo sapiens
MFRDFGEPGPSSGNGGGYGGPAQPPAAAQAAQQKFHLVPSINTMSGSQELQWMVQPHFLGPSSYPRPLTYPQYSPPQPRPGVIRALGPPPGVRRRPCEQPGGRGAPPSKARAEQAGCGQVQEPEEGTDRLPAGGD

SEQ ID NO: 7556 - protein, 479 aa, Homo sapiens
MVHSSMGAPEIRMSKPLEAEKQGLDSPSEHTDTERNGPDTNHQNPQNKTSPFSVSPTGPSTKIKAEDPSGDSAPAAPLPPQPAQPHLPQAQLMLTGSQLAGDIQQLLQLQQLVLVPGHHLQPPAQFLLPQAQQSQPGLLPTPNLFQLPQQTQGALLTSQPRAGLPTQAVTRPTLPDPHLSHPQPPKCLEPPSHPEEPSDLEELEQFARTFKQRRIKLGFTQGDVGLAMGKLYGNDFSQTTISRFEALNLSFKNMCKLKPLLEKWLNDAETMSVDSSLPSPNQLSSPSLGFDGLPGRRRKKRTSIETNVRFALEKSFLANQKPTSEEILLIAEQLHMEKEVIRVWFCNRRQKEKRINPCSAAPMLPSPGKPASYSPHMVTPQGGAGTLPLSQASSSLSTTVTTLSSAVGTLHPSRTAGGGGGGGGAAPPLNSIPSVTPPPPATTNSTNPSPQGSHSAIGLSGLNPSTGPGLWWNPAPYQP

SEQ ID NO: 7557 - protein, 75 aa, Homo sapiens
MTRGFAPILPVEFHKMGSFRRPRPRFMSSPVLSDLPRFQAARQALQLSSSSAWNSVQTAVINVFKGGGLQSNELY

SEQ ID NO: 7558 - protein, 39 aa, Homo sapiens
MATNFLAHEKIWFDKFKYDDAERRFYEQMNGPVAGASRQ

SEQ ID NO: 7559 - protein, 39 aa, Homo sapiens
MPPKDDKKKKDAGKSAKKDKDPVNKSGGKAKKKVEIRPL

SEQ ID NO: 7560 - protein, 165 aa, Homo sapiens
MQDYNKDDMSYRRISAVEPKTALPFNRFLPNKSRQPSYVPAPLRKKKPDKHEDNRRSWASPVYTEADGTFSRLFQKIYGENGSKSMSDVSAEDVQNLRQLRYEEMQKIKSQLKEQDQKWQDDLAKWKDRRKSYTSDLQKKKEEREEIEKQALEKSKRSSKTFKEM

SEQ ID NO: 7561 - protein, 183 aa, Homo sapiens
MSKGPAVGIDLGTTYSCVGVFQHGKVEIIANDQGNRTTPSYVAFTDTERLIGDAAKNQVAMNPTNTVFDAKRLIGRRFDDAVVQSDMKHWPFMVVNDAGRPKVQVEYKGETKSFYPEEVSSMVLTKMKEIAEAYLGKTVTNAVVTVPAYFNDSQRQATKDAGTIAGLNVLRIINEPTAAAIAY

SEQ ID NO: 7562 - protein, 101 aa, Homo sapiens
MPGGPIPPGFFQPFMSPRYAGGPRPPIRMGNQPPGGVPGTQPLLPNSMDPTRQQGHPNMGGSMQRMNPPRGMGPMGPGPQNYGSGMRPPPNSLGPAMPGIN

SEQ ID NO: 7563 - protein, 81 aa, Homo sapiens
MALNGAEVDDFSWEPPTEAETKVLQARRERQDRISRLMGDYLLRGYRMLGETRSSSKTNSGKSTAWLVRNSTQTWIKIIPL

SEQ ID NO: 7564 - protein, 924 aa, Homo sapiens
MLSLDPSGPEWDCPLGSKDLEEEGPWGGGSGLPPTGCFPGSWRQDVGLDCKGSPEGAEARAWTVYYYSLLQSCLQQAGLPETQDRGQVPRTGCPGAEVTLCVLGSPSTFLPVLLEGGVQSPGNMLLCLSPAWLMKVPAPGQPGEAALLVSKAVSFHPGGLTFLDDFVPPRRATYFLAGLGLGPGRGREAAELARDLTCPTGASAELARLLEDRLLTRQLLAQQGGVAVPATLAFTYKPPGLLRGGDASLGLRLVELSGKEGQETLVKEEVEAFLRSEALGDILQVAVKLSGWRWRGRQAWRLHPRAELGAVVDTVLALLEKLEEEESVLVEAVYPPAQLPCSDGPSPGPGLAVRICAVVCRTQGDRPLLSKVVCGVGRGDRPLRHHNSLPRTLEAALAAVLALEAGLSAEQRGGRRAHTDFLGVDFALTAAGGVLTPVALELNGGLCLEACGALEGLWAAPRLGPAADEAVAAPLVETMLRRSARCLMEGKQLLVVGAGGVSKKFVWEAARDYGLQLHLVESDPNHFASQLVQTFIHFDMTEHRRDEENARLLAELVRARGLKLDGCFSYWDDCLVLTALLCQELGLPCSSPAAMRLAKQKSLTQLHLLHHHGPPWPAPSLHAVPCCPLESEADVERAVHQVPLPGVMKLEFGAGAVGVRLVEDAPQCHEHFSRITRDLQGEADHPGIGLGWGNAMLLMEFVEGTEHDVDLVLFGGRLLAAFVSDNGPTRLPGFTETAACMPTGLAPEQEAQMVQAAFRCCLGCGLLDGVFNVELKLTGAGPRLIEINPRMGGFYLRDWILELYGVDLLLAAVMVACGLRPALPTRPRARGHLVGVMCLVSQHLQALSSTASRETLQALHDRGLLRLNLLEEALVPGEYEEPYCSVACAGPSPTEARLRLLGLCQGLGIDGPSYPVAHFLSHFK

SEQ ID NO: 7565 - protein, 57 aa, Homo sapiens
MRQASWCHQGWATGVCDRAPDFLSPSEDQVLRPALGSSVALNCTAWVVSGPHCSLPS

SEQ ID NO: 7566 - protein, 934 aa, Homo sapiens
MIDLSFLTEEEQEAIMKVLQRDAALKRAEEERVRHLPEKIKDDQQLKNMSGQWFYEAKAKRHRDKIHGADIIRASMRKKRPQIAAEQSKDRENGAKESWVNNVNKDAFLPPELAGVVEEPEEDAAPASPSSSVVNPASSVIDMSQENTRKPNVSPEKRKNPFNSSKLPEGHSSQQTKNEQSKNGRTGLFQTSKEDELSESKEKSTVADTSIQKLEKSKQTLPGLSNGSQIKAPIPKARKMIYKSTDLNKDDNQSFPRQRTDSLKARGAPRGILKRNSSSSSTDSETLRYNHNFEPKSKIVSPGLTIHERISEKEHSLEDNSSPNSLEPLKHVRFSAVKDELPQSPGLIHGREVGEFSVLESDRLKNGMEDAGDTEEFQSDPKPSQYRKPSLFHQSTSSPYVSKSETHQPMTSGSFPINGLHSHSEVLTARPQSMENSPTINEPKDKSSELTRLESVLPRSPADELSHCVEPEPSQVPGGSSRDRQQGSEEEPSPVLKTLERSAARKMPSKSLEDISSDSSNQAKVDNQPEELVRSAEDVSTVPTQPDNPFSHPDKLKRMSKSVPAFLQDESDDRETDTASESSYQLSRHKKSPSSLTNLSSSSGMTSLSSVSGSVMSVYSGDFGNLEVKGNIQFAIEYVESLKELHVFVAQCKDLAAADVKKQRSDPYVKAYLLPDKGKMGKKKTLVVKKTLNPVYNEILRYKIEKQILKTQKLNLSIWHRDTFKRNSFLGEVELDLETWDWDNKQNKQLRWYPLKRKTAPVALEAENRGEMKLALQYVPEPVPGKKLPTTGEVHIWVKECLDLPLLRGSHLNSFVKCTILPDTSRKSRQKTRAVGKTTNPIFNHTMVYDGFRPEDLMEACVELTVWDHYKLTNQFLGGLRIGFGTGKSYGTEVDWMDSTSEEVALWEKMVNSPNTWIEATLPLRMLLIAKISK

SEQ ID NO: 7567 - protein, 228 aa, Homo sapiens
MRNCFRLQEEMLQREEAENTLQSFRQDVDNASLARLDLERKVESLQEEIAFLKKLHEEEIQELQAQIQEQHVQIDVDVSKPDLTAALRDVRQQYESVAAKNLQEAEEWYKSKFADLSEAANRNNDALRQAKQESTEYRRQVQSLTCEVDALKGTNESLERQMREMEENFAVEAANYQDTIGRLQDEIQNMKEEMARHLREYQDLLNVKMALDIEIATYRKLLEGEESR

SEQ ID NO: 7568 - protein, 216 aa, Homo sapiens
MMNTPVINAAVEMGFSRSLVKQTVQRKILATGENYRLVNDLVLDLLNAEDEIREEERERATEEKESNDLLLIRKNRMALFQHLTCVIPILDSLLTAGIINEQEHDVIKQKTQTSLQARELIDTILVKGNIAATVFRNSLQEAEAVLYEHLFVQQDIKYIPTEDVSDLPVEEQLRRLQEERTCKVCMDKEVSIVFIPCGHLVVCKDCAPSLRKCPIC

SEQ ID NO: 7569 - protein, 135 aa, Homo sapiens
QISKKRKFVADGIFKAELNEFLTRELAEDGYSGVEVRVTPTRTEIIILATRTQNVLGEKGRRIRELTAVVQKRFGFPEGSVELYAEKVATRGLCAIAQAESLRYKLLGGLAVRRVGPKAARLWCLGNSEDRGLNP

SEQ ID NO: 7570 - protein, 139 aa, Homo sapiens
MATNFLAHEKIWFDKFKYDDAERRFYEQMNGPVAGASRQENGASVILRDIARARENIQKSLAGSSGPGASSGTSGDHVVQELQQAISKLEARLNVLEKSSPGHRATAPQTQHVSPMRQVEPPAKKPATPAEDDEDDDID

SEQ ID NO: 7571 - protein, 257 aa, Homo sapiens
MATNFLAHEKIWFDKFKYDDAERRFYEQMNGPVAGASRQSSGPGASSGTSGDHGELVVRIASLEVENQSLRGVVQELQQAISKLEARLNVLEKSSPGHRATAPQTQHVSPMRQVEPPAKKPATPAEDDEDDDIDLFGSDNEEEDKEAAQLREERLRQYAEKKAKKPALVAKSSILLDVKPWDDETDMAQLEACVRSIQLDGLVWGASKLVPVGYGIRKLQIQCVVEDDKVGTDLLEEEITKFEEHVQSVDIAAFNKI

SEQ ID NO: 7572 - protein, 838 aa, Homo sapiens
MERMNWLSRLASRGPGHRIPQGANLQTPVMADPETCLMVFKNHWSQVVRILERQGPRAAPGGADDLSAVRNHTYQMLTLLAEDRAVPSAPTGPGPLLEFALHEDLLTRVLTWQLQWDELGDGVEERRAEQLKLFEMLVSEARQPLLRHGPVREALLTLLDACGRPVPSSPALDEGLVLLLSQLCVCVAQEPSLLEFFLQPPPEPGAAPRLLLFSRLVPFVHREGTLGQQARDALLLLMALSAGSPTVGRYIADHSYFCPVLATGLSALYSSLPRKIEVPGDDWHCLRREDWLGVPALALFMSSLEFCNAVIQVAHPLVQKQLVDYIHNGFLVPVMGPALHKTSVEEMIASTAYLELFLRSISEPALLRTFLRFLLLHRHDTHTILDTLVARIGSNSRLCMVSLSLFRTLLNLSCEDVLLQLVLRYLVPCNHVMLSQKPAVRDVDLYGRAADKFLSLIPRCCRHHAPSPPRPEHASWARGPGSPSVDSSSVTTVPRPSTPSRLALFLRQQSLGGSESPGPAPCSPGLSASPASSPGRRPTPAEEPGELEDNYLEYLREARRGVDRCVRACRTWSAPYDGERPSPEPSPFGSRTKKRSLLPEEDRNNVGEGEEEELGRRGRAGGAGEGPGHLPPPQLNGVPGSWPEGAKKVRLVPKEGAGELLEGISEGMAGLEGFGQELRELEVALSNGGTGSESPLEPPLPLEEEEAYESFTCPPEPPGPFLSSPLRTLNQLPSQPFTGKLLSLGLPFCVLFACSRHVCAGFLDLLAMSFLCTCLAPHPSCLHHFQIRVMSYLCPCVCLYVFHACAGLSIDLHLSLVCMSYVHVPPLSLVWPFPAICN

SEQ ID NO: 7573 - protein, 361 aa, Homo sapiens
MSEREVSTAPAGTDMPAAKKQKLSSDENSNPDLSGDENDDAVSIESGTNTERPDTPTNTPNAPGRKSWGKGKWKSKKCKYSFKCVNSLKEDHNQPLFGVQFNWHSKEGDPLVFATVGSNRVTLYECHSQGEIRLLQSYVDADADENFYTCAWTYDSNTSHPLLAVAGSRGIIRIINPITMQCIKHYVGHGNAINELKFHPRDPNLLLSVSKDHALRLWNIQTDTLVAIFGGVEGHRDEVLSASCENAIVCWKPGKMEDDIDKIKPSESNVTILGRFDYSQCDIWYMRFSMDFWQKMLALGNQVGKLYVWDLEVEDPHKAKCTTLTHHKCGAAIRQTSFSRDSSILIAVCDDASIWRWDRLR

SEQ ID NO: 7574 - protein, 170 aa, Homo sapiens
MAVPFVEDWDLVQTLGEGAYGEVQLAVNRVTEEAVAVKIVDMKRAVDCPENIKKEICINKMLNHENVVKFYGHRREGNIQYLFLEYCSGGELFDRIEPDIGMPEPDAQRFFHQLMAGVVYLHGIGITHRDIKPENLLLDERDNLKISDFGLATVFRYNNRERLLNKMCGT

SEQ ID NO: 7575 - protein, 133 aa, Homo sapiens
MQLFVRAQELHTFEVTGQETVAQIKAHVASLEGIAPEDQVVLLAGAPLEDEATLGQCGVEALTTLEVAGRMLGGKVHGSLARAGKVRGQTPKVAKQEKKKKKTGRAKRRMQYNRRFVNVVPTFGKKKGPNANS

SEQ ID NO: 7576 - protein, 209 aa, Homo sapiens
RAGLRRADGEAPSALPYCYFLQKDAEAPWLSKPAYDSAECRHHAAEALRVAWCLEAASLSHRPGPRSGLSVSSLRPNRKMATNFLAHEKIWFDKFKYDDAERRFYEQMNGPVAGASRQENGASVILRDIARARENIQKSLAGSSGPGASSGTSGDHGELVVRIASLEVENQSLRGVVQELQQAISKLEARLNVLEKSSPGHRATAPQTQ

SEQ ID NO: 7577 - protein, 115 aa, Homo sapiens
MAVQISKKRKFVADGIFKAELNEFLTRELAEDGYSGVEVRVTPTRTEIIILATRTQNVLGEKGRRIRELTAVVQKRFGFPEGSVEGLLWCAAVHHGEWGQRLRGCGVWETPRTEG

SEQ ID NO: 7578 - protein, 150 aa, Homo sapiens
MEFVKCLGHPEEFYNLVRFRIGGKRKVMPKMDQDSLSSSLKTCYKYLNQTSRSFAAVIQALDGEMRNAVCIFYLVLRALDTLEDDMTISVEKKVPLLHNFHSFLYQPDWRFMESKEKDRQVLEDFPTISLEFRNLAEKYQTVIADICRRM

SEQ ID NO: 7579 - protein, 151 aa, Homo sapiens
MAMQMQLEANADTSVEEESFGPQPISRLEQCGINANDVKKLEEAGFHTVEAVAYAPKKELINIKGISEAKADKILAEAAKLVPMGFTTATEFHQRRSEIIQITTGSKELDKLLQGGIETGSITEMFGEFRTGKTQICHTLAVTCQVWSLWQ

SEQ ID NO: 7580 - protein, 172 aa, Homo sapiens
MIIYRDLISHDEMFSDIYKIREIADGLCLEVEGKMVSRTEGNIDDSLIGGNASAEGPEGEGTESTVITGVDIVMNHHLQETSFTKEAYKKYIKDYMKSIKGKLEEQRPERVKPFMTGAAEQIKHILANFKNYQFFIGENMNPDGMVALLDYREDGVTPYMIFFKDGLEMEKC

SEQ ID NO: 7581 - protein, 202 aa, Homo sapiens
FHDTLHVSGVYNGAGGDTHRAMLPSPLNVRLEAPAGMGEQLTETFALDTNTGSFLHTLEGPRFRASQCIYAHRTLPHVLAFRVSIARLAPGSGPITLLLRSAFSPESPDLDLHQGPDFQGARYLYGHTLTPEQPGGPQQEVHMLWTPAPPDLTLGEVPCPSPRPQDTSAMASVLGASPMGAVRNATGATSSGTRTSGCSRVS

SEQ ID NO: 7582 - protein, 69 aa, Homo sapiens
RKPIVLKRIVAHAVEVPAVQSPRRSPRAAGPALASRGCWGQKTCPESRQWCAPNSPRSPGFVQSPGPQT

SEQ ID NO: 7583 - protein, 191 aa, Homo sapiens
MQDYNKDDMSYRRISAVEPKTALPFNRFLPNKSRQPSYVPAPLRKKKPDKHEDNRRSWASPVYTEADGTFSRSKSMSDVSAEDVQNLRQLRYEEMQKIKSQLKEQDQKWQDDLAKWKDRRKSYTSDLQKKKEEREEIEKQALEKSKRSSKTFKEMLQDRESQNQKSTVPSRRRMYSFDDVLEEGKRPPTMT

SEQ ID NO: 7584 - protein, 75 aa, Homo sapiens
MAMQMQLEANADTSVEEESFGPQPISRLEQCGINANDVKKLEEAGFHTVEAVAYAPKKELINIKGISEAKADKIL

SEQ ID NO: 7585 - protein, 166 aa, Homo sapiens
NITKSEQKKNPQAVLDVLEFYNSKKTSNSQKYMSFTDKSAEDYNSSNALNVKAVSETPAVPPVSEDEDDDDDDATPPPVIAPRPEHTKSVYTRSVIEPLPVTPTRDVATSPISPTENNTTPPDALTRNTEKQKKKPKMSDEEILEKLLTSWEMSCGLLWNTWLEAP

SEQ ID NO: 7586 - protein, 137 aa, Homo sapiens
METLEELDWCLDQLETIQTYRSVSEMASNKFKRMLNRELTHLSEMSRSGNQVSEYISNTFLDKQNDVEIPSPTQKDREKKKKQQLMTQISGVKKLMHSSSLNNTSISRFGVNTENEDHLAKELEDLNKWGLNIFNVA

SEQ ID NO: 7587 - protein, 161 aa, Homo sapiens
MSAAGAGAGVEAGFSSEELLSLRFPLHRACRDGDLATLCSLLQQTPHAHLASEDSFYGWTPVHWAAHFGKLECLVQLVRAGATLNVSTTRYAQTPAHIAAFGGHPQCLVWLIQAGANINKPDCEGETPIHKAARSGSLECISALVANGAHVDNPRKGEHSI

SEQ ID NO: 7588 - protein, 137 aa, Homo sapiens
MLPACTRSQERPASRKMATNFLAHEKIWFDKFKYDDAERRFYEQMNGPVAGASRQENGASVILRDIARARENIQKSLAGSSGPGASSGTSGDHGELVVRIASLEVENQSLRGVVQELQQAISKLEARLNVLEKSSPG

SEQ ID NO: 7589 - protein, 93 aa, Homo sapiens
MESMFSSPAEAALQRETGVPGLLTPLPDLDGVLPCSSLTSYWEMLWLWLHDWRRRQGQRCSFWVTQPTAAAAWMCWVLSKLELRLSYILALPA

SEQ ID NO: 7590 - protein, 201 aa, Homo sapiens
MGATTMDQKSLWAGVVVLLLLQGGSAYKLVCYFTNWSQDRQEPGKFTPENIDPFLCSHLIYSFASIENNKVIIKDKSEVMLYQTINSLKTKNPKLKILLSIGGYLFGSKGFHPMVDSSTSRLEFINSIILFLRNHNFDGLDVSWIYPDQKENTHFTVLIHELAEAFQKDFTKSTKERLLLTAGVSAGRQMIDNSYQVEKLA

SEQ ID NO: 7591 - protein, 145 aa, Homo sapiens
MLYQTINSLKTKFHPMVDSSTSRLEFINSIILFLRNHNFDGLDVSWIYPDQKENTHFTVLIHELAEAFQKDFTKSTKERLLLTAGVSAGRQMIDNSYQVEKLAKDLDFINLLSFDFHGSWEKPLITGHNSPLSKGWQDRGPSSYY

SEQ ID NO: 7592 - protein, 39 aa, Homo sapiens
MENHKSNNKENITIVDISRKINQLPEAESSFFSPFQEST

SEQ ID NO: 7593 - protein, 86 aa, Homo sapiens
TQNHTCSYPGWHSTTIADHTRPHGDSAPVSCLGEHHSTPSLPADPGSLPEESASPARCMIVHQGTILDNVKNLLEFAETLQFIDSM

SEQ ID NO: 7594 - protein, 149 aa, Homo sapiens
LSQAEVASVWVERIQEHPAIYDSICFIMSSSTNVDLLVKVGEVVDKLFDLDEKLMLEWVRNGAAQPLDQPQEESEEQPVFRLVPCILEAAKQVRSENPEWLDVYMHILQLLTTVDDGIQAIGDGGSGSKGRPVEQTEVFLCISKPSSFL

SEQ ID NO: 7595 - protein, 293 aa, Homo sapiens
MRESALERGPVPEAPAGGPVHAVTVVTLLEKLASMLETLRERQGGLARRQGGLAGSVRRIQSGLGALSRSHDTTSNTLAQLLAKAERVSSHANAAQERAVRRAAQVQRLEANHGLLVARGKLHVLLFKASPTLQRFAVRTQLSLPLPSHACLSPQTLAAEEEGEVPASAFQKAPEPLGPADQSELGPEQLEAEVGESSDEEPVESRAQRLRRTGLQKVQSLRRALSGRKGPAAPPPTPVKPPRLGPGRSAEAQPEAQPALEPTLEPEPPQDTEEDPGRPGAAEEALLQMESVA

SEQ ID NO: 7596 - protein, 311 aa, Homo sapiens
MLYQTINSLKTKNPKLKILLSIGGYLFGSKGFHPMVDSSTSRLEFINSIILFLRNHNFDGLDVSWIYPDQKENTHFTVLIHELAEAFQKDFTKSTKERLLLTAGVSAGRQMIDNSYQVEKLAKDLDFINLLSFDFHGSWEKPLITGHNSPLSKGWQDRGPSSYYNVEYAVGYWIHKGMPSEKVVMGIPTYGHSFTLASAETTVGAPASGPGAAGPITESSGFLAYYEICQFLKGAKITRLQDQQVPYAVKGNQWVGYDDVKSMETKVQFLKNLNLGGAMIWSIDMDDFTGKSCNQGPYPLVQAVKRSLGSL

SEQ ID NO: 7597 - protein, 196 aa, Homo sapiens
MCCKVMLLGDTGVGKTCFLIQFKDGAFLSGTFIATVGIDFRNKVVTVDGVRVKLQIWDTAGQERFRSVTHAYYRDAQALLLLYDITNKSSFDNIRAWLTEIHEYAQRDVVIMLLGNKADMSSERVIRSEDGETLAREYGVPFLETSAKTGMNVELAFLAIAKELKYRAGHQADEPSFQIRDYVESQKKRSSCCSFM

SEQ ID NO: 7598 - protein, 116 aa, Homo sapiens
MGRMHAPGKGLSQSALPYRRSVPTWLKLTSDDVKEQIYKLAKKGLTPSQIVLLLSPSLECSGAISAHCNLHLLDSSDSPASASRIGVILRDSHGVAQVRFVTGNKILRILKSKGLA

SEQ ID NO: 7599 - protein, 155 aa, Homo sapiens
MSKSVPAFLQDESDDRETDTASESSYQLSRHKKSPSSLTNLSSSSGMTSLSSVSGSVMSVYSGDFGNLEVKGNIQFAIEYVESLKELHVFVAQCKDLAAADVKKQRSDPYVKAYLLPDKGKMGKKKTLVVKKTLNPVYNEILRYKIEKQILKTQK

SEQ ID NO: 7600 - protein, 162 aa, Homo sapiens
MKQTHADTPVDHCLSGIRKCSSTFKLKSEVNKHETALEMQNPNLNNKECCFTFTLNGNSRKLDRSVFTAYGKPSESIYSALSANDYFSERIKNQFNKNIIVYEEKTIDGHINLGMPLKCLPSDSHFKITFGQRKSSKEDGHILRQCENPNMECILFHVVAIG

SEQ ID NO: 7601 - protein, 336 aa, Homo sapiens
MSKSVPAFLQDEVSGSVMSVYSGDFGNLEVKGNIQFAIEYVESLKELHVFVAQCKDLAAADVKKQRSDPYVKAYLLPDKGKMGKKKTLVVKKTLNPVYNEILRYKIEKQILKTQKLNLSIWHRDTFKRNSFLGEVELDLETWDWDNKQNKQLRWYPLKRKTAPVALEAENRGEMKLALQYVPEPVPGKKLPTTGEVHIWVKECLDLPLLRGSHLNSFVKCTILPDTSRKSRQKTRAVGKTTNPIFNHTMVYDGFRPEDLMEACVELTVWDHYKLTNQFLGGLRIGFGTGKSYGTEVDWMDSTSEEVALWEKMVNSPNTWIEATLPLRMLLIAKISK

SEQ ID NO: 7602 - protein, 262 aa, Homo sapiens
AFEAQNPDPKAPVVLLSEPACAHALDTGKTQDEGARAGRLRARRRYLVERARDARVVGLLAGTLGVAQHREALAHLRNLTQAAGKRSYVLALGRPTPAKLANFPEVDVFVLLACPLGALAPQLSGSFFQPILAPCELEAACNPAWPPPGLAPHLTHYADLLPGSPFHVALPPPESELWETPDVSLITGDLRPPPAWKSSNDHGSLALTPRPQLELAESSPAASFLSSRSWQGLEPRLGQTPVTEAVSGRRGIAIAYEDEGSG

SEQ ID NO: 7603 - protein, 609 aa, Homo sapiens
MPTAESEAKVKTKVRFEELLKTHSDLMREKKKLKKKLVRSEENISPDTIRSNLHYMKETTSDDPDTIRSNLPHIKETTSDDVSAANTNNLKKSTRVTKNKLRNTQLATENPNGDASVEEDKQGKPNKKVIKTVPQLTTQDLKPETPENKVDSTHQKTHTKPQPGVDHQKSEKANEGREETDLEEDEELMQAYQCHVTEEMAKEIKRKIRKKLKEQLTYFPSDTLFHDDKLSSEKRKKKKEVPVFSKAETSTLTISGDTVEGEQKKESSVRSVSSDSHQDDEISSMEQSTEDSMQDDTKPKPKKTKKKTKAVADNNEDVDGDGVHEITSRDSPVYPKCLLDDDLVLGVYIHRTDRLKSDFMISHPMVKIHVVDEHTGQYVKKDDSGRPVSSYYEKENVDYILPIMTQPYDFKQLKSRLPEWEEQIVFNENFPYLLRGSDESPKVILFFEILDFLSVDEIKNNSEVQNQECGFRKIAWAFLKLLGANGNANINSKLRLQLYYPPTKPRSPLSVVEAFEWWSKCPRNHYPSTLYVTVRGLKVPDCIKPSYRSMMALQEEKGKPVHCERHHESSSVDTEPGLEESKEVIKWKRLPGQENEDVFVLISPTMEEY

SEQ ID NO: 7604 - protein, 388 aa, Homo sapiens
MARRPRHSIYSSDEDDEDFEMCDHDYDGLLPKSGKRHLGKTRWTREEDEKLKKLVEQNGTDDWKVIANYLPNRTDVQCQHRWQKVLNPELIKGPWTKEEDQRVIELVQKYGPKRWSVIAKHLKGRIGKQCRERWHNHLNPEVKKTSWTEEEDRIIYQAHKRLGNRWAEIAKLLPGRTDNAIKNHWNSTMRRKVEQEGYLQESSKASQPAVATSFQKNSHLMGFAQAPPTAQLPATGQPTVNNDYSYYHISEAQNVSSHVPYPVALHVNIVNVPQPAAAAIQRHYNDEDPEKEKRIKELELLLMSTENELKGQQVLPTQNHTCSYPGWHSTTIADHTRPHGDSAPVSCLGEHHSTPSLPADPGSLPEESASPARCRVSGGPCSTSEGQP

SEQ ID NO: 7605 - protein, 161 aa, Homo sapiens
GRENRMPILISKIFPGLAADQSRALRLGDAILSVNGTDLRQATHDQAVQALKRAGKEVLLEVKFIREVTPYIKKPSLVSDLPWEGAAPQSPSFSGSEDSGSPKHQNSTKDRKIIPLKMCFAARNLSMPDLENRLIELHSPDSRNTLILRCKDTATAHSWQN

SEQ ID NO: 7606 - protein, 144 aa, Homo sapiens
MVAMAEAEAGVAVEVRGLPPAVPDELLTLYFENRRRSGGGPVLSWQRLGCGGVLTFREPADAERVLAQADHELHGAQLSLRPAPPRAPARLLLQGLPPGTTPQRLEQHVQALLRASGLPVQPCCALASPRPDRALVQLPKPLSE

SEQ ID NO: 7607 - protein, 115 aa, Homo sapiens
FYNYMMGIEFNPRIGKWFDFKLFFNGRPGIVAWTLINLSFAAKQRELHSHVTNAMVLVNVLQAIYVIDFFWNETWYLKTIDICHDHFGWYLGWGDCVWLPYLYTLQMRNAAVEAE

SEQ ID NO: 7608 - protein, 165 aa, Homo sapiens
MQDYNKDDMSYRRISAVEPKTALPFNRFLPNKSRQPSYVPAPLRKKKPDKHEDNRRSWASPVYTEADGTFSSNQRRIWGTNVENWPTVQGTSKSSCYLEEEKAKTRSIPNIVKDDLYVRKLSPVMPNPGNAFDQFLPKCWTPEDVNWKRIKRETYKPWYKEFQGF

SEQ ID NO: 7609 - protein, 169 aa, Homo sapiens
MAYNDTDRNQTEKLLKRVRELEQEVQRLKKEQAKNKEDSNIRENSAGAGKTKRAFDFSAHGRRHVALRIAYMGWGYQGFASQENTNNTIEEKLFEALTKTRLVESRQTSNYHRCGRTDKGVSAFGQVISLDLRSQFPRGRDSEDFNVKEEANAAAEEIRYTHILNRVLP

SEQ ID NO: 7610 - protein, 99 aa, Homo sapiens
MIHPDPERRPSAMALVKHSVLLSASRKSAEQLRIELNAEKFKNSLLQKELKKAQMAKAAAEERALFTDRMATRSTTQNDPNFQCKFKGLWSKEKYLCMP

SEQ ID NO: 7611 - protein, 122 aa, Homo sapiens
MGAPGGKINRPRTELKKKLFKRRRVLNRERRLRHRVVGAVIDQGLITRHHLKKRASSARANITLSGKKRRKLLQQIRLAQKEKTAMEGEAGTEVGEGNPGFIWDNTSFFPLLSGSPFKASQD

SEQ ID NO: 7612 - protein, 224 aa, Homo sapiens
PGISPPPEKQKRKKKKMPEILSLRGRQRAHSKLANKPVVQPVEEQEPKGPQASEERNLEPPSSEQLEPTVTFLFTLLNTSEPTEPKDPESDSEIQEYQFLDQEDWGPQRTSKEIRQLQNDCMRLRESLNTTQVHNLALGEKLQNLPTLLYKSLKEGAQAIQEEAQAIQDEVKALQEESQALPEVALLSDPNPRKAGLLFKLPDLPHDHRDQGQAWPGPRPEVGH

SEQ ID NO: 7613 - protein, 160 aa, Homo sapiens
MTSKDYYFDSYAHFGIHEEMLKDEVRTLTYRNSMFHNRHLFKDKVVLDVGSGTGILCMFAAKAGARKVIGIECSSISDYAVKIVKANKLDHVVTIIKGKVEEVELPVEKVDIIISEWMGYCLFYESMLNTVLYARDKWLAPDGLIFPDRATLYVTAIEDR

SEQ ID NO: 7614 - protein, 116 aa, Homo sapiens
MPGPRGAAGGLAPEMRGAGAAGLLALLLLLLLLLLGLGGRVEGGPAGERGAGGGGALARERFKVVFAPVICKRTCLKGQCRDSCQQGSNMTLIGENGHSTDTLTGSGFRWCALSPA

SEQ ID NO: 7615 - protein, 202 aa, Homo sapiens
MATRRLTDAFLLLRNNSIQNRQLLAEQELDELADDRMALVSGISLDPEAAIGVTKRPPPKWVDGVDEIQYDVGRIKQKMKELASLHDKHLNRPTLDDSSEEEHAIEITTQEITQLFHRCQRAVQALPSRARACSEQEGRLLGNVVASLAQALQELSTSFRHAQSGYLKRMKNREERSQHFFDTSVPLMDDGDDNTLYHRRTS

SEQ ID NO: 7616 - protein, 52 aa, Homo sapiens
MRGKTFRFEMQRDLVSFPLSPAVRVKLVSAGFQTAEELLEVKPSELSKGNDS

SEQ ID NO: 7617 - protein, 238 aa, Homo sapiens
MATNFLAHEKIWFDKFKYDDAERRFYEQMNGPVAGASRQSSGPGASSGTSGDHVVQELQQAISKLEARLNVLEKSSPGHRATAPQTQHVSPMRQVEPPAKKPATPAEDDEDDDIDLFGSDNEEEDKEAAQLREERLRQYAEKKAKKPALVAKSSILLDVKPWDDETDMAQLEACVRSIQLDGLVWGASKLVPVGYGIRKLQIQCVVEDDKVGTDLLEEEITKFEEHVQSVDIAAFNKI

SEQ ID NO: 7618 - protein, 76 aa, Homo sapiens
IKHILANFKNYQFFIGENMNPDGMVALLDYREDGVTPYMIFFKDGLEMEKCDAKERNPCAFCLSLWRPRLNWGIHL

SEQ ID NO: 7619 - protein, 44 aa, Homo sapiens
MAVQISKKRKFVADGIFKAELNEFLTRELAEDGYSGVENTECSW

SEQ ID NO: 7620 - protein, 127 aa, Homo sapiens
MAVPFVEDWDLVQTLGEGAYGEVQLAVNRVTEEAVAVKIVDMKRAVDCPENIKKEICINKMLNHENVVKFYGHRREGNIQYLFLEYCSGGELFDRIEPDIGMPEPDAQRFFHQLMAGVVYLHGIGIT

SEQ ID NO: 7621 - protein, 84 aa, Homo sapiens
MPVKKKRKSPGVAAAVAEDGGLKKCKISSYCRSQPPARLISGEEHFSSKKCLAWFYEYAGPDEVVGPEGMEKFCEDIGVEPENV

SEQ ID NO: 7622 - protein, 124 aa, Homo sapiens
MATPAVPVSAPPATPTPVPAAAPASVPAPTPAPAAAPVPAAAPASSSDPAAAAAATAAPGQTPASAQAPAQTPAPALPGPALPGPFPGGRVVRLHPVILASIVDSYERRNEGAARVIGTLLGGC

SEQ ID NO: 7623 - protein, 264 aa, Homo sapiens
MNPLFGPNLFLLQQEQQGLAGPLGDSLGGDHFAGGGDLPPAPLSPAGPAAYSPPGPGPAPPAAMALRNDLGSNINVLKTLNLRFRCFLAKVHELERRNRLLEKQLQQALEEGKQGRRGLGRRDQAVQTGFVSPIRPLGLQLGARPAAVCSPSARVLGSPARSPAGPLAPSAASLSSSSTSTSTTYSSSARFMPGTIWSFSHARRLGPGLEPTLVQGPGLSWVHPDGVGVQIDTITPEIRALYNVLAKVKRERDEYKRRCFYRVK

SEQ ID NO: 7624 - protein, 91 aa, Homo sapiens
MAVQISKKRKFVADGIFKAELNEFLTRELAEDGYSGVEVRVTPTRTEIIILATRTQNVLGEKGRRIRELTAVVQKRFGFPEGSVEHCGTQR

SEQ ID NO: 7625 - protein, 147 aa, Homo sapiens
MASCPDSDNSWVLAGSESLPVETLGPASRMDPESERALQAPHSPSKTDGKELAGTMDGEGTLFQTESPQSGSILTEETEVKGTLEGDVCGVEPPGPGDTVVQGDLQETTVVTGLGPDTQDLEGQSPPQSLPSTPKAVTSLPCPCPFP

SEQ ID NO: 7626 - protein, 45 aa, Homo sapiens
MEFVKCLGHPEEFYNLVRFRIGGKRKVMPKMDQITSHEGRFWNEV

SEQ ID NO: 7627 - protein, 1360 aa, Homo sapiens
SHTVFIDYQEKERTDRPNFELSQRKSLGTPTVICTPTEESVFFPGNGESDRLVANDSQLTPLEEWSNNRGPVEVADNMELSKSATCKNIKDVQSPGFLNEPLSSKSQRRKSLKLKNDKTIVFSENHKNDMDITQSCMVEIDNESALEDKEDFHLAGASKTILYSCGQDDMEITRSHTTALECKTLLPNEIAIRPMDKTVLFTDNYSDLEVTDSHTVFIDCQATEKILEENPKFGIGKGKNLGVSFPKDNSCVQEIAEKQALAVGNKIVLHTEQKQQLFAATNRTTNEIIKFHSAAMDEKVIGKVVDQACTLEKAQVESCQLNNRDRRNVDFTSSHATAVCGSSDNYSCLPNVISCTDNLEGSAMLLCDKDEEKANYCPVQNDLAYANDFASEYYLESEGQPLSAPCPLLEKEEVIQTSTKGQLDCVITLHKDQDLIKDPRNLLANQTLVYSQDLGEMTKLNSKRVSFKLPKDQMKVYVDDIYVIPQPHFSTDQPPLPKKGQSSINKEEVILSKAGNKSLNIIENSSAPICENKPKILNSEEWFAAACKKELKENIQTTNYNTALDFHSNSDVTKQVIQTHVNAGEAPDPVITSNVPCFHSIKPNLNNLNGKTGEFLAFQTVHLPPLPEQLLELGNKAHNDMHIVQATEIHNINIISSNAKDSRDEENKKSHNGAETTSLPPKTVFKDKVRRCSLGIFLPRLPNKRNCSVTGIDDLEQIPADTTDINHLETQPVSSKDSGIGSVAGKLNLSPSQYINEENLPVYPDEINSSDSINIETEEKALIETYQKEISPYENKMGKTCNSQKRTWVQEEEDIHKEKKIRKNEIKFSDTTQDREIFDHHTEEDIDKSANSVLIKNLSRTPSSCSSSLDSIKADGTSLDFSTYRSSQMESQFLRDTICEESLREKLQDGRITIREFFILLQVHILIQKPRQSNLPGNFTVNTPPTPEDLMLSQYVYRPKIQIYREDCEARRQKIEELKLSASNQDKLLVDINKNLWEKMRHCSDKELKAFGIYLNKIKSCFTKMTKVFTHQGKVALYGKLVQSAQNEREKLQIKIDEMDKILKKIDNCLTEMETETKNLEDEEKNNPVEEWDSEMRAAEKELEQLKTEEEELQRNLLELEVQKEQTLAQIDFMQKQRNRTEELLDQLSLSEWDVVEWSDDQAVFTFVYDTIQLTITFEESVVGFPFLDKRYRKIVDVNFQSLLDEDQAPPSSLLVHKLIFQYVEEKESWKKTCTTQHQLPKMLEEFSLVVHHCRLLGEEIEYLKRWGPNYNLMNIDINNNELRLLFSSSAAFAKFEITLFLSAYYPSVPLPSTIQNHVGNTSQDDIATILSKVPLENNYLKNVVKQIYQDLFQDCHFYH

SEQ ID NO: 7628 - protein, 131 aa, Homo sapiens
MNENIDILETAIKQAAEQGARIIVTPEDALYGWKFTRETVFPYLEDIPDPQVNWIPCQDPHRFGHTPVQARLSCLAKDNSIYVLANLGDKKPCNSRDSTCPPNGYFQYNTNVVYNTEGKLVARYHKVGKSH

SEQ ID NO: 7629 - protein, 503 aa, Homo sapiens
MPEANYLLSVSWGYIKFKRMLNRELTHLSEMSRSGNQVSEYISNTFLDKQNDVEIPSPTQKDREKKKKQQLMTQISGVKKLMHSSSLNNTSISRFGVNTENEDHLAKELEDLNKWGLNIFNVAGYSHNRPLTCIMYAIFQERDLLKTFRISSDTFITYMMTLEDHYHSDVAYHNSLHAADVAQSTHVLLSTPALDAVFTDLEILAAIFAAAIHDVDHPGVSNQFLINTNSELALMYNDESVLENHHLAVGFKLLQEEHCDIFMNLTKKQRQTLRKMVIDMVLATDMSKHMSLLADLKTMVETKKVTSSGVLLLDNYTDRIQVLRNMVHCADLSNPTKSLELYRQWTDRIMEEFFQQGDKERERGMEISPMCDKHTASVEKSQVGFIDYIVHPLWETWADLVQPDAQDILDTLEDNRNWYQSMIPQSPSPPLDEQNRDCQGLMEKFQFELTLDEEDSEGPEKEGEGHSYFSSTKTLCVIDPENRDSLGETDIDIATEDKSPVDT

SEQ ID NO: 7630 - protein, 135 aa, Homo sapiens
MGAAHSASEEVRELEGKTGFSSDQIEQLHRRFKQLSGDQPTIRKENFNNVPDLELNPIRSKIVRAFFDNRNLRKGPSGLADEINFEDFLTIMSYFRPIDTTMDEEQVELSRKEKLRSCGFLGLEGGCAVDVKQGP

SEQ ID NO: 7631 - protein, 98 aa, Homo sapiens
MHDKGITTAAVCVYPARVCDAVKALKAAGCNIPVASVAAGFPAGQTHLKTRLEEIRLAVEDGATEIDVVINRSLVLTGQWEALYDEIRQFRKACGEAH

SEQ ID NO: 7632 - protein, 1746 aa, Homo sapiens
MDGVSSEANEENDNIERPVRRRHSSILKPPRSPLQDLRGGNERVQESNALRNKKNSRRVSFADTIKVFQTESHMKIVRKSEMEETETGENLLLIQNKKLEDNYCEITGMNTLLSAPIHTQMQQKEFSIIEHTRERKHANDQTVIFSDENQMDLTSSHTVMITKGLLDNPISEKSTKIDTTSFLANLKLHTEDSRMKKEVNFSVDQNTSSENKIDFNDFIKRLKTGKCSAFPDVPDKENFEIPIYSKEPNSASSTHQMHVSLKEDENNSNITRLFREKDDGMNFTQCHTANIQTLIPTSSETNSRESKGNDITIYGNDFMDLTFNHTLQILPATGNFSEIENQTQNAMDVTTGYGTKASGNKTVFKSKQNTAFQDLSINSADKIHITRSHIMGAETHIVSQTCNQDARILAMTPESIYSNPSIQGCKTVFYSSCNDAMEMTKCLSNMREEKNLLKHDSNYAKMYCNPDAMSSLTEKTIYSGEENMDITKSHTVAIDNQIFKQDQSNVQIAAAPTPEKEMMLQNLMTTSEDGKMNVNCNSVPHVSKERIQQSLSNPLSISLTDRKTELLSGENMDLTESHTSNLGSQVPLAAYNLAPESTSESHSQSKSSSDECEEITKSRNEPFQRSDIIAKNSLTDTWNKDKDWVLKILPYLDKDSPQSADCNQEIATSHNIVYCGGVLDKQITNRNTVSWEQSLFSTTKPLFSSGQFSMKNHDTAISSHTVKSVLGQNSKLAEPLRKSLSNPTPDYCHDKMIICSEEEQNMDLTKSHTVVIGFGPSELQELGKTNLEHTTGQLTTMNRQIAVKVEKCGKSPIEKSGVLKSNCIMDVLEDESVQKPKFPKEKQNVKIWGRKSVGGPKIDKTIVFSEDDKNDMDITKSYTIEINHRPLLEKRDCHLVPLAGTSETILYTCRQDDMEITRSHTTALECKTVSPDEITTRPMDKTVVFVDNHVELEMTESHTVFIDYQEKERTDRPNFELSQRKSLGTPTVICTPTEESVFFPGNGESDRLVANDSQLTPLEEWSNNRGPVEVADNMELSKSATCKNIKDVQSPGFLNEPLSSKSQRRKSLKLKNDKTIVFSENHKNDMDITQSCMVEIDNESALEDKEDFHLAGASKTILYSCGQDDMEITRSHTTALECKTLLPNEIAIRPMDKTVLFTDNYSDLEVTDSHTVFIDCQATEKILEENPKFGIGKGKNLGVSFPKDNSCVQEIAEKQALAVGNKIVLHTEQKQQLFAATNRTTNEIIKFHSAAMDEKVIGKVVDQACTLEKAQVESCQLNNRDRRNVDFTSSHATAVCGSSDNYSCLPNVISCTDNLEGSAMLLCDKDEEKANYCPVQNDLAYANDFASEYYLESEGQPLSAPCPLLEKEEVIQTSTKGQLDCVITLHKDQDLIKDPRNLLANQTLVYSQDLGEMTKLNSKRVSFKLPKDQMKVYVDDIYVIPQPHFSTDQPPLPKKGQSSINKEEVILSKAGNKSLNIIENSSAPICENKPKILNSEEWFAAACKKELKENIQTTNYNTALDFHSNSDVTKQVIQTHVNAGEAPDPVITSNVPCFHSIKPNLNNLNGKTGEFLAFQTVHLPPLPEQLLELGNKAHNDMHIVQATEIHNINIISSNAKDSRDEENKKSHNGAETTSLPPKTVFKDKVRRCSLGIFLPRLPNKRNCSVTGIDDLEQIPADTTDINHLETQPVSSKDSGIGSVAGKLNLSPSQYINEENLPVYPDEINSSDSINIETEEKNVGTRRRRYS

SEQ ID NO: 7633 - protein, 1176 aa, Homo sapiens
NYYYYLPWAHTKPVVTLTSYWEDISHRLDAVNTLLAMAERLQTNIEALKSGIQGKIPANQLAELWLKLIDEVIEDTRYTLPLTEGKANVTVLDTQIRKLRSRSLSQIHEAAVRMRSEATDVKSTLAEIEDWLDKLMQLTEEPQNSMPDIIIWMIRGEKRLAYARIPAHQVLYSTSGENASGKYCGKTQTIFLKYPQEKNNGPKVPVELRVNIWLGLSAVEKKFNSFAEGTFTVFAEMYENQALMFGKWGTSGLVGRHKFSDVTGKIKLKREFFLPPKGWEWEGEWIVDPERSLLTEADAGHTEFTDEVYQNESRYPGGDWKPAEDTYTDANGDKAASPSELTCPPGWEWEDDAWSYDINRAVDEKGWEYGITIPPDHKPKSWVAAEKMYHTHRRRRLVRKRKKDLTQTASSTARAMEELQDQEGWEYASLIGWKFHWKQRSSDTFRRRRWRRKMAPSETHGAAAIFKLEGALGADTTEDGDEKSLEKQKHSATTVFGANTPIVSCNFDRVYIYHLRCYVYQARNLLALDKDSFSDPYAHICFLHRSKTTEIIHSTLNPTWDQTIIFDEVEIYGEPQTVLQNPPKVIMELFDNDQVGKDEFLGRSIFSPVVKLNSEMDITPKLLWHPVMNGDKACGDVLVTAELILRGKDGSNLPILPPQRAPNLYMVPQGIRPVVQLTAIEILAWGLRNMKNFQMASITSPSLVVECGGERVESVVIKNLKKTPNFPSSVLFMKVFLPKEELYMPPLVIKVIDHRQFGRKPVVGQCTIERLDRFRCDPYAGKEDIVPQLKASLLSAPPCRDIVIEMEDTKPLLASKCLSSMSTALSKMASPATVHLTEKEEEIVDWWSKFYASSGEHEKCGQYIQKGYSKLKIYNCELENVAEFEGLTDFSDTFKLYRGKSDENEDPSVVGEFKGSFRIYPLPDDPSVPAPPRQFRELPDSVPQECTVRIYIVRGLELQPQDNNGLCDPYIKITLGKKVIEDRDHYIPNTLNPVFGRMYELSCYLPQEKDLKISVYDYDTFTRDEKVGETIIDLENRFLSRFGSHCGIPEEYCVSGVNTWRDQLRPTQLLQNVARFKGFPQPILSEDGSRIRYGGRDYSLDEFEANKILHQHLGAPEERLALHILRTQGLVPEHVETRTLHSTFQPNISQILPACDHLEHQGRYLGREKHHRRGNE

SEQ ID NO: 7634 - protein, 163 aa, Homo sapiens
MGAAHSASEEVRELEGKTGFSSDQIEQLHRRFKQLSGDQPTIRKENFNNVPDLELNPIRSKIVRAFFDNRNLRKGPSGLADEINFEDFLTIMSYFRPIDTTMDEEQVELSRKEKLRFLFHMYDSDSDGRITLEEYRNVKWSRSCCRETLTSRRSPLAPSPTGP

SEQ ID NO: 7635 - protein, 764 aa, Homo sapiens
MVAMAEAEAGVAVEVRGLPPAVPDELLTLYFENRRRSGGGPVLSWQRLGCGGVLTFREPADAERVLAQADHELHGAQLSLRPAPPRAPARLLLQGLPPGTTPQRLEQHVQALLRASGLPVQPCCALASPRPDRALVQLPKPLSEADVRVLEEQAQNLGLEGTLVSLARVPQARAVRVVGDGASVDLLLLELYLENERRSGGGPLEDLQRLPGPLGTVASFQQWQVAERVLQQEHRLQGSELSLVPHYDILEPEELAENTSGGDHPSTQGPRATKHALLRTGGLVTALQGAGTVTMGSGEEPGQSGASLRTGPMVQGRGIMTTGSGQEPGQSGTSLRTGPMGSLGQAEQVSSMPMGSLEHEGLVSLRPVGLQEQEGPMSLGPVGSAGPVETSKGLLGQEGLVEIAMDSPEQEGLVGPMEITMGSLEKAGPVSPGCVKLAGQEGLVEMVLLMEPGAMRFLQLYHEDLLAGLGDVALLPLEGPDMTGFRLCGAQASCQAAEEFLRSLLGSISCHVLCLEHPGSARFLLGPEGQHLLQGLEAQFQCVFGTERLATATLDTGLEEVDPTEALPVLPGNAHTLWTPDSTGGDQEDVSLEEVRELLATLEGLDLDGEDWLPRELEEEGPQEQPEEEVTPGHEEEEPVAPSTVAPRWLEEEAALQLALHRSLEPQGQVAEQEEAAALRQALTLSLLEQPPLEAEEPPDGGTDGKAQLVVHSAFEQDVEELDRALRAALEVHVQEETVGPWRRTLPAELRARLERCHGWRGRR

SEQ ID NO: 7636 - protein, 172 aa, Homo sapiens
MAMQMQLEANADTSVEEESFGPQPISRLEQCGINANDVKKLEEAGFHTVEAVAYAPKKELINIKGISEAKADKILAEAAKLVPMGFTTATEFHQRRSEIIQITTGSKELDKLLQGGIETGSITEMFGEFRTGKTQICHTLAVTCQLPIDRGGGEGKAMYIDTEGTFRPERLL

SEQ ID NO: 7637 - protein, 402 aa, Homo sapiens
MARRPRHSIYSSDEDDEDFEMCDHDYDGLLPKSGKRHLGKTRWTREEDEKLKKLVEQNGTDDWKVIANYLPNRTDVQCQHRWQKVLNPELIKGPWTKEEDQRVIELVQKYGPKRWSVIAKHLKGRIGKQCRERWHNHLNPEVKKTSWTEEEDRIIYQAHKRLGNRWAEIAKLLPGRTDNAIKNHWNSTMRRKVEQEGYLQESSKASQPAVATSFQKNSHLMGFAQAPPTAQLPATGQPTVNNDYSYYHISEAQNVSSHVPYPVALHVNIVNVPQPAAAAIQRHYNDEDPEKEKRIKELELLLMSTENELKGQQVLPTQNHTCSYPGWHSTTIADHTRPHGDSAPVSCLGEHHSTPSLPADPGSLPEESASPARCMIVHQGTILDNVKNLLEFAETLQFIDSM

SEQ ID NO: 7638 - protein, 96 aa, Homo sapiens
MSCKKQRSRKHSVNEKCNMKIEHYFSPVSKEQQNNCSTSLMRMESRGDPRATTNTQAQRFHSPKKNPEDQTMPQNRTIYVTLKVNHRRNQDMKLKL

SEQ ID NO: 7639 - protein, 141 aa, Homo sapiens
MRVEPSWPNQLLKTSVKFLMTSPEIASLSWGQMKVKGSNTTYKDCKVWPGGSRTWDWRETGTEHSPGVQPADVKEVVEKGVQTLVIGRGMSEALKVPSSTVEYLKKHGIDVRVLQTEQAVKEYNALVAQGVRVGGVFHSTC

SEQ ID NO: 7640 - protein, 745 aa, Homo sapiens
MARRPRHSIYSSDEDDEDFEMCDHDYDGLLPKSGKRHLGKTRWTREEDEKLKKLVEQNGTDDWKVIANYLPNRTDVQCQHRWQKVLNPELIKGPWTKEEDQRVIELVQKYGPKRWSVIAKHLKGRIGKQCRERWHNHLNPEVKKTSWTEEEDRIIYQAHKRLGNRWAEIAKLLPGRTDNAIKNHWNSTMRRKVEQEGYLQESSKASQPAVATSFQKNSHLMGFAQAPPTAQLPATGQPTVNNDYSYYHISEAQNVSSHVPYPVALHVNIVNVPQPAAAAIQRHYNDEDPEKEKRIKELELLLMSTENELKGQQVLPTQNHTCSYPGWHSTTIADHTRPHGDSAPVSCLGEHHSTPSLPADPGSLPEESASPARCMIVHQGTILDNDSSSWCDLSSFEFFEEADFSPSQHHTGKALQLQQREGNGTKPAGEPSPRVNKRMLSESSLDPPKVLPPARHSTIPLVILRKKRGQASPLATGDCSSFIFADVSSSTPKRSPVKSLPFSPSQFLNTSSNHENSDLEMPSLTSTPLIGHKLTVTTPFHRDQTVKTQKENTVFRTPAIKRSILESSPRTPTPFKHALAAQEIKYGPLKMLPQTPSHLVEDLQDVIKQESDESGIVAEFQENGPPLLKKIKQEVESPTDKSGNFFCSHHWEGDSLNTQLFTQTSPVADAPNILTSSVLMAPASEDEDNVLKAFTVPKNRSLASPLQPCSSTWEPASCGKMEEQMTSSSQARKYVNAFSARTLVM

SEQ ID NO: 7641 - protein, 106 aa, Homo sapiens
MATNFLAHEKIWFDKFKYDDAERRFYEQMNGPVAGASRQSSGPGASSGTSGDHGELVVRIASLEVENQSLRGVVQELQQAISKLEARLNVLEKSSPGHRATAPQTQ

SEQ ID NO: 7642 - protein, 206 aa, Homo sapiens
IFEAVGAQGTVVLDEESLHVDDLDLFDGDSGLRFAEDLEVSELKVGADLEREGDLGEVPPHAVHESNHLTDLYRRDETIQVKGNGYVQSPRFPNSYPRNLLLTWRLHSQENTRIQLVFDNQFGLEEAENDICRYDFVEVEDISETSTIIRGRWCGHKEVPPRIKSRTNQIKITFKSDDYFVAKPGFKIYYSLLEDFQPAAASETNW

SEQ ID NO: 7643 - protein, 374 aa, Homo sapiens
MARRPRHSIYSSDEDDEDFEMCDHDYDGLLPKSGKRHLGKTRWTREEDEKLKKLVEQNGTDDWKVIANYLPNRTDVQCQHRWQKVLNPELIKGPWTKEEDQRVIELVQKYGPKRWSVIAKHLKGRIGKQCRERWHNHLNPEVKKTSWTEEEDRIIYQAHKRLGNRWAEIAKLLPGRTDNAIKNHWNSTMRRKVEQEGYLQESSKASQPAVATSFQKNSHLMGFAQAPPTAQLPATGQPTVNNDYSYYHISEAQNVSSHVPYPVALHVNIVNVPQPAAAAIQRHYNDEDPEKEKRIKELELLLMSTENELKGQQVLPTQNHTCSYPGWHSTTIADHTRPHGDSAPVSCLGEHHSTPSLPADPGSLPEESASPASS

SEQ ID NO: 7644 - protein, 257 aa, Homo sapiens
MATVWDEAEQDGIGEEVLKMSTEEIIQRTRLLDSEIKIMKSEVLRVTHELQAMKDKIKENSEKIKVNKTLPYLVSNVIELLDVDPNDQEEDGANIDLDSQRKGKCAVIKTSTRQGVNKDSYLILETLPTEYDSRVKAMEVDERPTEQYSDIGGLDKQIQELVEAIVLPMNHKEKFENLGIQPPKGVLMYGPPGTGKTLLARACAAQTKATFLKLAGPQLVQMFIGDGAKLVRDAFALAKEKAPSIIFIDELDAIGTK

SEQ ID NO: 7645 - protein, 157 aa, Homo sapiens
MGLLTILKKMKQKERELRLLMLGLDNAGKTTILKKFNGEDIDTISPTLGFNIKTLEHRGFKLNIWDVGGQKSLRSYWRNYFESTDGLIWVVDSADRQRMQDCQRELQSLLVEEVLELDSIRSHHWCIQGCSAVTGENLLPGIDWLLDDISSRIFTAD

SEQ ID NO: 7646 - protein, 376 aa, Homo sapiens
MSKSVPAFLQDESDDRETDTASESSYQLSRHKKSPSSLTNLSSSSGMTSLSSVSGSVMSVYSGDFGNLEVKGNIQFAIEYVESLKELHVFVAQCKDLAAADVKKQRSDPYVKAYLLPDKGKMGKKKTLVVKKTLNPVYNEILRYKIEKQILKTQKLNLSIWHRDTFKRNSFLGEVELDLETWDWDNKQNKQLRWYPLKRKTAPVALEAENRGEMKLALQYVPEPVPGKKLPTTGEVHIWVKECLDLPLLRGSHLNSFVKCTILPDTSRKSRQKTRAVGKTTNPIFNHTMVYDGFRPEDLMEACVELTVWDHYKLTNQFLGGLRIGFGTGKSYGTEVDWMDSTSEEVALWEKMVNSPNTWIEATLPLRMLLIAKISK

SEQ ID NO: 7647 - protein, 57 aa, Homo sapiens
DNSLSVRKGFCEAPGNRTQSGNHPEDWPVYQELLGMVLSICLCRHVHSEDYSKVPKY

SEQ ID NO: 7648 - protein, 236 aa, Homo sapiens
MSAHNRGTELARWLENPTTQKTKPKTNNPQADLSWISKIQVNHPAVLRRAEQIQARRTVKKEWQAAWLLKAVTFIDLTTLSGDDTSSNIQRLCYKAKYPIREDLLKALNMHDKGITTAAVCVYPARVCDAVKALKAAGCNIPVASVAAGFPAGQTHLKTRLEEIRLAVEDGATEIDVVINRSLVLTGQWEALYDEIRQFRKACGEAHLKTILATGELGTLTNVYKASMIAMMAGSD

SEQ ID NO: 7649 - protein, 64 aa, Homo sapiens
AYAPKKELINIKGISEAKADKILTESRSVARLECNSVILVYCTLRLSGSSDSPASASRVVGTTG

SEQ ID NO: 7650 - protein, 67 aa, Homo sapiens
MPVKKKRKSPGVAAAVAEDGGLKKCKISRYHLPPPFKLPSSLLCWTTGGKGVGPGLPGWGWRQVRPL

SEQ ID NO: 7651 - protein, 281 aa, Homo sapiens
QNHPDNRNETFSSVISLLNEDPLSQDLPVKMASIFKNFVITYNRTYESKEARWRLSVFVNNMVRAQKIQALDRGTAQYGVTKFSDLTEEEFRTIYLNTLLRKEPGNKMKQAKSVGDLAPPEWDWRSKGAVTKVKDQGMCGSCWAFSVTGNVEGQWFLNQGTLLSLSEQELLDCDKMDKACMGGLPSNAYSAIKNLGGLETEDDYSYQGHMQSCNFSAEKAKVYINDSVELSQNEQKLAAWLAKRGPISVAINAFGMQFYRHGISRPLRPLCSPWLIDHAVL

SEQ ID NO: 7652 - protein, 397 aa, Homo sapiens
MNLLPNIESPVTRQEKMATVWDEAEQDGIGEEVLKMSTEEIIQRTRLLDSEIKLLDVDPNDQEEDGANIDLDSQRKGKCAVIKTSTRQTYFLPVIGLVDAEKLKPGDLVGVNKDSYLILETLPTEYDSRVKAMEVDERPTEQYSDIGGLDKQIQELVEAIVLPMNHKEKFENLGIQPPKGVLMYGPPGTGKTLLARACAAQTKATFLKLAGPQLVQMFIGDGAKLVRDAFALAKEKAPSIIFIDELDAIGTKRFDSEKAGDREVQRTMLELLNQLDGFQPNTQVKVIAATNRVDILDPALLRSGRLDRKIEFPMPNEEARARIMQIHSRKMNVSPDVNYEELARCTDDFNGAQCKAVCVEAGMIALRRGATELTHEDYMEGILEVQAKKKANLQYYA

SEQ ID NO: 7653 - protein, 167 aa, Homo sapiens
MGTTAPGPIHLLELCDQKLMEFLCNMDNKDLVWLEEIQEEAERMFTREFSKEPELMPKTPSQKNRRKKRRISYVQDENRDPIRRRLSRRKSRSSQLSSRRLRSKDSVEKLATVVGENGSVLRRVTRAAAAAAAATMALAAPSSPTPESPTMLTKKPEDNHTQCQLVP

SEQ ID NO: 7654 - protein, 67 aa, Homo sapiens
KKRKSPGVAAAVAEDGGLKKCKISRYHLPPPFKLPSSLLCWTTGGKGVGPGLPGWGWRQLLQIPTPC

SEQ ID NO: 7655 - protein, 108 aa, Homo sapiens
MQLFVRAQELHTFEVTGQETVAQIKAHVASLEGIAPEDQVVLLAGAPLEDEATLGQCGVEALTTLEVAGRMLGGKVHGSLARAGKVRGQTPKVAKQEKKKKKTGRAKR

SEQ ID NO: 7656 - protein, 117 aa, Homo sapiens
MAVQISKKRKFVADGIFKAELNEFLTRELAEDGYSGVEVRVTPTRTEIIILATRTQNVLGEKGRRIRELTAVVQKRFGFPEGSVELYAEKVATRGLCAIAQAESLRYKLLGGLAVRR

SEQ ID NO: 7657 - protein, 209 aa, Homo sapiens
MADDAGAAGGPGGPGGPGMGNRGGFRGGFGSGIRGRGRGRGRGRGRGRGARGGKAEDKEESEIIDFFLGASLKDEVLKIMPVQKQTRAGQRTRFKAFVAIGDYNGHVGLGVKCSKEVATAIRGAIILAKLSIVPVRRGYWGNKIGKPHTVPCKVTGRCGSVLVRLIPAPRGTGIVSAPVPKKLLMMAGIDDCYTSARGCTATLGNFGHL

SEQ ID NO: 7658 - protein, 160 aa, Homo sapiens
FTNWSQDRQEPGKFTPENIDPFLCSHLIYSFASIENNKVIIKDKSEVMLYQTINSLKTKNPKLKILLSIGGYLFGSKGDLDFINLLSFDFHGSWEKPLITGHNSPLSKGWQDRGPSSYYNVEYAVGYWIHKGMPSEKVVMGIPTYGHSFTLASAETTVGA

SEQ ID NO: 7659 - protein, 611 aa, Homo sapiens
MARRPRHSIYSSDEDDEDFEMCDHDYDGLLPKSGKRHLGKTRWTREEDEKLKKLVEQNGTDDWKVIANYLPNRTDVQCQHRWQKVLNPELIKGPWTKEEDQRVIELVQKYGPKRWSVIAKHLKGRIGKQCRERWHNHLNPEVKKTSWTEEEDRIIYQAHKRLGNRWAEIAKLLPGRTDNAIKNHWNSTMRRKVEQEGYLQESSKASQPAVATSFQKNSHLMGFAQAPPTAQLPATGQPTVNNDYSYYHISEAQNVSSHVPYPVALHVNIVNVPQPAAAAIQRHYNDEDPEKEKRIKELELLLMSTENELKGQQVLPTQNHTCSYPGWHSTTIADHTRPHGDSAPVSCLGEHHSTPSLPADPGSLPEESASPARCMIVHQGTILDNVKNLLEFAETLQFIDSFLNTSSNHENSDLEMPSLTSTPLIGHKLTVTTPFHRDQTVKTQKENTVFRTPAIKRSILESSPRTPTPFKHALAAQEIKYGPLKMLPQTPSHLVEDLQDVIKQESDESGIVAEFQENGPPLLKKIKQEVESPTDKSGNFFCSHHWEGDSLNTQLFTQTSPVADAPNILTSSVLMAPASEDEDNVLKAFTVPKNRSLASPLQVITIPTLVF

SEQ ID NO: 7660 - protein, 277 aa, Homo sapiens
MKDRLEQLKAKQLTQDDDTDAVEIAIDNTAFMDEFFSEIEETRLNIDKISEHVEEAKKLYSIILSAPIPEPKTKDDLEQLTTEIKKRANNVRNKLKSMEKHIEEDEVRSSADLRIRKSQHSVLSRKFVEVMTKYNEAQVDFRERSKGRIQRQLEITGKKTTDEELEEMLESGNPAIFTSGIIDSQISKQALSEIEGRHKDIVRLESSIKELHDMFMDIAMLVENQGEMLDNIELNVMHTVDHVEKARDETKKAVKYQSQARKKLISLQTGVATLVFR

SEQ ID NO: 7661 - protein, 108 aa, Homo sapiens
MPSRLRKTRKLRGHVSHGHGRIGKHRKHPGGRGNAGGLHHHRINFDKYHPGYFGKVGMKHYHLKRNQSFCPTVNLDKLWTLVSEQTRVNAAKNKTGAAPIIDVVRSVS

SEQ ID NO: 7662 - protein, 137 aa, Homo sapiens
MTSPEIASLSWGQMKVKGSNTTYKDCKVWPGGSRTWDWRETGTEHSPGVQPADVKEVVEKGVQTLVIGRGMSEALKAPTQQLPSGVHVRAVVQFHLATASWHILERCKTDQELEQLGVFSTLLWTGEGSWTEHQTCL

SEQ ID NO: 7663 - protein, 144 aa, Homo sapiens
MEKEETTRELLLPNWQGSGSHGLTIAQRDDGVFVQEVTQNSPAARTGVVKEGDQIVGATIYFDNLQSGEVTQLLNTMGHHTVGLKLHRKGDRSPEPGQTWTREVFSSCSSEVVLSGDDEEYQRIYTTKIKPRLKSEDGVEGDLG

SEQ ID NO: 7664 - protein, 88 aa, Homo sapiens
MTSPEIASLSWGQMKVKGSNTTYKDCKVWPGGSRTWDWRETGTEHSPGVQPADVKEVVEKGVQTLVIGRGMSEALKDGIQGAQLDLNC

SEQ ID NO: 7665 - protein, 110 aa, Homo sapiens
MLRSCAARLRTLGALCLPPVGRRLPGSEPRPELRSFSSEEVILKDCSVPNPSWNKDLRLLFDQFMKKCEDGSWKRLPSYKRTPTEWIQDFKTHFLGRNSHFPINISEHQI

SEQ ID NO: 7666 - protein, 410 aa, Homo sapiens
MVNHFIAEFKRKHKKDISENKRAVRRLRTACERAKRTLSSSTQASIEIDSLYEGIDFYTSITRARFEELNADLFRGTLDPVEKALRDAKLDKSQIHDIVLVGGSTRIPKIQKLLQDFFNGKELNKSINPDEAVAYGAAVQAAILSGDKSENVQDLLLLDVTPLSLGIETAGGVMTVLIKRNTTIPTKQTQTFTTYSDNQPGVLIQVYEGERAMTKDNNLLGKFELTGIPPAPRGVPQIEVTFDIDANGILNVSAVDKSTGKENKITITNDKGRLSKEDIERMVQEAEKYKAEDEKQRDKVSSKNSLESYAFNMKATVEDEKLQGKINDEDKQKILDKCNEIINWLDKNQTAEKEEFEHQQKELEKVCNPIITKLYQSAGGMPGGMPGGFPGGGAPPSGGASSGPTIEEVD

SEQ ID NO: 7667 - protein, 153 aa, Homo sapiens
MTTASTSQSYYFDRDDVALKNFAKYFLHQSHEEREHAEKLMKLQNQRGGRIFLQDIKKPDCDDWESGLNAMECALHLEKNVNQSLLELHKLATDKNDPHLCDFIETHYLNEQVKAIKELGDHVTNLRKMGAPESGLAEYLFDKHTLGDSDNES

SEQ ID NO: 7668 - protein, 30 aa, Homo sapiens
MPVKKKRKSPGVAAAVAEDGGLKKCKISRS

SEQ ID NO: 7669 - protein, 1730 aa, Homo sapiens
MGNSDSQYTLQGSKNHSNTITGAKQIPCSLKIRGIHAKEEKSLHGWGHGSNGAGYKSRSLARSCLSHFKSNQPYASRLGGPTCKVSRGVAYSTHRTNAPGKDFQGISAAFSTENGFHSVGHELADNHITSRDCNGHLLNCYGRNESIASTPPGEDRKSPRVLIKTLGKLDGCLRVEFHNGGNPSKVPAEDCSEPVQLLRYSPTLASETSPVPEARRGSSADSLPSHRPSPTDSRLRSSKGSSLSSESSWYDSPWGNAGELSEAEGSFLAPGMPDPSLHASFPPGDAKKPFNQSSSLSSLRELYKDANLGSLSPSGIRLSDEYMGTHASLSNRVSFASDIDVPSRVAHGDPIQYSSFTLPCRKPKAFVEDTAKKDSLKARMRRISDWTGSLSRKKRKLQEPRSKEGSDYFDSRSDGLNTDVQGSSQASAFLWSGGSTQILSQRSESTHAIGSDPLRQNIYENFMRELEMSRTNTENIETSTETAESSSESLSSLEQLDLLFEKEQGVVRKAGWLFFKPLVTVQKERKLELVARRKWKQYWVTLKGCTLLFYETYGKNSMDQSSAPRCALFAEDSIVQSVPEHPKKENVFCLSNSFGDVYLFQATSQTDLENWVTAVHSACASLFAKKHGKEDTLRLLKNQTKNLLQKIDMDSKMKKMAELQLSVVSDPKNRKAIENQIQQWEQNLEKFHMDLFRMRCYLASLQGGELPNPKSLLAAASRPSKLALGRLGILSVSSFHALVCSRDDSALRKRTLSLTQRGRNKKGIFSSLKGLDTLARKGKEKRPSITQVDELLHIYGSTVDGVPRDNAWEIQTYVHFQDNHGVTVGIKPEHRVEDILTLACKMRQLEPSHYGLQLRKLVDDNVEYCIPAPYEYMQQQVYDEIEVFPLNVYDVQLTKTGSVCDFGFAVTAQVDERQHLSRIFISDVLPDGLAYGEGLRKGNEIMTLNGEAVSDLDLKQMEALFSEKSVGLTLIARPPDTKATLCTSWSDSDLFSRDQKSLLPPPNQSQLLEEFLDNFKKNTANDFSNVPDITTGLKRSQTDGTLDQVSHREKMEQTFRSAEQITALCRSFNDSQANGMEGPRENQDPPPRSLARHLSDADRLRKVIQELVDTEKSYVKDLSCLFELYLEPLQNETFLTQDEMESLFGSLPEMLEFQKVFLETLEDGISASSDFNTLETPSQFRKLLFSLGGSFLYYADHFKLYSGFCANHIKVQKVLERAKTDKAFKAFLDARNPTKQHSSTLESYLIKPVQRVLKYPLLLKELVSLTDQESEEHYHLTEALKAMEKVASHINEMQKIYEDYGTVFDQLVAEQSGTEKEQPEWSSEVMDVLDPRGKLTKGTLEEPRTLVTELSMGELLMHSTVSWLNPFLSLGKARKDLELTVFVFKRAVILVYKENCKLKKKLPSNSRPAHNSTDLDPFKFRWLIPISALQVRLGNPAGTENNSIWELIHTKSEIEGRPETIFQLCCSDSESKTNIVKVIRSILRENFRRHIKCELPLEKTCKDRLVPLKNRVPVSAKLASSRSLKVLKNSSSNEWTGETGKGTLLDSDEGSLSSGTQSSGCPTAEGRQDSKSTSPGKYPHPGLADFADNLIKESDILSDEDDDHRQTVKQGSPTKDIEIQFQRLRISEDPDVHPEAEQQPGPESGEGQKGGEQPKLVRGHFCPIKRKANSTKRDRGTLLKAQIRHQSLDSQSENATIDLNSVLEREFSVQSLTSVVSEECFYETESHGKS

SEQ ID NO: 7670 - protein, 168 aa, Homo sapiens
MATNFLAHEKIWFDKFKYDDAERRFYEQMNGPVAGASRQENGASVILRDIARARENIQKSLAGSSGPGASSGTSGDHGELVVRIASLEVENQSLRGVVQELQQAISKLEARLNVLEKSSPGHRATAPQTQHVSPMRQVEPPAKKPATPAEDDEDDDIDLFGSDNEEED

SEQ ID NO: 7671 - protein, 231 aa, Homo sapiens
MAVQISKKRKFVADGIFKAELNEFLTRELAEDGYSGVEVRVTPTRTEIIILATRTQNVLGEKGRRIRELTAVVQKRFGFPEGSLCAIAQAESLRYKLLGGLAVRRACYGVLRFIMESGAKGCEVVVSGKLRGQRAKSMKFVDGLMIHSGDPVNYYVDTAVRHVLLRQGVLGIKVKIMLPWDPTGKIGPKKPLPDHVSIVEPKDEILPTTPISEQKGGKPEPPAMPQPVPTA

SEQ ID NO: 7672 - protein, 39 aa, Homo sapiens
MALLCYNRGCGQRFDPETNSDDACTYHPGVPVFHDALKS

SEQ ID NO: 7673 - protein, 91 aa, Homo sapiens
GGNSSPSAKDIKKILDSVISELNGKNIEDVIAQGIGKLASVPAGGAVAVSAAPGSAAPAAGSAPAAAEEKKDEKKEESEESDDDMGFGLFD

SEQ ID NO: 7674 - protein, 58 aa, Homo sapiens
MVVFGYEAGTKPRDSGVVPVGTEEAPKDTKYISNGDIWNNSWFLWNILKLPVQTLLQG

SEQ ID NO: 7675 - protein, 446 aa, Homo sapiens
MARRPRHSIYSSDEDDEDFEMCDHDYDGLLPKSGKRHLGKTRWTREEDEKLKKLVEQNGTDDWKVIANYLPNRTDVQCQHRWQKVLNPELIKGPWTKEEDQRVIELVQKYGPKRWSVIAKHLKGRIGKQCRERWHNHLNPEVKKTSWTEEEDRIIYQAHKRLGNRWAEIAKLLPGRTDNAIKNHWNSTMRRKVEQEGYLQESSKASQPAVATSFQKNSHLMGFAQAPPTAQLPATGQPTVNNDYSYYHISEAQNVSSHVPYPVALHVNIVNVPQPAAAAIQRHYNDEDPEKEKRIKELELLLMSTENELKGQQTQNHTCSYPGWHSTTIADHTRPHGDSAPVSCLGEHHSTPSLPADPGSLPEESASPARCMIVHQGTILDNVKNLLEFAETLQFIDSFLNTSSNHENSDLEMPSLTSTPLIGHKLTVTTPFHRDQTVKTQKENTV

SEQ ID NO: 7676 - protein, 72 aa, Homo sapiens
MNGPEDLPKSYDYDLIIIGGGSGGLAAAKEAAQYGKKVMVLDFVTPTPLGTRWGLGGTCVNVGCIPKKLMHQ

SEQ ID NO: 7677 - protein, 141 aa, Homo sapiens
PLPTPHRGAFGRLPEPGLVQPQLPTPSSDFWKEVQLALPRKVQYRPVEGDPQTQLQDDKDPMLILRGRVPEGRALDSEVDPDPEGDLGVRGPVFGEPSAPPHTSGVSLGESRSSEVDVSDLGSRNYSARTDFYCLVSKDDM

SEQ ID NO: 7678 - protein, 201 aa, Homo sapiens
MVDNRGFMVTRSYTVGVMMMHRTGLYNYYDDEKEKLQIVEMPLAHKLSSLIILMPHHVEPLERLEKLLTKEQLKIWMGKMQKKAVAISLPKGVVEVTHDLQKHLAGLGLTEAIDKNKADLSRMSGKKDLYLASVFHATAFELDTDGNPFDQDIYGREELRSPKLFYADHPFIFLVRDTQSGSLLFIGRLVRPKGDKMRDEL

SEQ ID NO: 7679 - protein, 124 aa, Homo sapiens
METLSFPRYNVAEIVIHIRNKILTGADGKNLTKNDLYPNPKPEVLHMIYMRALQIVYGIRLEHFYMMPVNSEVMYPHLMEGFLPFSNLVTHLDSFLPICRVNDFETADILCPKAKRTSRFLSGI

SEQ ID NO: 7680 - protein, 325 aa, Homo sapiens
MTSKDYYFDSYAHFGIHEEMLKDEVRTLTYRNSMFHNRHLFKDKVVLDVGSGTGILCMFAAKAGARKVIGIECSSISDYAVKIVKANKLDHVVTIIKGKVEEVELPVEKVDIIISEWMGYCLFYESMLNTVLYARDKWLAPDGLIFPDRATLYVTAIEDRQYKDYKIHWWENVYGFDMSCIKDVAIKEPLVDVVDPKQLVTNACLIKEVDIYTVKVEDLTFTSPFCLQVKRNDYVHALVAYFNIEFTRCHKRTGFSTSPESPYTHWKQTVFYMEDYLTVKTGEEIFGTIGMRPNAKNNRDLDFTIDLDFKGQLCELSCSTDYRMR

SEQ ID NO: 7681 - protein, 101 aa, Homo sapiens
TKDAEGLDEIDHAEMELRRGQILWFRGLNRIQTQIDVINTFQTGASFKGVLRRQNMGQHLDVKLVPSSSYVAVAPVKSSPTTSVPAVSSPPMGNQSGQSVP

SEQ ID NO: 7682 - protein, 627 aa, Homo sapiens
MSKGPAVGIDLGTTYSCVGVFQHGKVEIIANDQGNRTTPSYVAFTDTERLIGDAAKNQVAMNPTNTVFDAKRLIGRRFDDAVVQSDMKHWPFMVVNDAGRPKVQVEYKGETKSFYPEEVSSMVLTKMKEIAEAYLGKATKDAGTIAGLNVLRIINEPTAAAIAYGLDKKVGAERNVLIFDLGGGTFDVSILTIEDGIFEVKSTAGDTHLGGEDFDNRMVNHFIAEFKRKHKKDISENKRAVRRLRTACERAKRTLSSSTQASIEIDSLYEGIDFYTSITRARFEELNADLFRGTLDPVEKALRDAKLDKSQIHDIVLVGGSTRIPKIQKLLQDFFNGKELNKSINPDEAVAYGAAVQAAILSGDKSENVQDLLLLDVTPLSLGIETAGGVMTVLIKRNTTIPTKQTQTFTTYSDNQPGVLIQVYEGERAMTKDNNLLGKFELTGIPPAPRGVPQIEVTFDIDANGILNVSAVDKSTGKENKITITNDKGRLSKEDIERMVQEAEKYKAEDEKQRDKVSSKNSLESYAFNMKATVEDEKLQGKINDEDKQKILDKCNEIINWLDKNQTAEKEEFEHQQKELEKVCNPIITKLYQSAGGMPGGMPGGFPGGGAPPSGGASSGPTIEEVD

SEQ ID NO: 7683 - protein, 311 aa, Homo sapiens
TVWDEAEQDGIGEEVLKMSTEEIIQRTRLLDSEIKIMKSEVLRVTHELQAMKDKIKENSEKIKVNKTLPYLVSNVIELLDVDPNDQEEDGANIDLDSQRKGKCAVIKTSTRQTYFLPVIGLVDAEKLKPGDLVGVNKDSYLILETLPTEYDSRVKAMELVEAIVLPMNHKEKFENLGIQPPKGVLMYGPPGTGKTLLARACAAQTKATFLKLAGPQLVQMFIGDGAKLVRDAFALAKEKAPSIIFIDELDAIGTKRFDSEKAGDREVQRTMLELLNQLDGFQPNTQVKVIAATNRVDILDPALLRSGRLDR

SEQ ID NO: 7684 - protein, 261 aa, Homo sapiens
MATNFLAHEKIWFDKFKYDDAERRFYEQMNGPVAGASRQENGASVILRDIARARENIQKSLAGSSGPGASSGTSGDHGELVVRIASLEVENQSLRGVVQELQQAISKLEARLNVLEKSSPGHRATAPQTQHVSPMRQVEPPAKKPATPAEDDEDDDIDLFGSDNEEEDKEAAQLREERLRQYAEKKAKKPALVAKSSILLDVKPWDDETDMAQLEACVRSIQLDGLVWGASKLVPVGYGIRKLQIQCVVEDDKVGTDLLEE

SEQ ID NO: 7685 - protein, 77 aa, Homo sapiens
MEEEAETEEQQRFSYQQRLKAAVHYTVGCLCEEVALDKEMQFSKQTIAAISELTFRQCENFAKDLEMFASICRKRQE

SEQ ID NO: 7686 - protein, 121 aa, Homo sapiens
MEKEETTRELLLPNWQGSGSHGLTIAQRDDGVFVQEVTQNSPAARTGVVKEGDQIVGATIYFDNLQSGEVTQLLNTMGHHTVGLKLHRKGDRSPEPGQTWTREVFSSCSSEVVLNTPQPSA

SEQ ID NO: 7687 - protein, 87 aa, Homo sapiens
MRDVYIVQDLMETDLYKLLKSQQLSNDHICYFLYQILRGLKYIHSANVLHRDLKPSNLLINTTCDLKICDFGLARIADPEHDHTGFL

SEQ ID NO: 7688 - protein, 302 aa, Homo sapiens
MSLPPIRLPSPYGSDRLVQLAARLRPALCDTLITVGSQEFPAHSLVLAGVSQQLGRRGQWALGEGISPSTFAQLLNFVYGESVELQPGELRPLQEAARALGVQSLEEACWRARGDRAKKPDPGLKKHQEEPEKPSRNPERELGDPGEKQKPEQVSRTGGREQEMLHKHSPPRGRPEMAGATQEAQQEQTRSKEKRLQAPVGQRGADGKHGVLTWLRENPGGSEESLRKLPGPLPPAGSLQTSVTPRPSWAEAPWLVGGQPALWSILLMPPRYGIPFYHSTPTTGAWQEVWREQRRTCNLCGS

SEQ ID NO: 7689 - protein, 940 aa, Homo sapiens
MPMWAGGVGSPRRGMAPASTDDLFARKLRQPARPPLTPHTFEPRPVRGPLLRSGSDAGEARPPTPASPRARAHSHEEASRPAATSTRLFTDPLALLGLPAEEPEPAFPPVLEPRWFAHYDVQSLLFDWAPRSQGMGSHSEASSGTLASAEDQAASSDLLHGAPGFVCELGGEGELGLGGPASPPVPPALPNAAVSILEEPQNRTSAYSLEHADLGAGYYRKYFYGKEHQNFFGMDESLGPVAVSLRREEKEGSGGGTLHSYRVIVRTTQLRTLRGTISEDALPPGPPRGLSPRKLLEHVAPQLSPSCLRLGSASPKVPRTLLTLDEQVLSFQRKVGILYCRAGQGSEEEMYNNQEAGPAFMQFLTLLGDVVRLKGFESYRAQLDTKTDSTGTHSLYTTYQDHEIMFHVSTMLPYTPNNQQQLLRKRHIGNDIVTIVFQEPGSKPFCPTTIRSHFQHVFLVVRAHTPCTPHTTYRVAVSRTQDTPAFGPALPAGGGPFAANADFRAFLLAKALNGEQAAGHARQFHAMATRTRQQYLQDLATNEQLDLYHGRGEAITLRFDGSPGQAVGEVVARLQLVSRGCETRELALPRDGQGRLGFEVDAEGFVTHVERFTFAETAGLRPGARLLRVCGQTLPSLRPEAAAQLLRSAPKVCVTVLPPDESGRPRRSFSELYTLSLQEPSRRGAPDPVQDEVQGVTLLPTTKQLLHLCLQDGGSPPGPGDLAEERTEFLHSQNSLSPRSSLSDEAPVLPNTTPDLLLATTAKPSVPSADSETPLTQDRPGSPSGSEDKGNPAPELRASFLPRTLSLRNSISRIMSEAGSGTLEDEWQAISEIASTCNTILESLSREGQPIPESGDPKGTPKSDAEPEPGNLSEKVSHLESMLRKLQEDLQKEKADRAALEEEVRSLRHNNRRLQAESESAATRLLLASKQLGSPTADLA

SEQ ID NO: 7690 - protein, 167 aa, Homo sapiens
MGRVIRGQRKGAGSVFRAHVKHRKGAARLRAVDFAERHGYIKGIVKDIIHDPGRGAPLAKVVFRDPYRFKKRTELFIAAEGIHTGQFVYCGKKAQLNIGNVLPVGTMPEGTIVCCLEEKPGDRGKLARASGNYATVISHNPETKKTRVKLPSGSKKVISSANRAVVG

SEQ ID NO: 7691 - protein, 96 aa, Homo sapiens
MPAMLPTGSHSAVLPPSHCSTAPPSTSQEPSSSADPKLCLSPPTSDSRQERNVQFGLAYQEGRLQKLLKMNGPEDLPKSYDYDLIIIGGGSGGLAA

SEQ ID NO: 7692 - protein, 162 aa, Homo sapiens
MGGSVYPADDEMFSDIYKIREIADGLCLEVEGKMVSRTEGNIDDSLIGGNASAEGPEGEGTESTVITGVDIVMNHHLQETSFTKEAYKKYIKDYMKSIKGKLEEQRPERVKPFMTGAAEQIKHILANFKNYQFFIGENMNPDGMVALLDYREDGVTPYMIFF

SEQ ID NO: 7693 - protein, 581 aa, Homo sapiens
MARRPRHSIYSSDEDDEDFEMCDHDYDGLLPKSGKRHLGKTRWTREEDEKLKKLVEQNGTDDWKVIANYLPNRTDVQCQHRWQKVLNPELIKGPWTKEEDQRVIELVQKYGPKRWSVIAKHLKGRIGKQCRERWHNHLNPEVKKTSWTEEEDRIIYQAHKRLGNRWAEIAKLLPGRTDNAIKNHWNSTMRRKVEQEGYLQESSKASQPAVATSFQKNSHLMGFAQAPPTAQLPATGQPTVNNDYSYYHISEAQNVSSHVPYPVALHVNIVNVPQPAAAAIQRHYNDEDPEKEKRIKELELLLMSTENELKGQQVLPTQNHTCSYPGWHSTTIADHTRPHGDSAPVSCLGEHHSTPSLPADPGSLPEESASPARCMIVHQGTILDNVKNLLEFAETLQFIDSFLNTSSNHENSDLEMPSLTSTPLIGHKLTVTTPFHRDQTVKTQKENTVFRTPAIKRSILESSPRTPTPFKHALAAQEIKYGPLKMLPQTPSHLVEDLQDVIKQESDESGIVAEFQENGPPLLKKIKQEVNTQPFGSNKLRILPPLFLVCSLMCLPLALCNTTTFRARFSYKVQRKGTARL

SEQ ID NO: 7694 - protein, 769 aa, Homo sapiens
MPASWTSPQKSSALAPEDHGSSYEGSVSFRDVAIDFSREEWRHLDLSQRNLYRDVMLETYSHLLSVGYQVPKPEVVMLEQGKEPWALQGERPRHSCPGEKLWDHNQHRKIIGYKPASSQDQKIYSGEKSYECAEFGKSFTWKSQFKVHLKVPTGEKLYVCIECGRAFVQKPEFITHQKTHMREKPYKCNECGKSFFQVSSLFRHHRIHTGEKLYECSECGKGFPYNSDLSIHEKIHTGERHHECTDCGKAFTQKSTLKIHQKIHTGERSYICIECGQAFIQKTQLIAHRRIHSGEKPYECNNCGKSFISKSQLQVHQRVHTRVKPYICTEYGKVFSNNSNLITHEKIQSREKSSICTECGKAFTYRSELIIHQRIHTGEKPYECSDCGRAFTQKSALTVHQRIHTGEKSYICMKCGLAFIRKAHLITHQIIHTGEKPYKCGHCGKLFTSKSQLHVHKRIHTGEKPYVCNKCGKAFTNRSNLITHQKTHTGEKSYICSKCGKAFTQRSDLITHQRIHTGEKPYECNTCGKAFTQKSNLNIHQKIHTGERQYECHECGKAFNQKSILIVHQKIHTGEKPYVCTECGRAFIRKSNFITHQRIHTGEKPYECSDCGKSFTSKSQLLVHQPVHTGEKPYVCAECGKAFSGRSNLSKHQKTHTGEKPYICSECGKTFRQKSELITHHRIHTGEKPYECSDCGKSFTKKSQLQVHQRIHTGEKPYVCAECGKAFSNRSNLNKHQTTHTGDKPYKCGICGKGFVQKSVFSVHQSSHA

SEQ ID NO: 7695 - protein, 99 aa, Homo sapiens
MATNFLAHEKIWFDKFKYDDAERRFYEQMNGPVCALSSWTGWSGGLPSWCPWATVSGSYRFSVWWRTTRWGQTCWRRRSPSLRSTCRVSISQLSTRSEA

SEQ ID NO: 7696 - protein, 131 aa, Homo sapiens
MEKEETTRELLLPNWQGSGSHGLTIAQRDDGVFVQEVTQNSPAARTGVVKEGDQIVGATIYFDNLQSGEVTQLLNTMGHHTVGLKLHRKGDRSPEPGQTWTREVFSSCSSEVVLDCRSGQEENHPLLRLFL

SEQ ID NO: 7697 - protein, 111 aa, Homo sapiens
MSSGTELLWPGAALLVLLGVAASLCVRCSRPGAKRSEKIYQQRSLREDQQSFTGSRTYSLVGQAWPGPLADMAPTRKDKLLQFYPSLEDPASSRYQNFSKGSRHGSEEAYI

SEQ ID NO: 7698 - protein, 107 aa, Homo sapiens
MFRKGKKRHSSSSSQSSEISTKSKSVDSSLGGLSRSSTVASLDTDSTKSSGQSNNNSDTCAEFRIKYVGAIEKLKLSEGKGLEGPLDLINYIDVAQVKKKNSVTLWL

SEQ ID NO: 7699 - protein, 243 aa, Homo sapiens
MAVQISKKRKFVADGIFKAELNEFLTRELAEDGYSGVEVRVTPTRTEIIILATRTQNVLGEKGRRIRELTAVVQKRFGFPEGSVELYAEKVATRGLCAIAQAESLRYKLLGGLAVRRACYGVLRFIMESGAKGCEVVVSGKLRGQRAKSMKFVDGLMIHSGDPVNYYVDTAVRHVLLRQGVLGIKVKIMLPWDPTGKIGPKKPLPDHVSIVEPKDEILPTTPISEQKGGKPEPPAMPQPVPTA

SEQ ID NO: 7700 - protein, 167 aa, Homo sapiens
YCRDIHTKYSSEWGAGALEDKSRLQIWDTAGQERFRSITQSYYRSANALILTYDITCEESFRCLPEWLREIEQYASNKVITVLVGNKIDLAERREVSQQRAEEFSEAQDMYYLETSAKESDNVEKLFLDLACRLISEARQNTLVNNVSSPLPGEGKSISYLTCCNFN

SEQ ID NO: 7701 - protein, 285 aa, Homo sapiens
MTAPGAAGRCPPTIDSQMETSCQITFEFVDQEQLKDPVCYLKKAFLLVQDIMEDTMRFRDNTPNAIAIVQLQELSLRLKSCFTKDYEEHDKACVRTFYETPLQLLEKVKNVFNETKNLLDKDWNIFSKNCNNSFAECSSQDVVTKPDCNCLYPKAIPSSDPASVSPHQPLAPSMAPVAGLTWEDSEGTEGSSLLPGEQPLHTVDPGSAKQRPPRSTCQSFEPPETPVVKDSTIGGSPQPRPSVGAFNPGMEDILDSAMGTNWVPEEASGEASEIPVPQGTELSPS

SEQ ID NO: 7702 - protein, 385 aa, Homo sapiens
MARRPRHSIYSSDEDDEDFEMCDHDYDGLLPKSGKRHLGKTRWTREEDEKLKKLVEQNGTDDWKVIANYLPNRTDVQCQHRWQKVLNPELIKGPWTKEEDQRVIELVQKYGPKRWSVIAKHLKGRIGKQCRERWHNHLNPEVKKTSWTEEEDRIIYQAHKRLGNRWAEIAKLLPGRTDNAIKNHWNSTMRRKVEQEGYLQESSKASQPAVATSFQKNSHLMGFAQAPPTAQLPATGQPTVNNDYSYYHISEAQNVSSHVPYPVALHVNIVNVPQPAAAAIQRHYNDEDPEKEKRIKELELLLMSTENELKGQQTQNHTCSYPGWHSTTIADHTRPHGDSAPVSCLGEHHSTPSLPADPGSLPEESASPARCRVSGGPCSTSEGQP

SEQ ID NO: 7703 - protein, 69 aa, Homo sapiens
LKDHRPRMVWDSQASEHFFEYKKSRSGRHVVFYPTLKSLQVRLELARELGVGVSIWELGQGLDYFYDLL

SEQ ID NO: 7704 - protein, 83 aa, Homo sapiens
MTRGFAPILPVEFHKMGSFRRPRPRFMSSPVLSDLPRFQAARQALQLSSSSAWNSVQTAVINVFKGGGLQSNELYALNENIRR

SEQ ID NO: 7705 - protein, 77 aa, Homo sapiens
MDCSADTMTNRLLQRSRSSLPVDDTTKTIAKRLEAYYRASIPVIAYYETKTQLHKINAEGTPEDVFLQLCTAIDSIF

SEQ ID NO: 7706 - protein, 146 aa, Homo sapiens
MVGELIAFCTSTHKVGLTSEILNSFEHEFLSKRLSKARHSTCKDSGHAGARDIVSIQELIEVEEEEEILLNSYTTPSKGSQKRAISTPETPLTKRSVSTRSPHQLLSPSSFSPSATPSQKYNSRSNRGEVVTSFGLAQGVSWSGRG

SEQ ID NO: 7707 - protein, 154 aa, Homo sapiens
MSLVLNDLLICCRQLEHDRATERKKEVEKFKRLIRDPETIKHLDRHSDSKQGKYLNWDAVFRFLQKYIQKETECLRIAKPNVSASTQASRQKKMQEISSLVKYFIKCANRKLFSVYFRLYLKPSQDVHRVLVARIIHAVTKGCCSQTDGLNSKF

SEQ ID NO: 7708 - protein, 90 aa, Homo sapiens
MTSPEIASLSWGQMKVKGSNTTYKDCKVWPGGSRTWDWRETGTEVPSSTVEYLKKHGIDVRVLQTEQAVKEYNALVAQGVRVGGVFHSTC

SEQ ID NO: 7709 - protein, 144 aa, Homo sapiens
VGSGLRPDTWERFVRRFGPLQVLETYGLTEGNVATINYTGQRGAVGRASWLYKHIFPFSLIRYDVTTGEPIRDPQGHCMATSPGFLRFHDRTGDTFRWKGENVATTEVAEVFEALDFLQEVNVYGVTVPGHEGRAGMAALVLRP

SEQ ID NO: 7710 - protein, 67 aa, Homo sapiens
MEFVKCLGHPEEFYNLVRFRIGGKRKVMPKMDQTGGSWRARRRIARCWRTSQRSPLSLEIWLRNTKQ

SEQ ID NO: 7711 - protein, 135 aa, Homo sapiens
MVAMAEAEAGVAVEVRGLPPAVPDELLTLYFENRRRSGGGPVLSWQRLGCGGVLTFREPADAERVLAQADHELHGAQLSLRPAPPRAPARLLLQGLPPGTTPQRLEQHVQALLRASGLPVQPCCALASPRPDRAL

SEQ ID NO: 7712 - protein, 902 aa, Homo sapiens
MSGQWFYEAKAKRHRDKIHGADIIRASMRKKRPQIAAEQSKDRENGAKESWVNNVNKDAFLPPELAGVVEEPEEDAAPASPSSSVVNPASSVIDMSQENTRKPNVSPEKRKNPFNSSKLPEGHSSQQTKNEQSKNGRTGLFQTSKEDELSESKEKSTVADTSIQKLEKSKQTLPGLSNGSQIKAPIPKARKMIYKSTDLNKDDNQSFPRQRTDSLKARGAPRGILKRNSSSSSTDSETLRYNHNFEPKSKIVSPGLTIHERISEKEHSLEDNSSPNSLEPLKHVRFSAVKDELPQSPGLIHGREVGEFSVLESDRLKNGMEDAGDTEEFQSDPKPSQYRKPSLFHQSTSSPYVSKSETHQPMTSGSFPINGLHSHSEVLTARPQSMENSPTINEPKDKSSELTRLESVLPRSPADELSHCVEPEPSQVPGGSSRDRQQGSEEEPSPVLKTLERSAARKMPSKSLEDISSDSSNQAKVDNQPEELVRSAEDDEKPDQKPVTNECVPRISTVPTQPDNPFSHPDKLKRMSKSVPAFLQDESDDRETDTASESSYQLSRHKKSPSSLTNLSSSSGMTSLSSVSGSVMSVYSGDFGNLEVKGNIQFAIEYVESLKELHVFVAQCKDLAAADVKKQRSDPYVKAYLLPDKGKMGKKKTLVVKKTLNPVYNEILRYKIEKQILKTQKLNLSIWHRDTFKRNSFLGEVELDLETWDWDNKQNKQLRWYPLKRKTAPVALEAENRGEMKLALQYVPEPVPGKKLPTTGEVHIWVKECLDLPLLRGSHLNSFVKCTILPDTSRKSRQKTRAVGKTTNPIFNHTMVYDGFRPEDLMEACVELTVWDHYKLTNQFLGGLRIGFGTGKSYGTEVDWMDSTSEEVALWEKMVNSPNTWIEATLPLRMLLIAKISK

SEQ ID NO: 7713 - protein, 196 aa, Homo sapiens
RNKMFYAGTAFSDFLMGSSKDLAKHIRVVVSGARLPWVGGPEGREAEATWHMHLNTLPARLQCDGMDLTPKIQDLKPQCVVFLNIPRYCAGTMPWGHPGEHHDFEPQRHDDGYLEVIGFTMTSLAALQVGGHGERLTQCREVVLTTSKAIPVQVDGEPCKLAASRIRIALRNQATMVQKAKRRSAAPLHSDQQPVP

SEQ ID NO: 7714 - protein, 152 aa, Homo sapiens
QFGTPRGTVWPHLQLAQGKLLKDVFRPGDVFFNTGDLLVCDDQGFLRFHDRTGDTFRWKGENVATTEVAEVFEALDFLQEVNVYGVTVPGHEGRAGMAALVLRPPHALDLMQLYTHVSENLPPYARPRFLRLQESLATTETFKQQKVRMANE

SEQ ID NO: 7715 - protein, 143 aa, Homo sapiens
MPGVCDRAPDFLSPSEDQVLRPALGSSVALNCTAWVVSGPHCSLPSVQWLKDGLPLGIGGHYSLHEYSWPYKPRGCGAGLPPGPAGPAAGRPALCQVPSQRAALVPGRVWGGGDKRDCPEDRKFVNFILKPQLERRRGYKLFL

SEQ ID NO: 7716 - protein, 264 aa, Homo sapiens
MAALFLSAPPQAEVTFEDVAVYLSREEWGRLGPAQRGLYRDVMLETYGNLVSLALGTRTEYKELTSQETFGEEDPQGSEPVEACDHISKSEGSLEKLVEQRGPRAVTLTNGESSRESGGNLRLLSRPVPDQRPHKCDICEQSFEQRSYLNNHKRVHRSKKTNTVRNSGEIFSANLVVKEDQKIPTGKKLHYCSYCGKTFRYSANLVKHQRLHTEEKPYKCDECGKAFSQSCEFINHRRMHSGEIPYRCDECGKTFTRRPNLMKH

SEQ ID NO: 7717 - protein, 697 aa, Homo sapiens
MEAPLGSILSPCPGRAATGRAGTGRVGTGLRPPAVLQLCPLLAFYRCVRKMRSGKASCTLETVWEDKHKYEEAERRFYEHEATQAAASAQQLPAEGPAMNGPGQDDPEDADEAEAPDGGSRRDPRKSQDSRKPLQKKRKRSPKSGLGPADLALLGLSAERVWLDKSLFDQAESSYRQKLADVAAQAAWPPALAPWGLCTHGNQVACHHVTWGIWVNKSSFDQAERAFVEWSQALLLAPDGSRRQGTPNTGQQVAVPDLAHQPSPPVNGQPPLGSLQALVREVWLEKPRYDAAERGFYEALFDGHPPGKVRLQERAGLAEGARRGRRDRRGRNILGNKRAGLRRADGEAPSALPYCYFLQKDAEAPWLSKPAYDSAECRHHAAEALRVAWCLEAASLSHRPGPRSGLSVSSLRPNRKMATNFLAHEKIWFDKFKYDDAERRFYEQMNGPVAGASRQENGASVILRDIARARENIQKSLAGSSGPGASSGTSGDHGELVVRIASLEVENQSLRGVVQELQQAISKLEARLNVLEKSSPGHRATAPQTQHVSPMRQVEPPAKKPATPAEDDEDDDIDLFGSDNEEEDKEAAQLREERLRQYAEKKAKKPALVAKSSILLDVKPWDDETDMAQLEACVRSIQLDGLVWGASKLVPVGYGIRKLQIQCVVEDDKVGTDLLEEEITKFEEHVQSVDIAAFNKI

SEQ ID NO: 7718 - protein, 103 aa, Homo sapiens
MSKSVPAFLQDESDDRETDTASESSYQLSRHKKSPSSLTNLSSSSGMTSLSSVSGSVMSVYSGDFGNLEVKGNIQFAIEYVESLKELHVFVAQCKDLAAADVK

SEQ ID NO: 7719 - protein, 408 aa, Homo sapiens
MADLEAVLADVSYLMAMEKSKATPAARASKKILLPEPSIRSVMQKYLEDRGEVTFEKIFSQKLGYLLFRDFCLNHLEEARPLVEFYEEIKKYEKLETEEERVARSREIFDSYIMKELLACSHPFSKSATEHVQGHLGKKQVPPDLFQPYIEEICQNLRGDVFQKFIESDKFTRFCQWKNVELNIHLTMNDFSVHRIIGRGGFGEVYGCRKADTGKMYAMKCLDKKRIKMKQGETLALNERIMLSLVSTGDCPFIVCMSYAFHTPDKLSFILDLMNGGDLHYHLSQHGVFSEADMRFYAAEIILGLEHMHNRFVVYRDLKPANILLDEHGHVRISDLGLACDFSKKKPHASVGTHGYMAPEVLQKGSRCLCGVAPSPPRGWVGAPSPPVYSFPGAFLCRFLNVILKSEK

SEQ ID NO: 7720 - protein, 117 aa, Homo sapiens
MRSAVLKSLQPGSLPDCKAALGGSGNISTSPFWSRRHSEGQDTGTRAVLLYGAGARVCGSVTPSSFGGKSAAFGFLQWWAKDSPPRCSVESWQCPLWKTGTWCKPWEKVPMEKFNLL

SEQ ID NO: 7721 - protein, 214 aa, Homo sapiens
MSYFKEAELKDLLLQVGRGLRYIHSMSLVHMDIKPSNIFISRTSIPNAASEEGDEDDWASNKVMFKIGDLGHVTRISSPQVEEGDSRFLANEVLQENYTHLPKADIFALALTVVCAAGAEPLPRNGDQWHEIRQGRLPRIPQVLSQEFTELLKVMIHPDPERRPSAMALVKHSVLLSASRKSAEQLRIELNAEKFKNSLLQKELKKAQMAKAAA

SEQ ID NO: 7722 - protein, 141 aa, Homo sapiens
MQDYNKDDMSYRRISAVEPKTALPFNRFLPNKSRQPSYVPAPLRKKKPDKHEDNRRSWASPVYTEADGTFSSQFLLLQALQTYSDDILSSETHTKIDPTSGPRLITRRKNLSYAPGYRRDDLEMAALDPDLENDDFFVRKT

SEQ ID NO: 7723 - protein, 102 aa, Homo sapiens
MNENIDILETAIKQAAEQGARIIVTPEDALYGWKFTRETVFPYLEDIPDPQVNWIPCQDPHRFGHTPVQARLSCLAKDNSIYVLANLGDKKPCNSRDSTCPP

SEQ ID NO: 7724 - protein, 387 aa, Homo sapiens
MTVKTEAAKGTLTYSRMRGMVAILIAFMKQRRMGLNDFIQKIANNSYACKHPEVQSILKISQPQEPELMNANPSPPPSPSQQINLGPSSNPHAKPSDFHFLKVIGKGSFGKVLLARHKAEEVFYAVKVLQKKAILKKKELFYHLQRERCFLEPRARFYAAEIASALGYLHSLNIVYRDLKPENILLDSQGHIVLTDFGLCKENIEHNSTTSTFCGTPEYLAPEVLHKQPYDRTVDWWCLGAVLYEMLYGLPPFYSRNTAEMYDNILNKPLQLKPNITNSARHLLEGLLQKDRTKRLGAKDDFMEIKSHVFFSLINWDDLINKKITPPFNPNVSGPNDLRHFDPEFTEEPVPNSIGKSPDSVLVTASVKEAAEAFLGFSYAPPTDSFL

SEQ ID NO: 7725 - protein, 155 aa, Homo sapiens
IDHLFISNLPEIVVELLMTLHEPANSSASQSTDLCDFSGDLDPAPNPPHFPSHVIKATFAYISNCHKTKLKSILEILSKSPDSYQKILLAICEQAAETNNVYKKHRILKIYHLFVSLLLKDIKSGLGGAWAFVLRDVIYTLIHYINQRKLTIFSQ

SEQ ID NO: 7726 - protein, 115 aa, Homo sapiens
MATRRLTDAFLLLRNNSIQNRQLLAEQELDELADDRMALVSGISLDPEAAIGVTKRPPPKWVDGVDEIQYDVGRIKQKMKELASLHDKHLNRPTLDDSSEEEHAIEITTQEITQA

SEQ ID NO: 7727 - protein, 176 aa, Homo sapiens
MCSKPEDPVEYLESCLQKVKELGGCDKVKWDTFVSQEKKTLPPLNGGQSRRSFLRNVMPENSNFPYRRYDRLPPIHQFSIESDTDLSETAELIEEYEVFDPTRPRPKIILVIGGPGSGKGTQSLKIAERYGFQYISVGELLRKKIHSTSSNRKWSLIAKIITTGELAPQETTITEI

SEQ ID NO: 7728 - protein, 171 aa, Homo sapiens
MSKGPAVGIDLGTTYSCVGVFQHGKVEIIANDQGNRTTPSYVAFTDTERLIGDAAKNQVAMNPTNTVFDAKRLIGRRFDDAVVQSDMKHWPFMVVNDAGRPKVQVEYKGETKSFYPEEVSSMVLTKMKEIAEAYLGKTVTNAVVTVPAYFNDSQRQATKDAGTIAGLNVLR

SEQ ID NO: 7729 - protein, 581 aa, Homo sapiens
MARRPRHSIYSSDEDDEDFEMCDHDYDGLLPKSGKRHLGKTRWTREEDEKLKKLVEQNGTDDWKVIANYLPNRTDVQCQHRWQKVLNPELIKGPWTKEEDQRVIELVQKYGPKRWSVIAKHLKGRIGKQCRERWHNHLNPEVKKTSWTEEEDRIIYQAHKRLGNRWAEIAKLLPGRTDNAIKNHWNSTMRRKVEQEGYLQESSKASQPAVATSFQKNSHLMGFAQAPPTAQLPATGQPTVNNDYSYYHISEAQNVSSHVPYPVALHVNIVNVPQPAAAAIQRHYNDEDPEKEKRIKELELLLMSTENELKGQQVLPTQNHTCSYPGWHSTTIADHTRPHGDSAPVSCLGEHHSTPSLPADPGSLPEESASPARCMIVHQGTILDNVKNLLEFAETLQFIDSFLNTSSNHENSDLEMPSLTSTPLIGHKLTVTTPFHRDQTVKTQKENTVFRTPAIKRSILESSPRTPTPFKHALAAQEIKYGPLKMLPQTPSHLVEDLQDVIKQESDESGIVAEFQENGPPLLKKIKQEVNTQPFGSNKLRILPPLFLVCSLMCLPLALCNTTTFRARFSYKVQRKGGISN

SEQ ID NO: 7730 - protein, 162 aa, Homo sapiens
MSCIAFSFGGSLADAISENYRIMSYFKEAELKDLLLQVGRGLRYIHSMSLVHMDIKPSNIFISRTSIPNAASEEGDEDDWASNKVMFKIGDLGHVTRISSPQVEEGDSRFLANEVLQENYTHLPKADIFALALTVVCAAGAEPLPRNGDQWHEIRQGRLPRI

SEQ ID NO: 7731 - protein, 148 aa, Homo sapiens
MAPTQGPRAPLEFGGPLGNPIYDFFLGRELNPRICFFDFKYFCELRPGLIGWVLINLALLMKEAELRGSPSLAMWLVNGFQLLYVGDALWHEEAVLTTMDITHDGFGFMLAFGDMAWVPFTYSLQAQFLLHHPQPLGLPMASVICLIN

SEQ ID NO: 7732 - protein, 198 aa, Homo sapiens
MATNFLAHEKIWFDKFKYDDAERRFYEQMNGPVAGASRQENGASVILRDIARARENIQKSLAGSSGPGASSGTSGDHGELVVRIASLEVENQSLRGVVQELQQAISKLEARLNVLEKSSPGHRATAPQTQHVSPMRQVEPPAKKPATPAEDDEDDDIDLFGSDNEEEDKEAAQLREERLRQYAEKKAKKPALVAKSSI

SEQ ID NO: 7733 - protein, 459 aa, Homo sapiens
MSSQSSSLSEACSREAYSSHNWALPPASRSNPQPAYPWATRRMKEEAIKPPLKAFMKQRRMGLNDFIQKIANNSYACKHPEVQSILKISQPQEPELMNANPSPPPSPSQQINLGPSSNPHAKPSDFHFLKVIGKGSFGKVLLARHKAEEVFYAVKVLQKKAILKKKEEKHIMSERNVLLKNVKHPFLVGLHFSFQTADKLYFVLDYINGGELFYHLQRERCFLEPRARFYAAEIASALGYLHSLNIVYRDLKPENILLDSQGHIVLTDFGLCKENIEHNSTTSTFCGTPEYLAPEVLHKQPYDRTVDWWCLGAVLYEMLYGLPPFYSRNTAEMYDNILNKPLQLKPNITNSARHLLEGLLQKDRTKRLGAKDDFMEIKSHVFFSLINWDDLINKKITPPFNPNVSGPNDLRHFDPEFTEEPVPNSIGKSPDSVLVTASVKEAAEAFLGFSYAPPTDSFL

SEQ ID NO: 7734 - protein, 150 aa, Homo sapiens
MGWGRLQRISLPSQCLSLLSTWLGSLLLLVCLLASRSITEEVSEYCSHMIGSGHLQSLQRLIDSQMETSCQITFEFVDQEQLKDPVCYLKKAFLLVQDIMEDTMRFRDNTPNAIAIVQLQELSLRLKSCFTKDYEEHDKACVRTFYETPL

SEQ ID NO: 7735 - protein, 205 aa, Homo sapiens
MGRVIRGQRKGAGSVFRAHVKHRKGAARLRAVDFAERHGYIKGIVKDIIHDPGRGAPLAKVVFRDPYRFKKRTELFIAAEGIHTGQFVYCGKKAQLNIGNVLPVGTMPEGTIVCCLEEKPGDRGKLARASGNYATVISHNPETKKTRVKLPSGSKKVISSANRAVVGVVAGGGRIDKPILKAGRAYHKYKAKRNCWPRVRGVAMN

SEQ ID NO: 7736 - protein, 137 aa, Homo sapiens
MSKGPAVGIDLGTTYSCVGVFQHGKVEIIANDQGNRTTPSYVAFTDTERLIGDAAKNQVAMNPTNTVFDAKRLIGRRFDDAVVQSDMKHWPFMVVNDAGRPKVQVEYKGETKSFYPEEVSSMVLTKMKEIAEAYLGK

SEQ ID NO: 7737 - protein, 126 aa, Homo sapiens
MPVQPPSKDTEEMEAEGDSAAEMNGEEEESEEERSGSQTESEEESSEMDDEDYERRRSECVSEMLDLEKQFSELKEKLFRERLSQLRLRLEEVGAERAPEYTEPLGGLQRSLKIRIQGSTRASVWM

SEQ ID NO: 7738 - protein, 79 aa, Homo sapiens
MARRPRHSIYSSDEDDEDFEMCDHDYDGLLPKSGKRHLGKTRWTREENRTDVQCQHRWQKVLNPELIKGPWTKEEDQRN

SEQ ID NO: 7739 - protein, 204 aa, Homo sapiens
MATNFLAHEKIWFDKFKYDDAERRFYEQMNGPVAGASRQENGASVILRDIARARENIQKSLAGSSGPGASSGTSGDHGELVVRIASLEVENQSLRGVVQELQQAISKLEARLNVLEKSSPGHRATAPQTQHVSPMRQVEPPAKKPATPAEDDEDDDIDLFGSDNEEEDKEAAQLREERLRQYAEKKAKKPALVAKSSILLDVKP

SEQ ID NO: 7740 - protein, 425 aa, Homo sapiens
MASSTPSSSATSSNAGADPNTTNLRPTTYDTWCGVAHGCTRKLGLKICGFLQRTNSLEEKSRLVSAFKERQSSKNLLSCENSDRDARFRRTETDFSNLFARDLLPAKNGEEQTVQFLLEVVDILLNYVRKTFDRSTKVLDFHHPHQLLEGMEGFNLELSDHPESLEQILVDCRDTLKYGVRTGHPRFFNQLSTGLDIIGLAGEWLTSTANTNMFTYEIAPVFVLMEQITLKKMREIVGWSSKDGDGIFSPGGAISNMYSIMAARYKYFPEVKTKGMAAVPKLVLFTSEQSHYSIKKAGAALGFGTDNVILIKCNERGKIIPADFEAKILEAKQKGYVPFYVNATAGTTVYGAFDPIQEIADICEKYNLWLHVDGFNFSQLANRIICLATELMTNKGCVTWHPNYSVNMHHGCLGRWAAHVQEAPP

SEQ ID NO: 7741 - protein, 758 aa, Homo sapiens
MARRPRHSIYSSDEDDEDFEMCDHDYDGLLPKSGKRHLGKTRWTREEDEKLKKLVEQNGTDDWKVIANYLPNRTDVQCQHRWQKVLNPELIKGPWTKEEDQRVIELVQKYGPKRWSVIAKHLKGRIGKQCRERWHNHLNPEVKKTSWTEEEDRIIYQAHKRLGNRWAEIAKLLPGRTDNAIKNHWNSTMRRKVEQEGYLQESSKASQPAVATSFQKNSHLMGFAQAPPTAQLPATGQPTVNNDYSYYHISEAQNVSSHVPYPVALHVNIVNVPQPAAAAIQRHYNDEDPEKEKRIKELELLLMSTENELKGQQTQNHTCSYPGWHSTTIADHTRPHGDSAPVSCLGEHHSTPSLPADPGSLPEESASPARCMIVHQGTILDNVKNLLEFAETLQFIDSDSSSWCDLSSFEFFEEADFSPSQHHTGKALQLQQREGNGTKPAGEPSPRVNKRMLSESSLDPPKVLPPARHSTIPLVILRKKRGQASPLATGDCSSFIFADVSSSTPKRSPVKSLPFSPSQFLNTSSNHENSDLEMPSLTSTPLIGHKLTVTTPFHRDQTVKTQKENTVFRTPAIKRSILESSPRTPTPFKHALAAQEIKYGPLKMLPQTPSHLVEDLQDVIKQESDESGIVAEFQENGPPLLKKIKQEVESPTDKSGNFFCSHHWEGDSLNTQLFTQTSPVADAPNILTSSVLMAPASEDEDNVLKAFTVPKNRSLASPLQPCSSTWEPASCGKMEEQMTSSSQARKYVNAFSARTLVM

SEQ ID NO: 7742 - protein, 51 aa, Homo sapiens
MEFVKCLGHPEEFYNLVRFRIGGKRKVMPKMDQQRSVHILSGSPSSGHTGR

SEQ ID NO: 7743 - protein, 419 aa, Homo sapiens
MARRPRHSIYSSDEDDEDFEMCDHDYDGLLPKSGKRHLGKTRWTREEDEKLKKLVEQNGTDDWKVIANYLPNRTDVQCQHRWQKVLNPELIKGPWTKEEDQRVIELVQKYGPKRWSVIAKHLKGRIGKQCRERWHNHLNPEVKKTSWTEEEDRIIYQAHKRLGNRWAEIAKLLPGRTDNAIKNHWNSTMRRKVEQEGYLQESSKASQPAVATSFQKNSHLMGFAQAPPTAQLPATGQPTVNNDYSYYHISEAQNVSSHVPYPVALHVNIVNVPQPAAAAIQRHYNDEDPEKEKRIKELELLLMSTENELKGQQTQNHTCSYPGWHSTTIADHTRPHGDSAPVSCLGEHHSTPSLPADPGSLPEESASPARILHHGVISAVLNSLKKQIFHLANITQAKPYSFSKERAMGLNLQENLAQG

SEQ ID NO: 7744 - protein, 134 aa, Homo sapiens
VSCAYQVARGMEYLASKKCIHRDLAARNVLVTEDNVMKIADFGLARDIHHIDYYKKTTNGRLPVKWMAPEALFDRIYTHQSDVWSFGVLLWEIFTLGGSPYPGVPVEELFKLLKEGHRMDKPSNCTNELPAAGT

SEQ ID NO: 7745 - protein, 422 aa, Homo sapiens
MARRPRHSIYSSDEDDEDFEMCDHDYDGLLPKSGKRHLGKTRWTREEDEKLKKLVEQNGTDDWKVIANYLPNRTDVQCQHRWQKVLNPELIKGPWTKEEDQRVIELVQKYGPKRWSVIAKHLKGRIGKQCRERWHNHLNPEVKKTSWTEEEDRIIYQAHKRLGNRWAEIAKLLPGRTDNAIKNHWNSTMRRKVEQEGYLQESSKASQPAVATSFQKNSHLMGFAQAPPTAQLPATGQPTVNNDYSYYHISEAQNVSSHVPYPVALHVNIVNVPQPAAAAIQRHYNDEDPEKEKRIKELELLLMSTENELKGQQVLPTQNHTCSYPGWHSTTIADHTRPHGDSAPVSCLGEHHSTPSLPADPGSLPEESASPARILHHGVISAVLNSLKKQIFHLANITQAKPYSFSKERAMGLNLQENLAQG

SEQ ID NO: 7746 - protein, 82 aa, Homo sapiens
MQNPRQYKIPDWFLNRQKDVKDGKYSQVLANGLDNKLREDLERLKKIRAHRGLRHFWGLRVRGQHTKTTGRRGRTVGVSKKK

SEQ ID NO: 7747 - protein, 132 aa, Homo sapiens
MSKGPAVGIDLGTTYSCVGVFQHGKVEIIANDQGNRTTPSYVAFTDTERLIGDAAKNQVAMNPTNTVFDAKRLIGRRFDDAVVQSDMKHWPFMVVNDAGRPKVQVEYKGETKSFYPEEVSSMVLTKMKEIAE

SEQ ID NO: 7748 - protein, 139 aa, Homo sapiens
MEKKLHAVPAAKTVKFKCPSSGTPNPTLRWLKNGKEFKPDHRIGGYKVRYATWSIIMDSVVPSDKGNYTCIVENEYGSINHTYQLDVVERSPHRPILQAGLPANKTVALGSNVEFMCKVYSDPQPHIQWLKHIEVNGSK

SEQ ID NO: 7749 - protein, 129 aa, Homo sapiens
MVSISGGDLPTGLDFISAPEPALSSCSLGTSAGWSPTMAAIRKKLVIVGDGACGKTCLLIVFSKDQFPEVYVPTVFENYIADIEVDGKQVELALWDTAGQEDYDRLRPLSYPDTDVILMCFSIDSPDSL

SEQ ID NO: 7750 - protein, 1367 aa, Homo sapiens
MGNSDSQYTLQGSKNHSNTITGAKQIPCSLKIRGIHAKEEKSLHGWGHGSNGAGYKSRSLARSCLSHFKSNQPYASRLGGPTCKVSRGVAYSTHRTNAPGKDFQGISAAFSTENGFHSVGHELADNHITSRDCNGHLLNCYGRNESIASTPPGEDRKSPRVLIKTLGKLDGCLRVEFHNGGNPSKVPAEDCSEPVQLLRYSPTLASETSPVPEARRGSSADSLPSHRPSPTDSRLRSSKGSSLSSESSWYDSPWGNAGELSEAEGSFLAPGMPDPSLHASFPPGDAKKPFNQSSSLSSLRELYKDANLGSLSPSGIRLSDEYMGTHASLSNRVSFASDIDVPSRVAHGDPIQYSSFTLPCRKPKAFVEDTAKKDSLKARMRRISDWTGSLSRKKRKLQEPRSKEGSDYFDSRSDGLNTDVQGSSQASAFLWSGGSTQILSQRSESTHAIGSDPLRQNIYENFMRELEMSRTNTENIETSTETAESSSESLSSLEQLDLLFEKEQGVVRKAGWLFFKPLVTVQKERKLELVARRKWKQYWVTLKGCTLLFYETYGKNSMDQSSAPRCALFAEDSIVQSVPEHPKKENVFCLSNSFGDVYLFQATSQTDLENWVTAVHSACASLFAKKHGKEDTLRLLKNQTKNLLQKIDMDSKMKKMAELQLSVVSDPKNRKAIENQIQQWEQNLEKFHMDLFRMRCYLASLQGGELPNPKSLLAAASRPSKLALGRLGILSVSSFHALVCSRDDSALRKRTLSLTQRGRNKKGIFSSLKGLDTLARKGKEKRPSITQVDELLHIYGSTVDGVPRDNAWEIQTYVHFQDNHGVTVGIKPEHRVEDILTLACKMRQLEPSHYGLQLRKLVDDNVEYCIPAPYEYMQQQVYDEIEVFPLNVYDVQLTKTGSVCDFGFAVTAQVDERQHLSRIFISDVLPDGLAYGEGLRKGNEIMTLNGEAVSDLDLKQMEALFSEKSVGLTLIARPPDTKATLCTSWSDSDLFSRDQKSLLPPPNQSQLLEEFLDNFKKNTANDFSNVPDITTGLKRSQTDGTLDQVSHREKMEQTFRSAEQITALCRSFNDSQANGMEGPRENQDPPPRSLARHLSDADRLRKVIQELVDTEKSYVKDLSCLFELYLEPLQNETFLTQDEMESLFGSLPEMLEFQKVFLETLEDGISASSDFNTLETPSQFRKLLFSLGGSFLYYADHFKLYSGFCANHIKVQKVLERAKTDKAFKAFLDARNPTKQHSSTLESYLIKPVQRVLKYPLLLKELVSLTDQESEEHYHLTEALKAMEKVASHINEMQKIYEDYGTVFDQLVAEQSGTEKEVTELSMGELLMHSTVSWLNPFLSLGKARKDLELTVFVFKRAVILVYKENC

SEQ ID NO: 7751 - protein, 63 aa, Homo sapiens
MVGVAEVSCGQAESSEKPNAEDMTSKDYYFDSYAHFGIHEEMLKDEVRTLTYRNSMFHNRHLF

SEQ ID NO: 7752 - protein, 119 aa, Homo sapiens
GSDNEEEDKEAAQLREERLRQYAEKKAKKPALVAKSSILLDVKPWDDETDMAQLEACVRSIQLDGLVWGASKLVPVGYGIRKLQIQCVVEDDKVGTDLLEEEITKFEEHSVDIAAFNKI

SEQ ID NO: 7753 - protein, 83 aa, Homo sapiens
MDDKKKKRSPKPCLAQPAQAPGTLRRVPVPTSHSGSLALGLPHLPSPKQRAKFKRPLRTQSSLRPSPYPQLCGKKARWVTGIT

SEQ ID NO: 7754 - protein, 50 aa, Homo sapiens
MSSSPVKRQRMESALDQLKQFTTVVADTGDFHVEMGFHRVSQDGLDLLTS

SEQ ID NO: 7755 - protein, 603 aa, Homo sapiens
MARRPRHSIYSSDEDDEDFEMCDHDYDGLLPKSGKRHLGKTRWTREEDEKLKKLVEQNGTDDWKVIANYLPNRTDVQCQHRWQKVLNPELIKGPWTKEEDQRVIELVQKYGPKRWSVIAKHLKGRIGKQCRERWHNHLNPEVKKTSWTEEEDRIIYQAHKRLGNRWAEIAKLLPGRTDNAIKNHWNSTMRRKVEQEGYLQESSKASQPAVATSFQKNSHLMGFAQAPPTAQLPATGQPTVNNDYSYYHISEAQNVSSHVPYPVALHVNIVNVPQPAAAAIQRHYNDEDPEKEKRIKELELLLMSTENELKGQQVLPTQNHTCSYPGWHSTTIADHTRPHGDSAPVSCLGEHHSTPSLPADPGSLPEESASPARCMIVHQGTILDNVKNLLEFAETLQFIDSFLNTSSNHENSDLEMPSLTSTPLIGHKLTVTTPFHRDQTVKTQKENTVFRTPAIKRSILESSPRTPTPFKHALAAQEIKYGPLKMLPQTPSHLVEDLQDVIKQESDESGIVAEFQENGPPLLKKIKQENILTSSVLMAPASEDEDNVLKAFTVPKNRSLASPLQPCSSTWEPASCGKMEEQMTSSSQARKYVNAFSARTLVM

SEQ ID NO: 7756 - protein, 1375 aa, Homo sapiens
MAGYVPGQQPANRSQEKEFVQAYEDVLERYKDERDRVQKKTFTKWVNKHLMKVRKHINDLYEDLRDGHNLISLLEVLSGIKLPREKGRMRFHRLQNVQIALDFLKQRQVKLVNIRNDDITDGNPKLTLGLIWTIILHFQISDIYISGESGDMSAKEKLLLWTQKVTAGYTGIKCTNFSSCWSDGKMFNALIHRYRPDLVDMERVQIQSNRENLEQAFEVAERLGVTRLLDAEDVDVPSPDEKSVITYVSSIYDAFPKVPEGGEGISATEVDSRWQEYQSRVDSLIPWIKQHTILMSDKTFPQNPVELKALYNQYIHFKETEILAKEREKGRIEELYKLLEVWIEFGRIKLPQGYHPNDVEEEWGKLIIEMLEREKSLRPAVERLELLLQIANKIQNGALNCEEKLTLAKNTLQADAAHLESGQPVQCESDVIMYIQECEGLIRQLQVDLQILRDENYYQLEELAFRVMRLQDELVTLRLECTNLYRKGHFTSLELVPPSTLTTTHLKAEPLTKATHSSSTSWFRKPMTRAELVAISSSEDEGNLRFVYELLSWVEEMQMKLERAEWGNDLPSVELQLETQQHIHTSVEELGSSVKEARLYEGKMSQNFHTSYAETLGKLETQYCKLKETSSFRMRHLQSLHKFVSRATAELIWLNEKEEEELAYDWSDNNSNISAKRNYFSELTMELEEKQDVFRSLQDTAELLSLENHPAKQTVEAYSAAVQSQLQWMKQLCLCVEQHVKENTAYFQFFSDARELESFLRNLQDSIKRKYSCDHNTSLSRLEDLLQDSMDEKEQLIQSKSSVASLVGRSKTIVQLKPRSPDHVLKNTISVKAVCDYRQIEITICKNDECVLEDNSQRTKWKVISPTGNEAMVPSVCFLIPPPNKDAIEMASRVEQSYQKVMALWHQLHVNTKSLISWNYLRKDLDLVQTWNLEKLRSSAPGECHQIMKNLQAHYEDFLQDSRDSVLFSVADRLRLEEEVEACKARFQHLMKSMENEDKEETVAKMYISELKNIRLRLEEYEQRVVKRIQSLASSRTDRDAWQDNALRIAEQEHTQEDLQQLRSDLDAVSMKCDSFLHQSPSSSSVPTLRSELNLLVEKMDHVYGLSTVYLNKLKTVDVIVRSIQDAELLVKGYEIKLSQEEVVLADLSALEAHWSTLRHWLSDVKDKNSVFSVLDEEIAKAKVVAEQMSRLTPERNLDLERYQEKGSQLQERWHRVIAQLEIRQSELESIQEVLGDYRACHGTLIKWIEETTAQQEMMKPGQAEDSRVLSEQLSQQTALFAEIERNQTKLDQCQKFSQQYSTIVKDYELQLMTYKAFVESQQKSPGKRRRMLSSSDAITQEFMDLRTRYTALVTLTTQHVKYISDALRRLEEEE

SEQ ID NO: 7757 - protein, 1062 aa, Homo sapiens
MGNSLGCFKEPKESIAIPEKAPISPKKRVRFKRRWRGKKIPTPEASHQEETSEGTGVIEETETLTKLTESLQKEDGVGGVEHTPPDILLPGDSAPNSRVVDRGMIVQVKERFQGEVQTAHLLLENESSVAGGVWDSLEEGMTVIAHLLDNPAERNCEKSVSQLVEFPRTASCSSRAVLLPLQGETAVEKGNIQRGFRSCALPRTDYPTDKGNQEQFSEGWSVEEGTKSVSGAPQTASWIIECSVSSLLLDQPGGQRRTEPSHVGQVPPQDSRLPTSQSDLSISGVTVSILPSSSGYGSDGPHIHGIQPKDTEPEKSSTSFSEEDGTLSLEASHTPSWGLEEISDIYISGESGDMSAKEKLLLWTQKVTAGYTGIKCTNFSSCWSDGKMFNALIHRYRPDLVDMERVQIQSNRENLEQAFEVAERLGVTRLLDAEDVDVPSPDEKSVITYVSSIYDAFPKVPEGGEGISATEVDSRWQEYQSRVDSLIPWIKQHTILMSDKTFPQNPVELKALYNQYIHFKETEILAKEREKGRIEELYKLLEVWIEFGRIKLPQGYHPNDVEEEWGKLIIEMLEREKSLRPAVERLELLLQIANKIQNGALNCEEKLTLAKNTLQADAAHLESGQPVQCESDVIMYIQECEGLIRQLQVDLQILRDENYYQLEELAFRVMRLQDELVTLRLECTNLYRKGHFTSLELVPPSTLTTTHLKAEPLTKATHSSSTSWFRKPMTRAELVAISSSEDEGNLRFVYELLSWVEEMQMKLERAEWGNDLPSVELQLETQQHIHTSVEELGSSVKEARLYEGKMSQNFHTSYAETLGKLETQYCKLKETSSFRMRHLQSLHKFVSRATAELIWLNEKEEEELAYDWSDNNSNISAKRNYFSELTMELEEKQDVFRSLQDTAELLSLENHPAKQTVEAYSAAVQSQLQWMKQLCLCVEQHVKENTAYFQFFSDARELESFLRNLQDSIKRKYSCDHNTSLSRLEDLLQDSMAQDEKEQLIQSKSSVASLVGRSKTIVQLKPRSPDHVLKNTISVKAVCDYRQIEGRTILSEGYGPLASAAC

SEQ ID NO: 7758 - protein, 113 aa, Homo sapiens
MPSRLRKTRKLRGHVSHGHGRIGKHRKHPGGRGNAGGLHHHRINFDKYEQTRVNAAKNKTGAAPIIDVVRSGYYKVLGKGKLPKQPVIVKAKFFSRRAEEKIKSVGGACVLVA

SEQ ID NO: 7759 - protein, 125 aa, Homo sapiens [sequence omitted]

SEQ ID NO: 7760 - protein, 113 aa, Homo sapiens
MKLQNQRGGRIFLQDIKKPDCDDWESGLNAMECALHLEKNVNQSLLELHKLATDKNDPHLCDFIETHYLNEQVKAIKELGDHVTNLRKMGAPESGLAEYLFDKHTLGDSDNES

SEQ ID NO: 7761 - protein, 155 aa, Homo sapiens
PLWQHVSPMRQVEPPAKKPATPAEDDEDDDIDLFGSDNEEEDKEAAQLREERLRQYAEKKAKKPALVAKSSILLDVKPWDDETDMAQLEACVRSIQLDGLVWGASKLVPVGYGIRKLQIQCVVEDDKVGTDLLEEEITKFEEHVQSVDIAAFNKI

SEQ ID NO: 7762 - protein, 46 aa, Homo sapiens
MALVSGISLDPEAAIGVTKRPPPKWVDGVDEVSSIFSMMLAGLSRR

SEQ ID NO: 7763 - protein, 189 aa, Homo sapiens
MGPSPAPSRTSASPPSLFRELALQATWLRCWPPSWSCWPCCWPPCSMSSAVSTCCSDGKLYDAYVSYSDCPEDRKFVNFILKPQLERRRGYKLFLDDRDLLPRAEPSADLLVNLSRCRRLIVVLSDAFLSRAWCSHSFREGLCRLLELTRRPIFITFEGQRRDPAHPALRLLRQHRHLVTLLLWRPGSV

SEQ ID NO: 7764 - protein, 184 aa, Homo sapiens
MATVWDEAEVGTGRAGGPGTGARRETPLTRGKEQDGIGEEVLKMSTEEIIQRTRLLDSEIKIMKSEVLRVTHELQAMKDKIKENSEKIKVNKTLPYLVSNVIELLDVDPNDQEEDGANIDLDSQRKGKCAVIKTSTRQTYFLPVIGLVDAEKLKPGDLVGVNKDSYLILETLPTEYDSRVKAME

SEQ ID NO: 7765 - protein, 187 aa, Homo sapiens
MSKGPAVGIDLGTTYSCVGVFQHGKVEIIANDQGNRTTPSYVAFTDTERLIGDAAKNQVAMNPTNTVFDAKRLIGRRFDDAVVQSDMKHWPFMVVNDAGRPKVQVEYKGETKSFYPEEVSSMVLTKMKEIAEAYLGKTVTNAVVTVPAYFNDSQRQATKDAGTIAGLNVLRIINEPTAAAIAYGLDK

SEQ ID NO: 7766 - protein, 99 aa, Homo sapiens
MGAPGGKINRPRTELKKKLFKRRRVLNRERRLRHRVVGAVIDQGLITRHHLKKRASSARANITLSGKKRRKLLQQIRLAQKEKTAMEVLRSCPRKSRLF

SEQ ID NO: 7767 - protein, 205 aa, Homo sapiens
MTRGFAPILPVEFHKMGSFRRPRPRFMSSPVLSDLPRFQAARQALQLSSSSAWNSVQTAVINVFKGGGLQSNELYALNENIRRLLKSELGSFITDYFQNQLLAKGLFFVEEKIKLCEGENRIEVLAEVWDHFFTETLPTLQAIFYPVQGQELTIRQISLLGFRDLVLLKVKLGDLLLLAQSKLPSSIVQMLLILQPGGTPGSGPR

SEQ ID NO: 7768 - protein, 183 aa, Homo sapiens
PDQKENTHFTVLIHELAEAFQKDFTKSTKERLLLTAGVSAGRQMIDNSYQVEKLAKDLDFINLLSFDFHGSWEKPLITGHNSPLSKGWQDRGPSSYYNVICQFLKGAKITRLQDQQVPYAVKGNQWVGYDDVKSMETKVQFLKNLNLGGAMIWSIDMDDFTGKSCNQGPYPLVQAVKRSLGSL

SEQ ID NO: 7769 - protein, 1136 aa, Homo sapiens
MTLIGENGHSTDTLTGSGFRVVVCPLPCMNGGQCSSRNQCLCPPDFTGRFCQVPAGGAGGGTGGSGPGLSRTGALSTGALPPLAPEGDSVASKHAIYAVQVIADPPGPGEGPPAQHAAFLVPLGPGQISAEVQAPPPVVNVRVHHPPEASVQVHRIESSNAESAAPSQHLLPHPKPSHPRPPTQKPLGRCFQDTLPKQPCGSNPLPGLTKQEDCCGSIGTAWGQSKCHKCPQLQYTGVQKPGPVRGEVGADCPQGYKRLNSTHCQDINECAMPGVCRHGDCLNNPGSYRCVCPPGHSLGPSRTQCIADKPEEKSLCFRLVSPEHQCQHPLTTRLTRQLCCCSVGKAWGARCQRCPTDGTAAFKEICPAGKGYHILTSHQTLTIQGESDFSLFLHPDGPPKPQQLPESPSQAPPPEDTEEERGVTTDSPVSEERSVQQSHPTATTTPARPYPELISRPSPPTMRWFLPDLPPSRSAVEIAPTQVTETDECRLNQNICGHGECVPGPPDYSCHCNPGYRSHPQHRYCVDVNECEAEPCGPGRGICMNTGGSYNCHCNRGYRLHVGAGGRSCVDLNECAKPHLCGDGGFCINFPGHYKCNCYPGYRLKASRPPVCEDIDECRDPSSCPDGKCENKPGSFKCIACQPGYRSQGGGACRDVNECAEGSPCSPGWCENLPGSFRCTCAQGYAPAPDGRSCLDVDECEAGDVCDNGICSNTPGSFQCQCLSGYHLSRDRSHCEDIDECDFPAACIGGDCINTNGSYRCLCPQGHRLVGGRKCQDIDECSQDPSLCLPHGACKNLQGSYVCVCDEGFTPTQDQHGCEEVEQPHHKKECYLNFDDTVFCDSVLATNVTQQECCCSLGAGWGDHCEIYPCPVYSSAEFHSLCPDGKGYTQDNNIVNYGIPAHRDIDECMLFGSEICKEGKCVNTQPGYECYCKQGFYYDGNLLECVDVDECLDESNCRNGVCENTRGGYRCACTPPAEYSPAQRQCLSPEEMDVDECQDPAACRPGRCVNLPGSYRCECRPPWVPGPSGRDCQLPESPAERAPERRDVCWSQRGEDGMCAGPLAGPALTFDDCCCRQGRGWGAQCRPCPPRGAGSHCPTSQSESNSFWDTSPLLLGKPPRDEDSSEEDSDECRCVS

SEQ ID NO: 7770 - protein, 142 aa, Homo sapiens
MRLSVAAAISHGRVFRRMGLGPESRIHLLRNLLTGLVRHERIEAPWARVDEMRGYAEKEKDLIPKLFQVLAPRYKDQTGGYTRMLQIPNRSLDRAKMAVIEYKGNCLPPLPLPRRDSHLTLLNQLLQGLRQDLRQSQEASNH

SEQ ID NO: 7771 - protein, 235 aa, Homo sapiens
MGRVIRGQRKGAGSVFRAHVKHRKGAARLRAVDFAERHGYIKGIVKDIIHDPGRGAPLAKVVFRDPYRFKKRTELFIAAEGIHTGQFVYCGKKAQLNIGNVLPVGTMPEGTIVCCLEEKPGDRGKLARASGNYATVISSANRAVVGVVAGGGRIDKPILKAGRAYHKYKAKRNCWPRVRGVAMNPVEHPFGGGNHQHIGKPSTIRRDAPAGRKVGLIAARRTGRLRGTKTVQEKE

SEQ ID NO: 7772 - protein, 171 aa, Homo sapiens
SSSSSSTKATLYPPGLGSGCMLSRMALETHISPTPFGKLHVGLGCRQWHLWKILNPPPSPATDPSLYNMDMFYSSNIPATARPYRPYIIRGMAPPTTPCSTDVCDSDYSASRWKASKYYLDLNSDSDPYPPPPTPHSQYLSAEDSCPPSPATERSYFHLFPPPPSPCTDSS

SEQ ID NO: 7773 - protein, 1045 aa, Homo sapiens
MDLFRMRCYLASLQGGELPNPKSLLAAASRPSKLALGRLGILSVSSFHALVCSRDDSALRKRTLSLTQRGRNKKGIFSSLKGLDTLARKGKEKRPSITQIFDSSGSHGFSGTQLPQNSSNSSEVDELLHIYGSTVDGVPRDNAWEIQTYVHFQDNHGVTVGIKPEHRVEDILTLACKMRQLEPSHYGLQLRKLVDDNVEYCIPAPYEYMQQQVYDEIEVFPLNVYDVQLTKTGSVCDFGFAVTAQVDERQHLSRIFISDVLPDGLAYGEGLRKGNEIMTLNGEAVSDLDLKQMEALFSEKSVGLTLIARPPDTKATLCTSWSDSDLFSRDQKSLLPPPNQSQLLEEFLDNFKKNTANDFSNVPDITTGLKRSQTDGTLDQVSHREKMEQTFRSAEQITALCRSFNDSQANGMEGPRENQDPPPRSLARHLSDADRLRKVIQELVDTEKSYVKDLSCLFELYLEPLQNETFLTQDEMESLFGSLPEMLEFQKVFLETLEDGISASSDFNTLETPSQFRKLLFSLGGSFLYYADHFKLYSGFCANHIKVQKVLERAKTDKAFKAFLDARNPTKQHSSTLESYLIKPVQRVLKYPLLLKELVSLTDQESEEHYHLTEALKAMEKVASHINEMQKIYEDYGTVFDQLVAEQSGTEKEVTELSMGELLMHSTVSWLNPFLSLGKARKDLELTVFVFKRAVILVYKENCKLKKKLPSNSRPAHNSTDLDPFKFRWLIPISALQVRLGNPAGTENNSIWELIHTKSEIEGRPETIFQLCCSDSESKTNIVKVIRSILRENFRRHIKCELPLEKTCKDRLVPLKNRVPVSAKLAKCVFLTVASSRSLKVLKNSSSNEWTGETGKGTLLDSDEGSLSSGTQSSGCPTAEGRQDSKSTSPGKYPHPGLADFADNLIKESDILSDEDDDHRQTVKQGSPTKDIEIQFQRLRISEDPDVHPEAEQQPGPESGEGQKGGEQPKLVRGHFCPIKRKANSTKRDRGTLLKAQIRHQSLDSQSENATIDLNSVLEREFSVQSLTSVVSEECFYETESHGKS

SEQ ID NO: 7774 - protein, 88 aa, Homo sapiens
RLRFPGQARHVWPAARMQAPHKEHLYKLLVIGDLGVGKTSIIKRYVHQNFSSHYRATIGVDFALKVLHWDPETVVRLQLWDIAGKYKH

SEQ ID NO: 7775 - protein, 123 aa, Homo sapiens
MEKEETTRELLLPNWQGSGSHGLTIAQRDDGVFVQEVTQNSPAARTGVVKEGDQIVGATIYFDNLQSGEVTQLLNTMGHHTVGLKLHRKGDRSPEPGQTWTREVFSSCSSEVVLSGDDEEYQR

SEQ ID NO: 7776 - protein, 349 aa, Homo sapiens
MKLKELERPAVQAWSPASQYPLYLATGTSAQQLDSSFSTNGTLEIFEVDFRDPSLDLKHRGVLSALSRFHKLVWGSFGSGLLESSGVIVGGGDNGMLILYNVTHILSSGKEPVIAQKQKHTGAVRALDLNPFQGNLLASGASDSEIFIWDLNNLNVPMTLGSKSQQPPEDIKALSWNRQAQHILSSAHPSGKAVVWDLRKNEPIIKVSDHSNRMHCSGLAWHPDIATQLVLCSEDDRLPVIQLWDLRFASSPLKVLESHSRGILSVSWSQADAELLLTSAKDSQILCRNLGSSEVVYKLPTQSSWCFDVQWCPRDPSVFSAASFNGWISLYSVMGRSWEVQHMRQADKV

SEQ ID NO: 7777 - protein, 962 aa, Homo sapiens
MLGSMARKKPRNTSRLPLALNPLKSKDVLAVLAERNEAIVPVGAWVEPASPGSSEIPAYTSAYLIEEELKEQLRKKQEALKHFQKQVKYRVNQQIRLRKKQQLQKSYERAQKEGSIAMQSSATHLTSKRTSVFPNNLNVAIGSSRLPPSLMPGDGIEDEENQNELFQQQAQALSETMKQARHRLASFKTVIKKKGSVFPDDGRKSFLTREEVLSRKPASTGINTGIRGELPIKVHQGLLAAVPYQNYMENQELDYEEPDYEESSSLVTDEKGKEDLFGRGQQDQQAIHSEDKNKPFSRVQKVKFKNPLFVLMEEEEQKQLHFEGLQDILPEAQDYFLEAQGDLLETQGDLTGIQSVKPDTQAVEMKVQVTEPEGQAIEPEGQPIKTETQGIMLKAQSIELEEGSIVLKTQDFLPTNQALLTKNQDVLLKDHCVLPKDQSILLKYQDQDFLPRDQHVLHKDQDILPKYQDQNFLPKDQNFLSRDQHVLPKDQDILPKYQDQNFLPKDQNFLSRDQHVLPKDQNILPKYQGQDFLPKDQDFLSRDQHVLPKDWNILPKCQDQDFLPRDQGVLPKDQNILPICQDQDFLPRDQGYLPKDQNILPICQDRDFLPRDLHVLSNDQNILPKCQDQDFLPKYQKVHFKEPYSDMTDEKGREDFSLADYQCLPPKSQDQDDIKNQQPASFMREERVREELPLDYHQYVVPKIQDQDSPREQNKHIKLPSSFEKWEIARGNTPGVPLAYDRYQSGLSTEFQAPLAFQSDVDKEEDKKERQKQYLRHRRLFMDIEREQVKEQQRQKEQKKKIEKIKKKREQECYAAEQRILRMNFHEDPYSGEKLSEILAQLQLQEIKGTREKQQREKEYLSSLCLIILYLYRYVEALRAQIQEKMQLYNITLPPLCCCGPDFWDAHPDTCANNCIFYKNHRAYTRALHSFINSCDVPGGNSTLRVAIHNFASAHRRTLKNL

SEQ ID NO: 7778 - protein, 610 aa, Homo sapiens
MESVRIEQMLSLPAEVSSDNLESAERGASAAQVDMGPHPKVAAEGPAPLPTREPEQEQSPGTSTPESKVLLTQADALASRGRIREALEVYRQLSERQQLVAEQLEQLVRCLAEKVPQGEALAPAPPDEGSTASGTVAAEETGAAAAAAATEVWDGFKCRKCHGFLSDPVSLSCGHTFCKLCLERGRAADRRCALCGVKLSALMVATGRARGARRAGQQPPPPLRVNVVLSGLLGKLFPGPARASQLRHEGNRLYRERQVEAALLKYNEAVKLAPNDHLLYSNRSQIYFTLESHENALHDAEIACKLRPMGFKAHFRKAQALATLGKVEEALREFLYCVSLDGKNKRARCEAQRDNLELPHCSSQEEAAARGDGSSLMDPAKVKGDGQQHHMKDQEEEEEKWDATSPKAASSKTGKCQEKKRKHCQIESQEETGMPNKASKQDPPTDQGDKPALSLPLASFDASDLECALCMRLFYEPVTTPCGHTFCLKCLERCLDHNAKCPLCKDGLSQCLASRKYSKNVIMEELIAKFLPEELKERRKLYEEEMEELSNLNKNVPIFVCTMAYPTVPCPLHIFEPCYRLMIRRCIETGTRQFGMCLGDPVKGHCLLCN

SEQ ID NO: 7779 - protein, 128 aa, Homo sapiens
MAVQISKKRKFVADGIFKAELNEFLTRELAEDGYSGVEVRVTPTRTEIIILATRTQNVLGEKGRRIRELTAVVQKRSVCHCPGRVSALQTPRRACCAEGLLWCAAVHHGEWGQRLRGCGVWETPRTEG

SEQ ID NO: 7780 - protein, 63 aa, Homo sapiens
MATNFLAHEKIWFDKFKYDDAERRFYEQMNGPVAGASRQENGASVILRDIARARENIQKSLAG

SEQ ID NO: 7781 - protein, 326 aa, Homo sapiens
MARRPRHSIYSSDEDDEDFEMCDHDYDGLLPKSGKRHLGKTRWTREENRTDVQCQHRWQKVLNPELIKGPWTKEEDQRVIELVQKYGPKRWSVIAKHLKGRIGKQCRERWHNHLNPEVKKTSWTEEEDRIIYQAHKRLGNRWAEIAKLLPGRTDNAIKNHWNSTMRRKVEQEGYLQESSKASQPAVATSFQKNSHLMGFAQAPPTAQLPATGQPTVNNDYSYYHISEAQNVSSHVPYPVALHVNIVNVPQPAAAAIQRHYNDEDPEKEKRIKELELLLMSTENELKGQQVLPLCGPLLNSDIFSDWAANWDGSLCFATYIVNQQRQ

SEQ ID NO: 7782 - protein, 76 aa, Homo sapiens
CEVKTDFCQTVLPYLIHDILLQDTNESWRNLLSTHVQGFFTSCLRHFSQTSRSTTPANLDSDLLQEQFLMMLSGWI

SEQ ID NO: 7783 - protein, 733 aa, Homo sapiens
MPAETDECRLNQNICGHGECVPGPPDYSCHCNPGYRSHPQHRYCVDVNECEAEPCGPGRGICMNTGGSYNCHCNRGYRLHVGAGGRSCVDLNECAKPHLCGDGGFCINFPGHYKCNCYPGYRLKASRPPVCEDIDECRDPSSCPDGKCENKPGSFKCIACQPGYRSQGGGACRDVNECAEGSPCSPGWCENLPGSFRCTCAQGYAPAPDGRSCLDVDECEAGDVCDNGICSNTPGSFQCQCLSGYHLSRDRSHCEDIDECDFPAACIGGDCINTNGSYRCLCPQGHRLVGGRKCQDIDECSQDPSLCLPHGACKNLQGSYVCVCDEGFTPTQDQHGCEEVEQPHHKKECYLNFDDTVFCDSVLATNVTQQECCCSLGAGWGDHCEIYPCPVYSSAEFHSLCPDGKGYTQDNNIVNYGIPAHRDIDECMLFGSEICKEGKCVNTQPGYECYCKQGFYYDGNLLECVDVDECLDESNCRNGVCENTRGGYRCACTPPAEYSPAQRQCLSPEEMDVDECQDPAACRPGRCVNLPGSYRCECRPPWVPGPSGRDCQLPESPAERAPERRDVCWSQRGEDGMCAGPLAGPALTFDDCCCRQGRGWGAQCRPCPPRGAGSHCPTSQSESNSFWDTSPLLLGKPPRDEDSSEEDSDECRCVSGRCVPRPGGAVCECPGGFQLDASRARCVDIDECRELNQRGLLCKSERCVNTSGSFRCVCKAGFARSRPHGACVPQRRR

SEQ ID NO: 7784 - protein, 43 aa, Homo sapiens
MVVFGYEAGTKPRDSGVVPVGTEEAPKLFCSELPLRCGFLRMG

SEQ ID NO: 7785 - protein, 226 aa, Homo sapiens
MPVEEFVAGWISGALGLVLGHPFDTVKVRLQTQTTYRGIVDCMVKIYRHESAYCLAPFDLIKVRLQNQTEPRAQPGSPPPRYQGPVHCAASIFREEGPRGLFRGAWALTLRDTPTVGIYFITYEGLCRQYTPEGQNPSSATVLVAGGFAGIASWVAATPLDMIKSRMQMDGLRRRVYQGMLDCMVSSIRQEGLGVFFRGVTINSARAFPVNAVTFLSYEYLLRWWG

SEQ ID NO: 7786 - protein, 55 aa, Homo sapiens
MAMESTATAAVAAELVSADKMSGRARWLTPVIQHFGRPRWADHEVRRSRPSWLTR

SEQ ID NO: 7787 - protein, 93 aa, Homo sapiens
MTSPEIASLSWGQMKVKGSNTTYKDCKVWPGGSRTWDWRETGTEHSPGVQPADVKEVVEKGVQTLVIGRGMSEALKGLTLPPRLECSGTIITH

SEQ ID NO: 7788 - protein, 36 aa, Homo sapiens
MESGAKGCEVVVSGKLRGQRAKSMKFVDGLMIHSGD

SEQ ID NO: 7789 - protein, 144 aa, Homo sapiens
MVSVDKHQSPSLKYTGSSMVHIPPGEPDFESSLCQTCLGEHAFQRGVLPQENESCSWETQSGCEVREPCNHANILTKPDPRTFWTNDDPAFMKQRRMGLNDFIQKIANNSYACKHPEVQSILKISQPQEPELMNANPSPPPSPS

SEQ ID NO: 7790 - protein, 350 aa, Homo sapiens
MARRPRHSIYSSDEDDEDFEMCDHDYDGLLPKSGKRHLGKTRWTREEDEKLKKLVEQNGTDDWKVIANYLPNRTDVQCQHRWQKVLNPELIKGPWTKEEDQRVIELVQKYGPKRWSVIAKHLKGRIGKQCRERWHNHLNPEVKKTSWTEEEDRIIYQAHKRLGNRWAEIAKLLPGRTDNAIKNHWNSTMRRKVEQEGYLQESSKASQPAVATSFQKNSHLMGFAQAPPTAQLPATGQPTVNNDYSYYHISEAQNVSSHVPYPVALHVNIVNVPQPAAAAIQRHYNDEDPEKEKRIKELELLLMSTENELKGQQVLPLCGPLLNSDIFSDWAANWDGSLCFATYIVNQQRQ

SEQ ID NO: 7791 - protein, 364 aa, Homo sapiens
MARRPRHSIYSSDEDDEDFEMCDHDYDGLLPKSGKRHLGKTRWTREEDEKLKKLVEQNGTDDWKVIANYLPNRTDVQCQHRWQKVLNPELIKGPWTKEEDQRVIELVQKYGPKRWSVIAKHLKGRIGKQCRERWHNHLNPEVKKTSWTEEEDRIIYQAHKRLGNRWAEIAKLLPGRTDNAIKNHWNSTMRRKVEQEGYLQESSKASQPAVATSFQKNSHLMGFAQAPPTAQLPATGQPTVNNDYSYYHISEAQNVSSHVPYPVALHVNIVNVPQPAAAAIQRHYNDEDPEKEKRIKELELLLMSTENELKGQQVLPFLNTSSNHENSDLEMPSLTSTPLIGHKLTVTTPFHRDQTVKTQKENTV

SEQ ID NO: 7792 - protein, 431 aa, Homo sapiens
MSTRSVSSSSYRRMFGGPGTASRPSSSRSYVTTSTRTYSLGSALRPSTSRSLYASSPGGVYATRSSAVRLRSSVPGVRLLQDSVDFSLADAINTEFKNTRTNEKVELQELNDRFANYIDKVRFLEQQNKILLAELEQLKGQGKSRLGDLYEEEMRELRRQVDQLTNDKARVEVERDNLAEDIMRLREKLQEEMLQREEAENTLQSFRQDVDNASLARLDLERKVESLQEEIAFLKKLHEEEIQELQAQIQEQHVQIDVDVSKPDLTAALRDVRQQYESVAAKNLQEAEEWYKSKFADLSEAANRNNDALRQAKQESTEYRRQVQSLTCEVDALKGTNESLERQMREMEENFAVEAANYQDTIGRLQDEIQNMKEEMARHLREYQDLLNVKMALDIEIATYRKLLEGEESRISLPLPNFSSLNLRGKHFISL

SEQ ID NO: 7793 - protein, 157 aa, Homo sapiens
WGEKKAVLAGDLILSAASIALARIGNTTVISILTQVIEDLVRGEFLQLGSKENENERFAHYLEKTFKKTASLIANSCKAVSVLGCPDPVVHEIAYQYGKNVGIAFQLIDDVLDFTSCSDQMGKPTSADLKLGLATGPVLFACQQVHCQGKTGSCCKH

SEQ ID NO: 7794 - protein, 1369 aa, Homo sapiens
MSLVLNDLLICCRQLEHDRATERKKEVEKFKRLIRDPETIKHLDRHSDSKQGKYLNWDAVFRFLQKYIQKETECLRIAKPNVSASTQASRQKKMQEISSLVKYFIKCANRRAPRLKCQELLNYIMDTVKDSSNGAIYGADCSNILLKDILSVRKYWCEISQQQWLELFSVYFRLYLKPSQDVHRVLVARIIHAVTKGCCSQTDGLNSKFLDFFSKAIQCARQEKSSSGLNHILAALTIFLKTLAVNFRIRVCELGDEILPTLLYIWTQHRLNDSLKEVIIELFQLQIYIHHPKGAKTQEKGAYESTKWRSILYNLYDLLVNEISHIGSRGKYSSGFRNIAVKENLIELMADICHQVFNEDTRSLEISQSYTTTQRESSDYSVPCKRKKIELGWEVIKDHLQKSQNDFDLVPWLQIATQLISKYPASLPNCELSPLLMILSQLLPQQRHGERTPYVLRCLTEVALCQDKRSNLESSQKSDLLKLWNKIWCITFRGISSEQIQAENFGLLGAIIQGSLVEVDREFWKLFTGSACRPSCPAVCCLTLALTTSIVPGTVKMGIEQNMCEVNRSFSLKESIMKWLLFYQLEGDLENSTEVPPILHSNFPHLVLEKILVSLTMKNCKAAMNFFQSVPECEHHQKDKEELSFSEVEELFLQTTFDKMDFLTIVRECGIEKHQSSIGFSVHQNLKESLDRCLLGLSEQLLNNYSSEITNSETLVRCSRLLVGVLGCYCYMGVIAEEEAYKSELFQKAKSLMQCAGESITLFKNKTNEEFRIGSLRNMMQLCTRCLSNCTKKSPNKIASGFFLRLLTSKLMNDIADICKSLASFIKKPFDRGEVESMEDDTNGNLMEVEDQSSMNLFNDYPDSSVSDANEPGESQSTIGAINPLAEEYLSKQDLLFLDMLKFLCLCVTTAQTNTVSFRAADIRRKLLMLIDSSTLEPTKSLHLHMYLMLLKELPGEEYPLPMEDVLELLKPLSNVCSLYRRDQDVCKTILNHVLHVVKNLGQSNMDSENTRDAQGQFLTVIGAFWHLTKERKYIFSVRMALVNCLKTLLEADPYSKWAILNVMGKDFPVNEVFTQFLADNHHQVRMLAAESINRLFQDTKGDSSRLLKALPLKLQQTAFENAYLKAQEGMREMSHSAENPETLDEIYNRKSVLLTLIAVVLSCSPICEKQALFALCKSVKENGLEPHLVKKVLEKVSETFGYRRLEDFMASHLDYLVLEWLNLQDTEYNLSSFPFILLNYTNIEDFYRSCYKVLIPHLVIRSHFDEVKSIANQIQEDWKSLLTDCFPKILVNILPYFAYEGTRDSGMAQQRETATKVYDMLKSENLLGKQIDHLFISNLPEIVVELLMTLHEPANSSASQSTDLCDFS

SEQ ID NO: 7795 - protein, 151 aa, Homo sapiens [sequence omitted]

SEQ ID NO: 7796 - protein, 39 aa, Homo sapiens
GYEAGTKPRDSGVVPVGTEEAPKLFCSELPLRCGFLRMG

SEQ ID NO: 7797 - protein, 146 aa, Homo sapiens
MVAMAEAEAGVAVEVRGLPPAVPDELLTLYFENRRRSGGGPVLSWQRLGCGGVLTFREPADAERVLAQADHELHGAQLSLRPAPPRAPARLLLQGLPPGTTPQRLEQHVQALLRASGLPVQPCCALASPRPDRALVQLPKPLSEAG

SEQ ID NO: 7798 - protein, 120 aa, Homo sapiens
MVCRLPVSKKTLLCSFQVLDELGRHVLLRKDCGPVDTKVPGAGEPKSAFTQGSAMISSLSQNHPDNRNETFSSVISLLNEDPLSQDLPVKMASIFKNFVITYNRTYESKEEARWRLSVFV

SEQ ID NO: 7799 - protein, 219 aa, Homo sapiens
MAQALGEDLVQPPELQDDSSSLGSDSELSGPGPYRQADRYGFIGGSSAEPGPGHPPADLIRQREMKWVEMTSHWEKTMSRRYKKVKMQCRKGIPSALRARCWPLLCGAHVCQKNSPGTYQELAEAPGDPQWMETIGRDLHRQFPLHEMFVSPQGHGQQGLLQVLKAYTLYRPEQGYCQAQGPVAAVLLMHLPPEEAFWCLVQICEVYLPGYYGPHMVRG

SEQ ID NO: 7800 - protein, 30 aa, Homo sapiens
MSVPAFIDISEEDQELRFQKRTRKVDFMLI

SEQ ID NO: 7801 - protein, 121 aa, Homo sapiens
MAASQCLCCSKFLFQRQNLACFLTNPHCGSLVNADGHGEVWTDWNNMSKFFQYGWRCTTNENTYSNRTLMGNWNQERYDLRNIVQPKPLPSQDLSESLTGSQDINLNWILPDTNAQKSQLT

SEQ ID NO: 7802 - protein, 173 aa, Homo sapiens
METWSVEQVCSWLVEKNLGELVHRFQEEEVSGAALLALNDRMVQQLVKKIGHQAVLMDLIKKYKQNTQGLKSPENPKKAALVMQTEAARDYRDEESSSPARHGEQMPSFYPAENLDNGLIDQRVLKQRRNVKQILARSKALQWTKSYVLPEFPYDVKCMLAEQKCPDHSMRIR

SEQ ID NO: 7803 - protein, 76 aa, Homo sapiens
FPFLKCPYQMFREFQLLTRTDIYKKTRHILESYSENILTSFSVVDNPINIVLQEKMKHYTDEDMLKCASVHTCVGS

SEQ ID NO: 7804 - protein, 223 aa, Homo sapiens
MTVLIKRNTTIPTKQTQTFTTYSDNQPGVLIQVYEGERAMTKDNNLLGKFELTGIPPAPRGVPQIEVTFDIDANGILNVSAVDKSTGKENKITITNDKGRLSKEDIERMVQEAEKYKAEDEKQRDKVSSKNSLESYAFNMKATVEDEKLQGKINDEDKQKILDKCNEIINWLDKNQTAEKEEFEHQQKELEKVCNPIITKLYQSAGGMPGGMPGGFPGGGAPP

SEQ ID NO: 7805 - protein, 555 aa, Homo sapiens
MARRPRHSIYSSDEDDEDFEMCDHDYDGLLPKSGKRHLGKTRWTREEDEKLKKLVEQNGTDDWKVIANYLPNRTDVQCQHRWQKVLNPELIKGPWTKEEDQRVIELVQKYGPKRWSVIAKHLKGRIGKQCRERWHNHLNPEVKKTSWTEEEDRIIYQAHKRLGNRWAEIAKLLPGRTDNAIKNHWNSTMRRKVEQEGYLQESSKASQPAVATSFQKNSHLMGFAQAPPTAQLPATGQPTVNNDYSYYHISEAQNVSSHVPYPVALHVNIVNVPQPAAAAIQRHYNDEDPEKEKRIKELELLLMSTENELKGQQVLPFLNTSSNHENSDLEMPSLTSTPLIGHKLTVTTPFHRDQTVKTQKENTVFRTPAIKRSILESSPRTPTPFKHALAAQEIKYGPLKMLPQTPSHLVEDLQDVIKQESDESGIVAEFQENGPPLLKKIKQEVESPTDKSGNFFCSHHWEGDSLNTQLFTQTSPVADAPNILTSSVLMAPASEDEDNVLKAFTVPKNRSLASPLQPCSSTWEPASCGKMEEQMTSSSQARKYVNAFSARTLVM

SEQ ID NO: 7806 - protein, 144 aa, Homo sapiens
DAISENYRIMSYFKEAELKDLLLQVGRGLRYIHSMSLVHMDIKPSNIFISRTSIPNAASEEGDEDDWASNKVMFKIGDLGHVTRISSPQVEEGDSRFLANEVLQEWYVLLVLNLFREMEINGMKSDRVDYLGYHKCFPKNLQSC

SEQ ID NO: 7807 - protein, 245 aa, Homo sapiens
TGNFFYNYMMGIEFNPRIGKWFDFKLFFNGRPGIVAWTLINLSFAAKQRELHSHVTNAMVLVNVLQAIYVIDFFWNETWYLKTIDICHDHFGWYLGWGDCVWLPYLYTLQKRTRRQGVCQRQSWGLTPGRWAPEPTLLSSPWAKHRLTPSPSPPRVCTWCTTPCSCPPRTPWASCCWAWWATTSSGWPTTRRTCSAARMGAASSGAGSPRSSSAPTHPPMGRGTTASCWCRASGAWPATSTTSAT

SEQ ID NO: 7808 - protein, 293 aa, Homo sapiens
MAELTALESLIEMGFPRGRAEKALALTGNQGIEAAMDWLMEHEDDPDVDEPLETPLGHILGREPTSSEQGGLEGSGSAAGEGKPALSEEERQEQTKRMLELVAQKQREREEREEREALERERQRRRQGQELSAARQRLQEDEMRRAAEERRREKAEEQRVREKIERDKAERAKKYGGSVGSQPPPVAPEPGPVPSSPSQEPPTKREYDQCRIQVRLPDGTSLTQTFRAREQLAAVRLYVELHRGEELGGGQDPVQLLSGFPRRAFSEADMERPLQELGLVPSAVLIVAKKCPS

SEQ ID NO: 7809 - protein, 122 aa, Homo sapiens
MLYQTINSLKTKNPKLKILLSIGGYLFGSKGFHPMVDSSTSRLEFINSIILFLRNHNFDGLDVSWIYPDQKENTHFTVLIHELAEAFQKDFTKSTKERLLLTAGVSAGRQMIDNSYQVEKLA

SEQ ID NO: 7810 - protein, 130 aa, Homo sapiens
MATNFLAHEKIWFDKFKYDDAERRFYEQMNGPVAGASRQENGASVILRDIARARENIQKSLAGSSGPGASSGTSGDHGELVVRIASLEVENQSLRGVVQELQQAISKLEARLNVLEKSSPGHRATAPQTQ

SEQ ID NO: 7811 - protein, 220 aa, Homo sapiens
MGATTMDQKSLWAGVVVLLLLQGGSAYKLVCYFTNWSQDRQEPGKFTPENIDPFLCSHLIYSFASIENNKVIIKDKSEVMLYQTINSLKTKNPKLKILLSIGGYLFGSKGFHPMVDSSTSRLEFINSIILFLRNHNFDGLDVSWIYPDQKENTHFTVLIHELAEAFQKDFTKSTKERLLLTAGVSAGRQMIDNSYQVEKLAKDLDFINLLSFDFHGSWEK

SEQ ID NO: 7812 - protein, 168 aa, Homo sapiens
MTSPEIASLSWGQMKVKGSNTTYKDCKVWPGGSRTWDWRETGTESLTLLPRLECSGAISAHCNLHLPGSCHSPASASQVAGTTGACHHTQHSPGVQPADVKEVVEKGVQTLVIGRGMSEALKVPSSTVEYLKKHGIDVRVLQTEQAVKEYNALVAQGVRVGGVFHSTC

SEQ ID NO: 7813 - protein, 275 aa, Homo sapiens
METWSVEQVCSWLVEKNLGELVHRFQEEEVSGAALLALNDRMVQQLVKKIGHQAVLMDLIKKYKQNTQGLKSPENPKKAALVMQTEAAREDEESSSPARHGEQMPSFYPAENLDNGLIDQRVLKQRRNVKQILARSKALQWTKSYVLPEFPYDVKCMLAEQKCPDHSMRIRIIEFLQADMTKYLEGSLYPSTQQYNDVVNALLQAHPFLDEDGCGFFLWKRALKDRFKYVRRPIEDDEQVIRNKCKFGHRRGQTRKSLADIRFDEIKLVQIKLSA

SEQ ID NO: 7814 - protein, 410 aa, Homo sapiens
MNLEGGGRGGEFGMSAVSCGNGKLRQWLIDQIDSGKYPGLVWENEEKSIFRIPWKHAGKQDYNREEDAALFKAWALFKGKFREGIDKPDPPTWKTRLRCALNKSNDFEELVERSQLDISDPYKVYRIVPEGAKKGAKQLTLEDPQMSMSHPYTMTTPYPSLPAQQVHNYMMPPLDRSWRDYVPDQPHPEIPYQCPMTFGPRGHHWQGPACENGCQVTGTFYACAPPESQAPGVPTEPSIRSAEALAFSDCRLHICLYYREILVKELTTSSPEGCRISHGHTYDASNLDQVLFPYPEDNGQRKNIEKLLSHLERGVVLWMAPDGLYAKRLCQSRIYWDGPLALCNDRPNKLERDQTCKLFDTQQFLSELQAFAHHGRSLPRFQVTLCFGEEFPDPQRQRKLITAHVLRSLA

SEQ ID NO: 7815 - protein, 152 aa, Homo sapiens
METLEELDWCLDQLETIQTYRSVSEMASNKFKRMLNRELTHLSEMSRSGNQVSEYISNTFLDKQNDVEIPSPTQKDREKKKKQQLMTQISGVKKLMHSSSLNNTSISRFGVNTENEDHLAKELEDLNKWGLNIFNVAGYSHNRPLTCIMYAI

SEQ ID NO: 7816 - protein, 98 aa, Homo sapiens
MQLFVRAQELHTFEVTGQETVAQIKALTTLEVAGRMLGGKVHGSLARAGKVRGQTPKVAKQEKKKKKTGRAKRRMQYNRRFVNVVPTFGKKKGPNANS

SEQ ID NO: 7817 - protein, 210 aa, Homo sapiens
METWSVEQVCSWLVEKNLGELVHRFQEEEVSGAALLALNDRMVQQLVKKIGHQAVLMDLIKKYKQNTQGLKSPENPKKAALVMQTEAARDYRDEESSSPARHGEQMPSFYPAENLDNGLIDQRVLKQRNVKQILARSKALQWTKSYVLPEFPYDVKCMLAEQKCPDHSMRIRIIEFLQADMTKYLEGSLYPSTQQYNDVVNALLQAHPFL

SEQ ID NO: 7818 - protein, 183 aa, Homo sapiens
MSCKKQRSRKHSVNEKCNMKIEHYFSPVSKEQQNNCSTSLMRMESRGDPRATTNTQAQRFHSPKKNPEDQTMPQNRTIYVTLKVNHRRNQDMKLKLTHSENSSLYMALNTLQAVRKEIETHQGQEMLVRGTEGIKEYINLGMPLSCFPEGGQVVITFSQSKSKQKEDNHIFGRQDKASTECVK

SEQ ID NO: 7819 - protein, 604 aa, Homo sapiens
MGASSPRSPEPVGPPAPGLPFCCGGSLLAVVVLLALPVAWGQCNAPEWLPFARPTNLTDEFEFPIGTYLNYECRPGYSGRPFSIICLKNSVWTGAKDRCRRKSCRNPPDPVNGMVHVIKGIQFGSQIKYSCTKGYRLIGSSSATCIISGDTVIWDNETPICDRIPCGLPPTITNGDFISTNRENFHYGSVVTYRCNPGSGGRKVFELVGEPSIYCTSNDDQVGIWSGPAPQCIIPNKCTPPNVENGILVSDNRSLFSLNEVVEFRCQPGFVMKGPRRVKCQALNKWEPELPSCSRVCQPPPDVLHAERTQRDKDNFSPGQEVFYSCEPGYDLRGAASMRCTPQGDWSPAAPTCEVKSCDDFMGQLLNGRVLFPVNLQLGAKVDFVCDEGFQLKGSSASYCVLAGMESLWNSSVPVCEQIFCPSPPVIPNGRHTGKPLEVFPFGKTVNYTCDPHPDRGTSFDLIGESTIRCTSDPQGNGVWSSPAPRCGILGHCQAPDHFLFAKLKTQTNASDFPIGTSLKYECRPEYYGRPFSITCLDNLVWSSPKDVCKRKSCKTPPDPVNGMVHVITDIQVGSRINYSCTTGSLSSPRSFSVCQVENPNQCI

SEQ ID NO: 7820 - protein, 124 aa, Homo sapiens
MRTKKMSKSVPAFLQDECKDLAAADVKKQRSDPYVKAYLLPDKGKMGKKKTLVVKKTLNPVYNEILRYKIEKQILKTQKLNLSIWHRDTFKRNSFLGEVELDLETWDWDNKQNKQLRWYPLKRK

SEQ ID NO: 7821 - protein, 178 aa, Homo sapiens
MSKGPAVGIDLGTTYSCVGVFQHGKVEIIANDQGNRTTPSYVAFTDTERLIGDAAKNQVAMNPTNTVFDAKRLIGRRFDDAVVQSDMKHWPFMVVNDAGRPKVQVEYKGETKSFYPEEVSSMVLTKMKEIAEAYLGKTVTNAVVTVPAYFNDSQRQATKDAGTIAGLNVLRIINEPTA

SEQ ID NO: 7822 - protein, 39 aa, Homo sapiens
MPPKDDKKKKDAGKSAKKDKDPVNKSGGKAKKKLWSLRD

SEQ ID NO: 7823 - protein, 43 aa, Homo sapiens
MKDRLEQLKAKQLTQDDDTDAVEIAIDNTAFMDEFFSEKPRMT

SEQ ID NO: 7824 - protein, 53 aa, Homo sapiens
MNGPEDLPKSYDYDLIIIGGGSGGLAAAKEAAQYGKKVMVLDFVTPTPLGTRW

SEQ ID NO: 7825 - protein, 169 aa, Homo sapiens
MAAIRKKLVIVGDGACGKTCLLIVFSKDQFPEVYVPTVFENYIADIEVDGKQVELALWDTAGQEDYDRLRPLSYPDTDVILMCFSIDSPDSLENIPEKWTPEVKHFCPNVPIILVGNKKDLRQDEHTRRELAKMKQEPVRSEEGRDMANRISAFGYLECSAKTKEGVRE

SEQ ID NO: 7826 - protein, 119 aa, Homo sapiens
MNVTPEVKSRGMKFAEEQLLKHGWTQGKGLGRKENGITQALRVTLKQDTHGVGHDPAKEFTNHWWNELFNKTAANLVVETGQDGVQIRSLSKETTRYNHPKPNLLYQKFVKTAQTLSRN

SEQ ID NO: 7827 - protein, 169 aa, Homo sapiens
MLYQTINSLKTKNPKLKILLSIGGYLFGSKGFHPMVDSSTSRLEFINSIILFLRNHNFDGLDVSWIYPDQKENTHFTVLIHELAEAFQKDFTKSTKERLLLTAGVSAGRQMIDNSYQVEKLAKDLDFINLLSFDFHGSWEKPLITGHNSPLSKGWQDRGPSSYYNVEYA

SEQ ID NO: 7828 - protein, 235 aa, Homo sapiens
MFRDFGEPGPSSGNGGGYGGPAQPPAAAQAAQQKFHLVPSINTMSGSQELQWMVQPHFLGPSSYPRPLTYPQYSPPQPRPGVIRALGPPPGVRRRPCEQETDKLEDEKSGLQREIEELQKQKERLELVLEAHRPICKIPEGAKEGDTGSTSGTSSPPAPCRPVPCISLSPGPVLEPEALHTPTLMTTPSLTPFTPSLVFTYPSTPEPCASAHRKSSSSSGDPSSDPLGSPTLLAL

SEQ ID NO: 7829 - protein, 316 aa, Homo sapiens
FDMVYWTGDIPAHDVWHQTRQDQLRALTTVTALVRKFLGPVPVYPAVGNHESTPVNSFPPPFIEGNHSSRWLYEAMAKAWEPWLPAEALRTLRYLSSVETQEGKRKVHIIGHIPPGHCLKSWSWNYYRIVARYENTLAAQFFGHTHVDEFEVFYDEETLSRPLAVAFLAPSATTYIGLNPGYRVYQIDGNYSGSSHVVLDHETYILNLTQANIPGAIPHWQLLYRARETYGLPNTLPTAWHNLVYRMRGDMQLFQTFWFLYHKGHPPSEPCGTPCRLATLCAQLSARADSPALCRHLMPDGSLPEAQSLWPRPLFC

SEQ ID NO: 7830 - protein, 55 aa, Homo sapiens
NPFDQDIYGREELRSPKLFYADHPFIFLVRDTQSGSLLFIGRLVRPKGDKMRDEL

SEQ ID NO: 7831 - protein, 141 aa, Homo sapiens
MDFWLWPLYFLPEMESCCVAQDGLELVALSDPPGSASQSAGITVSGALRILPEVKVEGELGGSVTIKCPLPEMHVRIYLCREMAGSGTCGTVVSTTNFIKAEYKGRVTLKQYPRKNLFLVEVTQLTESDSGVYACGAGMNT

SEQ ID NO: 7832 - protein, 158 aa, Homo sapiens
MAVQISKKRKFVADGIFKAELNEFLTRELAEDGYSGVEVRVTPTRTEIIILATRTQNVLGEKGRRIRELTAVVQKRFGFPEGSVELYAEKVATRGVLGIKVKIMLPWDPTGKIGPKKPLPDHVSIVEPKDEILPTTPISEQKGGKPEPPAMPQPVPTA

SEQ ID NO: 7833 - protein, 215 aa, Homo sapiens
MRPKTGQVGCETPEELGPGPRQRWPLLLLGLAMVAHGLLRPMVAPQSGDPDPGASVGSSRSSLRSLWGSRLLLQPSPQRADPRCWPRGFWSEPQSLCYVFGTGTKVTVLGQPKANPTVTLFPPSSEELQANKATLVCLISDFYPGAVTVAWKADGSPVKAGVETTKPSKQSNNKYAASSYLSLTPEQWKSHRSYSCQVTHEGSTVEKTVAPTECS

SEQ ID NO: 7834 - protein, 182 aa, Homo sapiens
MGATTMDQKSLWAGVVVLLLLQGGSAYKLVCYFTNWSQDRQEPGKFTPENIDPFLCSHLIYSFASIENNKVIIKDKSEVMLYQTINSLKTKNPKLKILLSIGGYLFGSKGFHPMVDSSTSRLEFINSIILFLRNHNFDGLDELAEAFQKDFTKSTKERLLLTAGVSAGRQMIDNSYQVEKLA

SEQ ID NO: 7835 - protein, 347 aa, Homo sapiens
MARRPRHSIYSSDEDDEDFEMCDHDYDGLLPKSGKRHLGKTRWTREEDEKLKKLVEQNGTDDWKVIANYLPNRTDVQCQHRWQKVLNPELIKGPWTKEEDQRVIELVQKYGPKRWSVIAKHLKGRIGKQCRERWHNHLNPEVKKTSWTEEEDRIIYQAHKRLGNRWAEIAKLLPGRTDNAIKNHWNSTMRRKVEQEGYLQESSKASQPAVATSFQKNSHLMGFAQAPPTAQLPATGQPTVNNDYSYYHISEAQNVSSHVPYPVALHVNIVNVPQPAAAAIQRHYNDEDPEKEKRIKELELLLMSTENELKGQQLCGPLLNSDIFSDWAANWDGSLCFATYIVNQQRQ

SEQ ID NO: 7836 - protein, 111 aa, Homo sapiens
NFQQPADAERALDTMNFDVIKGKPIRIMWSQRDPSLRKSGVGNVFIKNLDKSIDNKALYDTFSAFGNILSCKVVCDENGSKGYAFVHFETQEAADKAIEKMNGMLLNDRKV

SEQ ID NO: 7837 - protein, 80 aa, Homo sapiens
MTRGFAPILPVEFHKMGSFRRPRPRFMSSPVLSDLPRFQAARQALQLSSSSAWNSVQTAVINVFKGGGLQSNELYALNEN

SEQ ID NO: 7838 - protein, 115 aa, Homo sapiens
MGEPQGSMRILVTGGSGLVGKAIQKVVADGAGLPGEDWVFVSSKDADLTWLAWPGCAWLCSWKNKHPPISSWKPAPSYQPGPGATLPFDCPSCHSPTQFLHLAPNPGVLVPSRAS

SEQ ID NO: 7839 - protein, 67 aa, Homo sapiens
LIQTMHSNLAGKITGMLLEIDNSELLHMLESPESLRSKVDEAVAVLQAHHAKKEAAQKVGAVAAATS

SEQ ID NO: 7840 - protein, 267 aa, Homo sapiens
MRVAAATAAAGAGPAMAVWTRATKAGLVELLLRERWVRVVAELSGESLSLTGDAAAAELEPALGPAAAAFNGLPNGGGAGDSLPGSPSRGLGPPSPPAPPRGPAGEAGASPPVRRVRVVKQEAGGLGISIKGGRENRMPILISKIFPGLAADQSRALRLGDAILSVNGTDLRQATHDQAVQALKRAGKEVLLEVKFIREVTPYIKKPSLVSDLPWEGAAPQSPSFSGSEDSGSPKHQNSTKDRKIIPLKMCFAARNLSMPDLENRQN

SEQ ID NO: 7841 - protein, 148 aa, Homo sapiens
MGRVIRGQRKGAGSVFRAHVKHRKGAARLRAVDFAERHGYIKGIVKKVISSANRAVVGVVAGGGRIDKPILKAGRAYHKYKAKRNCWPRVRGVAMNPVEHPFGGGNHQHIGKPSTIRRDAPAGRKVGLIAARRTGRLRGTKTVQEKEN

SEQ ID NO: 7842 - protein, 307 aa, Homo sapiens
TIQLLRKFLKNHVIEDIKGRWGSENVDDNNQLFRFPATSPLKTLPRRTPKRHGLHLSQENGEKIKHEIINEDQENAIDNRELSQEDVEEVWRYVILIYLQTILGVPSLEEVINPKQVIPQYIMYNMANTSKRGVVILQNKSDDLPHWVLSAMKCLANWPRSNDMNNPTYVGFERDVFRTIADYFLDLPEPLLTFEYYELFVNILGNFKDFRSSIPVVCGYITVSDRSSGIHKIQDDPQSSKFLHLNNLNSFKSTECLLLSLLHREKNKEESDSTERLQISNPGFQERCAKKMQLVNLRNRRACCNLI

SEQ ID NO: 7843 - protein, 221 aa, Homo sapiens
METLSFPRYNVAEIVIHIRNKILTGADGKNLTKNDLYPNPKPEVLHMIYMRALQIVYGIRLEHFYMMPVNSEVMYPHLMEGFLPFSNLVTHLDSFLPICRVNDFETADILCPKAKRTSRFLSGIINFIHFREACRETYMEFLWQYKSSADKMQQLNAAHQEALMKLERLDSVPVEEQEEFKQLSDGIQELQQSLNQDFHQKTCCKREIPKRSQIFQRKPSV

SEQ ID NO: 7844 - protein, 32 aa, Homo sapiens
FVADGIFKAELNEFLTRELAEDGYSGVERRPC

SEQ ID NO: 7845 - protein, 262 aa, Homo sapiens
MATNFLAHEKIWFDKFKYDDAERRFYEQMNGPVAGASRQENGASVILRDIARARENIQKSLAGSSGPGASSGTSGDHVVQELQQAISKLEARLNVLEKSSPGHRATAPQTQHVSPMRQVEPPAKKPATPAEDDEDDDIDLFGSDNEEEDKEAAQLREERLRQYAEKKAKKPALVAKSSILLDVKPWDDETDMAQLEACVRSIQLDGLVWGASKLVPVGYGIRKLQIQCVVEDDKVGTDLLEEEITKFEEHVQSVDIAAFNKI

SEQ ID NO: 7846 - protein, 100 aa, Homo sapiens
MAMQMQLEANADTSVEEESFGPQPISRLEQCGINANDVKKLEEAGFHTVEAVAYAPKKELINIKGISEAKADKILVELRLDLSQKCLENSELGRPRSVIR

SEQ ID NO: 7847 - protein, 186 aa, Homo sapiens
MELSCPGSRCPVQEQRARWERKRACTARELLETERRYQEQLGLVATYFLGILKAKGTLRPPERQALFGSWELIYGASQELLPYLEGGCWGQGLEGFCRHLELYNQFAANSERSQTTLQEQLKKNKGFRRFVRLQEGRPEFGGLQLQDLLPLPLQRLQQYENLVVALAENTGPNSPDHQQLTPVLPS

SEQ ID NO: 7848 - protein, 261 aa, Homo sapiens
MFVNLGWQGMGQGWTQGSQLKGARGRHMQDRERKTGGFVLEVTQLPLAEALKVEGEADPQRTVECELEGVGLAHVSVLFQIRGSRARALPDRALVNCQYSSATFSTGERKRRPHGDRKSCEMGLQLRQTFEAAILTQLHPRSQIDIYVQVLQADGGTYAACVNAATLAVLDAGIPMRDFVCACSAGFVDGTALADLSHVEEAAGGPQLALALLPASGQIALLEMDARLHEDHLERVLEAAAQAARDVHTLLDRVVRQHVRE

SEQ ID NO: 7849 - protein, 170 aa, Homo sapiens
FVADGIFKAELNEFLTRELAEDGYSGVEVRVTPTRTEIIILATRACYGVLRFIMESGAKGCEVVVSGKLRGQRAKSMKFVDGLMIHSGDPVNYYVDTAVRHVLLRQGVLGIKVKIMLPWDPTGKIGPKKPLPDHVSIVEPKDEILPTTPISEQKGGKPEPPAMPQPVPTA

SEQ ID NO: 7850 - protein, 1588 aa, Homo sapiens
MEACLKEELPSPVELEESLRNGVLLAKLGHCFAPSVVPLKKIYDVEQLRYQATGLHFRHTDNINFWLSAIAHIGLPSTFFPETTDIYDKKNMPRVVYCIHALSLFLFRLGLAPQIHDLYGKVKFTAEELSNMASELAKYGLQLPAFSKIGGILANELSVDEAAVHAAVLAINEAVERGVVEDTLAALQNPSALLENLREPLAAVYQEMLAQAKMEKAANARNHDDRESQDIYDHYLTQAEIQGNINHVNVHGALEVVDDALERQSPEALLKALQDPALALRGVRRDFADWYLEQLNSDREQKAQELGLVELLEKEEVQAGVAAANTKGDQEQAMLHAVQRINKAIRRRVAADTVKELMCPEAQLPPVYPVASSMYQLELAVLQQQQGELGQEELFVAVEMLSAVVLINRALEARDASGFWSSLVNPATGLAEVEGENAQRYFDALLKLRQERGMGEDFLSWNDLQATVSQVNAQTQEETDRVLAVSLINEALDKGSPEKTLSALLLPAAGLDDVSLPVAPRYHLLLVAAKRQKAQVTGDPGAVLWLEEIRQGVVRANQDTNTAQRMALGVAAINQAIKEGKAAQTERVLRNPAVALRGVVPDCANGYQRALESAMAKKQRPADTAFWVQHDMKDGTAYYFHLQTFQGIWEQPPGCPLNTSHLTREEIQSAVTKVTAAYDRQQLWKANVGFVIQLQARLRGFLVRQKFAEHSHFLRTWLPAVIKIQAHWRGYRQRKIYLEWLQYFKANLDAIIKIQAWARMWAARRQYLRRLHYFQKNVNSIVKIQAFFRARKAQDDYRILVHAPHPPLSVVRRFAHLLNQSQQDFLAEAELLKLQEEVVRKIRSNQQLEQDLNIMDIKIGLLVKNRITLQEVVSHCKKLTKRNKEQLSDMMVLDKQKGLKSLSKEKRQKLEAYQHLFYLLQTQPIYLAKLIFQMPQNKTTKFMEAVIFSLYNYASSRREAYLLLQLFKTALQEEIKSKVEQPQDVVTGNPTVVRLVVRFYRNGRGQSALQEILGKVIQDVLEDKVLSVHTDPVHLYKNWINQTEAQTGQRSHLPYDVTPEQALSHPEVQRRLDIALRNLLAMTDKFLLAITSSVDQIPYGMRYVAKVLKATLAEKFPDATDSEVYKVVGNLLYYRFLNPAVVAPDAFDIVAMAAGGALAAPQRHALGAVAQLLQHAAAGKAFSGQSQHLRVLNDYLEETHLKFRKFIHRACQVPEPEERFAVDEYSDMVAVAKPMVYITVGELVNTHRLLLEHQDCIAPDHQDPLHELLEDLGELPTIPDLIGESIAADGHTDLSKLEVSLTLTNKFEGLEADADDSNTRSLLLSTKQLLADIIQFHPGDTLKEILSLSASREQEAAHKQLMSRRQACTAQTPEPLRRHRSLTAHSLLPLAEKQRRVLRNLRRLEALGLVSARNGYQGLVDELAKDIRNQHRHRHRRKAELVKLQATLQGLSTKTTFYEEQGDYYSQYIRACLDHLAPDSKSSGKGKKQPSLHYTAAQLLEKGVLVEIEDLPASHFRNVIFDITPGDEAGKFEVNAKFLGVDMERFQLHYQDLLQLQYEGVAVMKLFNKAKVNVNLLIFLLNKKFLRK

SEQ ID NO: 7851 - protein, 605 aa, Homo sapiens
MARRPRHSIYSSDEDDEDFEMCDHDYDGLLPKSGKRHLGKTRWTREEDEKLKKLVEQNGTDDWKVIANYLPNRTDVQCQHRWQKVLNPELIKGPWTKEEDQRVIELVQKYGPKRWSVIAKHLKGRIGKQCRERWHNHLNPEVKKTSWTEEEDRIIYQAHKRLGNRWAEIAKLLPGRTDNAIKNHWNSTMRRKVEQEGYLQESSKASQPAVATSFQKNSHLMGFAQAPPTAQLPATGQPTVNNDYSYYHISEAQNVSSHVPYPVALHVNIVNVPQPAAAAIQTQNHTCSYPGWHSTTIADHTRPHGDSAPVSCLGEHHSTPSLPADPGSLPEESASPARCMIVHQGTILDNVKNLLEFAETLQFIDSFLNTSSNHENSDLEMPSLTSTPLIGHKLTVTTPFHRDQTVKTQKENTVFRTPAIKRSILESSPRTPTPFKHALAAQEIKYGPLKMLPQTPSHLVEDLQDVIKQESDESGIVAEFQENGPPLLKKIKQEVESPTDKSGNFFCSHHWEGDSLNTQLFTQTSPVADAPNILTSSVLMAPASEDEDNVLKAFTVPKNRSLASPLQPCSSTWEPASCGKMEEQMTSSSQARKYVNAFSARTLVM

SEQ ID NO: 7852 - protein, 128 aa, Homo sapiens
RKAEAERAQRMAKERQEQEEARRKLEEQARAKTQTPPVSPAPQPTEERLPSSPVYEDAASFKAELSYRGPVSGTEPEPVYSMEAADYREASSQQGLAYATEAVYESAEAPGHYPAALSWLSFRGQHLR

SEQ ID NO: 7853 - protein, 358 aa, Homo sapiens
MPGCELPVGTCPDMCPAAERAQREREHRLHRLEVVPGCRQDPPRADPQRAVKEYSRPAAGKPRPPPSQLRPPSVLLATVRYLAGEVAESADIARAEVASFVADRLRAVLLDLALQGAGDAEAAVVLEAALATLLTVVARLGPDAARGPADPVLLQAQVQEGFGSLRRCYARGAGPHPRQPAFQGLFLLYNLGSVEALHEVLQLPAALRACPPLRKALAVDAAFREGNAARLFRLLQTLPYLPSCAVQCHVGHARREALARFARAFSTPKGQTLPLGFMVNLLALDGLREARDLCQAHGLPLDGEERVVFLRGRYVEEGLPPASTCKVLVESKLRGRTLEEVVMAEEEDEGTDRPGSPA

SEQ ID NO: 7854 - protein, 172 aa, Homo sapiens
MRLDSEAASHAHSQAKTEEQIAAEEAWNETEKVWLVHRDGFSLASQLKSEELNLPEGKVRVKLDHDGAILDVDEDDVEKANAPSCDRLEDLASLVYLNESSVLHTLRQRYGASLLHTYAGPSLLVLGPRGAPAVYSEKVMHMFKGCRREDMAPHIYAVAQTAYRAMLMSRQD

SEQ ID NO: 7855 - protein, 100 aa, Homo sapiens
MSKSVPAFLQDEVSGSVMSVYSGDFGNLEVKGNIQFAIEYVESLKELHVFVAQCKDLAAADVKKQRSDPWSFTVVAQAGTISAHSNLRLPGSSDSPASAS

SEQ ID NO: 7856 - protein, 102 aa, Homo sapiens
MPMWAGGVGSPRRGMAPASTDDLFARKLRQPARPPLTPHTFEPRPVRGPLLRSGSDAGEARPPTPASPRARAHSHEEASRPAATSTRLFTDPLALLGLPAEE

SEQ ID NO: 7857 - protein, 63 aa, Homo sapiens
MSEEIITPVYCTGVSAQVQKQRARELGLGRHENAIKYLGQDYEQLRVRCLQSGTLFRDEAFPP

SEQ ID NO: 7858 - protein, 299 aa, Homo sapiens
MLGVCQTLKQYFLGILKAKGTLRPPERQALFGSWELIYGASQELLPYLEGGCWGQGLEGFCRHLELYNQFAANSERSQTTLQEQLKKNKGFRRFVRLQEGRPEFGGLQLQDLLPLPLQRLQQYENLVVALAENTGPNSPDHQQLTRAARLISETAQRVHTIGQKQKNDQHLRRVQALLSGRQAKGLTSGRWFLRQGWLLVVPPHGEPRPRMFFLFTDVLLMAKPRPPLHLLRSGTFACKALYPMAQCHLSRVFGHSGGPCGGLLSLSFPHEKLLLMSTDQEELSRWYHSLTWAISSQKN

SEQ ID NO: 7859 - protein, 168 aa, Homo sapiens
MSKGPAVGIDLGTTYSCVGVFQHGKVEIIANDQGNRTTPSYVAFTDTERLIGDAAKNQVAMNPTNTVFETKSFYPEEVSSMVLTKMKEIAEAYLGKTVTNAVVTVPAYFNDSQRQATKDAGTIAGLNVLRIINEPTAAAIAYGLDKKVGAERNVLIFDLGGGTFDVSI

SEQ ID NO: 7860 - protein, 714 aa, Homo sapiens
MLETYSHLLSVGYQVPKPEVVMLEQGKEPWALQGERPRHSCPGEKLWDHNQHRKIIGYKPASSQDQKIYSGEKSYECAEFGKSFTWKSQFKVHLKVPTGEKLYVCIECGRAFVQKPEFITHQKTHMREKPYKCNECGKSFFQVSSLFRHHRIHTGEKLYECSECGKGFPYNSDLSIHEKIHTGERHHECTDCGKAFTQKSTLKIHQKIHTGERSYICIECGQAFIQKTQLIAHRRIHSGEKPYECNNCGKSFISKSQLQVHQRVHTRVKPYICTEYGKVFSNNSNLITHEKIQSREKSSICTECGKAFTYRSELIIHQRIHTGEKPYECSDCGRAFTQKSALTVHQRIHTGEKSYICMKCGLAFIRKAHLITHQIIHTGEKPYKCGHCGKLFTSKSQLHVHKRIHTGEKPYVCNKCGKAFTNRSNLITHQKTHTGEKSYICSKCGKAFTQRSDLITHQRIHTGEKPYECNTCGKAFTQKSNLNIHQKIHTGERQYECHECGKAFNQKSILIVHQKIHTGEKPYVCTECGRAFIRKSNFITHQRIHTGEKPYECSDCGKSFTSKSQLLVHQPVHTGEKPYVCAECGKAFSGRSNLSKHQKTHTGEKPYICSECGKTFRQKSELITHHRIHTGEKPYECSDCGKSFTKKSQLQVHQRIHTGEKPYVCAECGKAFSNRSNLNKHQTTHTGDKPYKCGICGKGFVQKSVFSVHQSSHA

SEQ ID NO: 7861 - protein, 85 aa, Homo sapiens
MEKEETTRELLLPNWQGSGSHGLTIAQRDDGVFVQEVTQNSPAARTGVVKEGDQIVGATIYFDNLQSGEVTQLLNTMGHHTVGLK

SEQ ID NO: 7862 - protein, 192 aa, Homo sapiens
DHHTEEDIDKSANSVLIKNLSRTPSSCSSSLDSIKADGTSLDFSTYRSSQMESQFLRDTICEESLREFTVNTPPTPEDLMLSQYVYRPKIQIYREDCEARRQKIEELKLSASNQDKLLVDINKNLWEKMRHCSDKELKAFGIYLNKIKSCFTKMTKVFTHQGKVALYGKLVQSAQNEREKLQIKIDEMDKIL

SEQ ID NO: 7863 - protein, 235 aa, Homo sapiens
MADDAGAAGGPGGPGGPGMGNRGGFRGGFGSGIRGRGRGRGRGRGRGRGARGGKAEDKEWMPVTKLGRLVKDMKIKSLEEIYLFSLPIKESEIIDFFLGASLKDEVLKIMPVQKQTRAGQRTRFKVTGRCGSVLVRLIPAPRGTGIVSAPVPKKLLMMAGIDDCYTSARGCTATLGNFAKATFDAISKTYSYLTPDLWKETVFTKSPYQEFTDHLVKTHTRVSVQRTQAPAVATT

SEQ ID NO: 7864 - protein, 36 aa, Homo sapiens
MAQLEACVRSIQLDGLVWGASKLVPVGYGIRKLQIQ

SEQ ID NO: 7865 - protein, 417 aa, Homo sapiens
METLSFPRYNVAEIVIHIRNKILTGADGKNLTKNDLYPNPKPEVLHMIYMRALQIVYGIRLEHFYMMPVNSEVMYPHLMEGFLPFSNLVTHLDSFLPICRVNDFETADILCPKAKRTSRFLSGIINFIHFREACRETYMEFLWQYKSSADKMQQLNAAHQEALMKLERLDSVPVEEQEEFKQLSDGIQELQQSLNQDFHQKTIVLQEGNSQKKSNISEKTKRLNELKLSVVSLKEIQESLKTKIVDSPEKLKNYKEKMKDTVQKLKNARSLNLEDQIESDESELKKLKTEENSFKRLMIVKKEKLATAQFKINKKHEDVKQYKRTVIEDCNKVQEKRGAVYERVTTINQEIQKIKLGIQQLKDAAEREKLKSQEIFLNLKTALEKYHDGIEKAAEDSYAKIDEKTAELKRKMFKMST

SEQ ID NO: 7866 - protein, 143 aa, Homo sapiens
MNVTPEVKSRGMKFAEEQLLKHGWTQGKGLGRKENGITQALRVTLKQDTHGVGHDPAKEFTNHWWNELFNKTAANLVVETGQDGVQIRSLSKETTRYNHPKPNLLYQKFVKWDPVTSLAVAYLDCPDPQQELRSSGSVDPAIC

SEQ ID NO: 7867 - protein, 103 aa, Homo sapiens
MARRPRHSIYSSDEDDEDFEMCDHDYDGLLPKSGKRHLGKTRWTREEDEKLKKLVEQNGTDDWKVIANYLPNRTDVQCQHRWQKVLNPELIKGPWTKEEDQRN

SEQ ID NO: 7868 - protein, 166 aa, Homo sapiens
MATNFLAHEKIWFDKFKYDDAERRFYEQMNGPVAGASRQENGASVILRDIARARENIQKSLAGSSGPGASSGTSGDHGELVVRIASLEVENQSLRGVVQELQQAISKLEARLNVLEKSSPGHRATAPQTQHVSPMRQVEPPAKKPATPAEDDEDDDIDLFGSDNEE

SEQ ID NO: 7869 - protein, 467 aa, Homo sapiens
MVHSSMGAPEIRMSKPLEAEKQGLDSPSEHTDTERNGPDTNHQNPQNKTSPFSVSPTGPSTKIKAEDPSGDSAPAAPLPPQPAQPHLPQAQLMLTGSQLAGDIQQLLQLQQLVLVPGHHLQPPAQFLLPQAQQSQPGLLPTPNLFQLPQQTQGALLTSQPRAGLPTQAVTRPTLPDPHLSHPQPPKCLEPPSHPEEPSDLEELEQFARTFKQRRIKLGFTQGDVGLAMGKLYGNDFSQTTISRFEALNLSFKNMCKLKPLLEKWLNDAETMSVDSSLPSPNQLSSPSLGFDGLPGRRRKKRTSIETNVRFALEKSFLANQKPTSEEILLIAEQLHMEKEVIRVWFCNRRQKEKRINPCSAAPMLPSPGKPASYSPHMVTPQGGAGTLPLSQASSSLSTTVTTLSSAVGTLHPSRTAGGGGGGGGAAPPLNSIPSVTPPPPATTNSTNPSPQGSHSAIGLSGLNPSTG

SEQ ID NO: 7870 - protein, 160 aa, Homo sapiens
MSKSVPAFLQDEVSGSVMSVYSGDFGNLEVKGNIQFAIEYVESLKELHVFVAQCKDLAAADVKKQRSDPYVKAYLLPDKGKMGKKKTLVVKKTLNPVYNEILRYKIEKQILKTQKLNLSIWHRDTFKRNSFLGEVELDLETWDWDNKQNKQLRWYPLKRK

SEQ ID NO: 7871 - protein, 2028 aa, Homo sapiens
MGNSLGCFKEPKESIAIPEKAPISPKKRVRFKRRWRGKKIPTPEASHQEETSEGTGVIEETETLTKLTESLQKEDGVGGVEHTPPDILLPGDSAPNSRVVDRGMIVQVKERFQGEVQTAHLLLENESSVAGGVWDSLEEGMTVIAHLLDNPAERNCEKSVSQLVEFPRTASCSSRAVLLPLQGETAVEKGNIQRGFRSCALPRTDYPTDKGNQEQFSEGWSVEEGTKSVSGAPQTASWIIECSVSSLLLDQPGGQRRTEPSHVGQVPPQDSRLPTSQSDLSISGVTVSILPSSSGYGSDGPHIHGIQPKDTEPEKSSTSFSEEDGTLSLEISDIYISGESGDMSAKEKLLLWTQKVTAGYTGIKCTNFSSCWSDGKMFNALIHRYRPDLVDMERVQIQSNRENLEQAFEVAERLGVTRLLDAEDVDVPSPDEKSVITYVSSIYDAFPKVPEGGEGISATEVDSRWQEYQSRVDSLIPWIKQHTILMSDKTFPQNPVELKALYNQYIHFKETEILAKEREKGRIEELYKLLEVWIEFGRIKLPQGYHPNDVEEEWGKLIIEMLEREKSLRPAVERLELLLQIANKIQNGALNCEEKLTLAKNTLQADAAHLESGQPVQCESDVIMYIQECEGLIRQLQVDLQILRDENYYQLEELAFRVMRLQDELVTLRLECTNLYRKGHFTSLELVPPSTLTTTHLKAEPLTKATHSSSTSWFRKPMTRAELVAISSSEDEGNLRFVYELLSWVEEMQMKLERAEWGNDLPSVELQLETQQHIHTSVEELGSSVKEARLYEGKMSQNFHTSYAETLGKLETQYCKLKETSSFRMRHLQSLHKFVSRATAELIWLNEKEEEELAYDWSDNNSNISAKRNYFSELTMELEEKQDVFRSLQDTAELLSLENHPAKQTVEAYSAAVQSQLQWMKQLCLCVEQHVKENTAYFQFFSDARELESFLRNLQDSIKRKYSCDHNTSLSRLEDLLQDSMDEKEQLIQSKSSVASLVGRSKTIVQLKPRSPDHVLKNTISVKAVCDYRQIEITICKNDECVLEDNSQRTKWKVISPTGNEAMVPSVCFLIPPPNKDAIEMASRVEQSYQKVMALWHQLHVNTKSLISWNYLRKDLDLVQTWNLEKLRSSAPGECHQIMKNLQAHYEDFLQDSRDSVLFSVADRLRLEEEVEACKARFQHLMKSMENEDKEETVAKMYISELKNIRLRLEEYEQRVVKRIQSLASSRTDRDAWQDNALRIAEQEHTQEDLQQLRSDLDAVSMKCDSFLHQSPSSSSVPTLRSELNLLVEKMDHVYGLSTVYLNKLKTVDVIVRSIQDAELLVKGYEIKLSQEEVVLADLSALEAHWSTLRHWLSDVKDKNSVFSVLDEEIAKAKVVAEQMSRLTPERNLDLERYQEKGSQLQERWHRVIAQLEIRQSELESIQEVLGDYRACHGTLIKWIEETTAQQEMMKPGQAEDSRVLSEQLSQQTALFAEIERNQTKLDQCQKFSQQYSTIVKDYELQLMTYKAFVESQQKSPGKRRRMLSSSDAITQEFMDLRTRYTALVTLTTQHVKYISDALRRLEEEEKVVEEEKQEHVEKVKELLGWVSTLARNTQGKATSSETKESTDIEKAILEQQVLSEELTTKKEQVSEAIKTSQIFLAKHGHKLSEKEKKQISEQLNALNKAYHDLCDGSANQLQQLQSQLAHQTEQKTLQKQQNTCHQQLEDLCSWVGQAERALAGHQGRTTQQDLSALQKNQSDLKDLQDDIQNRATSFATVVKDIEGFMEENQTKLSPRELTALREKLHQAKEQYEALQEETRVAQKELEEAVTSALQQETEKSKAAKELAENKKKIDALLDWVTSVGSSGGQLLTNLPGMEQLSGASLEKGALDTTDGYMGVNQAPEKLDKQCEMMKARHQELLSQQQNFILATQSAQAFLDQHGHNLTPEEQQMLQQKLGELKEQYSTSLAQSEAELKQVQTLQDELQKFLQDHKEFESWLERSEKELENMHKGGSSPETLPSLLKRQGSFSEDVISHKGDLRFVTISG

SEQ ID NO: 7872 - protein, 122 aa, Homo sapiens
VADGIFKAELNEFLTRELAEDGYSGVEVRVTPTRTEIIILATRTQNVLGEKGRRIRELTAVVQKRFGFPEGSVELYAEKVATRGLCAIAQAESLRYKLLGGLAVRRCAGHQGEDHAALGPNW

SEQ ID NO: 7873 - protein, 35 aa, Homo sapiens
MATNFLAHEKIWFDKFKYDDAERRFYEQMNGPVAG

SEQ ID NO: 7874 - protein, 41 aa, Homo sapiens
KTRKLRGHVSHGHGRIGKHRKHPGGRGNAGGLHHHRINFDK

SEQ ID NO: 7875 - protein, 1701 aa, Homo sapiens
MGNSDSQYTLQGSKNHSNTITGAKQIPCSLKIRGIHAKEEKSLHGWGHGSNGAGYKSRSLARSCLSHFKSNQPYASRLGGPTCKVSRGVAYSTHRTNAPGKDFQGISAAFSTENGFHSVGHELADNHITSRDCNGHLLNCYGRNESIASTPPGEDRKSPRVLIKTLGKLDGCLRVEFHNGGNPSKVPAEDCSEPVQLLRYSPTLASETSPVPEARRGSSADSLPSHRPSPTDSRLRSSKGSSLSSESSWYDSPWGNAGELSEAEGSFLAPGMPDPSLHASFPPGDAKKPFNQSSSLSSLRELYKDANLGSLSPSGIRLSDEYMGTHASLSNRVSFASDIDVPSRVAHGDPIQYSSFTLPCRKPKAFVEDTAKKDSLKARMRRISDWTGSLSRKKRKLQEPRSKEGSDYFDSRSDGLNTDVQGSSQASAFLWSGGSTQILSQRSESTHAIGSDPLRQNIYENFMRELEMSRTNTENIETSTETAESSSESLSSLEQLDLLFEKEQGVVRKAGWLFFKPLVTVQKERKLELVARRKWKQYWVTLKGCTLLFYETYGKNSMDQSSAPRCALFAEDSIVQSVPEHPKKENVFCLSNSFGDVYLFQATSQTDLENWVTAVHSACASLFAKKHGKEDTLRLLKNQTKNLLQKIDMDSKMKKMAELQLSVVSDPKNRKAIENQIQQWEQNLEKFHMDLFRMRCYLASLQGGELPNPKSLLAAASRPSKLALGRLGILSVSSFHALVCSRDDSALRKRTLSLTQRGRNKKGIFSSLKGLDTLARKGKEKRPSITQVDELLHIYGSTVDGVPRDNAWEIQTYVHFQDNHGVTVGIKPEHRVEDILTLACKMRQLEPSHYGLQLRKLVDDNVEYCIPAPYEYMQQQVYDEIEVFPLNVYDVQLTKTGSVCDFGFAVTAQVDERQHLSRIFISDVLPDGLAYGEGLRKGNEIMTLNGEAVSDLDLKQMEALFSEKSVGLTLIARPPDTKATLCTSWSDSDLFSRDQKSLLPPPNQSQLLEEFLDNFKKNTANDFSNVPDITTGLKRSQTDGTLDQVSHREKMEQTFRSAEQITALCRSFNDSQANGMEGPRENQDPPPRSLARHLSDADRLRKVIQELVDTEKSYVKDLSCLFELYLEPLQNETFLTQDEMESLFGSLPEMLEFQKVFLETLEDGISASSDFNTLETPSQFRKLLFSLGGSFLYYADHFKLYSGFCANHIKVQKVLERAKTDKAFKAFLDARNPTKQHSSTLESYLIKPVQRVLKYPLLLKELVSLTDQESEEHYHLTEALKAMEKVASHINEMQKIYEDYGTVFDQLVAEQSGTEKEVTELSMGELLMHSTVSWLNPFLSLGKARKDLELTVFVFKRAVILVYKENCKLKKKLPSNSRPAHNSTDLDPFKFRWLIPISALQVRLGNPAGTENNSIWELIHTKSEIEGRPETIFQLCCSDSESKTNIVKVIRSILRENFRRHIKCELPLEKTCKDRLVPLKNRVPVSAKLASSRSLKVLKNSSSNEWTGETGKGTLLDSDEGSLSSGTQSSGCPTAEGRQDSKSTSPGKYPHPGLADFADNLIKESDILSDEDDDHRQTVKQGSPTKDIEIQFQRLRISEDPDVHPEAEQQPGPESGEGQKGGEQPKLVRGHFCPIKRKANSTKRDRGTLLKAQIRHQSLDSQSENATIDLNSVLEREFSVQSLTSVVSEECFYETESHGKS

SEQ ID NO: 7876 - protein, 500 aa, Homo sapiens
MSKGPAVGIDLGTTYSCVGVFQHGKVEIIANDQGNRTTPSYVAFTDTERLIGDAAKNQVAMNPTNTVFDAKRLIGRRFDDAVVQSDMKHWPFMVVNDAGRPKHKKDISENKRAVRRLRTACERAKRTLSSSTQASIEIDSLYEGIDFYTSITRARFEELNADLFRGTLDPVEKALRDAKLDKSQIHDIVLVGGSTRIPKIQKLLQDFFNGKELNKSINPDEAVAYGAAVQAAILSGDKSENVQDLLLLDVTPLSLGIETAGGVMTVLIKRNTTIPTKQTQTFTTYSDNQPGVLIQVYEGERAMTKDNNLLGKFELTGIPPAPRGVPQIEVTFDIDANGILNVSAVDKSTGKENKITITNDKGRLSKEDIERMVQEAEKYKAEDEKQRDKVSSKNSLESYAFNMKATVEDEKLQGKINDEDKQKILDKCNEIINWLDKNQTAEKEEFEHQQKELEKVCNPIITKLYQSAGGMPGGMPGGFPGGGAPPSGGASSGPTIEEVD

SEQ ID NO: 7877 - protein, 228 aa, Homo sapiens
MTDQTYCDRLVQDTPFLTGHGRLSEQQVDRIILQLNRYYPQILTNKEAEKFRNPKASLRVRLCDLLSHLQRSGERDCQEFYRALYIHAQPLHSRLPSRHALRKFHITNHACLVLARGGHPSLPLMAWMSSMTTQVCCSPGLASPLASAPPQRPPSGPEGRVWQAQAVQMLVSVSHFLPLPPSLSHGSFHTAWGILYVHSCPSFSNLIPRGSLHVCVDSNLVPTAAWRS

SEQ ID NO: 7878 - protein, 143 aa, Homo sapiens
METLEELDWCLDQLETIQTYRSVSEMASNKFKRMLNRELTHLSEMSRSGNQVSEYISNTFLDKQNDVEIPSPTQKDREKKKKQQLMTQISGVKKLMHSSSLNNTSISRFGVNTENEDHLAKELEDLNKWGLNIFNVAGYSHNR

SEQ ID NO: 7879 - protein, 91 aa, Homo sapiens
MAAKQPPPLMKKHSQTDLVSRLKTRKILGVGGEDDDGEVHRSKGLAVRLCCALLRHCHHGISLIMWNALYTAEKVIIRWTLLTEACYFGVQ

SEQ ID NO: 7880 - protein, 106 aa, Homo sapiens
MEDDIDKIKPSESNVTILGRFDYSQCDIWYMRFSMDFWQKMLALGNQVGKLYVWDLEVEDPHKAKCTTLTHHKCGAAIRQTSFSRDSSILIAVCDDASIWRWDRLR

SEQ ID NO: 7881 - protein, 139 aa, Homo sapiens
MENEKENLFCEPHKRGLMKTPLKESTTANIVLAEIQPDFGPLTTPTKPKEGSQGEPWTPTANLKMLISAVSPEIRNRDQKRGLFDNRSGLPEAKDCIHEHLSGDEFEKSQPSRKEKSLGLLCHKFLARYPNYPNPAVNN

SEQ ID NO: 7882 - protein, 364 aa, Homo sapiens
MNVYHFKKGTEICNYSYSSNILSIRLNRQRLLVCLEESIYIHNIKDMKLLKTLLDIPANPTGLCALSINHSNSYLAYPGSLTSGEIVLYDGNSLKTVCTIAAHEGTLAAITFNASGSKLASASEKGTVIRVFSVPDGQKLYEFRRGMKRYVTISSLVFSMDSQFLCASSNTETVHIFKLEQVTNSRPEEPSTWSGYMGKMFMAATNYLPTQVSDMMHQDRAFATARLNFSGQRNICTLSTIQKLPRLLVASSSGHLYMYNLDPQDGGECVLIKTHSLLGSGTTEENKENDLRPSLPQSYAATVARPSASSASTVPGYSEDGGALRGEVIPEHEFATGPVCLDDENEFPPIILCRGNQKGKTKQS

SEQ ID NO: 7883 - protein, 242 aa, Homo sapiens
MFPQELAQKIKGYQEQIASLNSKCKMLTMKAKHATMLLTVTEVEGLAEGTEDLDGELLPTPSAHPSVVMDIAYYQALSAERLQTDAAKIHPSTSASQEFYEPGLEPSATAKLGDLQRSWETLKNVISEKQRTLYEALERQQKYQDSLQSISTKMEAIELKLSESPEPGRSPESQMAEHQALMDEILMLQDEINELQSSLAEELVSESCEADPAEQLALQSTLTVLAERMSTIRMKASGKRQL

SEQ ID NO: 7884 - protein, 86 aa, Homo sapiens
MMSDASDMLAAALEQMDGIIAGSKALEYSNGIFDCQSPTSPFMGSLRALHLVEDLRGLLEMMETDEKEGLRCQIPDSTAETLVEWL

SEQ ID NO: 7885 - protein, 102 aa, Homo sapiens
MIRKEAYVHKSVMEELKRIIDDSEITKEDDALWPPPDRVGRQELEIVIGDEHISFTTSKIGSLIDVNQSKDPEGLRVFYYLVQDLKCLVFSLIGLHFKIKPI

SEQ ID NO: 7886 - protein, 208 aa, Homo sapiens
MVQEHDEPILKHLKDIKVKFSDAGQPMSFVLEFHFEPNEYFTNEVLTKTYRMRSEPDDSDPFSFDGPEIMGCTGCQIDWKKGKNVTLKTIKKKQKHKGRGTVRTVTKTVSNDSFFNFFAPPEVPESGDLDDDAEAILAADFEIGHFLRERIIPRSVLYFTGEAIEDDDDDYDEEGEEADEEGEEEGDEENDPDYDPKKDQNPAECKQQ

SEQ ID NO: 7887 - protein, 589 aa, Homo sapiens
MGFMVADLWATSRLLVNYPEPYRSQILDYLFKPNFGASLHILKVEIGGDGQTTDGTEPSHMHYALDENYFRGYEWWLMKEAKKRNPNITLIGLPWSFPGWLGKGFDWPYVNLQLTAYYVVTWIVGAKRYHDLDIDYIGIWNERSYNANYIKILRKMLNYQGLQRVKIIASDNLWESISASMLLDAELFKVVDVIGAHYPGTHSAKDAKLTGKKLWSSEDFSTLNSDMGAGCWGRILNQNYINGYMTSTIAWNLVASYYEQLPYGRCGLMTAQEPWSGHYVVESPVWVSAHTTQFTQPGWYYLKTVGHLEKGGSYVALTDGLGNLTIIIETMSHKHSKCIRPFLPYFNVSQQFATFVLKGSFSEIPELQVWYTKLGKTSERFLFKQLDSLWLLDSDGSFTLSLHEDELFTLTTLTTGRKGSYPLPPKSQPFPSTYKDDFNVDYPFFSEAPNFADQTGVFEYFTNIEDPGEHHFTLRQVLNQRPITWAADASNTISIIGDYNWTNLTIKCDVYIETPDTGGVFIAGRVNKGGILIRSARGIFFWIFANGSYRVTGDLAGWIIYALGRVEVTAKKWYTLTLTIKVAGRRKKT

SEQ ID NO: 7888 - protein, 81 aa, Homo sapiens
MAVASDFYLRYYVGHKGKFGHEFLEFEFRPDGRMKSTKQEGRGKVPQEGVRKIFLEDGTLEMSLEMRDLAFERKKQTSRAV

SEQ ID NO: 7889 - protein, 367 aa, Homo sapiens
ALEKAKDAGRKERVLVRQREQVTTPENINLDLTYSVLFNLASQYSVNEMYAEALNTYQVIVKNKMFSNAGILKMNMGNIYLKQRNYSKAIKFYRMALDQVPSVNKQMRIKIMQNIGVTFIQADREKMKKAFQKLITVPLEIDEDKYISPSDDPHTNLVTEAIKNDHLRQMERERKAMAEKYIMTSAKLIAPVIETSFAAGYDWCVEVVKASQYVELANDLEINKAVTYLRQKDYNQAVEILKVLEKKDSRVKSAAATNLSALYYMGKDFAQASSYADIAVNSDRYNPAALTNKGNTVFANGDYEKAAEFYKEALRNDSSCTEALYNIGLTYEKLNRLDEALDCFLKLHAILRNSAEVLYQIANMYLI

SEQ ID NO: 7890 - protein, 111 aa, Homo sapiens
MAAASIANIVKSSLGPVGLDKMLVDDIGDVTITNDGATILKLLEVEHPAAKVLCELADLQDKEVGDGTTSVVIIAAELLKNADELVKQKIHPTSVISGYRLACKEAVRYIN

SEQ ID NO: 7891 - protein, 51 aa, Homo sapiens
SALSQYLFPSFETFNTKNCIAYNPNGNALDESCEDKNRYIYKVLLCCPGWS

SEQ ID NO: 7892 - protein, 102 aa, Homo sapiens
LRLRRLNCASAIFPASVGRARRRFWKLVLVGDGGTGKTTFVKRHLTGEFEKKYVATLGVEVHPLVFHTNRGPIKFNVWDTAGQEKFGGLRDGYYIQVCHHNV

SEQ ID NO: 7893 - protein, 109 aa, Homo sapiens
MMSDASDMLAAALEQMDGIIAGSKALEYSNGIFDCQSPTSPFMGSLRALHLVEDLRGLLEMMETDEKEGLRCQIPDSTAETLVEWLQSQMVGSACSKFCYKSFVAYSKI

SEQ ID NO: 7894 - protein, 244 aa, Homo sapiens
MQAVVPLNKMTAISPEPQTLASTEQNEVPRVVTSGEQEAILRGNAADAESFRQRFRWFCYSEVAGPRKALSQLWELCNQWLRPDIHTKEQILELLVFEQFLTILPGEIRIWVKSQHPESSEEVVTLIEDLTQMLEEKDPVSQDSTVSQEENSKEDKMVTVCPNTESCESITLKDVAVNFSRGEWKKLEPFQKELYKEVLLENLRNLEFLDFPVSKLELISQLKWVELPWLLEEVSKSSRLGSVI

SEQ ID NO: 7895 - protein, 112 aa, Homo sapiens
MAQNLKDLAGRLPAGPRGMGTALKLLLGAGAVAYGVRESVFTVEGGHRAIFFNRIGGVQQDTILAEGLHFRIPWFQYPIIYDIRARPRKISSPTDGEYLPASVVSTQCSGAS

SEQ ID NO: 7896 - protein, 200 aa, Homo sapiens
MLSEVLLVSAPGKVILHGEHAVVHGKVALAVSLNLRTFLRLQPHSNGKVDLSLPNIGIKRAWDVARLQSLDTSFLEQGDVTTPTSEQVEKLKEVAGLPDDCAVTERLAVLAFLYLYLSICRKQRALPSLDIVVWSELPPGAGLGSSAAYSVCLAAALLTVCEEIPNPLKDGDCVNRWTKEDLELINKWAFQGERMIHGNP

SEQ ID NO: 7897 - protein, 437 aa, Homo sapiens
MPGFDYKFLEKPKRRLLCPLCGKPMREPVQVSTCGHRFCDTCLQEFLSEGVFKCPEDQLPLDYAKIYPDPELEVQVLGLPIRCIHSEEGCRWSGPLRHLQGHLNTCSFNVIPCPNRCPMKLSRRDLPAHLQHDCPKRRLKCEFCGCDFSGEAYESHEGMCPQESVYCENKCGARMMRRLLAQHATSECPKRTQPCTYCTKEFVFDTIQSHQYQCPRLPVACPNQCGVGTVAREDLPGHLKDSCNTALVLCPFKDSGCKHRCPKLAMARHVEESVKPHLAMMCALVSRQRQELQELRRELEELSVGSDGVLIWKIGSYGRRLQEAKAKPNLECFSPAFYTHKYGYKLQVSAFLNGNGSGEGTHLSLYIRVLPGAFDNLLEWPFARRGLSPFLGRADMPWCRSHSTRTEVPAQVLCPKSHKGVGIGEGERVVQRVCLEI

SEQ ID NO: 7898 - protein, 258 aa, Homo sapiens
NMASDSRHTLLRAPAPELLPANVAGRETDAESWCQKLNQRKEKLSRREREHHAEAAQFQEDVNADPEVQRCSSWREYKELLQRRQVQRSQRRAPHLWGQPVTPLLSPGQASSPGTPSACHIFEGHWQLRNHRTLERAWMNWDGLRLKEDVGGGSGPTSTVSSPAAAAGPVWEGLEMPWSFSISLCCRQHTFLMEVPGCWRSLGAWKSSLMFTRPTLWPHSERITLANPMPGCALVDLMSLSQTSAASSGCLTRVGMSL

SEQ ID NO: 7899 - protein, 71 aa, Homo sapiens
MVRPVRHKKPVNYSQFDHSDSDDDFVSATVPLNKKSRTAPKELKQDKPKPNLNNLRKEEIPVQEKTPKKRH

SEQ ID NO: 7900 - protein, 241 aa, Homo sapiens
DIGLPQYKTQFDEGRVDGRMLHYMTVNTIAPSEVQKWTNHRVMEWLRSVDLAEYAPNLRGSGVHGGLMVLEPRFNVETMAQLLNIPPNKTLLRRHLATHFNLLIGAEAQHQKRDAMELPDYVLLTATAKVKPKKLAFSNFGNLRKKKQEDGEEYVCPMELGQASGSASKKGFKPGLDMRLYEEDDLDRLEQMEDSEGTVRQIGAFSEGINNLTHMLKEDDMFKDFAARSPSASITDEDSNV

SEQ ID NO: 7901 - protein, 270 aa, Homo sapiens
MVMTGSQGATRKYKVWMRHRYHSCCNRLGELLGHPSFQVKTLLIRGIIRYVASSTHRRVRSSFSLWLSSSASYSTARIVQPLELALSALLKFVQLEGAHPLEKSKWEGNYLFPRELFKLVVGGLLSPEEDQSLLLSQFREYLDYDDTRYHTMQAAVDAVARVTGQHPEVPPAFWNNAFTLLSAVSLPRREPTVSSFYVKRAELWDTWKVAHLKEHRRVFQAMWLSFLKHKLPLSLYKKVLLIVHDAILPQLAQPTLMIDFLTRACDLGEC

SEQ ID NO: 7902 - protein, 1221 aa, Homo sapiens
MKTAQALHRMWIQAVKKLRRWKGRVSPSASSPLVFPNLSSWEGEGSKTILTAPGMEELIWEQYTVTLQKDSKRGFGIAVSGGRDNPHFENGETSIVISDVLPGGPADGLLQENDRVVMVNGTPMEDVLHSFAVQQLRKSGKVAAIVVKRPRKVQVAALQASPPLDQDDRAFEVMDEFDGRSFRSGYSERSRLNSHGGRSRSWEDSPERGRPHERARSRERDLSRDRSRGRSLERGLDQDHARTRDRSRGRSLERGLDHDFGPSRDRDRDRSRGRSIDQDYERAYHRAYDPDYERAYSPEYRRGARHDARSRGPRSRSREHPHSRSPSPEPRGRPGPIGVLLMKSRANEEYGLRLGSQIFVKEMTRTGLATKDGNLHEGDIILKINGTVTENMSLTDARKLIEKSRGKLQLVVLRDSQQTLINIPSLNDSDSEIEDISEIESNRSFSPEERRHQYSDYDYHSSSEKLKERPSSREDTPSRLSRMGATPTPFKSTGDIAGTVVPETNKEPRYQEDPPAPQPKAAPRTFLRPSPEDEAIYGPNTKMVRFKKGDSVGLRLAGGNDVGIFVAGIQEGTSAEQEGLQEGDQILKVNTQDFRGLVREDAVLYLLEIPKGEMVTILAQSRADVYRDILACGRGDSFFIRSHFECEKETPQSLAFTRGEVFRVVDTLYDGKLGNWLAVRIGNELEKGLIPNKSRAEQMASVQNAQRDNAGDRADFWRMRGQRSGVKKNLRKSREDLTAVVSVSTKFPAYERVLLREAGFKRPVVLFGPIADIAMEKLANELPDWFQTAKTEPKDAGSEKSTGVVRLNTVRQIIEQDKHALLDVTPKAVDLLNYTQWFPIVIFFNPDSRQGVKTMRQRLNPTSNKSSRKLFDQANKLKKTCAHLFTATINLNSANDSWFGSLKDTIQHQQGEAVWVSEGKMEGMDDDPEDRMSYLTAMGADYLSCDSRLISDFEDTDGEGGAYTDNELDEPAEEPLVSSITRSSEPVQHEESIRKPSPEPRAQMRRAASSDQLRDNSPPPAFKPEPPKAKTQNKEESYDFSKSYEYKSNPSAVAGNETPGASTKGYPPPVAAKPTFGRSILKPSTPIPPQEGEEVGESSEEQDNAPKSVLGKVKIFEKMDHKARLQRMQELQEAQNARIEIAQKHPDIYAVPIKTHKPDPGTPQHTSSRPPEPQKAPSRPYQDTRGSYGSDAEEEEYRQQLSEHSKRGYYGQSARYRDTEL

SEQ ID NO: 7903 - protein, 83 aa, Homo sapiens
VNDFELARADFQKVLQLYPNNKAAKTQLAVCQQRIRRQLAREKKLYANMFERLAEEENKAPWLTPAIPALCRAKVGGSLEPSR

SEQ ID NO: 7904 - protein, 81 aa, Homo sapiens
MAPQMYEFHLPLSPEELLKSGGVNQYVVQEVLSIKHLPPQLRAFQAAFRAQGPLAMLQHFDTIYSILHGIPPLPGASSYPG

SEQ ID NO: 7905 - protein, 612 aa, Homo sapiens
MQFQHSVLSTSTQLLFKDLLQNTDAHKRAFHEIYRTRSVNGIPVPPDQLEDMAERFHFVSSTSELHLMKMEFLELKYRLLSLLVLAESKLKSWIIKYGRRESVEQLLQNYVSFIENSKFFEQYEVTYQILKQTAEMYVKADGSVEEAENVMKFMNETTAQWRNLSVEVRSVRSMLEEVISNWDRYGNTVASLQAWLEDAEKMLNQSENAKKDFFRNLPHWIQQHTAMNDAGNFLIETCDEMVSRDLKQQLLLLNGRWRELFMEVKQYAQADEMDRMKKEYTDCVVTLSAFATEAHKKLSEPLEVSFMNVKLLIQDLEDIEQRVPVMDAQYKIITKTAHLITKESPQEEGKEMFATMSKLKEQLTKVKECYSPLLYESQQLLIPLEELEKQMTSFYDSLGKINEIITVLEREAQSSALFKQKHQELLACQENCKKTLTLIEKGSQSVQKFVTLSNVLKHFDQTRLQRQIADIHVAFQSMVKKTGDWKKHVETNSRLMKKFEESRAELEKVLRIAQEGLEEKGDPEELLRRHTEFFSQLDQRVLNAFLKACDELTDILPEQEQQGLQEAVRKLHKQWKVSQDRTETPCILNEGRSLSVLRSKCKRNLEIPGKSL

SEQ ID NO: 7906 - protein, 87 aa, Homo sapiens
MATSSQYRQLLSDYGPPSLGYTQGTGNSQVPQSKYAELLAIIEELGKEIRPTYAGSKSAMERLKRGIIHARGLVRECLAETERNARS

SEQ ID NO: 7907 - protein, 294 aa, Homo sapiens
MKQWKARLGCGLESGPMALEQNLSDLQLQAAVEVAGDLEVDCYRAPCSESQEELALQHFMKEKLLAELEGKLRVFENIVAVLNKEVEASHLALATSIHQSQLDRERILSLEQRVVELQQTLAQKDQALGKLEQSLRLMEEASFDGTFLWKITNVTRRCHESACGRTVSLFSPAFYTAKYGYKLCLRLYLNGDGTGKRTHLSLFIVIMRGEYDALLPWPFRNKVTFMLLDQNNREHAIDAFRPDLSSASFQRPQSETNVASGCPLFFPLSKLQSPKHAYVKDDTMFLKCIVETST

SEQ ID NO: 7908 - protein, 144 aa, Homo sapiens
MKAKDLIVTPATILKEKPDPNNLVFGTVFTDHMLTVEWSSEFGWEKPHIKPLQNLSLHPGSSALHYAVELFEGLKAFRGVDNKIRLFQPNLNMDRMYRSAVRATLPVFDKEELLECIQQLVKLDQEWVPYSTSASLYIRPTFIG

SEQ ID NO: 7909 - protein, 87 aa, Homo sapiens
MAQNLKDLAGRLPAGPRGMGTALKLLLGAGAVAYGVRESVFTVEGGHRAIFFNRIGGVQQDTILAEGLHFRSPHHRIVSISQLTTLC

SEQ ID NO: 7910 - protein, 139 aa, Homo sapiens
MAAFTKLSIEPAFTPGPNIELQKDSDCCSCQEKWVGYRCNCYFISSEQKTWNESRHLCASQKSSLLQLQNTDELDFMSSSQQFYWIGLSYSEEHTAWLWENGSALSQYLFPSFETFNTKNCIAYNPNGNALDESCEDKN

SEQ ID NO: 7911 - protein, 164 aa, Homo sapiens
MAPSRNGMVLKPHFHKDWQRRVATWFNQPARKIRRRKARQAKARRIAPRPASGPIRPIVRCPTVRYHTKVRAGRGFSLEELRVAGIHKKGDSSAEELKLATQLTGPVMPVRNVYKKEKARVITEEEKNFKAFASLRMARANARLFGIRAKRAKEAAEQDVEKKK

SEQ ID NO: 7912 - protein, 475 aa, Homo sapiens
MEDIQTNAELKSTQEQSVPADDSMKVKDEYSERDENVLKSEPMGNAEEPEIPYSYSREYNEYENIKLERHVVSFDSSRPTSGKMNCDVCGLSCISFNVLMVHKRSHTGERPFQCNQCGASFTQKGNLLRHIKLHTGEKPFKCHLCNYACQRRDALTGHLRTHSVEKPYKCEFCGRSYKQRSSLEEHKERCRTFLQSTDPGDTASAEARHIKAEMGSERALVLDRLASNVAKRKSSMPQKFIGEKRHCFDVNYNSSYMYEKESELIQTRMMDQAINNAISYLGAEALRPLVQTPPAPTSEMVPVISSMYPIALTRAEMSNGAPQELEKKSIHLPEKSVPSERGLSPNNSGHDSTDTDSNHEERQNHIYQQNHMVLSRARNGMPLLKEVPRSYELLKPPPICPRDSVKVINKEGEVMDVYRCDHCRVLFLDYVMFTIHMGCHGFRDPFECNMCGYRSHDRYEFSSHIARGEHRALLK

SEQ ID NO: 7913 - protein, 118 aa, Homo sapiens
YLSEVSLQKYDCPFSGTSFVVFSLFLICAMAGDVVYADIKTVRTSPLELAFPLQRSVSFNFSTVHKSCPAKDWKVHKGKCYWIAETKKSWNKSQNDCAINNSYLMVIQDITAMKSNLF

SEQ ID NO: 7914 - protein, 68 aa, Homo sapiens
HKKPVNYSQFDHSDSDDDFVSATVPLNKKSRTAPKELKQDKPKPNLNNLRKEEIPVQEKTPKKSHRKK

SEQ ID NO: 7915 - protein, 494 aa, Homo sapiens [sequence omitted]

SEQ ID NO: 7916 - protein, 213 aa, Homo sapiens
MAQNLKDLAGRLPAGPRGMGTALKLLLGAGAVAYGVRESVFTVEGGHRAIFFNRIGGVQQDTILAEGLHFRVVPGCTPLHRAYREEHEGENAWERVFGLDQPLLTSISDLQMVNISLRVLSRPNAQELPSMYQRLGLDYEERVLPSIVNEVLKSVVAKFNASQLITQRAQVSLLIRRELTERAKDFSLILDDVAITELSFSREYTAAVEAKQV

SEQ ID NO: 7917 - protein, 115 aa, Homo sapiens
MGEAPAPEQYLVLEELIDMNQHHLNALGVGHASLDQLCQVTRARGLHSKLTGAGGGGCGITLLKPGLEQPEVEATKQALTSCGFDCLETSIGAPGVSIHSATSLDSRVQQALDGL

SEQ ID NO: 7918 - protein, 191 aa, Homo sapiens
MDSFKVVLEGPAPWGFRLQGGKDFNVPLSISRLTPGGKAAQAGVAVGDWVLSIDGENAGSLTHIEAQNKIRACGERLSLGLSRAQPVQSKPQKASAPAADPPRYTFAPSVSLNKTARPFGAPPPADSAPQQNGQPLRPLVPDASKQRLMENTEDWRPRPGTGQSRSFRILAHLTGTEFMQDPDEEHLKKSS

SEQ ID NO: 7919 - protein, 193 aa, Homo sapiens
SFVGSDPSQFCGQQGSPLGRPPGQREFVSSGRSLRLTFRTQPSSENKTAHLHKGFLALYQTVVCGRPVTPIAQNQTTLGSSRAKLGNFPWQAFTSIHGRGGGALLGDRWILTAAHTIYPKDSVSLRKNQSVNVFLGHTAIDEMLKLGNHPVHRVVVHPDYRQNESHNFSGDIALLELQHSIPLGPNVLPVCLP

SEQ ID NO: 7920 - protein, 389 aa, Homo sapiens
MIRNGRGAAGGAEQPGPGGRRAVRVWCDGCYDMVHYGHSNQLRQARAMGDYLIVGVHTDEEIAKHKGPPVFTQEERYKMVQAIKWVDEVVPAAPYVTTLETLDKYNCDFCVHGNDITLTVDGRDTYEEVKQAGRYRECKRTQGVSTTDLVGRMLLVTKAHHSSQEMSSEYREYADSFGKCPGGRNPWTGVSQFLQTSQKIIQFASGKEPQPGETVIYVAGAFDLFHIGHVDFLEKVHRLAERPYIIAGLHFDQEVNHYKGKNYPIMNLHERTLSVLACRYVSEVVIGAPYAVTAELLSHFKVDLVCHGKTEIIPDRDGSDPYQEPKRRGIFRQIDSGSNLTTDLIVQRIITNRLEYEARNQKKEAKELAFLEAARQQAAQPLGERDGDF

SEQ ID NO: 7921 - protein, 507 aa, Homo sapiens
MQEQTLQLEQQSKLKEYEAAVEQLKSEQIRAQAEERRKTLSEETRQHQARAQYQDKLARQRYEDQLKQQQLLNEENLRKQEESVQKQEAMRRATVEREMELRHKNEMLRVEAEARARAKAERENADIIREQIRLKAAEHRQTVLESIRTAGTLFGEGFRAFVTDWDKVTATVAGLTLLAVGVYSAKNATLVAGRFIEARLGKPSLVRETSRITVLEALRHPIQVSRRLLSRPQDALEGVVLSPSLEARVRDIAIATRNTKKNRSLYRNILMYGPPGTGKTLFAKKLALHSGMDYAIMTGGDVAPMGREGVTAMHKLFDWANTSRRGLLLFVDEADAFLRKRATEKISEDLRATLNAFLYRTGQHSNKFMLVLASNQPEQFDWAINDRINEMVHFDLPGQEERERLVRMYFDKYVLKPATEGKQRLKLAQFDYGRKCSEVARLTEGMSGREIAQLAVSWQATAYASEDGVLTEAMMDTRVQDAVQQHQQKMCWLKAEGPGRGDEPSPS

SEQ ID NO: 7922 - protein, 217 aa, Homo sapiens
TLVNNVRLPRGHRLELSDGDLLTFGPEGPPGTSPSEFYFMFQQVRVKPQDFAAITIPRSRGEARVGAGFRPMLPSQGAPQRPLSTFSPAPKATLILNSIGSLSKLRPQPLTFSPSWGGPKSLPVPAPPGEMGTTPSAPPQRNRRKSVHRVLAELDDESEPPENPPPVLMEPRKKLRVDKAPLTPTGNWHIQGMQSIVKGQKERPWPREHLSGYEEAS

SEQ ID NO: 7923 - protein, 628 aa, Homo sapiens
MGRKLDPTKEKRGPGRKARKQKGAETELVRFLPAVSDENSKRLSSRARKRAAKRRLGSVEAPKTNKSPEAKPLPGKLPKGAVQTAGKKGPQSLFNAPRGKKRPAPGSDEEEEEEDSEEDGMVNHGDLWGSEDDADTVDDYGADSNSEDEEEGEALLPIERAARKQKAREAAAGIQWSEEETEDEEEEKEVTPESGPPKVEEADGGLQINVDEEPFVLPPAGEMEQDAQAPDLQRVHKRIQDIVGILRDFGAQREEGRSRSEYLNRLKKDLAIYYSYGDFLLGKLMDLFPLSELVEFLEANEVPRPVTLRTNTLKTRRRDLAQALINRGVNLDPLGKWSKTGLVVYDSSVPIGATPEYLAGHYMLQGASSMLPVMALAPQEHERILDMCCAPGGKTSYMAQLMKNTGVILANDANAERLKSVVGNLHRLGVTNTIISHYDGRQFPKVVGGFDRVLLDAPCSGTGVISKDPAVKTNKDEKDILRCAHLQKELLLSAIDSVNATSKTGGYLVYCTCSITVEENEWVVDYALKKRNVRLVPTGLDFGQEGFTRFRERRFHPSLRSTRRFYPHTHNMDGFFIAKFKKFSNSIPQSQTDGVLLCRSGWTAVVQSQLIATSTFQVQAILVPQTPK

SEQ ID NO: 7924 - protein, 64 aa, Homo sapiens
MKLHCEVEVISRHLPALGLRNRGKGVRAVLSLCQQTSRSQPPVRAFLLISTLKDKRGTRYEHSG

SEQ ID NO: 7925 - protein, 74 aa, Homo sapiens
MDPVGLQLGNKNLWSCLVRLLTKDPEWLNAKMKFFLPNTDLDSRNETLDPEQRVILQLNKLHVQGSDTWQSFIH

SEQ ID NO: 7926 - protein, 282 aa, Homo sapiens
MRFARSKRGLRLKTVDSCFQDLKESRLVEDTFTIDEVSEVLNGLQAVVHSEVESELINTAYTNVLLLRQLFAQAEKWYLKLQTDISELENRELLEQVAEFEKAEITSSNKKPILDVTKPKLAPLNEGGTAELLNKEILRLQEENEKLKSRLKTIEIQATNALDEKSKLEKALQDLQLDQGNQKDFIKAQDLSNLENTVAALKSEFQKTLNDKTENQKSLEENLATAKHDLLRVQEQLHMAEKELEKKFQQTAAYRNMKEILTKKNDQIKDLRKRLAQYEPED

SEQ ID NO: 7927 - protein, 846 aa, Homo sapiens
MARSSPYLRQLQGPLLPPRDLVEEDDDYLNDDVEEDEESVFIDAEELCSGGVKAGSLPGCLRVSICDENTQETCKVFGRFPITGAWWRVKVQVKPVVGSRSYQYQVQGFPSYFLQSDMSPPNQKHICALFLKECEVSSDDVNKFLTWVKEVSNYKNLNFENLRETLRTFHKETGRKDQKQPTQNGQEELFLDNEMSLPLENTIPFRNVMTALQFPKIMEFLPVLLPRHFKWIIGSGSKEMLKEIEEILGTHPWKLGFSKITYREWKLLRCEASWIAFCQCESLLQLMTDLEKNALIMYSRLKQICREDGHTYVEVNDLTLTLSNHMSFHAASESLKFLKDIGVVTYEKSCVFPYDLYHAERAIAFSICDLMKKPPWHLCVDVEKVLASIHTTKPENSSDDALNESKPDEVRLENPVDVVDTQDNGDHIWTNGENEINAEISEVQLDQDQVEVPLDRDQVAALEMICSNPVTVISGKGGCGKTTIVSRLFKHIEQLEEREVKKACEDFEQDQNASEEWITFTEQSQLEADKAIEVLLTAPTGKAAGLLRQKTGLHAYTLCQVNYSFYSWTQTMMTTNKPWKFSSVRVLVVDEGSLVSVGIFKSVLNLLCEHSKLSKLIILGDIRQLPSIEPGNLLKDLFETLKSRNCAIELKTNHRAESQLIVDNATRISRRQFPKFDAELNISDNPTLPISIQDKTFIFVRLPEEDASSQSSKTNHHSCLYSAVKTLLQENNLQNAKTSQFIAFRRQDCDLINDCCCKHYTGHLTKDHQSRLVFGIGDKICCTRNAYLSDLLPENISGSQQNNDLDASSEDFSGTLPDFAKNKRDFESNVRLCNGEIFFITNIEYL

SEQ ID NO: 7928 - protein, 136 aa, Homo sapiens
MAAASIANIVKSSLGPVGLDKMLVDDIGDVTITNDGATILKLLEVEHPAAKVLCELADLQDKEVGDGTTSVVIIAAELLKNADELVKQKIHPTSVISGYRLACKEAVRYINENLIVNTDELGRDCLINAAKTSMSS

SEQ ID NO: 7929 - protein, 711 aa, Homo sapiens
MLASLKVKKQELANSSDATLPDRPLSPPLTAPPTMKSSEFFEMLEKMQGIKLEEQKPGPQKNKDDYIPYPSIDEVVEKGGPYPQVILPQFGGYWIEDPENVGTPTSLGSSICEEEEEDNLSPNTFGYKLECKGEARAYRRHFLGKDHLNFYCTGSSLGNLILSVKCEEAEGIEYLRVILRSKLKTVHERIPLAGLSKLPSVPQIAKAFCDDAVGLRFNPVLYPKASQMIVSYDEHEVNNTFKFGVIYQKARQTLEEELFGNNEESPAFKEFLDLLGDTITLQDFKGFRGGLDVTHGQTGVESVYTTFRDREIMFHVSTKLPFTDGDAQQLQRKRHIGNDIVAIIFQEENTPFVPDMIASNFLHAYIVVQVETPGTETPSYKVSVTAREDVPTFGPPLPSPPVFQKGPEFREFLLTKLTNAENACCKSDKFAKLEDRTRAALLDNLHDELHAHTQAMLGLGPEEDKFENGGHGGFLESFKRAIRVRSHSMETMVGGQKKSHSGGIPGSLSGGISHNSMEVTKTTFSPPVVAATVKNQSRSPIKRRSGLFPRLHTGSEGQGDSRARCDSTSSTPKTPDGGHSSQEIKSETSSNPSSPEICPNKEKPFMKLKENGRAISRSSSSTSSVSSTAGEGEAMEEGDSGGSQPSTTSPFKQEVFVYSPSPSSESPSLGAAATPIIMSRSPTDAKSRNSPRSNLKFRFDKLSHASSGAGH

SEQ ID NO: 7930 - protein, 51 aa, Homo sapiens
MTAEEMKATESGAQSAPLPMEGVDISPKQDEGVLKIIGDLKRLLQRLSCGM

SEQ ID NO: 7931 - protein, 14 aa, Homo sapiens
MEAVKQGSATVGLK

SEQ ID NO: 7932 - protein, 603 aa, Homo sapiens
MKDYDELLKYYELHETIGTGGFAKVKLACHILTGEMVAIKIMDKNTLGSDLPRIKTEIEALKNLRHQHICQLYHVLETANKIFMVLEENLLFDEYHKLKLIDFGLCAKPKGNKDYHLQTCCGSLAYAAPELIQGKSYLGSEADVWSMGILLYVLMCGFLPFDDDNVMALYKKIMRGKYDVPKWLSPSSILLLQQMLQVDPKKRISMKNLLNHPWIMQDYNYPVEWQSKNPFIHLDDDCVTELSVHHRNNRQTMEDLISLWQYDHLTATYLLLLAKKARGKPVRLRLSSFSCGQASATPFTDIKSNNWSLEDVTASDKNYVAGLIDYDWCEDDLSTGAATPRTSQFTKYWTESNGVESKSLTPALCRTPANKLKNKENVYTPKSAVKNEEYFMFPEPKTPVNKNQHKREILTTPNRYTTPSKARNQCLKETPIKIPVNSTGTDKLMTGVISPERRCRSVELDLNQAHMEETPKRKGAKVFGSLERGLDKVITVLTRSKRKGSARDGPRRLKLHYNVTTTRLVNPDQLLNEIMSILPKKHVDFVQKGYTLKCQTQSDFGKVTMQFELEVCQLQKPDVVGIRRQRLKGDAWVYKRLVEDILSSCKV

SEQ ID NO: 7933 - protein, 834 aa, Homo sapiens
MDSSNLAVIFAPNLLQTSEGHEKMSSNTEKKLRLQAAVVQTLIDYASDIGRVPDFILEKIPAMLGIDGLCATPSLEGFEEGEYETPGEYKRKRRQSVGDFVSGALNKFKPNRTPSITPQEERIAQLSESPVILTPNAKRTLPVDSSHGFSSKKRKSIKHNFNFELLPSNLFNSSSTPVSVHIDTSSEGSSQSSLSPVLIGGNHLITAGVPRRSKRIAGKKVCRVESGKAGCFSPKISHKEKVRRSLRLKFNLGKNGREVNGCSGVNRYESVGWRLANQQSLKNRIESVKTGLLFSPDVDEKLPKKGSEKISKSEETLLTPERLVGTNYRMSWTGPNNSSFQEVDANEASSMVENLEVENSLEPDIMVEKSPATSCELTPSNLNNKHNSNITSSPLSGDENNMTKETLVKVQKAFSESGSNLHALMNQRQSSVTNVGKVKLTEPSYLEDSPEENLFETNDLTIVESKEKYEHHTGKGEKCFSERDFSPLQTQTFNRETTIKCYSTQMKMEHEKDIHSNMPKDYLSKQEFSSDEEIKKQQSPKDKLNNKLKENENMMEGNLPKCAAHSKDEARSSFSQQSTCVVTNLSKPRPMRIAKQQSLETCEKTVSESSQMTEHRKVSDHIQWFNKLSLNEPNRIKVKSPLKFQRTPVRQSVRRINSLLEYSRQPTGHKLASLGDTASPLVKSVSCDGALSSCIESASKDSSVSCIKSGPKEQKSMSCEESNIGAISKSSMELPSKSFLKMRKHPDSVNASLRSTTVYKQKILSDGQVKVPLDDLTNHDIVKPVVNNNMGISSGINNRVLRRPSERGRAWYKGSPKHPIGKTQLLPTSKPVDL

SEQ ID NO: 7934 - protein, 254 aa, Homo sapiens
MAPGSFAEYTVVPASIATPVPSVKPEYLTLLVSGTTAYISLKELGGLSEGKKVLVTAAAGGTGQFAMQLSKKAKCHVIGTCSSDEKSAFLKSLGCDRPINYKTEPVGTVLKQEYPEGVDVVYESVGGAMFDLAVDALATKGRLIVIGFISGYQTPTGLSPVKAGTLPAKLLKKSASVQGFFLNHYLSKYQAAMSHLLEMCVSGDLVCEVDLGDLSPEGRFTGLESIFRAVNYMYMGKNTGKIVVELPHSVNSKL

SEQ ID NO: 7935 - protein, 156 aa, Homo sapiens
MATLKDQLIYNLLKEEQTPQNKITVVGVGAVGMACAISILMKDLADELALVDVIEDKLKGEMMDLQHGSLFLRTPKIVSGKDYNVTANSKLVIITAGARQQEGESRLNLVQRNVNIFKFIIPNVVKYSPNCKLLIVSNPVDILTYVAWKISGFPKN

SEQ ID NO: 7936 - protein, 159 aa, Homo sapiens
MQMRFDGRLGFPGGFVDTQDRSLEDGLNRELREELGEAAAAFRVERTDYRSSHVGSGPRVVAHFYAKRLTLEELLAVEAGATRAKDHGLEVLGLVRVPLYTLRDGVGGLPTFLENSFIGSAREQLLEAALHGPMKTEMRTLVLGREGRTWECFLIGSER

SEQ ID NO: 7937 - protein, 388 aa, Homo sapiens
MPSRAEDYEVLYTIGTGSYGRCQKIRRKSDGKILVWKELDYGSMTEAEKQMLVSEVNLLRELKHPNIVRYYDRIIDRTNTTLYIVMEYCEGGDLASVITKGTKERQYLDEEFVLRVMTQLTLALKECHRRSDGGHTVLHRDLKPANVFLDGKQNVKLGDFGLARILNHDTSFAKTFVGTPYYMSPEQMNRMSYNEKSDIWSLGCLLYELCALMPPFTAFSQKELAGKIREGKFRRIPYRYSDELNEIITRMLNLKDYHRPSVEEILENPLIADLVADEQRRNLERRGRQLGEPEKSQDSSPVLSELKLKEIQLQERERALKAREERLEQKEQELCVRERLAEDKLARAENLLKNYSLLKERKFLSLASNPESHFVAQAGMQWCDHSSM

SEQ ID NO: 7938 - protein, 629 aa, Homo sapiens
MMEPEEYRERGREMVDYICQYLSTVRERRVTPDVQPGYLRAQLPESAPEDPDSWDSIFGDIERIIMPGVVHWQSPHMHAYYPALTSWPSLLGDMLADAINCLGFTWASSPACTELEMNVMDWLAKMLGLPEHFLHHHPSSQGGGVLQSTVSESTLIALLAARKNKILEMKTSEPDADESCLNARLVAYASDQAHSSVEKAGLISLVKMKFLPVDDNFSLRGEALQKAIEEDKQRGLVPVFVCATLGTTGVCAFDCLSELGPICAREGLWLHIDAAYAGTAFLCPEFRGFLKGIEYADSFTFNPSKWMMVHFDCTGFWVKDKYKLQQTFSVNPIYLRHANSGVATDFMGTEMAKYFESLVRNDPSFEIPAKRHLGLVVFRLKGPNCLTENVLKEIAKAGRLFLIPATIQDKLIIRFTVTSQFTTRDDILRDWNLIRDAATLILSQHCTSQPSPRVGNLISQIRGARAWACGTSLQSVSGAGDDPVQARKIIKQPQRVGAGPMKRENGLHLETLLDPVDDCFSEEAPDATKHKLSSFLFSYLSVQTKKKTVRSLSCNSVPVSAQKPLPTEASVKNGGSSRVRIFSRFPEDMMMLKKSAFKKLIKFYSVPSFPECSSQCGLQLPCCPLQAMV

SEQ ID NO: 7939 - protein, 267 aa, Homo sapiens
MAQNLKDLAGRLPAGPRGMGTALKLLLGAGAVAYGVRESVFTVEGGHRAIFFNRIGGVQQDTILAEGLHFRIPWFQYPIIYDIRARPRKISSPTGSKDLQMVNISLRVLSRPNAQELPSMYQRLGLDYEERVLPSIVNEVLKSVVAKFNASQLITQRAQVSLLIRRELTERAKDFSLILDDVAITELSFSREYTAAVEAKQVAQQEAQRAQFLVEKAKQEQRQKIVQAEGEAEAAKMLGEALSKNPGYIKLRKIRAAQNISKTPHQG

SEQ ID NO: 7940 - protein, 373 aa, Homo sapiens
MAEASRPRLSIPCSSITDVRTTTALEMPDRENTFVVKVEGPSEYIMETVDAQHVKAWVSDIQECLSPGPCPATSPRPMTLPLAPGTSFLTRENTDSLELSCLNHSESLPSQDLLLGPSESNDRLSQGAYGGLSDRPSASISPSSASIAASHFDSMELLPPELPPRIPIEEGPPTGTVHPLSAPYPPLDTPETATGSFLFQGEPEGGEGDQPLSGYPWFHGMLSRLKAAQLVLTGGTGSHGVFLVRQSETRRGEYVLTFNFQGKAKHLRLSLNEEGQCRVQHLWFQSIFDMLEHFRVHPIPLESGGSSDVVLVSYVPSSQRQQGEQSRSAGEEVPVHPRSEAGSRLGAMRGCAREMDATPMPPAPSCPSERVTV

SEQ ID NO: 7941 - protein, 1125 aa, Homo sapiens
MRFWLRTEEMALEEMVQRLNAVSKHTDEIMHQDIVPLCAADIQDQLKKRFAYLSGGRGQDGSPVITFPDYPAFSEIPDKEFQNVMTYLTSIPSLQDAGIGFILVIDRRRDKWTSVKASVLRIAASFPANLQLVLVLRPTGFFQRTLSDIAFKFNRDDFKMKVPVIMLSSVPDLHGYIDKSQLTEDLGGTLDYCHSRWLCQRTAIESFALMVKQTAQMLQSFGTELAETELPNDVQSTSSVLCAHTEKKDKAKEDLRLALKEGHSVLESLRELQAEGSEPSVNQDQLDNQATVQRLLAQLNETEAAFDEFWAKHQQKLEQCLQLRHFEQGFREVKAILDAASQKIATFTDIGNSLAHVEHLLRDLASFEEKSGVAVERARALSLDGEQLIGNKHYAVDSIRPKCQELRHLCDQFSAEIARRRGLLSKSLELHRRLETSMKWCDEGIYLLASQPVDKCQSQDGAEAALQEIEKFLETGAENKIQELNAIYKEYESILNQDLMEHVRKVFQKQASMEEVFHRRQASLKKLAARQTRPVQPVAPRPEALAKSPCPSPGIRRGSENSSSEGGALRRGPYRRAKSEMSESRQGRGSAGEEEESLAILRRHVMSELLDTERAYVEELLCVLEGYAAEMDNPLMAHLLSTGLHNKKDVLFGNMEEIYHFHNRIFLRELENYTDCPELVGRCFLERMEDFQIYEKYCQNKPRSESLWRQCSDCPFFQECQRKLDHKLSLDSYLLKPVQRITKYQLLLKEMLKYSRNCEGAEDLQEALSSILGILKAVNDSMHLIAITGYDGNLGDLGKLLMQGSFSVWTDHKRGHTKVKELARFKPMQRHLFLHEKAVLFCKKREENGEGYEKAPSYSYKQSLNMAAVGITENVKGDAKKFEIWYNAREEVYIVQAPTPEIKAAWVNEIRKVLTSQLQACREASQHRALEQSQSLPLPAPTSTSPSRGNSRNIKKLEERKTDPLSLEGYVSSAPLTKPPEKGKGWSKTSHSLEAPEDDGGWSSAEEQINSSDAEEDGGLGPKKLVPGKYTVVADHEKGGPDALRVRSGDVVELVQEGDEGLWYVRDPTTGKEGWVPASSLSVRLGPSGSAQCLSSSESSPGSAVLSNSSSCSEGGQAPFSDLQG

SEQ ID NO: 7942 - protein, 170 aa, Homo sapiens
MLSEVLLVSAPGKVILHGEHAVVHGKVALAVSLNLRTFLRLQPHSNGKVDLSLPNIGIKRAWDVARLQSLDTSFLEQGDVTTPTSEQVEKLKEVAGLPDDCAVTERLAVLAFLYLYLSICRKQRALPSLDIVVWSELPPGAGLGSSAAYSVCLAAALLTVCEEIPNPLKD

SEQ ID NO: 7943 - protein, 148 aa, Homo sapiens
MKPPSSIQTSEFDSSDEEPIEDEQTPIHISWLSLSRVNCSQFLGLCALPGCKFKDVRRNVQKDTEELKSCGIQDIFVFCTRGELSKYRVPNLLDLYQQCGIITHHHPIADGGTPDIASCCEIMEELTTCLKNYRKTLIHSCLSPTIPV

SEQ ID NO: 7944 - protein, 149 aa, Homo sapiens
MLGSLVLRRKALAPRLLLRLLRSPTLRGHGGASGRNVTTGSLGEPQWLRVATGGRPGTSPALFSGRGAATGGRQGGRFDTKCLAAATWGRLPGPEETLPGQDSWNGVPSRAGLGMCRCQCKAQTWLDSTHGGSHQPKQQCGTGPACCWG

SEQ ID NO: 7945 - protein, 128 aa, Homo sapiens
MRVHISSCLKVQEQMANCPKFVPVVPTSQPIPSNIPNRSTFACPYCGARNLDQQELVKHCVESHRSDPNRVVCPICSAMPWGDPSYKSANFLQHLLHRHKFSYDTFVDYSIDEEAAFQAALALSLSEN

SEQ ID NO: 7946 - protein, 665 aa, Homo sapiens
MFPVLEPHQVGLIRSYNSKTMTCFQELVTFRDVAIDFSRQEWEYLDPNQRDLYRDVMLENYRNLVSLGGHSISKPVVVDLLERGKEPWMILREETQFTDLDLQCEIISYIEVPTYETDISSTQLQSIYKREKLYECKKCQKKFSSGYQLILHHRFHVIERPYECKECGKNFRSGYQLTLHQRFHTGEKPYECTECGKNFRSGYQLTVHQRFHTGEKTYECRQCGKAFIYASHIVQHERIHTGGKPYECQECGRAFSQGGHLRIHQRVHTGEKPYKCKECGKTFSRRSNLVEHGQFHTDEKPYICEKCGKAFRRGHQLTVHQRVHTGKKPYECKECGKGYTTASYFLLHQRIHKGGKPYECKECKKTFTLYRNLTRHQNIHTGEKLFECKQCGKTYTTGSKLFQHQKTHTGEKPYECKECGKAFSLYGYLKQHQKIHTGMKHFECKECKKTFTLYRNLTRHQNIHTGKKLFECQECGKAYSTGSNLIQHRKTHTGEKPYKCKECGKTFSLHGYLNQHQKIHTGMKPYECKVCRKTFTFYRNLTLHQSIHTDEKPFECKECGKTFRRSSHLTAHQSIHADKKPYECKECGKAFKMYGYLTQHQKIHTGGKPYECKECGKAFSRASNLVQHERIHTGEKPYVCKQCGKTFRYGSALKAHQRIHRSIKV

SEQ ID NO: 7947 - protein, 389 aa, Homo sapiens
MSLRIDVDTNFPECVVDAGKVTLGTQQRQEMDPRLREKQNEIILRAVCALLNSGGGIIKAEIENKGYNYERHGVGLDVPPIFRSHLDKMQKENHFLIFVKSWNTEAGVPLATLCSNLYHRERTSTDVMDSQEALAFLKCRTQTPTNINVSNSLGPQAAQGSVQYEGNINVSAAALFDRKRLQYLEKLNLPESTHVEFVMFSTDVSHCVKDRLPKCVSAFANTEGGYVFFGVHDETCQVIGCEKEKIDLTSLRASIDGCIKKLPVHHFCTQRPEIKYVLNFLEVHDKGALRGYVCAIKVEKFCCAVFAKVPSSWQVKDNRVRQLPTREWTAWMMEADPDLSRCPEMVLQLSLSSATPRSKPVCIHKNSECLKEQQKRYFPVSARKTSASQ

SEQ ID NO: 7948 - protein, 476 aa, Homo sapiens
MPQLNGGGGDDLGANDELISFKDEGEQEEKSSENSSAERDLADVKSSLVNESETNQNSSSDSEAERRPPPRSESFRDKSRESLEEAAKRQDGGLFKGPPYPGYPFIMIPDLTSPYLPNGSLSPTARTYLQMKWPLLDVQAGSLQSRQALKDARSPSPAHIVSNKVPVVQHPHHVHPLTPLITYSNEHFTPGNPPPHLPADVDPKTGIPRPPHPPDISPYYPLSPGTVGQIPHPLGWLVPQQGQPVYPITTGGFRHPYPTALTVNASMSSFLSSRFPPHMVPPHHTLHTTGIPHPAIVTPTVKQESSQSDVGSLHSSKHQDSKKEEEKKKPHIKKPLNAFMLYMKEMRAKVVAECTLKESAAINQILGRRWHALSREEQAKYYELARKERQLHMQLYPGWSARDNYGKKKKRKRDKQPGETNEHSECFLNPCLSLPPITDLSAPKKCRARFGLDQQNNWCGPCRCKYSKEVSGTVRA

SEQ ID NO: 7949 - protein, 248 aa, Homo sapiens
MAQAPADPGREGHLEQRILQVLTEAGSPVKLAQLVKECQAPKRELNQVLYRMKKELKVSLTSPATWCLGGTDPEGEGPAELALSSPAERPQQHAATIPETPGPQFSQQREEDIYRFLKDNGPQRALVIAQALGMRTAKDVNRDLYRMKSRHLLDMDEQSKAWTIYRPEDSGRRAKSASIIYQHNPINMICQNGPNSWISIANSEAIQIGHGNIITRQTVSREDGKSPKRAQGGDLGGEPPDPLGGGKG

SEQ ID NO: 7950 - protein, 190 aa, Homo sapiens
MDTRRGHLLQPPDPGLTSNFGHLDDPGLARWTPGKEESLNLCHCAELGCRTQGVCSFPAMPQAPIDGRIADCRLLWDYVYQLLLDTRYEPYIKWEDKDAKIFRVVDPNGLARLWGNHKNRVNMTYEKMSRALRHYYKLNIIKKEPGQKLLFRFLKTPGKMVQDKHSHLEPLESQEQDRIEFKDKRPEISP

SEQ ID NO: 7951 - protein, 57 aa, Homo sapiens
MAAAAARWNHVWVGTETGILKGVNLQRKQAANFTAGGQPRREEAVSALCWGTGGETQ

SEQ ID NO: 7952 - protein, 65 aa, Homo sapiens
MEGPLSVFGDRSTGETIRSQNVMAAASIANIVKSSLGPVGLDKMLVDDIGWFIFFPANFLGCNHY

SEQ ID NO: 7953 - protein, 158 aa, Homo sapiens
MLPSLVPCVGKTVWLYLQAWPNPVFEGDALTLRCQGWKNTPLSQVKFYRDGKFLHFSKENQTLSMGAATVQSRGQYSCSGQVMYIPQTFTQTSETAMVQVQELFPPPVLSAIPSPEPREGSLVTLRCQTKLHPLRVARSRSRAPSWRSECRLLYPVLC

SEQ ID NO: 7954 - protein, 275 aa, Homo sapiens
MVNHGDLWGSEDDADTVDDYGADSNSEDEEEGEALLPIERAARKQKAREAAAGIQWSEEETEDEEEEKEVTPESGPPKVEEADGGLQINVDEEPFVLPPAGEMEQDAQAPDLQRVHKRIQDIVGILRDFGAQREEGRSRSEYLNRLKKDLAIYYSYGDFLLGKLMDLFPLSELVEFLEANEVPRPVTLRTNTLKTRRRDLAQALINRGVNLDPLGKWSKTGLVVYDSSVPIGATPEYLAGHYMLQGASSMLPVMALAPQEHERILDMCCAPGGKT

SEQ ID NO: 7955 - protein, 80 aa, Homo sapiens
MQSTDLGNKESGKIWHRKPSPATRDGIIVNIIHNTSDYHPKVLRFLNVAFDGTGDCLIAGDHQGNIYVFDLHGNSHQGAS

SEQ ID NO: 7956 - protein, 328 aa, Homo sapiens
MFDARTSESVLSVEHGQPVESVLLFPSGGLLVSAGGRYVKVWDMLKGGQLLVSLKNHHKTVTCLCLSSSGQRLLSGSLDRKVKVYSTTSYKVVHSFDYAASILSLALAHEDETIVVGMTNGILSVKHRKSEAKKESLPRRRRPAYRTFIKGKNYMKQRDDILINRPAKKHLELYDRDLKHFRISKALDRVLDPTCTIKTPEITVSIIKELNRRGVLANALAGRDEKEISHVLNFLIRNLSQPRFAPVLINAAEIIIDIYLPVIGQSPVVDKKFLLLQGLVEKEIDYQRELLETLGMMDMLFATMRRKEGTSVLEHTSDGFPENKKIES

SEQ ID NO: 7957 - protein, 244 aa, Homo sapiens
CGAAAGRRGRRGRRPRLEVIDLTHDNKDDLQAAIALSLLESPKIQADGRDLNRMHEATSAETKRSKRKRCEVWGENPNPNDWRRVDGWPVGLKNVGNTCWFSAVIQEKRNIMFMQELQYLFALMMGSNRKFVDPSAALDLLKGAFRSSEEQQQDVSEFTHKLLDWLEDAFQLAVNVNSPRNKSENPMVQLFYGTFLTEGVREGKPFCNNETFGQYPLQVNGYRNLDECLEGAMVEGDVELLPSD

SEQ ID NO: 7958 - protein, 385 aa, Homo sapiens
MDCSNGCSAECTGEGGSKEVVGTFKAKDLIVTPATILKEKPDPNNLVFGTVFTDHMLTVEWSSEFGWEKPHIKPLQNLSLHPGSSALHYAVELFEGLKAFRGVDNKIRLFQPNLNMDRMYRSAVRATLPVFDKEELLECIQQLVKLDQEWVPYSTSASLYIRPTFIGTEPSLGVKKPTKALLFVLLSPVGPYFSSGTFNPVSLWANPKYVRAWKGGTGDCKMGGNYGSSLFAQCEAVDNGCQQVLWLYGEDHQITEVGTMNLFLYWINEDGEEELATPPLDGIILPGVTRRCILDLAHQWGEFKVSERYLTMDDLTTALEGNRVREMFGSGTACVVCPVSDILYKGETIHIPTMENGPKLASRILSKLTDIQYGREESDWTIVLS

SEQ ID NO: 7959 - protein, 349 aa, Homo sapiens
MKDCSNGCSAECTGEGGSKEVVGTFKAKDLIVTPATILKEKPDPNNLVFGTVFTDHMLTVEWSSEFGWEKPHIKPLQNLSLHPGSSALHYAVEVFDKEELLECIQQLVKLDQEWVPYSTSASLYIRPTFIGTEPSLGVKKPTKALLFVLLSPVGPYFSSGTFNPVSLWANPKYVRAWKGGTGDCKMGGNYGSSLFAQCEAVDNGCQQVLWLYGEDHQITEVGTMNLFLYWINEDGEEELATPPLDGIILPGVTRRCILDLAHQWGEFKVSERYLTMDDLTTALEGNRVREMFGSGTACVVCPVSDILYKGETIHIPTMENGPKLASRILSKLTDIQYGREESDWTIVLS

SEQ ID NO: 7960 - protein, 656 aa, Homo sapiens
MAVFNQKSVSDMIKEFRKNWRALCNSERTTLCGADSMLLALQLSMAENNKQHSGEFTVSLSDVLLTWKYLLHEKLNLPVENMDVTDHYEDVRKIYDDFLKNSNMLDLIDVYQKCRALTSNCENYNTVSPGSTIQPPSERGSLLLSRPDLLAPGEDPPVSASLTLERQKGESLLAWSWSLNFRLPGIPITVQKKRRDLKKLAAVMRQSQLLDFLSGKQYAVGDETDLSIPTSPTSKYNRDNEKVQLLARKIIFSYLNLLVNSKNDLAVAYILNIPDRGLGREAFTDLKHAAREKQMSIFLVATSFIRTIELGGKGYAPPPSDPLRTHVKGLSNFINFIDKLDEILGEIPNPSIAGGQILSVIKMQLIKGQNSRDPFCKAIEEVAQDLDLRIKNIINSQEGVVALSTTDISPARPKSHAINHGTAYCGRDTVKALLVLLDEEAANAPTKNKAELLYDEENTIHHHGTSILTLFRSPTQVNNSIKPLRERICVSMQEKKIKMKQTLIRSQFACTYKDDYMISKDNWNNVNLASKPLCVLYMENDLSEGVNPSVGRSTIGTSFGNVHLDRSKNEKVSRKSTSQTGNKSSKRKQVDLDGENILCDNRNEPPQHKNAKIPKKSNDSQNRLYGKLAKVAKSNKCTAKDKLISGQAKLTQFFRL

SEQ ID NO: 7961 - protein, 104 aa, Homo sapiens
MLQDKPLRTSWQRKMKERQERKLAKDFARHLEEEKERRRQEKKQRRAENLKRRLENERKAEVVQVIRNPAKLKRAKKKQLRSIEKRDTLALLQKQPPQQPAAKI

SEQ ID NO: 7962 - protein, 622 aa, Homo sapiens
MPGGGPQGAPAAAGGGGVSHRAGSRDCLPPAACFRRRRLARRPGYMRSSTGPGIGFLSPAVGTLFRFPGGVSGEESHHSESRARQCGLDSRGLLVRSPVSKSAAAPTVTSVRGTSAHFGIQLRGGTRLPDRLSWPCGPGSAGWQQEFAAMDSSETLDASWEAACSDGARRVRAAGSLPSAELSSNSCSPGCGPEVPPTPPGSHSAFTSSFSFIRLSLGSAGERGEAEGCPPSREAESHCQSPQEMGAKAASLDGPHEDPRCLSRPFSLLATRVSADLAQAARNSSRPERDMHSLPDMDPGSSSSLDPSLAGCGGDGSSGSGDAHSWDTLLRKWEPVLRDCLLRNRRQMEVISLRLKLQKLQEDAVENDDYDKAETLQQRLEDLEQEKISLHFQLPSRQPALSSFLGHLAAQVQAALRRGATQQASGDDTHTPLRMEPRLLEPTAQDSLHVSITRRDWLLQEKQQLQKEIEALQARMFVLEAKDQQLRREIEEQEQQLQWQGCDLTPLVGQLSLGQLQEVSKALQDTLASAGQIPFHAEPPETIRSLQERIKSLNLSLKEITTKVCMSEKFCSTLRKKVNDIETQLPALLEAKMHAISGGHGTLWHILPDVSGGIVGAHPTFY

SEQ ID NO: 7963 - protein, 263 aa, Homo sapiens
MAQTPAFDKPKVELHVHLDGSIKPETILYYGRRRGIALPANTAEGLLNVIGMDKPLTLPDFLAKFDYYMPAIAGCREAIKRIAYEFVEMKAKEGVVYVEVRYSPHLLANSKVEPIPWNQAEGDLTPDEVVALVGQGLQEGERDFGVKARSILCCMRHQPNWSPKVVELCKKYQQQTVVAIDLAGDETIPGSSLLPGHVQAYQEAVKSGIHRTVHAGEVGSAEVVKEAVDILKTERLGHGYHTLEDQALYNRLRQENMHFEAQK

SEQ ID NO: 7964 - protein, 579 aa, Homo sapiens
MPGGGPQGAPAAAGGGGVSHRAGSRDCLPPAACFRRRRLARRPGYMRSSTGPGIGFLSPAVGTLFRFPGGVSGEESHHSESRARQCGLDSRGLLVRSPVSKSAAAPTVTSVRGTSAHFGIQLRGGTRLPDRLSWPCGPGSAGWQQEFAAMDSSETLDASWEAACSDGARRVRAAGSLPSAELSSNSCSPGCGPEVPPTPPGSHSAFTSSFSFIRLSLGSAGERGEAEGCPPSREAESHCQSPQEMGAKAASLDGPHEDPRCLSRPFSLLATRVSADLAQAARNSSRPERDMHSLPDMDPGSSSSLDPSLAGCGGDGSSGSGDAHSWDTLLRKWEPVLRDCLLRNRRQMEVISLRLKLQKLQEDAVENDDYDKAETLQQRLEDLEQEKISLHFQLPSRQPALSSFLGHLAAQVQAALRRGATQQASGDDTHTPLRMEPRLLEPTAQDSLHVSITRRDWLLQEKQQLQKEIEALQARMFVLEAKDQQLRREIEEQEQQLQWQGCDLTPLVGQLSLGQLQEVSKALQDTLASAGQIPFHAEPPETIRSLQERIKSLNLSLKEITTKETISGRLKTSPRRLDH

SEQ ID NO: 7965 - protein, 1065 aa, Homo sapiens
MDTPENVLQYIQWVEENFPENKEYLITLLEHLMKEFLDKKKYHNDPRFISYCLKFAEYNSDLHQFFEFLYNHGIGTLSSPLYIAWAGHLEAQGELQHASAVLQRGIQNQAEPREFLQQQYRLFQTRLTETHLPAQARTSEPLHNVQVLNQMITSKSNPGNNMACISKNQGSELSGVISSACDKESNMERRVITISKSEYSVHSSLASKVDVEQVVMYCKEKLIRGESEFSFEELRAQKYNQRRKHEQWVNEDRHYMKRKEANAFEEQLLKQKMDELHKKLHQVVETSHEDLPASQERSEVNPARMGPSVGSQQELRAPCLPVTYQQTPVNMEKNPREAPPVVPPLANAISAALVSPATSQSIAPPVPLKAQTVTDSMFAVASKDAGCVNKSTHEFKPQSGAEIKEGCETHKVANTSSFHTTPNTSLGMVQATPSKVQPSPTVHTKEALGFIMNMFQAPTLPDISDDKDEWQSLDQNEDAFEAQFQKNVRSSGAWGVNKIISSLSSAFHVFEDGNKENYGLPQPKNKPTGARTFGERSVSRLPSKPKEEVPHAEEFLDDSTVWGIRCNKTLAPSPKSPGDFTSAAQLASTPFHKLPVESVHILEDKENVVAKQCTQATLDSCEENMVVPSRDGKFSPIQEKSPKQALSSHMYSASLLRLSQPAAGGVLTCEAELGVEACRLTDTDAAIAEDPPDAIAGLQAEWMQMSSLGTVDAPNFIVGNPWDDKLIFKLLSGLSKPVSSYPNTFEWQCKLPAIKPKTEFQLGSKLVYVHHLLGEGAFAQVYEATQGDLNDAKNKQKFVLKVQKPANPWEFYIGTQLMERLKPSMQHMFMKFYSAHLFQNGSVLVGELYSYGTLLNAINLYKNTPEKVMPQGLVISFAMRMLYMIEQVHDCEIIHGDIKPDNFILGNGFLEQDDEDDLSAGLALIDLGQSIDMKLFPKGTIFTAKCETSGFQCVEMLSNKPWNYQIDYFGVAATVYCMLFGTYMKVKNEGGECKPEGLFRRLPHLDMWNEFFHVMLNIPDCHHLPSLDLLRQKLKKVFQQHYTNKIRALRNRLIVLLLECKRSRK

SEQ ID NO: 7966 - protein, 138 aa, Homo sapiens
MEQVNELKEKGNKALSVGNIDDALQCYSEAIKLDPHNHVLYSNRSAAYAKKGDYQKAYEDGCKTVDLKPDWGKGYSRKAAALEFLNRFEEAKRTYEEGLKHEANNPQLKEGLQNMEARLAVQPARQPRRCEATSHGRP

SEQ ID NO: 7967 - protein, 182 aa, Homo sapiens
MGSAKSVPVTPARPPPHNKHLARVADPRSPSAGILRTPIQVESSPQPGLPAGEQLEGLKHAQDSDPRSPTLGIARTPMKTSSGDPPSPLVKQLSEVFETEDSKSNLPPEPVLPPEAPLSSELDLPLGTQLSVEEQMPPWNQTEFPSKQVFSKEEARQPTETPVASQSSDKPSRDPETPRSSG

SEQ ID NO: 7968 - protein, 132 aa, Homo sapiens
MPPKFDPNEIKVVYLRCTGGEVGATSALAPKIGPLGLIEVVPSASALIIKALKEPPRDRKKQKNIKHSGNITFDEIVNIARQMRHRSLARELSGTIKEILGTAQSVGCNVDGRHPHDIIDDINSGAVECPAS

SEQ ID NO: 7969 - protein, 609 aa, Homo sapiens
MPGGGPQGAPAAAGGGGVSHRAGSRDCLPPAACFRRRRLARRPGYMRSSTGPGIGFLSPAVGTLFRFPGGVSGEESHHSESRARQCGLDSRGLLVRSPVSKSAAAPTVTSVRGTSAHFGIQLRGGTRLPDRLSWPCGPGSAGWQQEFAAMDSSETLDASWEAACSDGARRVRAAGSLPSAELSSNSCSPGCGPEVPPTPPGSHSAFTSSFSFIRLSLGSAGERGEAEGCPPSREAESHCQSPQEMGAKAASLDGPHEDPRCLSRPFSLLATRVSADLAQAARNSSRPERDMHSLPDMDPGSSSSLDPSLAGCGGDGSSGSGDAHSWDTLLRKWEPVLRDCLLRNRRQMEVISLRLKLQKLQEDAVENDDYDKAETLQQRLEDLEQEKISLHFQLPSRQPALSSFLGHLAAQVQAALRRGATQQASGDDTHTPLRMEPRLLEPTAQDSLHVSITRRDWLLQEKQQLQKEIEALQARMFVLEAKDQQLRREIEEQEQQLQWQGCDLTPLVGQLSLGQLQEVSKALQDTLASAGQIPFHAEPPETIRREVRHQTAPCRNHQLEKPVINIWAFHLRRKICLFQADGLQHGSAEVKHLKETSVEPAGSTASRKE

SEQ ID NO: 7970 - protein, 128 aa, Homo sapiens
MFDVTSRVTYKNVPNWHRDLVRVCENIPIVLCGNKVDIKDRKVKAKSIVFHRKKNLQYYDISAKSNYNFEKPFLWLARKLIGDPNLEFVAMPALAPPEVVMDPALAAQYEHDLEVAQTTALPDEDDDL

SEQ ID NO: 7971 - protein, 144 aa, Homo sapiens
MATLKDQLIYNLLKEEQTPQNKITVVGVGAVGMACAISILMKDLADELALVDVIEDKLKGEMMDLQHGSLFLRTPKIVSGKDYNVTANSKLVIITAGARQQEGESRLNLVQRNVNIFKFIIPNVVKYSPNCKLLIVSNPGEAFD

SEQ ID NO: 7972 - protein, 1151 aa, Homo sapiens
MRSRSNSGVRLDGYARLVQQTILCHQNPVTGLLPASYDQKDAWVRDNVYSILAVWGLGLAYRKNADRDEDKAKAYELEQSVVKLMRGLLHCMIRQVDKVESFKYSQSTKDSLHAKYNTKTCATVVGDDQWGHLQLDATSVYLLFLAQMTASGLHIIHSLDEVNFIQNLVFYIEAAYKTADFGIWERGDKTNQGISELNASSVGMAKAALEALDELDLFGVKGGPQSVIHVLADEVQHCQSILNSLLPRASTSKEVDASLLSVVSFPAFAVEDSQLVELTKQEIITKLQGRYGCCRFLRDGYKTPKEDPNRLYYEPAELKLFENIECEWPLFWTYFILDGVFSGNAEQVQEYKEALEAVLIKGKNGVPLLPELYSVPPDRVDEEYQNPHTVDRVPMGKLPHMWGQSLYILGSLMAEGFLAPGEIDPLNRRFSTVPKPDVVVQVSILAETEEIKTILKDKGIYVETIAEVYPIRVQPARILSHIYSSLGCNNRMKLSGRPYRHMGVLGTSKLYDIRKTIFTFTPQFIDQQQFYLALDNKMIVEMLRTDLSYLCSRWRMTGQPTITFPISHSMLDEDGTSLNSSILAALRKMQDGYFGGARVQTGKLSEFLTTSCCTHLSFMDPGPEGKLYSEDYDDNYDYLESGNWMNDYDSTSHDVHMYLPTKLFQASRPSFNLLDSPHPRQENQVPSVRVEIHLPRDQSGEVDFKALVLQLKETSSLQEQADILYMLYTMKGPDWNTELYNERSATVRELLTELYGKVGEIRHWGLIRYISGILRKKVEALDEACTDLLSHQKHLTVGLPPEPREKTISAPLPYEALTQLIDEASEGDMSISILTQEIMVYLAMYMRTQPGLFAEMFRLRIGLIIQVMATELAHSLRCSAEEATEGLMNLSPSAMKNLLHHILSGKEFGVERSVRPTDSNVSPAISIHEIGAVGATKTERTGIMQLKSEIKQSPGTSMTPSSGSFPSAYDQQSSKDSRQGQWQRRRRLDGALNRVPVGFYQKVWKVLQKCHGLSVEGFVLPSSTTREMTPGEIKFSVHVESVLNRVPQPEYRQLLVEAILVLTMLADIEIHSIGSIIAVEKIVHIANDLFLQEQKTLGADDTMLAKDPASGICTLLYDSAPSGRFGTMTYLSKAAATYVQEFLPHSICAMQ

SEQ ID NO: 7973 - protein, 135 aa, Homo sapiens
MGLSVRELNRHLRGLSAEEVTRLKQRRRTLKNRGYAASCRVKRVCQKEELQKQKSELEREVDKLARENAAMRLELDALRGKCEALQGFARSVAAARGPATLVAPASVITIVKSTPGSGSGPAHGPDPAHGPASCS

SEQ ID NO: 7974 - protein, 194 aa, Homo sapiens
MTAELQQDDAAGAADGHGSSCQMLLNQLREITGIQDPSFLHEALKASNGDITQAVSLLTDERVKEPSQDTVATEPSEVEGSAANKEVLAKVIDLTHDNKDDLQAAIALSLLESPKIQADGRDLNRMHEATSAETKRSKRKRCEVWGENPNPNDWRRVDGWPVGLKNVGNTCWFSAVIQDASSGVPPCRPERVFI

SEQ ID NO: 7975 - protein, 851 aa, Homo sapiens
MQRSIMSFFHPKKEGKAKKPEKEASNSSRETEPPPKAALKEWNGVVSESDSPVKRPGRKAARVLGSEGEEEDEALSPAKGQKPALDCSQVSPPRPATSPENNASLSDTSPMDSSPSGIPKRRTEAETPTESVSEPEVATKQELQEEEEQTKPPRRAPKTLSSFFTPRKPAVKKEVKEEEPGAPGKEGAAEGPLDPSGYNPAKNNYHPVEDACWKPGQKVPYLAVARTFEKIEEVSARLRMVETLSNLLRSVVALSPPDLLPVLYLSLNHLGPPQQGLELGVGDGVLLKAVAQATGRQLESVRAEAAEKGDVGLVAENSRSTQRLMLPPPPLTASGVFSKFRDIARLTGSASTAKKIDIIKGLFVACRHSEARFIARSLSGRLRLGLAEQSVLAALSQAVSLTPPGQEFPPAMVDAGKGKTAEARKTWLEEQGMILKQTFCEVPDLDRIIPVLLEHGLERLPEHCKLSPGIPLKPMLAHPTRGISEVLKRFEEAAFTCEYKYDGQRAQIHALEGGEVKIFSRNQEDNTGKYPDIISRIPKIKLPSVTSFILDTEAVAWDREKKQIQPFQVLTTRKRKEVDASEIQVQVCLYAFDLIYLNGESLVREPLSRRRQLLRENFVETEGEFVFATSLDTKDIEQIAEFLEQSVKDSCEGLMVKTLDVDATYEIAKRSHNWLKLKKDYLDGVGDTLDLVVIGAYLGRGKRAGRYGGFLLASYDEDSEELQAICKLGTGFSDEELEEHHQSLKALVLPSPRPYVRIDGAVIPDHWLDPSAVWEVKCADLSLSPIYPAARGLVDSDKGISLRFPRFIRVREDKQPEQATTSAQVACLYRKQSQIQNQQGEDSGSDPEDTY

SEQ ID NO: 7976 - protein, 36 aa, Homo sapiens
MDPIRSFCGKLRSLASTLDCETARLQRALDGEESGA

SEQ ID NO: 7977 - protein, 42 aa, Homo sapiens
VSSEFPVRLSVYLEEEDITEEAALSKKRATKAKNTGQRGLKM

SEQ ID NO: 7978 - protein, 261 aa, Homo sapiens
MAQNLKDLAGRLPAGPRGMGTALKLLLGAGAVAYGVRESVFTVEGGHRAIFFNRIGGVQQDTILAEGLHFSGCCENLQQHTNCCFPEGQENLSLSVVVERSRPKNAWIPWFQYPIIYDIRARPRKISSPTGSKDLQMVNISLRVLSRPNAQELPSMYQRLGLDYEERVLPSIVNEVLKSVVAKFNASQLITQRAQVSLLIRRELTERAKDFSLILDDVAITELSFSREYTAAVEAKQVAQQEAQRAQFLVEKAKQEQRQKI

SEQ ID NO: 7979 - protein, 143 aa, Homo sapiens
MFKGPEKDIEFIYTAPSSAVCGVSLDVGGKKEYLIAGKAEGDGKMHITLCDFIVPWDTLSTTQKKSLNHRYQMGCECKITRCPMIPCYISSPDECLWMDWVTEKNINGHQAKFFACIKRSDGSCAWYRGAAPPKQEFLDIEDP

SEQ ID NO: 7980 - protein, 209 aa, Homo sapiens
MSYGRPPPDVEGMTSLKVDNLTYRTSPDTLRRVFEKYGRVGDVYIPRDRYTKESRGFAFVRFHDKRDAEDAMDAMDGAVLDGRELRVQMARYGRPPDSHHSRRGPPPRSPRRRRRSRSRSRSRSRSRSRSRYSRSKSRSRTRSRSRSTSKSRSARRSKSKSSSVSRSRSRSRSRSRSRSPPPVSKRESKSRSRSKSPPKSPEEEGAVSS

SEQ ID NO: 7981 - protein, 256 aa, Homo sapiens
MRNQDPGKMGRQRKSIKLYPTHPLVTFPRSWAKFQEKALLVEDTFTIDEVSEVLNGLQAVVHSEVESELINTAYTNVLLLRQLFAQAEKWYLKLQTDISELENRELLEQVAEFEKAEITSSNKKPILDVTKPKLAPLNEGGTAELLNKEILRLQEENEKLKSRLKTIEIQATNALDEKSKLEKALQDLQLDQGNQKDFIKAQDLSNLENTVAALKSEFQKTLNDKTENQKSLEENLATAKHDLLRVQEQLHMAEKI

SEQ ID NO: 7982 - protein, 339 aa, Homo sapiens
MAQTPAFDKPKVELHVHLDGSIKPETILYYGRRRGIALPANTAEGLLNVIGMDKPLTLPDFLAKFDYYMPAIAGCREAIKRIAYEFVEMKAKEGVVYVEVRYSPHLLANSKVEPIPWNQAEGDLTPDEVVALVGQGLQEGERDFGVKARSILCCMRHQPNWSPKVVELCKKYQQQTVVAIDLAGDETIPGSSLLPGHVQAYQAVDILKTERLGHGYHTLEDQALYNRLRQENMHFEICPWSSYLTGAWKPDTEHAVIRLKNDQANYSLNTDDPLIFKSTLDTDYQMTKRDMGFTEEEFKRLNINAAKSSFLPEDEKRELLDLLYKAYGMPPSASAGQNL

SEQ ID NO: 7983 - protein, 530 aa, Homo sapiens
MASLSLAPVNIFKAGADEERAETARLTSFIGAIAIGDLVKSTLGPKGMDKILLSSGRDASLMVTNDGATILKNIGVDNPAAKVLVDMSRVQDDEVGDGTTSVTVLAAELLREAESLIAKKIHPQTIIAGWREATKAAREALLSSAVDHGSDEVKFRQDLMNIAGTTLSSKLLTHHKDHFTKLAVEAVLRLKGSGNLEAIHIIKKLGGSLADSYLDEGFLLDKKIGVNQPKRIENAKILIANTGMDTDKIKIFGSRVRVDSTAKVAEIEHAEKEKMKEKVERILKHGINCFINRQLIYNYPEQLFGAAGVMAIEHADFAGVERLALVTGGEIASTFDHPELVKLGSCKLIEEVMIGEDKLIHFSGVALGEACTIVLRGATQQILDEAERSLHDALCVLAQTVKDSRTVYGGGCSEMLMAHAVTQLANRTPGKEAVAMESYAKALRMLPTIIADNAGYDSADLVAQLRAAHSEGNTTAGLGNVSLITTPVKHSHVLSIFGPVSSKVVFERYSIKEDCGICLSVPIISLSLDI

SEQ ID NO: 7984 - protein, 299 aa, Homo sapiens
MAQNLKDLAGRLPAGPRGMGTALKLLLGAGAVAYGVRESVFTVEGGHRAIFFNRIGGVQQDTILAEGLHFRIPWFQYPIIYDIRARPRKISSPTGSKDLQMVNISLRVLSRPNAQELPSMYQRLGLDYEERVLPSIVNEVLKSVVAKFNASQLITQRAQVSLLIRRELTERAKDFSLILDDVAITELSFSREYTAAVEAKQVAQQEAQRAQFLVEKAKQEQRQKIVQAEGEAEAAKMLGEALSKNPGYIKLRKIRAAQNISKTIATSQNRIYLTADNLVLNLQDESFTRGSDSLIKGKK

SEQ ID NO: 7985 - protein, 159 aa, Homo sapiens
MGRKLDPTKEKRGPGRKARKQKGAETELVRFLPAVSDENSKRLSSRARKRAAKRRLGSVEAPKTNKSPEAKPLPGKLPKGISAGAVQTAGKKGPQSLFNAPRGKKRPAPGSDEEEEEEDSEEDGMVNHGDLWGSEDDADTVDDYGADSNSEDEEEGEAV

SEQ ID NO: 7986 - protein, 447 aa, Homo sapiens
MPDLENRVLDQIEFLDTKYSVGIHNLLAYVKHLKGQNEEALKSLKEAENLMQEEHDNQANVRSLVTWGNFAWMYYHMGRLAEAQTYLDKVENICKKLSNPFRYRMECPEIDCEEGWALLKCGGKNYERAKACFEKVLEVDPENPESSAGYAISAYRLDGFKLATKNHKPFSLLPLRQAVRLNPDNGYIKVLLALKLQDEGQEAEGEKYIEEALANMSSQTYVFRYAAKFYRRKGSVDKALELLKKALQETPTSVLLHHQIGLCYKAQMIQIKEATKGQPRGQNREKLDKMIRSAIFHFESAVEKKPTFEVAHLDLARMYIEAGNHRKAEENFQKLLCMKPVVEETMQDIHFHYGRFQEFQKKSDVNAIIHYLKAIKIEQASLTRDKSINSLKKLVLRKLRRKALDLESLSLLGFVYKLEGNMNEALEYYERALRLAADFENSVRQGP

SEQ ID NO: 7987 - protein, 660 aa, Homo sapiens
MGCNMCVVQKPEEQYKVMLQEVELYKSSHRDKLGLMVCYRTDDEEDLGIYVGEVNPNSIAAKDGRIREGDRIIQINGVDVQNREEAVAILSQEENTNISLLVARPESQLAKRWKDSDRDDFLDDFGSENEGELRARKLKSPPAQQPGNEEEKGAPDAGPGLSNSQELDSGVGRTDESTRNEESSEHDLLGDEPPSSTNTPGSLRKFGLQGDALQSRDFHFSMDSLLAEGAGLGGGDVPGLTDEEYERYRELLEIKCHLENGNQLGLLFPRASGGNSALDVNRNESLGHEMAMLEEELRHLEFKCRNILRAQKMQQLRERCMKAWLLEEESLYDLAASEPKKHELSDISELPEKSDKDSTSAYNTGESCRSTPLLVEPLPESPLRRAMAGNSNLNRTPPGPAVATPAKAAPPPGSPAKFRSLSRDPEAGRRQHAEERGRRNPKTGLTLERVGPESSPYLSRRHRGQGQEGEHYHSCVQLAPTRGLEELGHGPLSLAGGPRVGGVAAAATEAPRMEWKVKVRSDGTRYVAKRPVRDRLLKARALKIREERSGMTTDDDAVSEMKMGRYWSKEERKQHLIRAREQRKRREFMMQSRLECLREQQNGDSKPELNIIALSHRKTMKKRNKKILDNWITIQEMLAHGARSADGKRVYNPLLSVTTV

SEQ ID NO: 7988 - protein, 407 aa, Homo sapiens
MIRNGRGAAGGAEQPGPGGRRAVRVWCDGCYDMVHYGHSNQLRQARAMGDYLIVGVHTDEEIAKHKGPPVFTQEERYKMVQAIKWVDEVVPAAPYVTTLETLDKYNCDFCVHGNDITLTVDGRDTYEEVKQAGRYRECKRTQGVSTTDLVGRMLLVTKAHHSSQEMSSEYREYADSFGKPPHPIPAGDILSSEGCSQCPGGRNPWTGVSQFLQTSQKIIQFASGKEPQPGETVIYVAGAFDLFHIGHVDFLEKVHRLAERPYIIAGLHFDQEVNHYKGKNYPIMNLHERTLSVLACRYVSEVVIGAPYAVTAELLSHFKVDLVCHGKTEIIPDRDGSDPYQEPKRRGIFRQIDSGSNLTTDLIVQRIITNRLEYEARNQKKEAKELAFLEAARQQAAQPLGERDGDF

SEQ ID NO: 7989 - protein, 268 aa, Homo sapiens
MGSAKSVPVTPARPPPHNKHLARVADPRSPSAGILRTPIQVESSPQPGLPAGEQLEGLKHAQDSDPRSPTLGIARTPMKTSSGDPPSPLVKQLSEVFETEDSKSNLPPEPVLPPEAPLSSELDLPLGTQLSVEEQMPPWNQTEFPSKQVFSKEEARQPTETPVASQSSDKPSRDPETPRSSGSMRNRWKPNSSKVLGRSPLTILQDDNSPGTLTLRQGKRPSPLSENVSELKEGAILGTGRLLKTGGRAWEQGQDHDKENQHFPLVES

SEQ ID NO: 7990 - protein, 651 aa, Homo sapiens
MARELRALLLWGRRLRPLLRAPALAAVPGGSTSKHEFQAETKKLLDIVARSLYSEKEVFIRELISNASDALEKLRHKLVSDGQALPEMEIHLQTNAEKGTITIQDTGIGMTQEELVSNLGTIARSGSKAFLDALQNQAEASSKIIGQFGVGFYSAFMVADRVEVYSRSAAPGSLGYQWLSDGSGVFEIAEASGVRTGTKIIIHLKSDCKEFSSEARVRDVVTKYSNFVSFPLYLNGRRMNTLQAIWMMDPKDVREWQHEEFYRYVAQAHDKPRYTLHYKTDAPLNIRSIFYVPDMKPSMFDVSRELGSSVALYSRKVLIQTKATDILPKWLRFIRGVVDSEDIPLNLSRELLQESALIRKLRDVLQQRLIKFFIDQSKKDAEKYAKFFEDYGLFMREGIVTATEQEVKEDIAKLLRYESSALPSGQLTSLSEYASRMRAGTRNIYYLCAPNRHLAEHSPYYEAMKKKDTEVLFCFEQFDELTLLHLREFDKKKLISVETDIVVDHYKEEKFEDRSPAAECLSEKETEELMAWMRNVLGSRVTNVKVTLRLDTHPAMVTVLEMGAARHFLRMQQLAKTQEERAQLLQPTLEINPRHALIKKLNQLRASEPGLAQLLVDQIYENAMIAAGLVDDPRAMVGRLNELLVKALERH

SEQ ID NO: 7991 - protein, 1157 aa, Homo sapiens
MKTAQALHRMWIQAVKKLRRWKGRAPGMEELIWEQYTVTLQKDSKRGFGIAVSGGRDNPHFENGETSIVISDVLPGGPADGLLQENDRVVMVNGTPMEDVLHSFAVQQLRKSGKVAAIVVKRPRKVQVAALQASPPLDQDDRAFEVMDEFDGRSFRSGYSERSRLNSHGGRSRSWEDSPERGRPHERARSRERDLSRDRSRGRSLERGLDQDHARTRDRSRGRSLERGLDHDFGPSRDRDRDRSRGRSIDQDYERAYHRAYDPDYERAYSPEYRRGARHDARSRGPRSRSREHPHSRSPSPEPRGRPGPIGVLLMKSRANEEYGLRLGSQIFVKEMTRTGLATKDGNLHEGDIILKINGTVTENMSLTDARKLIEKSRGKLQLVVLRDSQQTLINIPSLNDSDSEIEDISEIESNRSFSPEERRHQYSDYDYHSSSEKLKERPSSREDTPSRLSRMGATPTPFKSTGDIAGTVVPETNKEPRYQEDPPAPQPKAAPRTFLRPSPEDEAIYGPNTKMVRFKKGDSVGLRLAGGNDVGIFVAGIQEGTSAEQEGLQEGDQILKVNTQDFRGLVREDAVLYLLEIPKGEMVTILAQSRADVYRDILACGRGDSFFIRSHFECEKETPQSLAFTRGEVFRVVDTLYDGKLGNWLAVRIGNELEKGLIPNKSRAEQMASVQNAQRDNAGDRADFWRMRGQRSGVKKNLRKSREDLTAVVSVSTKFPAYERVLLREAGFKRPVVLFGPIADIAMEKLANELPDWFQTAKTEPKDAGSEKSTGVVRLNTVRQIIEQDKHALLDVTPKAVDLLNYTQWFPIVIFFNPDSRQGVKTMRQRLNPTSNKSSRKLFDQANKLKKTCAHLFTATINLNSANDSWFGSLKDTIQHQQGEAVWVSEGKMEGMDDDPEDRMSYLTAMGADYLSCDSRLISDFEDTDGEGGAYTDNELDEPAEEPLVSSITRSSEPVQHEEAKTQNKEESYDFSKSYEYKSNPSAVAGNETPGASTKGYPPPVAAKPTFGRSILKPSTPIPPQEGEEVGESSEEQDNAPKSVLGKVKIFEKMDHKARLQRMQELQEAQNARIEIAQKHPDIYAVPIKTHKPDPGTPQHTSSRPPEPQKAPSRPYQDTRGSYGSDAEEEEYRQQLSEHSKRGYYGQSARYRDTEL

SEQ ID NO: 7992 - protein, 87 aa, Homo sapiens
SRRLGGLRPESPESLTSVSRTRRALVEFESNPEETREPGSPPSVQRAGLGSPERPPKTSPGSPRLQQGAGLESPQGQPEPGAASPQP

SEQ ID NO: 7993 - protein, 344 aa, Homo sapiens
MMFSGFNADYEASSSRCSSASPAGDSLSYYHSPADSFSSMGSPVNAQDFCTDLAVSSANFIPTVTAISTSPDLQWLVQPALVSSVAPSQTRAPHPFGVPAPSAGAYSRAGVVKTMTGGRAQSIGRRGKVEQETDQLEDEKSALQTEIANLLKEKEKLEFILAAHRPACKIPDDLGFPEEMSVASLDLTGGLPEVATPESEEAFTLPLLNDPEPKPSVEPVKSISSMELKTEPFDDFLFPASSRPSGSETARSVPDMDLSGSFYAADWEPLHSGSLGMGPMATELEPLCTPVVTCTPSCTAYTSSFVFTYPEADSFPSCAAAHRKGSSSNEPSSDSLSSPTLLAL

SEQ ID NO: 7994 - protein, 205 aa, Homo sapiens
AKPGWKNSIRHNLSLHDMFVRETSANGKVSFWTIHPSANRYLTLDQVFKPLDPGSPQLPEHLESQQQKRPNPELRRNMTIKTELPLGARRKMKPLLPRVSSYLVPIQFPVNQSLVLQPSVKVPLPLAASLMSSELARHSKRVRIAPKVLLAEEGIAPLSSAGPGKEEKLLFGEGFSPLLPVQTIKEEEIQPGEEMPHLARPIKVE

SEQ ID NO: 7995 - protein, 382 aa, Homo sapiens
MEKPDIGMPEPDAQRFFHQLMAGVVYLHGIGITHRDIKPENLLLDERDNLKISDFGLATVFRYNNRERLLNKMCGTLPYVAPELLKRREFHAEPVDVWSCGIVLTAMLAGELPWDQPSDSCQEYSDWKEKKTYLNPWKKIDSAPLALLHKILVENPSARITIPDIKKDRWYNKPLKKGAKRPRVTSGGVSESPSGFSKHIQSNLDFSPVNSASSEENVKYSSSQPEPRTGLSLWDTSPSYIDKLVQGISFSQPTCPDHMLLNSQLLGTPGSSQNPWQRLVKRMTRFFTKLDADKSYQCLKETCEKLGYQWKKSCMNQVTISTTDRRNNKLIFKVNLLEMDDKILVDFRLSKGDGLEFKRHFLKIKGKLIDIVSSQKIWLPAT

SEQ ID NO: 7996 - protein, 57 aa, Homo sapiens
MSEKSVEAAAELSAKDLKEKKEKVEEKASRKERKKEVVEAPVPLVVMVGKACSQPEA

SEQ ID NO: 7997 - protein, 268 aa, Homo sapiens
MTTDEGAKNNEESPTATVAEQGEDITSKKDRGVLKIVKRVGNGEETPMIGDKVYVHYKGKLSNGKKFDSSHDRNEPFVFSLGKGQVIKAWDIGVATMKKGEICHLLCKPEYAYGSAGSLPKIPSNATLFFEIELLDFKGEDLFEDGGIIRRTKRKGEGYSNPNEGATVEIHLEGRCGGRMFDCRDVAFTVGEGEDHDIPIGIDKALEKMQREEQCILYLGPRPKNPGRWIPKKNWSRLPLSKRREPYTSRCVSPYAILSISKNLFKCW

SEQ ID NO: 7998 - protein, 590 aa, Homo sapiens
MRKVPCKKDAASGSFFARDNTANFLHWCRDIGVDETYLFESEGLVLHKDPRQVYLCLLEIGRIVSRYGVEPPVLVKLEKEIELEETLLNTSGPEDSISIPKSCCRHEELHEAVKHIAEDPPCSCSHRFSIEYLSEGRYRLGDKILFIRMLHGKHVMVRVGGGWDTLQGFLLKYDPCRILQFATLEQKILAFQKGVSNESVPDSPARTPQPPEMNPLSAVNMFQKQNSKPSVPVSIPKSKEKQGRPPGALVPASSLKGGNLGSMSVRSKLPNSPAASSHPKLKSSKGITKKPQAPSNNASSSLASLNPVGKNTSSPALPRTAPCISESPRKCISSPNTPKAKVIPAQNSADLPESTLLPNKCSGKTQPKYLKHNHISSRDNAVSHLAAHSNSSSKCPKLPKANIPVRPKPSFQSSAKMTKTSSKTIATGLGTQSQPSDGAPQAKPVPAQKLKSALNLNQPVSVSSVSPVKATQKSKDKNIVSATKKQPQNKSAFQKTGPSSLKSPGRTPLSIVSLPQSSTKTQTAPKSAQTVAKSQHSTKGPPRSGKTPASIRKPPSSVKDADSGDKKPTAKKKEDDDHYFVMTGSKKPRK

SEQ ID NO: 7999 - protein, 152 aa, Homo sapiens
MLVDGPSERPALCFLLLAVAMSFFGSALSIDETRAHLLLKEKMMRLGGRLVLNTKEELANERLMTLKIAEMKEAMRTLIFPPSMHFFQAKHLIERSQVFNILRMMPKGAALHLHDIGIVTMDWLVRNVTYRPHCHICFTPRGIMQFRFAHPT

SEQ ID NO: 8000 - protein, 133 aa, Homo sapiens
MAVFNQKSVSDMIKEFRKNWRALCNSERTTLCGADSMLLALQLSMAENNKQHSGEFTVSLSDVLLTWKYLLHEKLNLPVENMDVTDHYEDVRKIYDDFLKNSNMLDLIDVYQKCRALTSNCENYNTVSPVSIF

SEQ ID NO: 8001 - protein, 142 aa, Homo sapiens
MENDNTVLLNPPLFALDKDAPLRYAGEICGFRLHGSGVPFEAVILDKATGEGLIRAKEPVDCEAQKEHTFTIQAYDCGEGPDGANTKKSHKATVHVRVNDVNEFAPVFVERLYRAAVTEGKLYDRILRVEAIDGDCSPQYSQ

SEQ ID NO: 8002 - protein, 385 aa, Homo sapiens
MFQFVFSRVYCINPARRKWKEFEKMLGCAEEGHASLGRDPDWASYTLGVFICLSCSGIHRNIPQVSKVKSVRLDAWEEAQVEFMASHGNDAARARFESKVPSFYYRPTPSDCQLLREQWIRAKYERQEFIYPEKQEPYSAGYREGFLWKRGRDNGQFLSRKFVLTEREGALKYFNRNDAKEPKAVMKIEHLNATFQPAKIGHPHGLQVTYLKDNSTRNIFIYHEDGKEIVDWFNALRAARFHYLQVAFPGAGDADLVPKLSRNYLKEGYMEKTGPKQTEGFRKRWFTMDDRRLMYFKDPLDAFARGEVFIGSKESGYTVLHGFPPSTQGHHWPHGITIVTPDRKFLFACETESDQREWVAAFQKAVDRPMLPQEYAVEAHFKHKP

SEQ ID NO: 8003 - protein, 236 aa, Homo sapiens
MEQVNELKEKGNKALSVGNIDDALQCYSEAIKLDPHNHVLYSNRSAAYAKKGDYQKAYEDGCKTVDLKPDWGKGYSRKAAALEFLNRFEEAKRTYEEGLKHEANNPQLKEGLQNMEARLAERKFMNPFNMPNLYQKLESDPRTRTLLSDPTYRELIEQLRNKPSDLGTKLQDPRIMTTLSVLLGVDLGSMDEEEEIATPPPPPPPKKETKPEPMEEDLPENKKQVLFFSLLTVTYL

SEQ ID NO: 8004 - protein, 81 aa, Homo sapiens
MGRKLDPTKEKRGPGRKARKQKGAETELVRFLPAVSDENSKRLSSRARKRAAKRRLGSVEAPKTNKSPEAKPLPGKLPKGP

SEQ ID NO: 8005 - protein, 176 aa, Homo sapiens
MVVITNKHKPWIEAEYQGIVMENDNTVLLNPPLFALDKDAPLRYAGEICGFRLHGSGVPFEAVILDKATGEGLIRAKEPVDCEAQKEHTFTIQAYDCGEGPDGANTKKSHKATVHVRVNDVNEFAPVFVERLYRAAVTEGKLYDRILRVEAIDGDCSPQYSQICYYEILTPNTPFL

SEQ ID NO: 8006 - protein, 206 aa, Homo sapiens
KEKAKGIQAKVTAAKEDWKNFHSNLHQKESALENLKIQMKDFEVSAEPIQDWLSKTEKMVHESSNRLYDLPAKRREQQKLQEKVSRLDRIVAEHNQFSLGIKELQDWMTDAIHMLDSYCHPTSDKSVLDSRTLKLEVCIFTQKYLQPTEFVFLKISRLHPPGVMMSHSLHDKSQMLCECNAVCLGCTCQRIPESSDPGCFPKNKIK

SEQ ID NO: 8007 - protein, 404 aa, Homo sapiens
MPGLMRMRERYSASKPLKGARIAGCLHMTVETAVLIETLVTLGAEVQWSSCNIFSTQDHAAAAIAKAGIPVYAWKGETDEEYLWCIEQTLYFKDGPLNMILDDGGDLTNLIHTKYPQLLPGIRGISEETTTGVHNLYKMMANGILKVPAINVNDSVTKSKFDNLYGCRESLIDGIKRATDVMIAGKVAVVAGYGDVGKGCAQALRGFGARVIITEIDPINALQAAMEGYEVTTMDEACQEGNIFVTTTGCIDIILGRHFEQMKDDAIVCNIGHFDVEIDVKWLNENAVEKVNIKPQVDRYRLKNGRRIILLAEGRLVNLGCAMGHPSFVMSNSFTNQVMAQIELWTHPDKYPVGVHFLPKKLDEAVAEAHLGKLNVKLTKLTEKQAQYLGMSCDGPFKPDHYRY

SEQ ID NO: 8008 - protein, 888 aa, Homo sapiens
MQRSIMAALKEWNGVVSESDSPVKRPGRKAARVLGSEGEEEDEALSPAKGQKPALDCSQVSPPRPATSPENNASLSDTSPMDSSPSGIPKRRTARKQLPKRTIQEVLEEQSEDEDREAKRKKEEEEETPKESLTEAEVATEKEGEDGDQPTTPPKPLKTSKAETPTESVSEPEVATKQELQEEEEQTKPPRRAPKTLSSFFTPRKPAVKKEVKEEEPGAPGKEGAAEGPLDPSGYNPAKNNYHPVEDACWKPGQKVPYLAVARTFEKIEEVSARLRMVETLSNLLRSVVALSPPDLLPVLYLSLNHLGPPQQGLELGVGDGVLLKAVAQATGRQLESVRAEAAEKGDVGLVAENSRSTQRLMLPPPPLTASGVFSKFRDIARLTGSASTAKKIDIIKGLFVACRHSEARFIARSLSGRLRLGLAEQSVLAALSQAVSLTPPGQEFPPAMVDAGKGKTAEARKTWLEEQGMILKQTFCEVPDLDRIIPVLLEHGLERLPEHCKLSPGIPLKPMLAHPTRGISEVLKRFEEAAFTCEYKYDGQRAQIHALEGGEVKIFSRNQEDNTGKYPDIISRIPKIKLPSVTSFILDTEAVAWDREKKQIQPFQVLTTRKRKEVDASEIQVQVCLYAFDLIYLNGESLVREPLSRRRQLLRENFVETEGEFVFATSLDTKDIEQIAEFLEQSVKDSCEGLMVKTLDVDATYEIAKRSHNWLKLKKDYLDGVGDTLDLVVIGAYLGRGKRAGRYGGFLLASYDEDSEELQAICKLGTGFSDEELEEHHQSLKALVLPSPRPYVRIDGAVIPDHWLDPSAVWEVKCADLSLSPIYPAARGLVDSDKGISLRFPRFIRVREDKQPEQATTSAQVACLYRKQSQIQNQQGEDSGSDPEDTY

SEQ ID NO: 8009 - protein, 555 aa, Homo sapiens
MFLLCLTGNPLREEDRLGNHASDICGGSELDAVKTDSSLPSPSSLWSASHPSSSKKMDGYILSLVQKKTHPVRTNKPRTSVNADPTKGLLRNGSVCVRAPGGVSQGNSVNLKNSKQACLPSGGIPSLNNGTFSPPKQWSKESKAEQAESKRVPLPEGCPSGAASDLQSKHLPKTAKPASQEHARCSAIGTGESPKESAQLSGASPKESPSRGPAPPQENKVVQPLKKMSQKNSLQGVPPATPPLLSTAFPVEERPALDFKSEGSSQSLEEAHLVKAQFIPGQQPSVRLHRGHRNMGVVKNSSLKHRGPALQGLENGLPTVREKTRAGSKKCRFPDDLDTNKKLKKASSKGRKSGGGPEAGVPGRPAGGGHRAGSRAHGHGREAVVAKPKHKRTDYRRWKSSAEISYEEALRRARRGRRENVGLYPAPVPLPYASPYAYVASDSEYSAECESLFHSTVVDTSEDEQSNYTTNCFGDSESSVSEGEFVGESTTTSDSEESGGLIWSQFVQTLPIQTVTAPDLHNHPAKTFVKIKASHNLKKKILRFRSGSLKLMTTV

SEQ ID NO: 8010 - protein, 91 aa, Homo sapiens
MAAASIANIVKSSLGPVGLDKMLVDDIGDVTITNDGATILKLLEVEHPAAKVLCELADLQDKEVGDGTTSVVIIAAELLKNADELVKQKIH

SEQ ID NO: 8011 - protein, 481 aa, Homo sapiens
MGCSAKARWAAGALGVAGLLCAVLGAVMIVMVPSLIKQQVLKNVRIDPSSLSFNMWKEIPIPFYLSVYFFDVMNPSEILKGEKPQVRERGPYVYREFRHKSNITFNNNDTVSFLEYRTFQFQPSKSHGSESDYIVMPNILVLGAAVMMENKPMTLKLIMTLAFTTLGERAFMNRTVGEIMWGYKDPLVNLINKYFPGMFPFKDKFGLFAELNNSDSGLFTVFTGVQNISRIHLVDKWNGLSKVDFWHSDQCNMINGTSGQMWPPFMTPESSLEFYSPEACRSMKLMYKESGVFEGIPTYRFVAPKTLFANGSIYPPNEGFCPCLESGIQNVSTCRFSAPLFLSHPHFLNADPVLAEAVTGLHPNQEAHSLFLDIHPVTGIPMNCSVKLQLSLYMKSVAGIGQTGKIEPVVLPLLWFAESGAMEGETLHTFYTQLVLMPKEKCYLFWSSSKKGSKDKEAIQAYSESLMTSAPKGSVLQEAKL

SEQ ID NO: 8012 - protein, 74 aa, Homo sapiens
MVRPVRHKKPVNYSQFDHSDSDDDFVSATVPLNKKSRTAPKELKQDKPKPNLNNLRKEEIPVQEKTPKKSHRKK

SEQ ID NO: 8013 - protein, 176 aa, Homo sapiens
MGRKLDPTKEKRGPGRKARKQKGAETELVRFLPAVSDENSKRLSSRARKRAAKRRLGSVEAPKTNKSPEAKPLPGKLPKGISAGAVQTAGKKGPQSLFNAPRGKKRPAPGSDEEEEEEDSEEDGMVNHGDLWGSEDDADTVDDYGADSNSEDEEEGEALLPIERAARKQKAREAAA

SEQ ID NO: 8014 - protein, 94 aa, Homo sapiens
MATLKDQLIYNLLKEEQTPQNKITVVGVGAVGMACAISILMKDLADELALVDVIEDKLKGEMMDLQHGSLFLRTPKIVSGKALPNCSYIKLQLD

SEQ ID NO: 8015 - protein, 250 aa, Homo sapiens
MGRKLDPTKEKRGPGRKARKQKGAETELVRFLPAVSDENSKRLSSRARKRAAKRRLGSVEAPKTNKSPEAKPLPGKLPKGAVQTAGKKGPQSLFNAPRGKKRPAPGSDEEEEEEDSEEDGMVNHGDLWGSEDDADTVDDYGADSNSEDEEEGEALLPIERAARKQKAREAAAGIQWSEEETEDEEEEKEVTPESGPPKVEEADGGLQINVDEEPFVLPPAGEMEQDAQAPDLQRVHKRIQDIVGILRDFG

SEQ ID NO: 8016 - protein, 150 aa, Homo sapiens
MDRFLVKGAQGGLLRKQEEQEPTGEEPAVLGGDKESTRKRPRREAPGNGGHSAGPSWRHIRAEGLDCSYTVLFGKAEADEIFQELEKEVEYFTGALARVQVFGKWHSVPRKQATYGDAGLTYTFSGLTLSPKPWIPVLERIRDHVSGVTG

SEQ ID NO: 8017 - protein, 109 aa, Homo sapiens
IAELQELQPSAKDFEVRSLVGCGHFAEVQVVREKATGDIYAMKVMKKKALLAQEQVSFFEEERNILSRSTSPWIPQLQYAFQDKNHLYLVLYSHEKVKMEGTISQQTKL

SEQ ID NO: 8018 - protein, 274 aa, Homo sapiens
MGNTLGLAPMGTLPRRSPRREEPLPNPGSFDELHRLCKDVFPAQMEGVKLVVNKVLSSHFQVAHTIHMSALGLPGYHLHAAYAGDWQLSPTETQQAKFLTWQFDGEYRGDDYTATLTLGNPDLIGESVIMVAHFLQSLTHRLVLGGELVYHRRPGEEGAILTLAGKYSAVHWVATLNVGSGGAHASYYHRANEQVQVGVEFEANTRLQDTTFSFGYHLTLPQANMVFRGLVDSNWCVGAVLEKKMPPLPVTLALGAFLNHWRNRFHCGFSITVG

SEQ ID NO: 8019 - protein, 205 aa, Homo sapiens
NEEKDRKIEDLRQCLNRYKKMQDTVVLAQGKKGKDGEYEELLNSSSISSLLDAQGFSDLEKSPSPTPVMGSPSCDPFNTSVPEEFHTTILQVSIPSLLPATVSMETSEKSKLTPKPETSFEENDGNIILGATVDTQLCDKLLTSSLQKSSSLGNLKKETSDGDRAPAESRPFGTLPPRPPGQDTSMDDNPFGTRKVRSSFGRGFF

SEQ ID NO: 8020 - protein, 89 aa, Homo sapiens
MATLKDQLIYNLLKEEQTPQNKITVVGVGAVGMACAISILMKDLADELALVDVIEDKLKGEMMDLQHGSLFLRTPKIVSGKDSAPRFRD

SEQ ID NO: 8021 - protein, 265 aa, Homo sapiens
MSDSWVPNSASGQDPGGRRRAWAELLAGRVKREKYNPERAQKLKESAVRLLRSHQDLNALLLEVEGPLCKKLSLSKVIDCDSSEAYANHSSSFIGSALQDQASRLGVPVGILSAGMVASSVGQICTAPAETSHPVLLTVEQRSSLLLEAVWHLHVQGIVSLQELLESHPDMHAVGSWLFRNLCCLCEQMEASCQHADVARAMLSDFVQMFVLRGFQKNSDLRRTVEPEKMPQVTVDVLQRMLIFALDALAAGVQEESSTHKIVRC

SEQ ID NO: 8022 - protein, 980 aa, Homo sapiens
MMSDASDMLAAALEQMDGIIAGSKALEYSNGIFDCQSPTSPFMGSLRALHLVEDLRGLLEMMETDEKEGLRCQIPDSTAETLVEWLQSQMTNGHLPGNGDVYQERLARLENDKESLVLQVSVLTDQVEAQGEKIRDLEFCLEEHREKVNATEEMLQQELLSRTSLETQKLDLMAEISNLKLKLTAVEKDRLDYEDKFRDTEGLIQEINDLRLKVSEMDSERLQYEKKLKSTKDELASLKEQLEEKESEVKRLQEKLVCKMKGEGVEIVDRDIEVQKMKKAVESLMAANEEKDRKIEDLRQCLNRYKKMQDTVVLAQGKDGEYEELLNSSSISSLLDAQGFSDLEKSPSPTPVMGSPSCDPFNTSVPEEFHTTILQVSIPSLLPATVSMETSEKSKLTPKPETSFEENDGNIILGATVDTQLCDKLLTSSLQKSSSLGNLKKETSDGEKETIQKTSEDRAPAESRPFGTLPPRPPGQDTSMDDNPFGTRKVRSSFGRGFFKIKSNKRTASAPNLAETEKETAEHLDLAGASSRPKDSQRNSPFQIPPPSPDSKKKSRGIMKLFGKLRRSQSTTFNPDDMSEPEFKRGGTRATAGPRLGWSRDLGQSNSDLDMPFAKWTKEQVCNWLMEQGLGSYLNSGKHWIASGQTLLQASQQDLEKELGIKHSLHRKKLQLALQALGSEEETNHGKLDFNWVTRWLDDIGLPQYKTQFDEGRVDGRMLHYMTVDDLLSLKVVSVLHHLSIKRAIQVLRINNFEPNCLRRRPSDENTIAPSEVQKWTNHRVMEWLRSVDLAEYAPNLRGSGVHGGLMVLEPRFNVETMAQLLNIPPNKTLLRRHLATHFNLLIGAEAQHQKRDAMELPDYVLLTATAKVKPKKLAFSNFGNLRKKKQEDGEEYVCPMELGQASGSASKKGFKPGLDMRLYEEDDLDRLEQMEDSEGTVRQIGAFSEGINNLTHMLKEDDMFKDFAARSPSASITDEDSNV

SEQ ID NO: 8023 - protein, 398 aa, Homo sapiens
MASPLRSAAALARQDCSNGCSAECTGEGGSKEVVGTFKAKDLIVTPATILKEKPDPNNLVFGTVFTDHMLTVEWSSEFGWEKPHIKPLQNLSLHPGSSALHYAVELFEGLKAFRGVDNKIRLFQPNLNMDRMYRSAVRATLPVFDKEELLECIQQLVKLDQEWVPYSTSASLYIRPTFIGTEPSLGVKKPTKALLFVLLSPVGPYFSSGTFNPVSLWANPKYVRAWKGGTGDCKMGGNYGSSLFAQCEAVDNGCQQVLWLYGEDHQITEVGTMNLFLYWINEDGEEELATPPLDGIILPGVTRRCILDLAHQWGEFKVSERYLTMDDLTTALEGNRVREMFGSGTACVVCPVSDILYKGETIHIPTMENGPKLASRILSKLTDIQYGREESDWTIVLS

SEQ ID NO: 8024 - protein, 129 aa, Homo sapiens
MENDNTVLLNPPLFALDKDAPLRYAGEICGFRLHGSGVPFEAVILDKATGEGLIRAKEPVDCEAQKEHTFTIQAYDCGEGPDGANTKKSHKATVHVRVNDVNEFAPVFVERLYRAAVTEGKLYDRILRV

SEQ ID NO: 8025 - protein, 519 aa, Homo sapiens
MTAWFNGVEELGRDECFVCLELDPSNGSFLNAKLYISNWILIYFTRTLQLPAPFNTCTSSKSRGEPGCDSKRECISIHVGQAGVQIGNACWELYCLEHGIQPDGQMPSDKTIGGGDDSFNTFFSETGAGKHVPRAVFVDLEPTVIDEVRTGTYRQLFHPEQLITGKEDAANNYARGHYTIGKEIIDLVLDRIRKLADQCTGLQGFLVFHSFGGGTGSGFTSLLMERLSVDYGKKSKLEFSIYPAPQVSTAVVEPYNSILTTHTTLEHSDCAFMVDNEAIYDICRRNLDIERPTYTNLNRLISQIVSSITASLRFDGALNVDLTEFQTNLVPYPRIHFPLATYAPVISAEKAYHEQLTVAEITNACFEPANQMVKCDPRHGKYMACCLLYRGDVVPKDVNAAIATIKTKRTIQFVDWCPTGFKVGINYQPPTVVPGGDLAKVQRAVCMLSNTTAVAEAWARLDHKFDLMYAKRAFVHWYVGEGMEEGEFSEAREDMAALEKDYEEVGADSADGEDEGEEY

SEQ ID NO: 8026 - protein, 154 aa, Homo sapiens
MENDNTVLLNPPLFALDKDAPLRYAGEICGFRLHGSGVPFEAVILDKATGEGLIRAKEPVDCEAQKEHTFTIQAYDCGEGPDGANTKKSHKATVHVRVNDVNEFAPVFVERLYRAAVTEGKLYDRILRVEAIDGDCSPQYSQICYYEILTPNTP

SEQ ID NO: 8027 - protein, 636 aa, Homo sapiens
MMKEVLSTGQGNTEVIHTGTLQRHESHHIGDFCFQEIEKEIHDIEFQCQEDERNGLEAPMTKIKKLTGSTDQHDHRHAGNKPIKDQLGSSFYSHLPELHIFQIKGEIGNQLEKSTNDAPSVSTFQRISCRPQTQISNNYGNNPLNSSLLPQKQEVHMREKSFQCNKSGKAFNCSSLLRKHQIPHLGDKQYKCDVCGKLFNHEQYLACHDRCHTVEKPYKCKECGKTFSQESSLTCHRRLHTGVKRYNCNECGKIFGQNSALLIDKAIDTGENPYKCNECDKAFNQQSQLSHHRIHTGEKPYKCEECDKVFSRKSTIETHKRIHTGEKPYRCKVCDTAFTWHSQLARHRRIHTAKKTYKCNECGKTFSHKSSLVCHHRLHGGEKSYKCKVCDKAFVWSSQLAKHTRIDCGEKPYKCNECGKTFGQNSDLLIHKSIHTGEQPYKCDECEKVFSRKSSLETHKIGHTGEKPYKCKVCDKAFACHSYLAKHTRIHSGEKPYKCNECSKTFSHRSYLVCHHRVHSGEKPYKCNECSKTFSRRSSLHCHRRLHSGEKPYKCNECGNTFRHCSSLIYHRRLHTGEKSYKCTICDKAFVRNSLLSRHTRIHTAEKPYKCNECGKAFNQQSHLSRHHRIHTGEKP

SEQ ID NO: 8028 - protein, 49 aa, Homo sapiens
MDPIRSFCGKLRSLASTLDCETARLQRALDGEESAFIKIQLKPSYSNSN

SEQ ID NO: 8029 - protein, 397 aa, Homo sapiens
YTLEQALLSASQEIEMHADNPAAIQTVVLQRDDLQNGLLSTCRELSRATAELERAWREYDKLEYDVTVTRNQMQEQLDHLGEVQTESAGIQRAQIQKELWRIQDVMEGLSKHKQQRGTTEIGSHFPVGVVPPRAKSPTPESSTIASYVTLRKTKKMMDLRTERPRSAVEQLCLAESTRPRMTVEEQMERIRRHQQACLREKKKGLNVIGASDQSPLQSPSNLRDNPFRTTQTRRRDDKELDTAIRENDVKPDHETPATEIVQLKETEPQNVDFSKELKKTENISYEMLFEPEPNGVNSVEMMDKERNKDKMPEDVTFSPQDETQTANHKPEEHPEENTKNSVDEQEETVISYESTPEVSRGNQTMAVKSLSPSPESSASPVPSTQPQLTEGSHFMCV

SEQ ID NO: 8030 - protein, 167 aa, Homo sapiens
MIKDCGATWVVLGHSERRHVFGESDELIGQKVAHALAEGLGVIACIGEKLDEREAGITEKVVFEQTKVIADNVKDWSKVVLAYEPVWAIGTGKTATPQQAQEVHEKLRGWLKSNVSDAVAQSTRIIYGGSVTGATCKELASQPDVDGFLVGGASLKPEFVDIINAKQ

SEQ ID NO: 8031 - protein, 408 aa, Homo sapiens
MPQLNGGGGDDLGANDELISFKDEGEQEEKSSENSSAERDLADVKSSLVNESETNQNSSSDSEAERRPPPRSESFRDKSRESLEEAAKRQDGGLFKGPPYPGYPFIMIPDLTSPYLPNGSLSPTARTSNKVPVVQHPHHVHPLTPLITYSNEHFTPGNPPPHLPADVDPKTGIPRPPHPPDISPYYPLSPGTVGQIPHPLGWLVPQQGQPVYPITTGGFRHPYPTALTVNASMSRFPPHMVPPHHTLHTTGIPHPAIVTPTVKQESSQSDVGSLHSSKHQDSKKEEEKKKPHIKKPLNAFMLYMKEMRAKVVAECTLKESAAINQILGRRWHALSREEQAKYYELARKERQLHMQLYPGWSARDNYGKKKKRKRDKQPGETNGEKKSAFATYKVKAAASAHPLQMEAY

SEQ ID NO: 8032 - protein, 371 aa, Homo sapiens
MRRTGPEEEACGVWLDAAALKRRKVQTHLIKPGTKMLTLLPGERKANIYFTQRRAPSTGIHQRSIASFFTLQPGKTNGSDQKSVSSHTESQINKESKKNATQLDHLIPGLAHDCMASPLATSTTADIQEAGLSPQSLQTSGHHRMKTPFSTELSLLQPDTPDCAGDSHTPLAFSFTEDLESSCLLDRKEEKGDSARKWEWLHESKKNYQSMEKHTKLPGDKCCQPLGKTKLERKVSAKENRQAPVLLQTYRESWNGENIESVKQSRSPVSVFSWDNEKNDKDSWSQLFTEDSQGQRVIAHNTRAPFQDVTNNWNWDLGPFPNSPWAQCQEDGPTQNLKPDLLFTQDSEVQALACQQDCCRRSILKRQKHLR

SEQ ID NO: 8033 - protein, 446 aa, Homo sapiens
MAQALGEDLVQPPELQDDSSSLGSDSELSGPGPYRQADRYGFIGGSSAEPGPGHPPADLIRQREMKWVEMTSHWEKTMSRRYKKVKMQCRKGIPSALRARCWPLLCGAHVCQKNSPGTYQELAEAPGDPQWMETIGRDLHRQFPLHEMFVSPQGHGQQGLLQVLKAYTLYRPEQGYCQAQGPVAAVLLMHLPPEEAFWCLVQICEVYLPGYYGPHMEAVRLDAEVFMALLRRLLPHVHKHLQQVGVGPLLYLPEWFLCLFARSLPFPTVLRVWDAFLSEGARVLFRVGLTLVRLALGTAEQRGACPGLLETLGALRAIPPAQLQEEAFMSQVHSVVLSERDLQREIKAQLAQLPDSAPGPPPRPQVRLAGAQAIFEAQQLAGVRRGAKPEVPRIVVQPPEEPRPPRRKPQTRGKTFHGLLTRARGPPIEGPPRPQRGSTSFLDTRF

SEQ ID NO: 8034 - protein, 80 aa, Homo sapiens
MKYGNHCYYFSVEEKDWNSSLEFCLARDSHLLVITDNQEMSLLQVFLSEAFCWIGLRNNSGWRWEDGSPLNFSRISSNSF

SEQ ID NO: 8035 - protein, 302 aa, Homo sapiens
MSDSWVPNSASGQDPGGRRRAWAELLAGRVKREKYNPERAQKLKESAVRLLRSHQDLNALLLEVEGPLCKKLSLSKVIDCDSSEAYANHSSSFIGSALQDQASRLGVPVGILSAGMVASSVGQICTAPAETSHPVLLTVEQRKKLSSLLEFAQYLLAHSMFSRLSFCQELWKIQSSLLLEAVWHLHVQGIVSLQELLESHPDMHAVGSWLFRNLCCLCEQMEASCQHADVARAMLSDFVQMFVLRGFQKNSDLRRTVEPEKMPQVTVDVLQRMLIFALDALAAGVQEESSTHKIVRASAARS

SEQ ID NO: 8036 - protein, 639 aa, Homo sapiens
MQSLTKGNDLHWLACALYVACRKSVPTVSKGTVEGNYVSLTRILKCSEQSLIEFFNKMKKWEDMANLPPHFRERTERLERNFTVSAVIFKKYEPIFQDIFKYPQEEQPRQQRGRKQRRQPCTVSEIFHFCWVLFIYAKGNFPMISDDLVNSYHLLLCALDLVYGNALQCSNRKELVNPNFKGLSEDFHAKDSKPSSDPPCIIEKLCSLHDGLVLEAKGIKEHFWKPYIRKLYEKKLLKGKEENLTGFLEPGNFGESFKAINKAYEEYVLSVGNLDERIFLGEDAEEEIGTLSRCLNAGSGTETAERVQMKNILQQHFDKSKALRISTPLTGVRYIKENSPCVTPVSTATHSLSRLHTMLTGLRNAPSEKLEQILRTCSRDPTQAIANRLKEMFEIYSQHFQPDEDFSNCAKEIASKHFRFAEMLYYKVLESVIEQEQKRLGDMDLSGILEQDAFHRSLLACCLEVVTFSYKPPGNFPFITEIFDVPLYHFYKVIEVFIRAEDGLCREVVKHLNQIEEQILDHLAWKPESPLWEKIRDNENRVPTCEEVMPPQNLERADEICIAGSPLTPRRVTEVRADTGGLGRSITSPTTLYDRYSSPPASTTRRRLFVENDSPSDGGTPGRMPPQPLVNAVPVQNVS

SEQ ID NO: 8037 - protein, 176 aa, Homo sapiens
MAGNKDALLADLESTTSHISKRPVFLSEETPYSYPTGNHTYQEIAVPPPVPPPPSSEALNGTILDPLDQWQPSSSRFIHQQPQSSSPVYGSSAKTSSVSNPQDSVGSPCSRVGEEEHVYSFPNKQKSAEPSPTVMSTSLGSNLSELDRLLLELNAVQHNPPGFPADEANSSPPLPG

SEQ ID NO: 8038 - protein, 1190 aa, Homo sapiens
MKQPIMADGPRCKRRKQANPRRKNVVNYDNVVDTGSETDEEDKLHIAEDDGIANPLDQETSPASVPNHESSPHVSQALLPREEEEDEIREGGVEHPWHNNEILQASVDGPVKNANCTSDFEEYFAKRKLEERDGHAVSIEEYLQRSDTAIIYPEAPEELSRLGTPEANGQEENDLPPGTPDAFAQLLTCPYCDRGYKRLTSLKEHIKYRHEKNEENFSCPLCSYTFAYRTQLERHMVTHKPGTDQHQMLTQGAGNRKFKCTECGKAFKYKHHLKEHLRIHSGEKPYECPNCKKRFSHSGSYSSHISSKKCIGLISVNGRMRNNIKTGSSPNSVSSSPTNSAITQLRNKLENGKPLSMSEQTGLLKIKTEPLDFNDYKVLMATHGFSGTSPFMNGGLGATSPLGVHPSAQSPMQHLGVGMEAPLLGFPTMNSNLSEVQKVLQIVDNTVSRQKMDCKAEEISKLKGYHMKDPCSQPEEQGVTSPNIPPVGLPVVSHNGATKSIIDYTLEKVNEAKACLQSLTTDSRRQISNIKKEKLRTLIDLVTDDKMIENHNISTPFSCQFCKESFPGPIPLHQHERYLCKMNEEIKAVLQPHENIVPNKAGVFVDNKALLLSSVLSEKGMTSPINPYKDHMSVLKAYYAMNMEPNSDELLKISIAVGLPQEFVKEWFEQRKVYQYSNSRSPSLERSSKPLAPNSNPPTKDSLLPRSPVKPMDSITSPSIAELHNSVTNCDPPLRLTKPSHFTNIKPVEKLDHSRSNTPSPLNLSSTSSKNSHSSSYTPNSFSSEELQAEPLDLSLPKQMKEPKSIIATKNKTKASSISLDHNSVSSSSENSDEPLNLTFIKKEFSNSNNLDNKSTNPVFSMNPFSAKPLYTALPPQSAFPPATFMPPVQTSIPGLRPYPGLDQMSFLPHMAYTYPTGAATFADMQQRRKYQRKQGFQGELLDGAQDYMSGLDDMTDSDSCLSRKKIKKTESGMYACDLCDKTFQKSSSLLRHKYEHTGKRPHQCQICKKAFKHKHHLIEHSRLHSGEKPYQCDKCGKRFSHSGSYSQHMNHRYSYCKREAEEREAAEREAREKGHLEPTELLMNRAYLQSITPQGYSDSEERESMPRDGESEKEHEKEGEDGYGKLGRQDGDEEFEEEEEESENKSMDTDPETIRDEEETGDHSMDDSSEDGKMETKSDHEEDNMEDGM

SEQ ID NO: 8039 - protein, 303 aa, Homo sapiens
MSRSNVQPTAAPGQKVMENSSGTPDILTRHFTIDDFEIGRPLGKGKFGNVYLAREKKSHFIVALKVLFKSQIEKEGVEHQLRREIEIQAHLHHPNILRLYNYFYDRRRIYLILEYAPRGELYKELQKSCTFDEQRTATIMEELADALMYCHGKKVIHRDIKPENLLLGLKGELKIADFGWSVHAPSLRRKTMCGTLDYLPPEMIEGRMHNEKVDLWCIGVLCYELLVGNPPFESASHNETYRRIVKVDLKFPASVPMGAQDLISKLLRHNPSERLPLAQVSAHPWVRANSRRVLPPSALQSVA

SEQ ID NO: 8040 - protein, 688 aa, Homo sapiens
MLFNSVLRQPQLGVLRNAPNMEHVLAVANEEGFVRLYNTESQSFRKKCFKEWMAHWNAVFDLAWVPGELKLVTAAGDQTAKFWDVKAGELIGTCKGHQCSLKSVAFSKFEKAVFCTGGRDGNIMVWDTRCNKKDGFYRQVNQISGAHNTSDKQTPSKPKKKQNSKGLAPSVDFQQSVTVVLFQDENTLVSAGAVDGIIKVWDLRKNYTAYRQEPIASKSFLYPGSSTRKLGYSSLILDSTGSTLFANCTDDNIYMFNMTGLKTSPVAIFNGHQNSTFYVKSSLSPDDQFLVSGSSDEAAYIWKVSTPWQPPTVLLGHSQEVTSVCWCPSDFTKIATCSDDNTLKIWRLNRGLEEKPGGDKLSTVGWASQKKKESRPGLVTVTSSQSTPAKAPRAKCNPSNSSPSSAACAPSCAGDLPLPSNTPTFSIKTSPAKARSPINRRGSVSSVSPKPPSSFKMSIRNWVTRTPSSSPPITPPASETKIMSPRKALIPVSQKSSQAEACSESRNRVKRRLDSSCLESVKQKCVKSCNCVTELDGQVENLHLDLCCLAGNQEDLSKDSLGPTKSSKIEGAGTSISEPPSPISPYASESCGTLPLPLRPCGEGSEMVGKENSSPENKNWLLAMAAKRKAENPSPRSPSSQTPNSRRQSGKKLPSPVTITPSSMRKICTYFHRKSQEDFCGPEHSTEL

SEQ ID NO: 8041 - protein, 195 aa, Homo sapiens
MFPQELAQKIKGYQEQIASLNSKCKMLTMKAKHATMLLTVTEVEGLAEGTEDLDGELLPTPSAHPSVVMMTAGRCHTLLSPVTEESGEEGTNSEISSPPACRSPSPVANTDASVNQDIAYYQALSAERLQTDAAKIHPSTSASQEFYEPGLEPSATAKLGDLQRSWETLKNVISEKQRTLYEALERQQKYQDSLQ

SEQ ID NO: 8042 - protein, 534 aa, Homo sapiens
MIPDLTSPYLPNGSLSPTARTYLQMKWPLLDVQAGSLQSRQALKDARSPSPAHIVQSPLPCCTQGHDCQHFYPPSDFTVSTQVFRDMKRSHSLQKVGEPWCIESNKVPVVQHPHHVHPLTPLITYSNEHFTPGNPPPHLPADVDPKTGIPRPPHPPDISPYYPLSPGTVGQIPHPLGWQGQPVYPITTGGFRHPYPTALTVNASMSRFPPHMVPPHHTLHTTGIPHPAIVTPTVKQESSQSDVGSLHSSKHQDSKKEEEKKKPHIKKPLNAFMLYMKEMRAKVVAECTLKESAAINQILGRRWHALSREEQAKYYELARKERQLHMQLYPGWSARDNYGKKKKRKRDKQPGETNEHSECFLNPCLSLPPITDANTPKKCRALFGLDRQTLWCKPCRRKKKCVRYIQGEGSCLSPPSSDGSLLDSPPPSPNLLGSPPRDAKSQTEQTQPLSLSLKPDPLAHLSMMPPPPALLLAEATHKASALCPNGALDLPPAALQPAAPSSSIAQPSTSSLHSHSSLAGTQPQPLSLVTKSLE

SEQ ID NO: 8043 - protein, 589 aa, Homo sapiens
MADALLADLESTTSHISKRPVFLSEETPYSYPTGNHTYQEIAVPPPVPPPPSSEALNGTILDPLDQWQPSSSRFIHQQPQSSSPVYGSSAKTSSVSNPQDSVGSPCSRVGEEEHVYSFPNKQKSAEPSPTVMSTSLGSNLSELDRLLLELNAVQHNPPGFPADEANSSPPLPGALSPLYGVPETNSPLGGKAGPLTKEKPKRNGGRGLEDVRPSVESLLDELESSVPSPVPAITVNQGEMSSPQRVTSTQQQTRISASSATRELDELMASLSDFKIQGLEQRADGERCWAAGWPRDGGRSSPGGQDEGGFMAQGKTGSSSPPGGPPKPGSQLDSMLGSLQSDLNKLGVATVAKGVCGACKKPIAGQVVTAMGKTWHPEHFVCTHCQEEIGSRNFFERDGQPYCEKDYHNLFSPRCYYCNGPILDKVVTALDRTWHPEHFFCAQCGAFFGPEGFHEKDGKAYCRKDYFDMFAPKCGGCARAILENYISALNTLWHPECFVCRECFTPFVNGSFFEHDGQPYCEVHYHERRGSLCSGCQKPITGRCITAMAKKFHPEHFVCAFCLKQLNKGTFKEQNDKPYCQNCFLKLFC

SEQ ID NO: 8044 - protein, 1034 aa, Homo sapiens
MRDFGFGVLQTAPLRSSSPGPLFCGEAYGPYAVGSVNPLPSATPFGPLSPPPLPVTGFLEAASPFSVPLGGGAGSPAAAASSSSPFLAHQQTMQDELLLGLTQQPARPLSGAAATEKLPDHHPGGGTIAGVTHLLPSQDFKPSLHHPSSSSASSCCCCRTSSPQDFSKRQQQQLSSQKRKEFSPPHLPHPPDSKPPPPPPPLHCPGRFSPPPPPAGPLLQPAQLAQRQQQQPPQQFSLLHQQHLSPQDFAPRQRPADLPPLPQLPPSPPAAPRRRHGGAGSPRKTPAAGEGSAAESPNAGLASSTPVNPAPGSMESPNHPLLNSPSNLLPGGALGAGAFSSLQSPDLPHPGGGGGGGGGGPPGGGGGGGSASPPPLPGFGTPWSVQTASPPPQPQQPPPTQPQQQPPPPQQPPQPQPQPPGSSATTPGGGSGGSLSAMPPPSPDSENGFYPGLPSSMNPAFFPSFSPVSPHGCTGLSVPTSGGGGGGFGGPFSATAVPPPPPPAMNIPQQQPPPPAAPQQPQSRRSPVSPQLQQQHQAAAAAFLQQRNSYNHHQPLLKQSPWSNHQSSGWGTGSMSWGAMHGRDHRRTGNMGIPGTMNQISPLKKPFSGNVIAPPKFTRSTPSLTPKSWIEDNVFRTDNNSNTLLPLQVRSSLQLPAWGSDSLQDSWCTAAGTSRIDQDRSRMYDSLNMHSLENSLIDIMRAEHDPLKGRLSYPHPGTDNLLMLNARSYGRRRGRSSLFPIDDGLLDDGHSDQVGVLNSPTCYSAHQNGERIERFSRKVFVGGLPPDIDEDEITASFRRFGPLVVDWPHKAESKSYFPPKGYAFLLFQEESSVQALIDACIEEDGKLYLCVSSPTIKDKPVQIRPWNLSDSDFVMDGSQPLDPRKTIFVGGVPRPLRAVELAMIMDRLYGGVCYAGIDTDPELKYPKGAGRVAFSNQQSYIAAISARFVQLQHGDIDKRVEVKPYVLDDQMCDECQGARCGGKFAPFFCANVTCLQYYCEFCWANIHSRAGREFHKPLVKEGADRPRQIHFRWN

SEQ ID NO: 8045 - protein, 695 aa, Homo sapiens
MPGGGPQGAPAAAGGGGVSHRAGSRDCLPPAACFRRRRLARRPGYMRSSTGPGIGFLSPAVGTLFRFPGGVSGEESHHSESRARQCGLDSRGLLVRSPVSKSAAAPTVTSVRGTSAHFGIQLRGGTRLPDRLSWPCGPGSAGWQQEFAAMDSSETLDASWEAACSDGARRVRAAGSLPSAELSSNSCSPGCGPEVPPTPPGSHSAFTSSFSFIRLSLGSAGERGEAEGCPPSREAESHCQSPQEMGAKAASLDGPHEDPRCLSRPFSLLATRVSADLAQAARNSSRPERDMHSLPDMDPGSSSSLDPSLAGCGGDGSSGSGDAHSWDTLLRKWEPVLRDCLLRNRRQMEVISLRLKLQKLQEDAVENDDYDKAETLQQRLEDLEQEKISLHFQLPSRQPALSSFLGHLAAQVQAALRRGATQQASGDDTHTPLRMEPRLLEPTAQDSLHVSITRRDWLLQEKQQLQKEIEALQARMFVLEAKDQQLRREIEEQEQQLQWQGCDLTPLVGQLSLGQLQEVSKALQDTLASAGQIPFHAEPPETIRSLQERIKSLNLSLKEITTKVCMSEKFCSTLRKKVNDIETQLPALLEAKMHAISGNHFWTAKDLTEEIRSLTSEREGLEGLLSKLLVLSSRNVKKLGSVKEDYNRLRREVEHQETAYAASVHCLGKCGKLTWKLVDCLSRAYSSRKPGEACL

SEQ ID NO: 8046 - protein, 198 aa, Homo sapiens
MAAQGEPQLVLVGDGGTGKTTFVKRHLTGEFEKKYVATLGVEVHPLVFHTNRGPIKFNVWDTAGQEKFGGLRDGYYIQAQCAIIMFDVTSRVTYKNVPNWHRDLVRVCENIPIVLCGNKVDIKDRKVKAKSIVFHRKKNLQYYDISAKSNYNFEKPFLWLARKLIGDPNLEFVAMPALAPPEVVMDPALAAQYEHDLE

SEQ ID NO: 8047 - protein, 170 aa, Homo sapiens
MMSDASDMLAAALEQMDGIIAGSKALEYSNGIFDCQSPTSPFMGSLRALHLVEDLRGLLEMMETDEKEGLRCQIPDSTAETLVEWLQSQMTNGHLPGNGDVYQERLARLENDKESLVLQVSVLTDQVEAQGEKIRDLEFCLEEHREKVNATEEMLQQVCAEARTKMGFPC

SEQ ID NO: 8048 - protein, 70 aa, Homo sapiens
MKFQYKEDHPFEYRKKEGEKIRKKYPDRVPVIVEKAPKARVPDLDKRKYLVPSDLTVGQFYFLIRKRIHL

SEQ ID NO: 8049 - protein, 152 aa, Homo sapiens
HTSLQAGLLRGSVAAAPPGVEGRGARRCADRGGVSEAGAFPGEAWAGPGCAGAEGSQGPSLPNSQPPPEVYVSLIKACGGPGNFCPSFSELQRNFVKHRPTKLKSLLRLVKHWYQQAHHPGSGRPHPQRGRRVQMGHRCSEGLPVPETGLLL

SEQ ID NO: 8050 - protein, 275 aa, Homo sapiens
MSGLEMADHMMAMNHGRFPDGTNGLHHHPAHRMGMGQFPSPHHHQQQQPQHAFNALMGEHIHYGAGNMNATSGIRHAMGPGTVNGGHPPSALAPAARFNNSQFMGPPVASQGGSLPASMQLQKLNNQYFNHHPYPHNHYMPDLHPAAGHQMNGTNQHFRDCNPKHSGGSSTPGGSGGSSTPGGSGSSSGGGAGSSNSGGGSGSGNMPASVAHVPAAMLPPNVIDTDFIDEEVLMSLVIEMGLDRIKELPELWLGQNEFDFMTDFVCKQQPSRVSC

SEQ ID NO: 8051 - protein, 240 aa, Homo sapiens
MFAEFFGGRNPFDTFFGQRNGEEGMDIDDPFSGFPMGMGGFTNVNFGRSRSAQEPARKKQDPPVTHDLRVSLEEIYSGCTKKMKISHKRLNPDGKSIRNEDKILTIEVKKGWKEGTKITFPKEGDQTSNNIPADIVFVLKDKPHNIFKRDGSDVIYPARISLREALCGCTVNVPTLDGRTIPVVFKDVIRPGMRRKVPGEGLPLPKTPEKRGDLIIEFEVIFPERIPQTSRTVLEQVLPI

SEQ ID NO: 8052 - protein, 272 aa, Homo sapiens
MWRVKKLSLSLSPSPQTGKPSMRTPLRELTLQPGALTNSGKRSPACSSLTPSLCKLGLQVRFAWTASRLGCLPREGSNNSSPVDFVNNKRTDLSSEHFSHSSKWLETCQHESDEQPLDPIPQISSTPKTSEEAVDPLGNYMVKTIVLVPSPLGQQQDMIFEARLDTMAETNSISLNGPLRTDDLVREEVAPCMGDRFSEVAAVSEKPIFQESPSHLLEESPPNPCSEQLHCSKESLSSRTEAVREDLVPSESNAFLPSSVLWLSPSTALAAD

SEQ ID NO: 8053 - protein, 72 aa, Homo sapiens
MATLKDQLIYNLLKEEQTPQNKITVVGVGAVGMACAISILMKDLADELALVDVIEDKLKGEMMDLQHGSLFL

SEQ ID NO: 8054 - protein, 87 aa, Homo sapiens
MADRLTQLQDAVNSVRNFIRLASVFLFLEVKQGRKGAQEAKLESGERTERQGFGIKRSLGRRHRELGGLRPAAGRCLKVREGADSFA

SEQ ID NO: 8055 - protein, 744 aa, Homo sapiens
MAEISNLKLKLTAVEKDRLDYEDKFRDTEGLIQEINDLRLKVSEMDSERLQYEKKLKSTKSLMAKLSSMKIKVGQMQYEKQRMEQKWESLKDELASLKEQLEEKESEVKRLQEKLVCKMKGEGVEIVDRDIEVQKMKKAVESLMAANEEKDRKIEDLRQCLNRYKKMQDTVVLAQGKKGKDGEYEELLNSSSISSLLDAQGFSDLEKSPSPTPVMGSPSCDPFNTSVPEEFHTTILQVSIPSLLPATVSMETSEKSKLTPKPETSFEENDGNIILGATVDTQLCDKLLTSSLQKSSSLGNLKKETSDGEKETIQKTSEDRAPAESRPFGTLPPRPPGQDTSMDDNPFGTRKVRSSFGRGFFKIKSNKRTASAPNLAETEKETAEHLDLAGASSRPKDSQRNSPFQIPPPSPDSKKKSRGIMKLFGKLRRSQSTTFNPDDMSEPEFKRGGTRATAGPRLGWSRDLGQSNSDLDMPFAKWTKEQVCNWLMEQGLGSYLNSGKHWIASGQTLLQASQQDLEKELGIKHSLHRKKLQLALQALGSEEETNHGKLDFNWVTRWLDDIGLPQYKTQFDEGRVDGRMLHYMTVDDLLSLKVVSVLHHLSIKRAIQVLRINNFEPNCLRRRPSDENTIAPSEVQKWTNHRVMEWLRSVDLAEYAPNLRGSGVHGGLMVLEPRFNVETMAQLLNIPPNKTLLRRHLATHFNLLIGAEAQHQKRDAMELPDYVLLTATAKVKPKKLAFSNFGNL

SEQ ID NO: 8056 - protein, 432 aa, Homo sapiens
MLALPLPPCWSGAPPGEEGESAAGPWCFQHPVSLQAGSRCTTVWKRLPRVRDGCTGRPGPGPACCAEPPAAPVSPDLNLLPGRNPPACNGFFRRSIQKNMVYTCHRDKNCIINKVTRNRCQYCRLQKCFEVGMSKEAVRNDRNKKKKEVKEEGSPDSYELSPQLEELITKVSKAHQETFPSLCQLGKYTTNSSADHRVQLDLGLWDKFSELATKCIIKIVEFAKRLPGFTGLSIADQITLLKAACLDILMLRICTRYTPEQDTMTFSDGLTLNRTQMHNAGFGPLTDLVFAFAGQLLPLEMDDTETGLLSAICLICGDRMDLEEPEKVDKLQEPLLEALRLYARRRRPSQPYMFPRMLMKITDLRGISTKGAERAITLKMEIPGPMPPLIREMLENPEMFEDDSSQPGPHPNASSEDEVPGGQGKGGLKSPA

SEQ ID NO: 8057 - protein, 118 aa, Homo sapiens
MAPQMYEFHLPLSPEELLKSGGVNQYVVQEVLSIKHLPPQLRAFQAAFRAQGPLAMLQHFDTIYSILHHFRSIDPGLKEDTLQFLIKVVSRHSQELPAILDDTTLSGSDRNAHLNALK

SEQ ID NO: 8058 - protein, 100 aa, Homo sapiens
MEGPLSVFGDRSTGETIRSQNVMAAASIANIVKSSLGPVGLDKMLVDDIGDVTITNDGATILKLLEVEHPAAKVLCELADLQDKEVGDGTTSVGSSALYQ

SEQ ID NO: 8059 - protein, 48 aa, Homo sapiens
GILSALGNFLAQMIEKKRKKENSRSLDVGGPLRYAVYGGKTPQPSPPR

SEQ ID NO: 8060 - protein, 66 aa, Homo sapiens
MATSSQYRQLLSDYGPPSLGYTQGTGNSQVPQSKYAELLAIIEELGKEIRPTYAGSKSAMERLKRG

SEQ ID NO: 8061 - protein, 183 aa, Homo sapiens
MAVFNQKSVSDMIKEFRKNWRALCNSERTTLCGADSMLLALQLSMAENNKQVQLLARKIIFSYLNLLVNSKNDLAVAYILNIPDRGLGREAFTDLKHAAREKQMSIFLVATSFIRTIELGGKGYAPPPSDPLRTHVKGLSNFINFIDKLDEILGEIPNPRGCKSICWKINNWNEFWKCSSGQK

SEQ ID NO: 8062 - protein, 349 aa, Homo sapiens
MMQNPQILAALQERLDGLVETPTGYIESLPRVVKRRVNALKNLQVKCAQIEAKFYEEVHDLERKYAVLYQPLFDKRFEIINAIYEPTEEECEWKPDEEDEISELKEKAKIEDEKKDEEKEDPKGIPEFWLTVFKNVDLLSDMVQEHDEPILKHLKDIKVKFSDAGQPMSFVLEFHFEPNEYFTNEVLTKTYRMRSEPDDSDPFSFDGPEIMGCTGCQIDWKKGKNVTLKTIKKKQKHKGRGTVRTVTKTVSNDSFFNFFAPPEVPESGDLDDDAEAILAADFEIGHFLRERIIPRSVLYFTGEAIEDDDDDYDEEGEEADEEGEEEGDEENDPDYDPKKDQNPAECKQQ

SEQ ID NO: 8063 - protein, 257 aa, Homo sapiens
HKKPVNYSQFDHSDSDDDFVSATVPLNKKSRTAPKELKQDKPKPNLNNLRKEEIPVQEKTPKKRMALDDKLYQRDLEVALALSVKELPTVTTNVQNSQDKSIEKHGSSKIETMNKSPHISNCSVASDYLDLDKITVEDDVGGVQGKRKAASKAAAQQRKILLEGSDGDSANDTEPDFAPGEDSEDDSDFCESEDNDEDFSMRKSKVKEIKKKEVKVKSPVEKKEKKSKSKCNALDTTRKPLEIRSPSAESKKPKWVP

SEQ ID NO: 8064 - protein, 365 aa, Homo sapiens
MASSGEDISNDDDDMHPAAAGMADGVHLLGFSDEILLHILSHVPSTDLILNVRRTCRKLAALCLDKSLIHTVLLQKDYQASEDKVRQLVKEIGREIQQLSMAGCYWLPGSTVEHVARCRSLVKVNLSGCHLTSLRLSKMLSALQHLRSLAIDVSPGFDASQLSSECKATLSRVRELKQTLFTPSYGVVPCCTSLEKLLLYFEILDRTREGAILSGQLMVGQSNVPHYQNLRVFYARLAPGYINQEVVRLYLAVLSDRTPQNLHAFLISVPGSFAESGATKNLLDSMARNVVLDALQLPKSWLNGSSLLQHMKFNNPFYFSFSRCTLSGGHLIQQVINGGKDLRSLASLNLSGCVHCLSPDSLLCR

SEQ ID NO: 8065 - protein, 607 aa, Homo sapiens
MPQLNGGGGDDLGANDELISFKDEGEQEEKSSENSSAERDLADVKSSLVNESETNQNSSSDSEAERRPPPRSESFRDKSRESLEEAAKRQDGGLFKGPPYPGYPFIMIPDLTSPYLPNGSLSPTARTLHFQSGSTHYSAYKTIEHQIAVQYLQMKWPLLDVQAGSLQSRQALKDARSPSPAHIVSNKVPVVQHPHHVHPLTPLITYSNEHFTPGNPPPHLPADVDPKTGIPRPPHPPDISPYYPLSPGTVGQIPHPLGWLVPQQGQPVYPITTGGFRHPYPTALTVNASMSSFLSSRFPPHMVPPHHTLHTTGIPHPAIVTPTVKQESSQSDVGSLHSSKHQDSKKEEEKKKPHIKKPLNAFMLYMKEMRAKVVAECTLKESAAINQILGRRWHALSREEQAKYYELARKERQLHMQLYPGWSARDNYGKKKKRKRDKQPGETNDANTPKKCRALFGLDRQTLWCKPCRRKKKCVRYIQGEGSCLSPPSSDGSLLDSPPPSPNLLGSPPRDAKSQTEQTQPLSLSLKPDPLAHLSMMPPPPALLLAEATHKASALCPNGALDLPPAALQPAAPSSSIAQPSTSSLHSHSSLAGTQPQPLSLVTKSLE

SEQ ID NO: 8066 - protein, 383 aa, Homo sapiens
MADIDNKEQSELDQDLDDVEEVEEEETGEETKLKARQLTVQMMQNPQILAALQERLDGLVETPTGYIESLPRVVKRRVNALKNLQVKCAQIEAKFYEEVHDLERKYAVLYQPLFDKRFEIINAIYEPTEEECEWKPDEEDEISEELKEKAKIEDEKKDEEKEDPKGIPEFWLTVFKNVDLLSDMVQEHDEPILKHLKDIKVKFSDAGQPMSFVLEFHFEPNEYFTNEVLTKTYRMRSEPDDSDPFSFDGPEIMGCTGCQIDWKKGKNVTLKTIKKKQKHKGRGTVRTVTKTVSNDSFFNFFAPPEVPESGDLDDDAEAILAADFEIGHFLRERIIPRSVLYFTGEAIEDDDDDYDEEGEEADEGYQLFEEVKSCSKLFQRWLQ

SEQ ID NO: 8067 - protein, 152 aa, Homo sapiens
MHLGWNLPLTNNKMMSDASDMLAAALEQMDGIIAGSKALEYSNGIFDCQSPTSPFMGSLRALHLVEDLRGLLEMMETDEKEGLRCQIPDSTAETLVEWLQSQMTNGHLPGNGDVYQERLARLENDKESLVLQVSVLTDQVEAQGEKIRDLEF

SEQ ID NO: 8068 - protein, 361 aa, Homo sapiens
MGEPSGGYTYTQTSIFLFHAKIPFGSKSNMATLKDQLIYNLLKEEQTPQNKITVVGVGAVGMACAISILMKDLADELALVDVIEDKLKGEMMDLQHGSLFLRTPKIVSGKDYNVTANSKLVIITAGARQQEGESRLNLVQRNVNIFKFIIPNVVKYSPNCKLLIVSNPVDILTYVAWKISGFPKNRVIGSGCNLDSARFRYLMGERLGVHPLSCHGWVLGEHGDSSVPVWSGMNVAGVSLKTLHPDLGTDKDKEQWKEVHKQVVESAYEVIKLKGYTSWAIGLSVADLAESIMKNLRRVHPVSTMIKGLYGIKDDVFLSVPCILGQNGISDLVKVTLTSEEEARLKKSADTLWGIQKELQF

SEQ ID NO: 8069 - protein, 117 aa, Homo sapiens
MLSEVLLVSAPGKVILHGEHAVVHGKVALAVSLNLRTFLRLQPHSNGKVDLSLPNIGIKRAWDVARLQSLDTSFLGSHSVMQPGVQWCDHSSLFLQPPGLKRSSCLSLLSSWDHRAR

SEQ ID NO: 8070 - protein, 858 aa, Homo sapiens
MLQQELLSRTSLETQKLDLMAEISNLKLKLTAVEKDRLDYEDKFRDTEGLIQEINDLRLKVSEMDSERLQYEKKLKSTKSLMAKLSSMKIKVGQMQYEKQRMEQKWESLKDELASLKEQLEEKESEVKRLQEKLVCKMKGEGVEIVDRDIEVQKMKKAVESLMAANEEKDRKIEDLRQCLNRYKKMQDTVVLAQGKDGEYEELLNSSSISSLLDAQGFSDLEKSPSPTPVMGSPSCDPFNTSVPEEFHTTILQVSIPSLLPATVSMETSEKSKLTPKPETSFEENDGNIILGATVDTQLCDKLLTSSLQKSSSLGNLKKETSDGEKETIQKTSEDRAPAESRPFGTLPPRPPGQDTSMDDNPFGTRKVRSSFGRGFFKIKSNKRTASAPNLAETEKETAEHLDLAGASSRPKDSQRNSPFQIPPPSPDSKKKSRGIMKLFGKLRRSQSTTFNPDDMSEPEFKRGGTRATAGPRLGWSRDLGQSNSDLDMPFAKWTKEQVCNWLMEQGLGSYLNSGKHWIASGQTLLQASQQDLEKELGIKHSLHRKKLQLALQALGSEEETNHGKLDFNWVTRWLDDIGLPQYKTQFDEGRVDGRMLHYMTVDDLLSLKVVSVLHHLSIKRAIQVLRINNFEPNCLRRRPSDENTIAPSEVQKWTNHRVMEWLRSVDLAEYAPNLRGSGVHGGLMVLEPRFNVETMAQLLNIPPNKTLLRRHLATHFNLLIGAEAQHQKRDAMELPDYVLLTATAKVKPKKLAFSNFGNLRKKKQEDGEEYVCPMELGQASGSASKKGFKPGLDMRLYEEDDLDRLEQMEDSEGTVRQIGAFSEGINNLTHMLKEDDMFKDFAARSPSASITDEDSNV

SEQ ID NO: 8071 - protein, 439 aa, Homo sapiens
MEDKDREHPQAHVDIYEKQPVPFGLVRFGVAPDHPEVKNVINTFTQTAHSGRCAFWGNVEVGRDVTVPELQEAYHAVVLSYGAEDHRALEIPGEELPGVCSARAFVGWYNGLPENQELEPDLSCDTAVILGQGNVALDVARILLTPPEHLERTDITKAALGVLRQSRVKTVWLVGRRGPLQVAFTIKELREMIQLPGARPILDPVDFLGLQDKIKEVPRPRKRLTELLLRTATEKPGPAEAARQASASRAWGLRFFRSPQQVLPSPDGRRAAGVRLAVTRLEGVDEATRAVPTGDMEDLPCGLVLSSIGYKSRPVDPSVPFDSKLGVIPNVEGRVMDVPGLYCSGWVKRGPTGVIATTMTDSFLTGQMLLQDLKAGLLPSGPRPGYAAIQALLSSRGVRPVSFSDWEKLDAEEVARGQGTGKPREKLVDPQEMLRLLGH

SEQ ID NO: 8072 - protein, 16 aa, Homo sapiens
MNSLLIGELSPEQPSF

SEQ ID NO: 8073 - protein, 580 aa, Homo sapiens
MKDYDELLKYYELHETIGTGGFAKVKLACHILTGEMVAIKIMDKNTLGSDLPRIKTEIEALKNLRHQHICQLYHVLETANKIFMVLEGNKDYHLQTCCGSLAYAAPELIQGKSYLGSEADVWSMGILLYVLMCGFLPFDDDNVMALYKKIMRGKYDVPKWLSPSSILLLQQMLQVDPKKRISMKNLLNHPWIMQDYNYPVEWQSKNPFIHLDDDCVTELSVHHRNNRQTMEDLISLWQYDHLTATYLLLLAKKARGKPVRLRLSSFSCGQASATPFTDIKSNNWSLEDVTASDKNYVAGLIDYDWCEDDLSTGAATPRTSQFTKYWTESNGVESKSLTPALCRTPANKLKNKENVYTPKSAVKNEEYFMFPEPKTPVNKNQHKREILTTPNRYTTPSKARNQCLKETPIKIPVNSTGTDKLMTGVISPERRCRSVELDLNQAHMEETPKRKGAKVFGSLERGLDKVITVLTRSKRKGSARDGPRRLKLHYNVTTTRLVNPDQLLNEIMSILPKKHVDFVQKGYTLKCQTQSDFGKVTMQFELEVCQLQKPDVVGIRRQRLKGDAWVYKRLVEDILSSCKV

SEQ ID NO: 8074 - protein, 488 aa, Homo sapiens
MDKILLSSGRDASLMVTNDGATILKNIGVDNPAAKVLVDMSRVQDDEVGDGTTSVTVLAAELLREAESLIAKKIHPQTIIAGWREATKAAREALLSSAVDHGSDEVKFRQDLMNIAGTTLSSKLLTHHKDHFTKLAVEAVLRLKGSGNLEAIHIIKKLGGSLADSYLDEGFLLDKKIGVNQPKRIENAKILIANTGMDTDKIKIFGSRVRVDSTAKVAEIEHAEKEKMKEKVERILKHGINCFINRQLIYNYPEQLFGAAGVMAIEHADFAGVERLALVTGGEIASTFDHPELVKLGSCKLIEEVMIGEDKLIHFSGVALGEACTIVLRGATQQILDEAERSLHDALCVLAQTVKDSRTVYGGGCSEMLMAHAVTQLANRTPGKEAVAMESYAKALRMLPTIIADNAGYDSADLVAQLRAAHSEGNTTAGLDMREGTIGDMAILGITESFQVKRQVLLSAAEAAEVILRVDNIIKAAPRKRVPDHHPC

SEQ ID NO: 8075 - protein, 103 aa, Homo sapiens
MDRSGFGEISSPVIREAEVTRTARKQSAQKRVLLQASQDENFGNTTPRNQVIPRTPSSFRQPFTPTSRSLLRQPDISCILGTGGKSPRLTQSSGFFGNLSMHP

SEQ ID NO: 8076 - protein, 613 aa, Homo sapiens
MAVVTLGEERPIGHLHLALRHLLEQHGDDFDWFFLVPDTTYTEAHGLARLTGHLSLASAAHLYLGRPQDFIGGEPTPGRYCHGGFGVLLSRMLLQQLRPHLEGCRNDIVSARPDEWLGRCILDATGVGCTGDHEGVHYSHLELSPGEPVQEGDPHFRSALTAHPVRDPVHMYQLHKAFARAELERTYQEIQELQWEIQNTSHLAVDGDQAAAWPVGIPAPSRPASRFEVLRWDYFTEQHAFSCADGSPRCPLRGADRADVADVLGTALEELNRRYHPALRLQKQQLVNGYRRFDPARGMEYTLDLQLEALTPQGGRRPLTRRVQLLRPLSRVEILPVPYVTEASRLTVLLPLAAAERDLAPGFLEAFATAALEPGDAAAALTLLLLYEPRQAQRVAHADVFAPVKAHVAELERRFPGARVPWLSVQTAAPSPLRLMDLLSKKHPLDTLFLLAGPDTVLTPDFLNRCRMHAISGWQAFFPMHFQAFHPAVAPPQGPGPPELGRDTGRFDRQAASEACFYNSDYVAARGRLAAASEQEEELLESLDVYELFLHFSSLHVLRAVEPALLQRYRAQTCSARLSEDLYHRCLQSVLEGLGSRTQLAMLLFEQEQGNST

SEQ ID NO: 8077 - protein, 146 aa, Homo sapiens
MKPPSSIQTSEFDSSDEEPIEDEQTPIHISWLSLSRVNCSQFLGLCALPGCKFKDVRRNVQKDTEELKSCGIQDIFVFCTRGELSKYRVPNLLDLYQQCGIITHHHPIADGGTPDIASCCEIMEELTTCLKNYRKTLIQAFEGVLR

SEQ ID NO: 8078 - protein, 81 aa, Homo sapiens
MKYGNHCYYFSVEEKDWNSSLEFCLARDSHLLVITDNQEMSLLQVFLSEAFCWIGLRNNSGWRWEDGSPLNFSRISSNSFV

SEQ ID NO: 8079 - protein, 126 aa, Homo sapiens; identical to SEQ ID NO: 4956

SEQ ID NO: 8080 - protein, 187 aa, Homo sapiens
MGAAHSASEEVRELEGKTGFSSDQIEQLHRRFKQLSGDQPTIRNLRKGPSGLADEINFEDFLTIMSYFRPIDTTMDEEQVELSRKEKLRFLFHMYDSDSDGRITLEEYRNVVEELLSGNPHIEKESARSIADGAMMEAASVCMGQMEPDQVYEGITFEDFLKIWQGIDIETKMHVRFLNMETMALCH

SEQ ID NO: 8081 - protein, 165 aa, Homo sapiens
MGIQGLAKLIADVAPSAIRENDIKSYFGRKVAIDASMSIYQFLIAVRQGGDVLQNEEGETTSHLMGMFYRTIRMMENGIKPVYVFDGKPPQLKSGELAKRSERRAEAEKQLQQAQAAGAEQEVEKFTKRLVKVTKQHNDECKHLLSLMGIPYLDAPSEAEASCAA

SEQ ID NO: 8082 - protein, 46 aa, Homo sapiens
MRQTPLTCSGHTRPVVDLAFSGITPYGYFLISACKAKCGMLSQEMN

SEQ ID NO: 8083 - protein, 281 aa, Homo sapiens
MMSDASDMLAAALEQMDGIIAGSKALEYSNGIFDCQSPTSPFMGSLRALHLVEDLRGLLEMMETDEKEGLRCQIPDSTAETLVEWLQSQMTNGHLPGNGDVYQERLARLENDKESLVLQVSVLTDQVEAQGEKIRDLEFCLEEHREKVNATEEMLQQELLSRTSLETQKLDLMAEISNLKLKLTAVEKDRLDYEDKFRDTEGLIQEINDLRLKVSEMDSERLQYEKKLKSTKDELASLKEQLEEKESEVKRLQEKLVCKMKGEGVEIVDRDENFKKKLKEK

SEQ ID NO: 8084 - protein, 134 aa, Homo sapiens
MPDPAKSAPAPKKGSKKAVTKVQKKDGKKRKRSRKESYSVYVYKVLKQVHPDTGISSKAMGIMNSFVNDIFERIAGEASRLAHYNKRSTITSREIQTAVRLLLPGELAKHAVSEGTKAVTKYTSSKLIGPILWK

SEQ ID NO: 8085 - protein, 82 aa, Homo sapiens
EQVALYVDLDDVAEDDPELVDSICENARPSPLPRPAFSPHSMPAAPSWLPPTLPTGATTLAAAWSRTYSYLLHCSPGLTSSG

SEQ ID NO: 8086 - protein, 415 aa, Homo sapiens
MQRSIMSFFHPKKEGKAKKPEKEASNSSRETEPPPKAALKEWNGVVSESDSPVKRPGRKAARVLGSEGEEEDEALSPAKGQKPALDCSQVSPPRPATSPENNASLSDTSPMDSSPSGIPKRRTEEETPKESLTEAEVATEKEGEDGDQPTTPPKPLKTSKAETPTESVSEPEVATKQELQEEEEQTKPPRRAPKTLSSFFTPRKPAVKKEVKEEEPGAPGKEGAAEGPLDPSGYNPAKNNYHPVEDACWKPGQKVPYLAVARTFEKIEEVSARLRMVETLSNLLRSVVALSPPDLLPVLYLSLNHLGPPQQGLELGVGDGVLLKAVAQATGRERRETRSHNCHPRHPHPRSPLKVGSWSPSGLRQPRKATWGWWPRTAAAPRGSCCHHLRSLPPGSSASSATSPGSLAVLPQPRR

SEQ ID NO: 8087 - protein, 519 aa, Homo sapiens
MEQVNELKEKGNKALSVGNIDDALQCYSEAIKLDPHNHVLYSNRSAAYAKKGDYQKAYEDGCKTVDLKPDWGKGLKHEANNPQLKEGLQNMEARLAERKFMNPFNMPNLYQKLESDPRTRTLLSDPTYRELIEQLRNKPSDLGTKLQDPRIMTTLSVLLGVDLGSMDEEEEIATPPPPPPPKKETKPEPMEEDLPENKKQALKEKELGNDAYKKKDFDTALKHYDKAKELDPTNMTYITNQAAVYFEKGDYNKCRELCEKAIEVGRENREDYRQIAKAYARIGNSYFKEEKYKDAIHFYNKSLAEHRTPDVLKKCQQAEKILKEQERLAYINPDLALEEKNKGNECFQKGDYPQAMKHYTEAIKRNPKDAKLYSNRAACYTKLLEFQLALKDCEECIQLEPTFIKGYTRKAAALEAMKDYTKAMDVYQKALDLDSSCKEAADGYQRCMMAQYNRHDSPEDVKRRAMADPEVQQIMSDPAMRLILEQMQKDPQALSEHLKNPVIAQKIQKLMDVGLIAIR

SEQ ID NO: 8088 - protein, 485 aa, Homo sapiens
MESSKKMDSPGALQTNPPLKLHTDRSAGTPVFVPEQGGYKEKFVKTVEDKYKCEKCHLVLCSPKQTECGHRFCESCMAALLSSSSPKCTACQESIVKDKVFKDNCCKREILALQIYCRNESRGCAEQLMLGHLLVHLKNDCHFEELPCVRPDCKEKVLRKDLRDHVEKACKYREATCSHCKSQVPMIALQVSLLQNESVEKNKSIQSLHNQICSFEIEIERQKEMLRNNESKILHLQRVIDSQAEKLKELDKEIRPFRQNWEEADSMKSSVESLQNRVTELESVDKSAGQVARNTGLLESQLSRHDQMLSVHDIRLADMDLRFQVLETASYNGVLIWKIRDYKRRKQEAVMGKTLSLYSQPFYTGYFGYKMCARVYLNGDGMGKGTHLSLFFVIMRGEYDALLPWPFKQKVTLMLMDQGSSRRHLGDAFKPDPNSSSFKKPTGEMNIASGCPVFVAQTVLENGTYIKDDTIFIKVIVDTSDLPDP

SEQ ID NO: 8089 - protein, 126 aa, Homo sapiens; identical to SEQ ID NO: 5973

SEQ ID NO: 8090 - protein, 160 aa, Homo sapiens
MAPAASRLRAEAGLGALPRRALAQYLLFLRLYPVLTKAATSGILSALGNFLAQMIEKKRKKENSRSLDVGGPLRYAVYGSGCSSPTWQLCSGMPTWPPWGSDDRWENIRCTVDVGLGVSPAQREQNQSSQDVTDSKSGDSRCPKMMDRETEISECQNPVF

SEQ ID NO: 8091 - protein, 162 aa, Homo sapiens
MRLLAPTTRLYNCEVKWTISAGRSRNERCSLPARSKKSLFKDKAQISATDLQTMEALKTTCTMLEEQVMDLEALNDELLEKERQWEAWRSVLGDEKSQFECRVRELQRMLDTEKQSRARADQRITESRQVVELAVKEHKAEILALQQALKEQKLKAESLSDK

SEQ ID NO: 8092 - protein, 400 aa, Homo sapiens
MDGDEMTRIIWQFIKEKLILPHVDIQLKYFDLGLPNRDQTDDQVTIDSALATQKYSVAVKCATITPDEARVEEFKLKKMWKSPNGTIRNILGGTVFREPIICKNIPRLVPGWTKPITIGRHAHGDQYKATDFVADRAGTFKMVFTPKDGSGVKEWEVYNFPAGGVGMGMYNTDESISGFAHSCFQYAIQKKWPLYMSTKNTILKAYDGRFKDIFQEIFDKHYKTDFDKNKIWYEHRLIDDMVAQVLKSSGGFVWACKNYDGDVQSDILAQGFGSLGLMTSVLVCPDGKTIEAEAAHGTVTRHYREHQKGRPTSTNPIASIFAWTRGLEHRGKLDGNQDLIRFAQMLEKVCVETVESGAMTKDLAGCIHGLSNVKLNEHFLNTTDFLDTIKSNLDRALGRQ

SEQ ID NO: 8093 - protein, 482 aa, Homo sapiens
MPQLNGGGGDDLGANDELISFKDEGEQEEKSSENSSAERDLADVKSSLVNESETNQNSSSDSEAERRPPPRSESFRDKSRESLEEAAKRQDGGLFKGPPYPGYPFIMIPDLTSPYLPNGSLSPTARTLHFQSGSTHYSAYKTIEHQIAVQYLQMKWPLLDVQAGSLQSRQALKDARSPSPAHIVSNKVPVVQHPHHVHPLTPLITYSNEHFTPGNPPPHLPADVDPKTGIPRPPHPPDISPYYPLSPGTVGQIPHPLGWLVPQQGQPVYPITTGGFRHPYPTALTVNASMSRFPPHMVPPHHTLHTTGIPHPAIVTPTVKQESSQSDVGSLHSSKHQDSKKEEEKKKPHIKKPLNAFMLYMKEMRAKVVAECTLKESAAINQILGRRWHALSREEQAKYYELARKERQLHMQLYPGWSARDNYGKKKKRKRDKQPGETNEHSECFLNPCLSLPPITGEKKSAFATYKVKAAASAHPLQMEAY

SEQ ID NO: 8094 - protein, 579 aa, Homo sapiens
MPQLNGGGGDDLGANDELISFKDEGEQEEKSSENSSAERDLADVKSSLVNESETNQNSSSDSEAERRPPPRSESFRDKSRESLEEAAKRQDGGLFKGPPYPGYPFIMIPDLTSPYLPNGSLSPTARTYLQMKWPLLDVQAGSLQSRQALKDARSPSPAHIVSNKVPVVQHPHHVHPLTPLITYSNEHFTPGNPPPHLPADVDPKTGIPRPPHPPDISPYYPLSPGTVGQIPHPLGWLVPQQGQPVYPITTGGFRHPYPTALTVNASMSRFPPHMVPPHHTLHTTGIPHPAIVTPTVKQESSQSDVGSLHSSKHQDSKKEEEKKKPHIKKPLNAFMLYMKEMRAKVVAECTLKESAAINQILGRRWHALSREEQAKYYELARKERQLHMQLYPGWSARDNYGKKKKRKRDKQPGETNDLSAPKKCRARFGLDQQNNWCGPCRRKKKCVRYIQGEGSCLSPPSSDGSLLDSPPPSPNLLGSPPRDAKSQTEQTQPLSLSLKPDPLAHLSMMPPPPALLLAEATHKASALCPNGALDLPPAALQPAAPSSSIAQPSTSSLHSHSSLAGTQPQPLSLVTKSLE

SEQ ID NO: 8095 - protein, 235 aa, Homo sapiens
MVRPVRHKKPVNYSQFDHSDSDDDFVSATVPLNKKSRTAPKELKQDKPKPNLNNLRKEEIPVQEKTPKKRMALDDKLYQRDLEVALALSVKELPTVTTNVQNSQDKSIEKHGSSKIETMNKSPHISNCSVASDYLDLDKITVEDDVGGVQGKRKAASKAAAQQRKILLEGSDGDSANDTEPDFAPGEDSEDDSDFCESEDNDEDFSMRKSKVKEIKKKEVKRHLEVAEVAAAHWW

SEQ ID NO: 8096 - protein, 25 aa, Homo sapiens
ITEEAALSKKRATKAKNTGQRGLKM

SEQ ID NO: 8097 - protein, 501 aa, Homo sapiens
MAPERLRSRALSAFKLRGLLLRGEAIKYLTEALQSISELELEDKLEKIINAVEKQPLSSNMIERSVVEAAVQECSQSVDETILLMTNHPAPNLFGTPRDKAEMFRERYTILHQRTHRHELFTPPVIGSHPDESGSKFQLKTIETLLGSTTKIGDAIVLGMITQLKEGKFFLEDPTGTVQLDLSKAQFHSGLYTEACFVLAEGWFEDQVFHVNAFGFPPTEPSSTTRAYYGNINFFGGPSNTSVKTSAKLKQLEEENKDAMFVFLSDVWLDQVEVLEKLRIMFAGYSPAPPTCFILCGNFSSAPYGKNQVQALKDSLKTLADIICEYPDIHQSSRFVFVPGPEDPGFGSILPRPPLAESITNEFRQRVPFSVFTTNPCRIQYCTQEITVFREDLVNKMCRNCVRFPSSNLAIPNHFVKTILSQGHLTPLPLYVCPVYWAYDYALRVYPVPDLLVIADKYDPFTTTNTECLCINPGSFPRSGFSFKVFYPSNKTVEDSKLQGF

SEQ ID NO: 8098 - protein, 86 aa, Homo sapiens
MPMIGDRVFVHYTGWLLDGTKFDSSLDRKDKFSFDLGKGEVIKAWDIAIATMKVGEVCHITCKPEYAYGSAGSPPKIPPNATLVFE

SEQ ID NO: 8099 - protein, 114 aa, Homo sapiens
MATLKDQLIYNLLKEEQTPQNKITVVGVGAVGMACAISILMKDLADELALVDVIEDKLKGEMMDLQHGSLFLRTPKIVSGKDYNVTANSKLVIITAGARQQEGESRLNLVQRNV

SEQ ID NO: 8100 - protein, 75 aa, Homo sapiens
MAQTPAFDKPKVELHVHLDGSIKPETILYYGRRRGIALPANTAEGLLNVIGMDKPLTLPDFLAKFDYYMPAIARL

SEQ ID NO: 8101 - protein, 191 aa, Homo sapiens
KIEVIEIMTDRGSGKKRGFAFVTFDDHDSVDKIVIQKYHTVNGHNCEVRKALSKQEMASASSSQRGRSGSGNFGGGRGGGFGGNDNFGRGGNFSGRGGFGGSRGGGGYGGSGDGYNGFGNDGSNFGGGGSYNDFGNYNNQSSNFGPMKGGNFGGRSSGPYGGGGQYFAKPRNQGGYGGSSSSSSYGSGRRF

SEQ ID NO: 8102 - protein, 190 aa, Homo sapiens
LADLIPKEQARIKTFRQQHGKTVVGQITVDMMYGGMRGMKGLVYETSVLDPDEGIRFRGFSIPECQKLLPKAKGGEEPLPEGLFWLLVTGHIPTEEQVSWLSKEWAKRAALPSHVVTMLDNFPTNLHPMSQLSAAVTALNSESNFARAYAQGISRTKYWEQRSTEISTEKAAVLGPLTLTWTGLTISPTC

SEQ ID NO: 8103 - protein, 176 aa, Homo sapiens
MTHEEHHAAKTLGIGKAIAVLTSGGDAQGMNAAVRSTVRIGLIQGNRVLVVHDGFEGLAKGQIEEAGWSYVGGWTGQGGSKLGTKRTLPKKSFEQISANITKFNIQGLVIIGGFEAYTGGLELMEGRKQFDELCIPFVVIPATVSNNVPGSDFSVGADTALNTICTTCDRIKQSAA

SEQ ID NO: 8104 - protein, 176 aa, Homo sapiens
TPTGYIESLPRVVKRRVNALKNLQVKCAQIEAKFYEEVHDLERKYAVLYQPLFDKRFEIINAIYEPTEEECEWKPDEEDEISEELKEKAKIEDEKKDEEKEDPKGIPEFWLTVFKNVDLLSDMVQEHDEPILKHLKDIKVKFSDAGQPMSFVLEFHFEPNEYFTNEVLTKTYRMSS

SEQ ID NO: 8105 - protein, 373 aa, Homo sapiens
MPKKEKMAKTPLSDEKQLLLFQQKLLAEEEMAKKKERLLSQFLKDKLAKEEHNSALNLNKINTQWRTVLREVKTRELHKDIEILSQTFERVVDCKDNVIKNLEEKHFLRLHLENRVEDLWRKFQDVLKNYTDATEDRKAAFETLQVKDEKSSKEIEVQMKKIQKLQDAITISKGKIMIHSRESEDENRYIRNDKELVLVQLRKLKAQRTQARAASQKNLVRLTLESNATLKALRKIVDKGEKILKLAEICRKFETEEEKVLPFYSSVLTPKEQEGIQKNNLEELTEELTKVMVDYIGMENFWKRYNKVKLEQLSLQHRRAQLLDINGKLREMLKQYLDGISVSDEVLSQLNPLFIVNYQSNLLQPLSIRIAHP

SEQ ID NO: 8106 - protein, 36 aa, Homo sapiens
MSTSLGSNLSELDRLLLELNAVQHNPPGFPADEANS

SEQ ID NO: 8107 - protein, 166 aa, Homo sapiens
VKLYRFLARRTNSTFNQVVLKRLFMSRTNRPPLSLSRMIRKMKLPGRENKTAVVVGTITDDVRVQEVPKLKPCPLHQVCALRVTSRARSRILRAGGKILTFDQLALDSPKGCGTVLLSGPRKGREVYRHFGKAPGTPHSHTKPYVRSKGRKFERARGRRASRGYKN

SEQ ID NO: 8108 - protein, 155 aa, Homo sapiens
MCGICLSSLCAGWRFSVKEMKSERQIQLIREMLMCDTSGSIQLSEEQKSALAFLNRGQPSSSNAGNKRLSTIDESGSILSDISFDKTDESLDWDSSLVKTFKLKKREKRRSTSRQFVDGPPGPVKKTRSIGSAVDQGNESIVAKTTVTVPNDGGP

SEQ ID NO: 8109 - protein, 290 aa, Homo sapiens
MTTRQATKDPLLRGVSPTPSKIPVRSQKRTPFPTVTSCAVDQENQDPRRWVQKPPLNIQRPLVDSAGPRPKARHQAETSQRLVGISQPRNPLEELRPSPRGQNVGPGPPAQTEAPGTIEFVADPAALATILSGEGVKSCHLGRQPSLAKRVLVRGSQGGTTQRVQGVRASAYLAPRTPTHRLDPARASCFSRLEGPGPRGRTLCPQRLQALISPSGPSFHPSTRPSFQELRRETAGSSRTSVSQASGLLLETPVQPGEREVVTHSDEGGVASLGLAQRVPLRENREMSHT

SEQ ID NO: 8110 - protein, 31 aa, Homo sapiens
MSTSLGSNLSELDRLLLELNAVQHNPPGFPA

SEQ ID NO: 8111 - protein, 107 aa, Homo sapiens
MADGVDHIDIYADVGEEFNQEAEYGGHDQIDLYDDVISPSANNGDAPEDRDYMDTLPPTVGDDVGKGAAPNVVYTYTGKRIALYIGNLTWGETEFAKLCHPGWSAVV

SEQ ID NO: 8112 - protein, 95 aa, Homo sapiens
MRLFVSDGVPGCLPVLAAAGRARGRAEVLISTVGPEDCVVPFLTRPKVPVLQLDSGNYLFSTSAICRYFFLLSGWEQDDLTNQWLEWEATELQRS

SEQ ID NO: 8113 - protein, 72 aa, Homo sapiens
MPGEATETVPATEQELPQPQAETGSGTESDSDESVPELEEQELLESLSGNLRISSLSSQNQMSTRALLQILT

SEQ ID NO: 8114 - protein, 207 aa, Homo sapiens
MADIDNKEQSELDQDLDDVEEVEEEETGEETKLKARQLTVQMMQNPQILAALQERLDGLVETPTGYIESLPRVVKRRVNALKNLQVKCAQIEAKFYEEVHDLERKYAVLYQPLFDKRFEIINAIYEPTEEECEWKPDEEDEISVSTNFILEELKEKAKIEDEKKDEEKEDPKGIPEFWLTVFKNVDLLSDMVQEHDEPILKHLKDIK

SEQ ID NO: 8115 - protein, 115 aa, Homo sapiens
MATSRYEPVAEIGVGAYGTVYKARDPHSGHFVALKSVRVPNGGGGGGGLPISTVREVALLRRLEAFEHPNVVRLMDVCATSRTDREIKVTLVFEHVDQDLRTYLDKAPPPGLPAE

SEQ ID NO: 8116 - protein, 107 aa, Homo sapiens
MKSSLPQGVRNVASVCLQIGYPTVASVPHSIINGYKRVLALSVETDYTFPLAEKVKAFLADPSAFVAAAPVAAATTAAPAAAAAPAKVEAKEESEESDEDMGFGLFD

SEQ ID NO: 8117 - protein, 209 aa, Homo sapiens
MMQNPQILAALQERLDGLVETPTGYIESLPRVVKRRVNALKNLQVKCAQIEAKFYEEVHDLERKYAVLYQPLFDKRFEIINAIYEPTEEECEWKPDEEDEISEELKEKAKIEDEKKDEEKEDPKGIPEFWLTVFKNVDLLSDMVQEHDEPILKHLKDIKVKFSDAGQPMSFVLEFHFEPNEYFTNEVLTKTYRMRSEPDDSDPFSFDGP

SEQ ID NO: 8118 - protein, 198 aa, Homo sapiens
TVQMMQNPQILAALQERLDGLVETPTGYIESLPRVVKRRVNALKNLQVKCAQIEAKFYEEVHDLERKYAVLYQPLFDKRFEIINAIYEPTEEECEWKPDEEDEISELKEKAKIEDEKKDEEKEDPKGIPEFWLTVFKNVDLLSDMVQEHDEPILKHLKDIKVKFSDAGQPMSFVLEFHFEPNEYFTNEVLTKTYRMSS

SEQ ID NO: 8119 - protein, 161 aa, Homo sapiens
MTHEEHHAAKTLGIGKAIAVLTSGGDAQGMNAAVRAVVRVGIFTGARVFFVHEGYQGLVDGGDHIKEATWESVSMMLQLGGTVIGSARCKDFREREGRLRAAYNLVKRGITNLCVIGGDGSLTGADTFRSEWSDLLSDLQKAGKITDEEATKSSYLNIVGL

SEQ ID NO: 8120 - protein, 694 aa, Homo sapiens
MTHEEHHAAKTLGIGKAIAVLTSGGDAQGMNAAVRAVVRVGIFTGARVFFVHEGYQGLVDGGDHIKEATWESVSMMLQLGGTVIGSARCKDFREREGRLRAAYNLVKRGITNLCVIGGDGSLTGADTFRSEWSDLLSDLQKAGKITDEEATKSSYLNIVGLVGSIDNDFCGTDMTIGTDSALHRIMEIVDAITTTAQSHQRTFVLEVMGRHCGYLALVTSLSCGADWVFIPECPPDDDWEEHLCRRLSETRTRGSRLNIIIVAEGAIDKNGKPITSEDIKNGSRMGVEAVMALLEGTPDTPACVVSLSGNQAVRLPLMECVQVTKDVTKAMDEKKFDEALKLRGRSFMNNWEVYKLLAHVRPPVSKSGSHTVAVMNVGAPAAGMNAAVRSTVRIGLIQGNRVLVVHDGFEGLAKGQIEEAGWSYVGGWTGQGGSKLGTKRTLPKKSFEQISANITKFNIQGLVIIGGFEAYTGGLELMEGRKQFDELCIPFVVIPATVSNNVPGSDFSVGADTALNTICTANVEHLVQKMKTTVKRGLVLRNEKCNENYTTDFIFNLYSEEGKGIFDSRKNVLGHMQQGGSPTPFDRNFATKMGAKAMNWMSGKIKESYRNGRIFANTPDSGCVLGMRKRALVFQPVAELKDQTDFEHRIPKEQWWLKLRPILKILAKYEIDLDTSDHAHLEHITRKRSGEAAV

SEQ ID NO: 8121 - protein, 162 aa, Homo sapiens
MAPSVPAAEPEYPKGIRAVLLGPPGAGKGTQAPRLAENFCVCHLATGDMLRAMVASGSELGKKLKATMDAGKLVSDEMVVELIEKNLETPLCKNGFLLDGFPRTVRQAEMLDDLMEKRKEKLDSVIEFSIPDSLLIRRITGSIEHRNASASGHVCSDRPTLL

SEQ ID NO: 8122 - protein, 117 aa, Homo sapiens
MIDTLRPVPFASEMAISKTVAWLNEQLELGNERLLLMDCRPQELYESSHIESAINVAIPGIMLRRLQKGNLPVRALFTRGEDRDRFTRRCGTDTVVLYDESSSDWNENTGGESVLGL

SEQ ID NO: 8123 - protein, 105 aa, Homo sapiens
MAGEKVEKPDTKEKKPEAKKVDAGGKVKKGNLKAKKPKKGKPHCSRNPVLVRGIGRYSRSAMYSRKAMYKRKYSAAKSKVEKKKKEKVLATVTKPVGGDKNGGTR

SEQ ID NO: 8124 - protein, 159 aa, Homo sapiens
MAGEKVEKPDTKEKKPEAKKVDAGGKVKKGNLKAKKPKKGKPHCSRNPVLVRGIGRYSRSAMYSRKAMYKRKYSAAKSKVEKKKKEKVLATVTKPVGGDKNGGTRVVKLRKMPRYYPTEDVPRKLLSHGKKPFSQHVRKLRASITPGTILIILTGRHRG

SEQ ID NO: 8125 - protein, 117 aa, Homo sapiens
MDVANLAKVFGPTIVAHAVPNPDPVTMLQDIKRQPKVVERLLSLPLEYWSQFMMVEQENIDPLHVIENSNAFSTPQTPDIKAVPGGGLCVHFTAGEAEIQKGPPSCGQNKSTAAFNY

SEQ ID NO: 8126 - protein, 91 aa, Homo sapiens
MDDLDSEFQTGTSLAAARPCQEGTQCQVPDSQRRPAGGLGVYHLPHLQTACVLVGGDPLLIPNWKPHIPGDCRATPRPPTPVQRGPQWHNP

SEQ ID NO: 8127 - protein, 22 aa, Homo sapiens
MESRVLLRTFCLIFGLGAVWGL

SEQ ID NO: 8128 - protein, 508 aa, Homo sapiens
MAAINPWASWGALTDQSWGMTAVDPWASWALCPQYPAWHVEGSLEEGRRATGLPAAQVQEPVTFKDVAVDFTQEEWGQLDLVQRTLYRDVMLETYGHLLSVGNQIAKPEVISLLEQGEEPWSVEQACPQRTCPEWVRNLESKALIPAQSIFEEEQSHGMKLERYIWDDPWFSRLEVLGCKDQLEMYHMNQSTAMRQMVFMQKQVLSQRSSEFCGLGAEFSQNLNFVPSQRVSQIEHFYKPDTHAQSWRCDSAIMYADKVTCENNDYDKTVYQSIQPIYPARIQTGDNLFKCTDAVKSFNHIIHFGDHKGIHTGEKLYEYKECHQIFNQSPSFNEHPRLHVGENQYNYKEYENIFYFSSFMEHQKIGTVEKAYKYNEWEKVFGYDSFLTQHTSTYTAEKPYDYNECGTSFIWSSYLIQHKKTHTGEKPYECDKCGKVFRNRSALTKHERTHTGIKPYECNKCGKAFSWNSHLIVHKRIHTGEKPYVCNECGKSFNWNSHLIGHQRTHTG

SEQ ID NO: 8129 - protein, 188 aa, Homo sapiens [sequence omitted]

SEQ ID NO: 8130 - protein, 40 aa, Homo sapiens
MEESGAQLLLEMLTFNPHKRISAFRALQHSYLHKDEGNPE

SEQ ID NO: 8131 - protein, 151 aa, Homo sapiens
MRRVVRQSKFRHVFGQAVKNDQCYDDIRVSRVTWDSSFCAVNPRFVAIIIEASGGGAFLVLPLHKTGRIDKSYPTVCGHTGPVLDIDWCPHNDQVIASGSEDCTVMVWQIPENGLTLSLTEPVVILEGHSKRVGIVAWHPTARNVLLSAGG

SEQ ID NO: 8132 - protein, 185 aa, Homo sapiens
MEVHGKPKASPSCSSPTRDSSGVPVSKELLTAGSDGRGGIWDRLLINSQPKSRKTSTLQTVRIERSPLLDQVQTFLPQMARANEKLRKEMAAAPPGRFNIENIDGPHSKVIQMDVALFEMNQSDSKEVDSSEESSQDSSENSSESEDEDDSIPSEVTIDNIKLPNSEGGKGKIEVLDSPASKKKK

SEQ ID NO: 8133 - protein, 110 aa, Homo sapiens
MRLFVSDGVPGCLPVLAAAGRARGRAEVLISTVGPEDCVVPFLTRPKVPVLQLDSGNYLFSTSAICRYFFLLSGWEQDDLTNQWLEWEATELQWSKARRGKMFLVQCGEP

SEQ ID NO: 8134 - protein, 477 aa, Homo sapiens
MEWRNKKRSDWLSMVLRTAGVEEAFGSEVSVRPHRRAPLGSTYLPPAPSGMEAMAASTSLPDPGDFDRNVPRICGVCGDRATGFHFNAMTCEGCKGFFRRSMKRKALFTCPFNGDCRITKDNRRHCQACRLKRCVDIGMMKEFILTDEEVQRKREMILKRKEEEALKDSLRPKLSEEQQRIIAILLDAHHKTYDPTYSDFCQFRPPVRVNDGGGSHPSRPNSRHTPSFSGDSSSSCSDHCITSSDMMDSSSFSNLDLSEEDSDDPSVTLELSQLSMLPHLADLVSYSIQKVIGFAKMIPGFRDLTSEDQIVLLKSSAIEVIMLRSNESFTMDDMSWTCGNQDYKYRVSDVTKAGHSLELIEPLIKFQVGLKKLNLHEEEHVLLMAICIVSPDRPGVQDAALIEAIQDRLSNTLQTYIRCRHPPPGSHLLYAKMIQKLADLRSLNEEHSKQYRCLSFQPECSMKLTPLVLEVFGNEIS

SEQ ID NO: 8135 - protein, 131 aa, Homo sapiens
MPFNGEKQCVGEDQPSDSDSSRFSESMASLSDYECSRQSFASDSSSKSSSPASTSPPRVVTFDEVMATARNLSNLTLAHEIAVNENFQLKQEALPEKSLAGRVKHIVHQAFWDVLDSELNADPPEFEHAIK

SEQ ID NO: 8136 - protein, 139 aa, Homo sapiens
MDTMMLNVRNLFEQLVRRVEILSEGNEVQFIQLAKDFEDFRKKWQRTDHELGKYKDLLMKAETERSALDVKLKHARNQVDVEIKRRQRAEADCEKLERQIQLIREMLMCDTSGSIQLSEEQKSALAFLNRGQPSSSNAG

SEQ ID NO: 8137 - protein, 37 aa, Homo sapiens
MSTSLGSNLSELDRLLLELNAVQHNPPGFPADEANSS

SEQ ID NO: 8138 - protein, 379 aa, Homo sapiens
MADIDNKEQSELDQDLDDVEEVEEEETGEETKLKARQLTVQMMQNPQILAALQERLDGLVETPTGYIESLPRVVKRRVNALKNLQVKCAQIEAKFYEEVHDLERKYAVLYQPLFDKRFEIINAIYEPTEEECEWKPDEEDEISIPASCLGEFSTEELKEKAKIEDEKKDEEKEDPKGIPEFWLTVFKNVDLLSDMVQEHDEPILKHLKDIKVKFSDAGQPMSFVLEFHFEPNEYFTNEVLTKTYRMRSEPDDSDPFSFDGPEIMGCTGCQIDWKKGKNVTLKTIKKKQKHKGRGTVRTVTKTVSNDSFFNFFAPPEVPESGDLDDDAEAILAADFEIGHFLRERIIPRSVLYFTGEAIEDDDDDYDEEGEEADEVMFTK

SEQ ID NO: 8139 - protein, 34 aa, Homo sapiens
MPGEATETVPATEQELPQPQAETVVSHLRVWNRI

SEQ ID NO: 8140 - protein, 114 aa, Homo sapiens
MTTRQATKDPLLRGVSPTPSKIPVRSQKRTPFPTVTSCAVDQENQDPRRWVQKPPLNIQRPLVDSAGPRPKARHQAETSQRLVGISQPRNPLEELRPSPRGQNVGPGPPAQTEA

SEQ ID NO: 8141 - protein, 267 aa, Homo sapiens
MSKSESPKEPEQLRKLFIGGLSFETTDESLRSHFEQWGTLTDCVVMRDPNTKRSRGFGFVTYATVEEVDAAMNARPHKVDGRVVEPKRAVSREDSQRPGAHLTVKKIFVGGIKEDTEEHHLRDYFEQYGKIEVIEIMTDRGSGKKRGFAFVTFDDHDSVDKIVIQKYHTVNGHNCEVRKALSKQEMASASSSQRGRSGSGNFGGGSYNDFGNYNNQSSNFGPMKGGNFGGRSSGPYGGGGQYFAKPRNQGGYGGSSSSSSYGSGRRF

SEQ ID NO: 8142 - protein, 186 aa, Homo sapiens
MDVCATSRTDREIKVTLVFEHVDQDLRTYLDKAPPPGLPAETIKDLMRQFLRGLDFLHANCIVHRDLKPENILVTSGGTVKLADFGLARIYSYQMALTPVVVTLWYRAPEVLLQSTYATPVDMWSVGCIFAEMFRRKPLFCGNSEADQLGKIFDLIGLPPEDDWPRDVSLPRGAFPPRGPRPVQSV

SEQ ID NO: 8143 - protein, 246 aa, Homo sapiens
MPREDRATWKSNYFLKIIQLLDDYPKCFIVGADNVGSKQMQQIRMSLRGKAVVLMGKNTMMRKAIRGHLENNPALEKLLPHIRGNVGFVFTKEDLTEIRDMLLANKSDVQLIKTGDKVGASEATLLNMLNISPFSFGLVIQQVFDNGSIYNPEVLDITEETLHSRFLEGVRNVASVCLQIGYPTVASVPHSIINGYKRVLALSVETDYTFPLAEKVKAFLADPSAFVAAAPVAAATTAAPAAAAAP

SEQ ID NO: 8144 - protein, 119 aa, Homo sapiens
LLPLLLLLLPPPPRVGGFNLDAEAPAVLSGPPGSFFGFSVEFYRPGTDGVSVLVGAPKANTSQPGVLQGGAVYLCPWGASPTQCTPIEFDSKGMRSTVQLAHREGATERPRGHLLPLHR

SEQ ID NO: 8145 - protein, 166 aa, Homo sapiens
MELFLFLSPTSYPSPVWGLGVDPSLQIDVLTELELGESTTGVRQVPGLHNGTKAFLFQDTPRSIKASTATAEQFFQKLRNKHEFTILVTLKQTHLNSGVILSIHHLDHRYLELESSGHRNEVRLHYRSGSHRPHTEVFPYILADDKWHKLSLAISASHLILHIDCN

SEQ ID NO: 8146 - protein, 150 aa, Homo sapiens
MDTMMLNVRNLFEQLVRRVEILSEGNEVQFIQLAKDFEDFRKKWQRTDHELGKYKDLLMKAETERSALDVKLKHARNQVDVEIKRRQRAEADCEKLERQIQLIREMLMCDTSGSIQLSEEQKSALAFLNRGQPSSSNAGNKRLSTIDESG

SEQ ID NO: 8147 - protein, 457 aa, Homo sapiens
MSHTRDSHDSHLMPSPAPVAQPLPGHVVPCPSPFGRAQRVPSPGPPTLTSYSVLRRLTVQPKTRFTPMPSTPRVQQAQWLRGVSPQSCSEDPALPWEQVAVRLFDQESCIRSLEGSGKPPVATPSGPHSNRTPSLQEVKIQRIGILQQLLRQEVEGLVGGQCVPLNGGSSLDMVELQPLLTEISRTLNATEHNSGTSHLPGLLKHSGLPKPCLPEECGEPQPCPPAEPGPPEAFCRSEPEIPEPSLQEQLEVPEPYPPAEPRPLESCCRSEPEIPESSRQEQLEEQLEVPEPCPPAEPGPLQPSTQGQSGPPGPCPRVELGASEPCTLEHRSLESSLPPCCSQWAPATTSLIFSSQHPLCASPPICSLQSLRPPAGQAGLSNLAPRTLALRERLKSCLTAIHCFHEARLDDECAFYTSRAPPSGPTRVCTNPVATLLEWQDALCFIPVGSAAPQGSP

SEQ ID NO: 8148 - protein, 136 aa, Homo sapiens
MCGICLSSLCAGWRFSVKEMKSERQIQLIREMLMCDTSGSIQLSEEQKSALAFLNRGQPSSSNAGNKRLSTIDESGSILSDISFDKTDESLDWDSSLVKTFKLKKREKRRSTSRQFVDGPPGPVKKTRSIGSAVDQ

SEQ ID NO: 8149 - protein, 46 aa, Homo sapiens
MGCGNSTATSAGAGQETMEEYMLAYHLKLSIWCPVKQRRFGKIRRK

SEQ ID NO: 8150 - protein, 197 aa, Homo sapiens
PFDNGVQATGALYSRSLTPDDDVFQYLAHTYASRNPNMKKGDECKNKMNFPNGVTNGYSWYPLQGGMQDYNYIWAQCFEITLELSCCKYPREEKLPSFWNNNKASLIEYIKQVHLGVKGQVFDQNGNPLPNVIVEVQDRKHICPYRTNKYGEYYLLLLPGSYIINVTVPGHDPHITKLRSFACNRGQDEFCLTSLMS

SEQ ID NO: 8151 - protein, 97 aa, Homo sapiens
MPFNGEKQCVGEDQPSDSDSSRFSESMASLSDYECSRQSFASDSSSKSSSPASTSPPRVVTFDEVMATARNLSNLTLAHEIAVNENFQLKQEALPEK

SEQ ID NO: 8152 - protein, 868 aa, Homo sapiens
MTTRQATKDPLLRGVSPTPSKIPVRSQKRTPFPTVTSCAVDQENQDPRRWVQKPPLNIQRPLVDSAGPRPKARHQAETSQRLVGISQPRNPLEELRPSPRGQNVGPGPPAQTEAPGTIEFVADPAALATILSGEGVKSCHLGRQPSLAKRVLVRGSQGGTTQRVQGVRASAYLAPRTPTHRLDPARASCFSRLEGPGPRGRTLCPQRLQALISPSGPSFHPSTRPSFQELRRETAGSSRTSVSQASGLLLETPVQPAFSLPKGEREVVTHSDEGGVASLGLAQRVPLRENREMSHTRDSHDSHLMPSPAPVAQPLPGHVVPCPSPFGRAQRVPSPGPPTLTSYSVLRRLTVQPKTRFTPMPSTPRVQQAQWLRGVSPQSCSEDPALPWEQVAVRLFDQESCIRSLEGSGKPPVATPSGPHSNRTPSLQEVKIQRIGILQQLLRQEVEGLVGGQCVPLNGGSSLDMVELQPLLTEISRTLNATEHNSGTSHLPGLLKHSGLPKPCLPEECGEPQPCPPAEPGPPEAFCRSEPEIPEPSLQEQLEVPEPYPPAEPRPLESCCRSEPEIPESSRQEQLEVPEPCPPAEPRPLESYCRIEPEIPESSRQEQLEVPEPCPPAEPGPLQPSTQGQSGPPGPCPRVELGASEPCTLEHRSLESSLPPCCSQWAPATTSLIFSSQHPLCASPPICSLQSLRPPAGQAGKELAGKECEHKRSSPHCELHTCPAPTPGNLMLPHLPPWPSLALPQEEGRGCTSSPVLLIGLAVGGGGGEDSTWWKYRTPDLPLNFPCPSGLSNLAPRTLALRERLKSCLTAIHCFHEARLDDECAFYTSRAPPSGPTRVCTNPVATLLEWQDALCFIPVGSAAPQGSP

SEQ ID NO: 8153 - protein, 480 aa, Homo sapiens
MRWKDTMRRVVRQSKFRHVFGQAVKNDQCYDDIRVSRVTWDSSFCAVNPRFVAIIIEASGGGAFLVLPLHKTGRIDKSYPTVCGHTGPVLDIDWCPHNDQVIASGSEDCTVMVWQIPENGLTLSLTEPVVILEGHSKRVGIVAWHPTARNVLLSAGCDNAIIIWNVGTGEALINLDDMHSDMIYNVSWNRNGSLICTASKDKKVRVIDPRKQEIVAEKEKAHEGARPMRAIFLADGNVFTTGFSRMSERQLALWNPKNMQEPIALHEMDTSNGVLLPFYDPDTSIIYLCGKGDSSIRYFEITDESPYVHYLNTFSSKEPQRGMGYMPKRGLDVNKCEIARFFKLHERKCEPIIMTVPRKSDLFQDDLYPDTAGPEAALEAEEWFEGKNADPILISLKHGYIPGKNRDLKVVKKNILDSKPTANKKCDLISIPKKTTDTASVQNEAKLDEILKEIKSIKDTICNQDERISKLEQQMAKIAA

SEQ ID NO: 8154 - protein, 75 aa, Homo sapiens
MALLTAAARLLGTKNASCLVLAARHASASSTNLKDILADLIPKEQARIKTFRQQHGKTVVGQITVDMACCSGSCL

SEQ ID NO: 8155 - protein, 59 aa, Homo sapiens
MTHEEHHAAKTLGIGKAIAVLTSGGDAQEDICVRSNGPPLWIPGPCHLSVLWGRLGFYS

SEQ ID NO: 8156 - protein, 208 aa, Homo sapiens
MDVCATSRTDREIKVTLVFEHVDQDLRTYLDKAPPPGLPAETIKDLMRQFLRGLDFLHANCIVHRDLKPENILVTSGGTVKLADFGLARIYSYQMALTPVVVTLWYRAPEVLLQSTYATPVDMWSVGCIFAEMFRRKPLFCGNSEADQLGKIFDLIGLPPEDDWPRDVSLPRGAFPPRGPRPVQSVVPEMEESGAQLLLEMLTFNPHK

SEQ ID NO: 8157 - protein, 231 aa, Homo sapiens
MRDSLLVAKFLGTQDLCLFLNLALSPKEPEQLRKLFIGGLSFETTDESLRSHFEQWGTLTDCVVMRDPNTKRSRGFGFVTYATVEEVDAAMNARPHKVDGRVVEPKRAVSREDSQRPGAHLTVKKIFVGGIKEDTEEHHLRDYFEQYGKIEVIEIMTDRGSGKKRGFAFVTFDDHDSVDKIVIQKYHTVNGHNCEVRKALSKQEMASASSSQRGRSGSGNFGGGRGGGFGG

SEQ ID NO: 8158 - protein, 368 aa, Homo sapiens
MADIDNKEQSELDQDLDDVEEVEEEETGEETKLKARQLTVQMMQNPQILAALQERLDGLVETPTGYIESLPRVVKRRVNALKNLQVKCAQIEAKFYEEVHDLERKYAVLYQPLFDKRFEIINAIYEPTEEECEWKPDEEDEISEELKEKAKIEDEKKDEEKEDPKGIPEFWLTVFKNVDLLSDMVQEHDEPILKHLKDIKVKFSDAGQPMSFVLEFHFEPNEYFTNEVLTKTYRMRSEPDDSDPFSFDGPEIMGCTGCQIDWKKGKNVTLKTIKKKQKHKGRGTVRTVTKTVSNDSFFNFFAPPEVPESGDLDDDAEAILAADFEIGHFLRERIIPRSVLYFTGEAIEDDDDDYDEEGEEADEVMFTK

SEQ ID NO: 8159 - protein, 62 aa, Homo sapiens
PDPHFKRTKHKWRIISPTLLAEYAYVLRVGGDFAYAGAGVYHNRCAGATRLDVHSFRRAPTV

SEQ ID NO: 8160 - protein, 109 aa, Homo sapiens
MNRTVLFLGTGDGQLLKVILGENLTSNCPEVIYEIKEETPVFYKLVPDPVKNIYIYLTAGKEVRRIRVANCNKHKSCSECLTATDPHCGWCHSLQRCTFQGDCVHSENL

SEQ ID NO: 8161 - protein, 130 aa, Homo sapiens
MSRTNRPPLSLSRMIRKMKLPGRENKTAVVVGTITDDVRVQEVPKLKVCALRVTSRARSRILRAGGKILTFDQLALDSPKGCGTVLLSGPRKGREVYRHFGKAPGTPHSHTKPYVRSKGRKFERARGRRA

SEQ ID NO: 8162 - protein, 142 aa, Homo sapiens
MALLTAAARLLGTKNASCLVLAARHASASSTNLKDILADLIPKEQARIKTFRQQHGKTVVGQITVDMMYGGMRGMKGLVYETSVLDPDEGLFWLLVTGHIPTEEQVSWLSKEWAKRAALPSHVVTMLDNFPTNLHPMSQLSA

SEQ ID NO: 8163 - protein, 80 aa, Homo sapiens
ETRNVAGAEAPPPQKRYYRQRAHSNPMADHTLRYGTVTAVPRHTYSGSGDPGEGLRLCTRPDSGPTRSSCRWLPEHRLSP

SEQ ID NO: 8164 - protein, 169 aa, Homo sapiens
MRRVVRQSKFRHVFGQAVKNDQCYDDIRVSRVTWDSSFCAVNPRFVAIIIEASGGGAFLVLPLHKTGRIDKSYPTVCGHTGPVLDIDWCPHNDQVIASGSEDCTVMVWQIPENGLTLSLTEPVVILEGHSKRVGIVAWHPTARNVLLSAGCDNAIIIWNVGTGEALINL

SEQ ID NO: 8165 - protein, 111 aa, Homo sapiens
MLIPKPPPKTDILKSLDTMDDPDTVGSIPVFKTEWIMTHEEHHAAKTLGIGKAIAVLTSGGDAQGMNAAVRAVVRVGIFTGARVFFVHEGYQGLVDGGDHIKEATWESVSM

SEQ ID NO: 8166 - protein, 89 aa, Homo sapiens
MTKSRTMTSRLGYAKKSVATTLRLFGQIVTKLAAQFNFALKFLALTLFPMEHILYATTDQEGITQLGHIREEPPAVPAPIMTSVWTISV

SEQ ID NO: 8167 - protein, 247 aa, Homo sapiens
MPREDRATWKSNYFLKIIQLLDDYPKCFIVGADNVGSKQMQQIRMSLRGKAVVLMGKNTMMRKAIRGHLENNPALEKLLPHIRGNVGFVFTKEDLTEIRDMLLANKVPAAARAGAIAPCEVTVPAQNTGLGPEKTSFFQALGITTKISRGTIEILSDVQLIKTGDKVGASEATLLNMLNISPFSFGLVIQQVFDNGSIYNPEVLDITEETLHSRFLEGVRNVASVCLQIGYPTVASVPHSIINGYKR

SEQ ID NO: 8168 - protein, 120 aa, Homo sapiens
MAGEKVEKPDTKEKKPEAKKVDAGGKVKKGNLKAKKPKKGKPHCSRNPVLVRGIGRYSRSAMYSRKAMYKRKYSAAKSKVEKKKKEKVLATVTKPVGGDKNGGTRVVKLRKMPRYYPTED

SEQ ID NO: 8169 - protein, 64 aa, Homo sapiens
MDTGVIEGGLNVTLTIRLLMHGKEVGSIIGKKGESVKKMREESGARINISEGNCPERIITLAGP

SEQ ID NO: 8170 - protein, 85 aa, Homo sapiens
DNGMFSPSGESCEDIDECGTGRHSCANDTICFNLDGGYDCRCPHGKNCTGDCIHDGKVKHNGQIWVLENDRCSVCSCQVGINEKL

SEQ ID NO: 8171 - protein, 145 aa, Homo sapiens
MSKSESPKEPEQLRKLFIGGLSFETTDESLRSHFEQWGTLTDCVDSQRPGAHLTVKKIFVGGIKEDTEEHHLRDYFEQYGKIEVIEIMTDRGSGKKRGFAFVTFDDHDSVDKIVIQKYHTVNGHNCEVRKALSKQEMASASSSQR

SEQ ID NO: 8172 - protein, 159 aa, Homo sapiens
MRRVVRQSKFRHVFGQAVKNDQCYDDIRVSRVTWDSSFCAVNPRFVAIIIEASGGGAFLVLPLHKTGRIDKSYPTVCGHTGPVLDIDWCPHNDQVIASGSEDCTVMVWQIPENGLTLSLTEPVVILEGHSKRVGIVAWHPTARNVLLSAEKYAGTNCSS

SEQ ID NO: 8173 - protein, 237 aa, Homo sapiens
MADIDNKEQSELDQDLDDVEEVEEEETGEETKLKARQLTVQMMQNPQILAALQERLDGLVETPTGYIESLPRVVKRRVNALKNLQVKCAQIEAKFYEEVHDLERKYAVLYQPLFDKEELKEKAKIEDEKKDEEKEDPKGIPEFWLTVFKNVDLLSDMVQEHDEPILKHLKDIKVKFSDAGQPMSFVLEFHFEPNEYFTNEVLTKTYRMRSEPDDSDPFSFDGPEIMGCTGCQIDWKK

SEQ ID NO: 8174 - protein, 107 aa, Homo sapiens
MDTMMLNVRNLFEQLVRRVEILSEGNEVQFIQLAKDFEDFRKKWQRTDHELGKYKDLLMKAETERSALDVKLKHARNQVDVEIKRRQRAEADCEKLERQIQLIREML

SEQ ID NO: 8175 - protein, 328 aa, Homo sapiens
MADIDNLPRVVKRRVNALKNLQVKCAQIEAKFYEEVHDLERKYAVLYQPLFDKRFEIINAIYEPTEEECEWKPDEEDEISEELKEKAKIEDEKKDEEKEDPKGIPEFWLTVFKNVDLLSDMVQEHDEPILKHLKDIKVKFSDAGQPMSFVLEFHFEPNEYFTNEVLTKTYRMRSEPDDSDPFSFDGPEIMGCTGCQIDWKKGKNVTLKTIKKKQKHKGRGTVRTVTKTVSNDSFFNFFAPPEVPESGDLDDDAEAILAADFEIGHFLRERIIPRSVLYFTGEAIEDDDDDYDEEGEEADEEGEEEGDEENDPDYDPKKDQNPAECKQQ

SEQ ID NO: 8176 - protein, 178 aa, Homo sapiens
MALLTAAARLLGTKNASCLVLAARHASASSTNLKDILADLIPKEQARIKTFRQQHGKTVVGQITVDMMYGGMRGMKGLVYETSVLDPDEGIRFRGFSIPECQKLLPKAKGGEEPLPEGLFWLLVTGHIPTEEQVSWLSKEWAKRAALPSHVVTMLDNFPTNLHPMSQLSAAVTALNSE

SEQ ID NO: 8177 - protein, 81 aa, Homo sapiens
KGPAAGPRSRAAMAQWRKKKGLRKRRGAASQARGSDSEDGEFEIQAEDDARARKLGPGRPLPTFPTSECTSDVEPDTREMA

SEQ ID NO: 8178 - protein, 162 aa, Homo sapiens
MRRVVRQSKFRHVFGQAVKNDQCYDDIRVSRVTWDSSFCAVNPRFVAIIIEASGGGAFLVLPLHKTGRIDKSYPTVCGHTGPVLDIDWCPHNDQVIASGSEDCTVMVWQIPENGLTLSLTEPVVILEGHSKRVGIVAWHPTARNVLLSAGCDNAIIIWNVGT

SEQ ID NO: 8179 - protein, 100 aa, Homo sapiens
MATRGHVQDPNDRRLRPIYDYLDNGNNKMAIQQADKLLKKHKDLHCAKVLKAIGLQRTGKQEEAFTLAQEVAALEPTDDNSLQALTILYREMHRRWHGSI

SEQ ID NO: 8180 - protein, 130 aa, Homo sapiens
MRECISIHVGQAGVQIGNACWELYCLEHGIQPDGQMPSDKTIGGGDDSFNTFFSETGAGKHVPRAVFVDLEPTVIDEVRTGTYRQLFHPEQLITGKEDAANNYARGHYTIGKEIIDLVLDRIRKLVSIVL

SEQ ID NO: 8181 - protein, 121 aa, Homo sapiens
MPREDRATWKSNYFLKIIQLLDDYPKCFIVGADNVGSKQMQQIRMSLRGKAVVLMGKNTMMRKAIRGHLENNPALEKLLPHIRGNVGFVFTKEDLTEIRDMLLANKLLPVLVPLPHVKSLC

SEQ ID NO: 8182 - protein, 156 aa, Homo sapiens
MSKSESPKEPEQLRKLFIGGLSFETTDESLRSHFEQWGTLTDCVVMRDPNTKRSRGFGFVTYATVEEVDAAMNARPHKVDGRVVEPKRAVSREDSQRPGAHLTVKKIFVGGFGGSRGGGGYGGSGDGYNGFGNDGSNFGGGGSYNDFGNYNNQSSN

SEQ ID NO: 8183 - protein, 693 aa, Homo sapiens
MEVNCLTLKDLISPRQPRLDFAVEDGENAQKENIFVDRSRMAPKTPIKNEPIDLSKQKKFTPERNPITPVKFVDRQQAEPWTPTANLKMLISAASPDIRDREKKKGLFRPIENKDDAFTDSLQLDVVGDSAVDEFEKQRPSRKQKSLGLLCQKFLARYPSYPLSTEKTTISLDEVAVSLGVERRRIYDIVNVLESLHLVSRVAKNQYGWHGRHSLPKTLRNLQRLGEEQKYEEQMAYLQQKELDLIDYKFGERKKDGDPDSQEQQLLDFSEPDCPSSSANSRKDKSLRIMSQKFVMLFLVSKTKIVTLDVAAKILIEESQDAPDHSKFKTKVRRLYDIANVLTSLALIKKVHVTEERGRKPAFKWIGPVDFSSSDEELVDVSASVLPELKRETYGQIQVCAKQKLARHGSFNTVQASERIQRKVNSEPSSPYREEQGSGGYSLEIGSLAAVYRQKIEDNSQGKAFASKRVVPPSSSLDPVAPFPVLSVDPEYCVNPLAHPVFSVAQTDLQAFSMQNGLNGQVDVSLASAASAVESLKPALLAGQPLVYVPSASLFMLYGSLQEGPASGSGSERDDRSSEAPATVELSSAPSAQKRLCEERKPQEEDEPATKRQSREYEDGPLSLVMPKKPSDSTDLASPKTMGNRASIPLKDIHVNGQLPAAEEISGKATANSLVSSEWGNPSRNTDVEKPSK

SEQ ID NO: 8184 - protein, 126 aa, Homo sapiens
MTTRQATKDPLLRGVSPTPSKIPVRSQKRTPFPTVTSCAVDQENQDPRRWVQKPPLNIQRPLVDSAGPRPKARHQAETSQRLVGISQPRNPLEELRPSPRGQNVGPGPPAQTGAMACTCNHSYSGG

SEQ ID NO: 8185 - protein, 102 aa, Homo sapiens
MTHEEHHAAKTLGIGKAIAVLTSGGDAQGMNAAVRAVVRVGIFTGARVFFVHEGYQGLVDGGDHIKEATWESVSMMLQLLSSLKIHGQKFNMQCLVKALPRC

SEQ ID NO: 8186 - protein, 80 aa, Homo sapiens
KNYVRVVGRNGESSELDLQGIRIDSDISGTLKFACESIVEEYEDELIEFFSREADNVKDKLCSKRTDLCDHALHISHDEL

SEQ ID NO: 8187 - protein, 36 aa, Homo sapiens
MAAETRNVAGAEAPPPQKRYYRQRAHSNPMADHTLR

SEQ ID NO: 8188 - protein, 244 aa, Homo sapiens
AKLSRAEQRMNRLDQCYCERTCTMKGTTYREFESWIDGCKNCTCLNGTIQCETLICPNPDCPLKSALAYVDGKCSICQFQGRTYFEGERNTVYSSSGVCVLYECKDQTMKLVESSGCPALDCPESHQITLSHSCCKVCKGYDFCSERHNCMENSICRNLNDRAVCSCRDGFRALREDNAYCEDIDECAEGRHYCRENTMCVNTPGSFMCICKTGYIRIDDYSCTEHDECITNQHNCDENALCFN

SEQ ID NO: 8189 - protein, 52 aa, Homo sapiens
MATETVELHKLKLAELKQECLARGLETKGIKQDLIHRLQAYLEEHGRRNKAH

SEQ ID NO: 8190 - protein, 34 aa, Homo sapiens
MRLHDFVSKTVIKPESCVPCGKRIKFGKLSLKCR

SEQ ID NO: 8191 - protein, 163 aa, Homo sapiens
MRRVVRQSKFRHVFGQAVKNDQCYDDIRVSRVTWDSSFCAVNPRFVAIIIEASGGGAFLVLPLHKTGRIDKSYPTVCGHTGPVLDIDWCPHNDQVIASGSEDCTVMVWQIPENGLTLSLTEPVVILEGHSKRVGIVAWHPTARNVLLSAGCDNAIIIWNVGTG

SEQ ID NO: 8192 - protein, 63 aa, Homo sapiens
MGCGNSTATSAGAGQGPAGAAKDVTEESVTEDDKRRNYGGVYVGLPSEAVNMVSSQTKTVRKN

SEQ ID NO: 8193 - protein, 475 aa, Homo sapiens
MWRLPRALCVHAAKTSKLSGPWSRPAAFMSTLLINQPQYAWLKELGLREENEGVYNGSWGGRGEVITTYCPANNEPIARVRQASVADYEETVKKAREAWKIWADIPAPKRGEIVRQIGDALREKIQVLGSLVSLEMGKILVEGVGEVQEYVDICDYAVGLSRMIGGPILPSERSGHALIEQWNPVGLVGIITAFNFPVAVYGWNNAIAMICGNVCLWKGAPTTSLISVAVTKIIAKVLEDNKLPGAICSLTCGGADIGTAMAKDERVNLLSFTGSTQVGKQVGLMVQERFGRSLLELGGNNAIIAFEDADLSLVVPSALFAAVGTAGQRCTTARRLVMDRPGNYVEPTIVTGLGHDASIAHTETFAPILYVFKFKNEEEVFAWNNEVKQGLSSSIFTKDLGRIFRWLGPKGSDCGIVNVNIPTSGAEIGGAFGGEKHTGGGRESGSDAWKQYMRRSTCTINYSKDLPLAQGIKFQ

SEQ ID NO: 8194 - protein, 320 aa, Homo sapiens
MSKSESPKEPEQLRKLFIGGLSFETTDESLRSHFEQWGTLTDCVVMRDPNTKRSRGFGFVTYATVEEVDAAMNARPHKVDGRVVEPKRAVSREDSQRPGAHLTVKKIFVGGIKEDTEEHHLRDYFEQYGKIEVIEIMTDRGSGKKRGFAFVTFDDHDSVDKIVIQKYHTVNGHNCEVRKALSKQEMASASSSQRGRSGSGNFGGGRGGGFGGNDNFGRGGNFSGRGGFGGSRGGGGYGGSGDGYNGFGNDGSNFGGGGSYNDFGNYNNQSSNFGPMKGGNFGGRSSGPYGGGGQYFAKPRNQGGYGGSSSSSSYGSGRRF

SEQ ID NO: 8195 - protein, 234 aa, Homo sapiens
MPFNGEKQCVGEDQPSDSDSSRFSESMASLSDYECSRQSFASDSSSKSSSPASTSPPRVVTFDEVMATARNLSNLTLAHEIAVNENFQLKQEALPEKSLAGRVKHIVHQAFWDVLDSELNADPPEFEHAIKLFEEIREILLSFLTPGGNRLRNQICEVLDTDLIRQQAEHSAVDIQGLANYVISTMGKLCAPVRDNDIRELKATGNIVEVLRQIFHVLDLMQMDMANFTIMSLR

SEQ ID NO: 8196 - protein, 156 aa, Homo sapiens
MPREDRATWKSNYFLKIIQLLDDYPKCFIVGADNVGSKQMQQIRMSLRGKAVVLMGKNTMMRKAIRGHLENNPALEKLLPHIRGNVGFVFTKEDLTEIRDMLLANKVPAAARAGAIAPCEVTVPAQNTGLGPEKTSFFQALGVYCPTIIWFRVMCS

SEQ ID NO: 8197 - protein, 49 aa, Homo sapiens
MPSDKTIGGGDDSFNTFFSETGAGKHVPRAVFVDLEPTVIDEVRTGTYR

SEQ ID NO: 8198 - protein, 250 aa, Homo sapiens
MEAMAASTSLPDPGDFDRNVPRICGVCGDRATGFHFNAMTCEGCKGFFRRSMKRKALFTCPFNGDCRITKDNRRHCQACRLKRCVDIGMMKEFILTDEEVQRKREMILKRKEEEALKDSLRPKLSEEQQRIIAILLDAHHKTYDPTYSDFCQFRPPVRVNDGGGSHPSRPNSRHTPSFSGDSSSSCSDHCITSSDMMDSSSFSNLDLSEEDSDDPSVTLELSQLSMLPHLADLVSYSIQKVIGFAKMIPG

SEQ ID NO: 8199 - protein, 114 aa, Homo sapiens
MMQNPQILAALQERLDGLVETPTGYIESLPRVVKRRVNALKNLQVKCAQIEAKFYEEVHDLERKYAVLYQPLFDKRFEIINAIYEPTEEECEWKPDEEDEISEELKEKAKIEDE

SEQ ID NO: 8200 - protein, 293 aa, Homo sapiens
MDTMMLNVRNLFEQLVRRVEILSEGNEVQFIQLAKDFEDFRKKWQRTDHELGKYKDLLMKAETERSALDVKLKHARNQVDVEIKRRQRAEADCEKLERQIQLIREMLMCDTSGSIQLSEEQKSALAFLNRGQPSSSNAGNKRLSTIDESGSILSDISFDKTDESLDWDSSLVKTFKLKKREKRRSTSRQFVDGPPGPVKKTRSIGSAVDQGNESIVAKTTVTVPNDGGPIEAVSTIETVPYWTRSRRKTGTLQPWNSDSTLNSRQLEPRTETDSVGTPQSNGGMRLHDFVSKT

SEQ ID NO: 8201 - protein, 129 aa, Homo sapiens
MDTMMLNVRNLFEQLVRRVEILSEGNEVQFIQLAKDFEDFRKKWQRTDHELGKYKDLLMKAETERSALDVKLKHARNQVDVEIKRRQRAEADCEKLERQIQLIREMLMCDTSGSIQLSEEQKSALAFLN

SEQ ID NO: 8202 - protein, 462 aa, Homo sapiens
MPMSTILPVTSPCLPATGVTVWELMTFGAEPYAGLRLAEVPDLLEKGERLAQPQICTIDVYMVMVKCWMIDENIRPTFKELANEFTRMARDPPRYLVIKRESGPGIAPGPEPHGLTNKKLEEVELEPELDLDLDLEAEEDNLATTTLGSALSLPVGTLNRPRGSQSLLSPSSGYMPMNQGNLGESCQESAVSGSSERCPRPVSLHPMPRGCLASESSEGHVTGSEAELQEKVSMCRSRSRSRSPRPRGDSAYHSQRHSLLTPVTPLSPPGLEEEDVNGYVMPDTHLKGTPSSREGTLSSVGLSSVLGTEEEDEDEEYEYMNRRRRHSPPHPPRPSSLEELGYEYMDVGSDLSASLGSTQSCPLHPVPIMPTAGTTPDEDYEYMNRQRDGGGPGGDYAAMGACPASEQGYEEMRAFQGPGHQAPHVHYARLKTLRSLEATDSAFDNPDYWHSRLFPKANAQRT

SEQ ID NO: 8203 - protein, 264 aa, Homo sapiens
MADIDNKEQSELDQDLDDVEEVEEEETGEETKLKARQLTVQMMQNPQILAALQERLDGLVETPTGYIESLPRVVKRRVNALKNLQVKCAQIEAKFYEEVHDLERKYAVLYQPLFDKRFEIINAIYEPTEEECEWKPDEEDEISEELKEKAKIEDEKKDEEKEDPKGIPEFWLTVFKNVDLLSDMVQEHDEPILKHLKDIKVKFSDAGQPMSFVLEFHFEPNEYFTNEVLTKTYRMRSEPDDSDPFSFDGPEIMGCTGCQIDWKK

SEQ ID NO: 8204 - protein, 215 aa, Homo sapiens
MADIDNKEQSELDQDLDDVEEVEEEETGEETKLKARQLTVQMMQNPQILAALQERLDGLVETPTGYIESLPRVVKRRVNALKNLQVKCAQIEAKFYEEVHDLERKYAVLYQPLFDKAEDCCHFQVKTWRLLSDLPTMNNGRAVTHIQCCEELKEKAKIEDEKKDEEKEDPKGIPEFWLTVFKNVDLLSDMVQEHDEPILKHLKDIKVKFSDAGQP

SEQ ID NO: 8205 - protein, 56 aa, Homo sapiens
MDTMMLNVRNLFEQLVRRVEILSEGNENLSSWRRTLRISVKSGRGLTMSWGNTRIF

SEQ ID NO: 8206 - protein, 74 aa, Homo sapiens
MATSRYEPVAEIGVGAYGTVYKARDPHSGHFVALKSVRVPNGGGGGGGLPISTVREVALLRRLEAFEHPNVVRI

SEQ ID NO: 8207 - protein, 133 aa, Homo sapiens
MGVDIRHNKDRKVRRKEPKSQDIYLRLLVKLYRFLARRTNSTFNQVVLKRLFMSRTNRPPLSLSRMIRKMKLPGRENKTAVVVGTITDDVRVQEVPKLKAPGTPHSHTKPYVRSKGRKFERARGRRASRGYKN

SEQ ID NO: 8208 - protein, 149 aa, Homo sapiens
MHKDEFHLKFFMCVIQSRQLVRTPQRTAGEASTSSMLIPKPPPKTDILKSLDTMDDPDTVGSIPVFKTEWIMTHEEHHAAKTLGIGKAIAVLTSGGDAQGMNAAVRAVVRVGIFTGARVFFVHEGYQGLVDGGDHIKEATWESVSMMLQ

SEQ ID NO: 8209 - protein, 266 aa, Homo sapiens
MPFNGEKQCVGEDQPSDSDSSRFSESMASLSDYECSRQSFASDSSSKSSSPASTSPPRVVTFDEVMATARNLSNLTLAHEIAVNENFQLKQEALPEKSLAGRVKHIVHQAFWDVLDSELNADPPEFEHAIKLFEEIREILLSFLTPGGNRLRNQICEVLDTDLIRQQAEHSAVDIQGLANYVISTMGKLCAPVRDNDIRELKATGNIVEVLRQIFHVLDLMQMDMANFTIMSLRPHLQRQLVEYERTKFQEILEETPRKAEVAGAS

SEQ ID NO: 8210 - protein, 108 aa, Homo sapiens
SQHSAAARPSSCRRKQEDDRDGLLAEREQEEAIAQFPYVEFTGRDSITCLTCQGTGYIPTEQVNELVALIPHSDQRLRPQRTTSVKISYIGLMTQSSLETHHYVDCGG

SEQ ID NO: 8211 - protein, 83 aa, Homo sapiens
MKAETERSALDVKLKHARNQVDVEIKRRQRAEADCEKLERQIQLIREMLMCDTSGSIQLSEEQKSALAFLNRGQPSSSNAGNK

SEQ ID NO: 8212 - protein, 122 aa, Homo sapiens
MFSSVAHLARANPFNTPHLQLVHDGLGDLRSSSPGPTGQPRRPRNLAAAAVEGEIRPCPIQSCGLLVGRPAFEAWTRLGGQGRTSPARCTVGRRPVACPGVSAFSTIGGCQILGLPSRAWKR

SEQ ID NO: 8213 - protein, 104 aa, Homo sapiens
MFSSVAHLARANPFNTPHLQLVHDGLGDLRSSSPGPTGQPRRPRNLAAAAVEEQYSCDYGSGRFFILCGLGGIISCGTTHTALVPLDLVKCRMQVCFACWTRAY

SEQ ID NO: 8214 - protein, 114 aa, Homo sapiens
MCIAEIDLIPRDRPFVCAPSSKTGSVTTTYCCNQDHCNKIELPTTGLPLLVQRTIARTIVLQESIGKGRFGEVWRGKWRGEEVAVKIFSSREERSWFREAEIYQTVMLRHENIL

SEQ ID NO: 8215 - protein, 52 aa, Homo sapiens
MTTRQATKDPLLRGVSPTPSKIPVRSQKRTPFPTVTSCAVDQENQDPRVRGA

SEQ ID NO: 8216 - protein, 184 aa, Homo sapiens
MDPAASSCMRSLQPPAPVWGCLRNPHSEGNGASGLPHYPPTPFSFHQKPDFLATATAAYPDFSASCLAATPHSLPQEEHIFTEQHPAFPQSPNWHFPVSDARRRPNSGPAGGSKEMGTSSLGLVDTTGGPGDDYGVLGSTANETEKKSSRRRKESSGQSVVPEPKDEVEACEGRSAHLPQWAGP

SEQ ID NO: 8217 - protein, 130 aa, Homo sapiens
FRTVLELVINYQQLCIYWTKYYDFKNPIIEKYLRRQLTKPRPVILDPADPTGNLGGGDPKGWRQLAQEAEAWLNYPCFKNWDGSPVSSWILLMRQRLREVRSLAQGHQLTSGGNGIQAQWTLKPVLMSLC

SEQ ID NO: 8218 - protein, 84 aa, Homo sapiens
MGVDIRHNKDRKVRRKEPKSQDIYLRLLVKVSGQKNQLHIQPGCVEEVVYESHQPAASVPFPDDPEDEASWPGKQDGRGCGDHN

SEQ ID NO: 8219 - protein, 58 aa, Homo sapiens
GFVLQDTVEQLRCEHCARFLADRFVEGVCPFCGYEEARGDQCDKCGETLGSKETVGCS

SEQ ID NO: 8220 - protein, 49 aa, Homo sapiens
MEAMAASTSLPDPGDFDRNVPRICGVCGDRATGFHFNAMTCEGCKGFFR

SEQ ID NO: 8221 - protein, 158 aa, Homo sapiens
MRRNPFGVDICCRKGSRSPLQELYNPIQLELSNTAVLHQMRRDQVTDTCRANSATSRKRRVLTPNDLKHLVVDEDHELIYCYVPKVACTNWKRLMMVLTGRGKYSDPMEIPANEAHVSANLKTLNQYSIPEINHRLKSYMKFLFVREPFERLVSAYRN

SEQ ID NO: 8222 - protein, 48 aa, Homo sapiens
MGCGNSTATSAGAGQGPAGAAKDVPFSSTTWVRLCHCLMDQLYSNSRR

SEQ ID NO: 8223 - protein, 272 aa, Homo sapiens
MPFNGEKQCVGEDQPSDSDSSRFSESMASLSDYECSRQSFASDSSSKSSSPASTSPPRVVTFDEVMATARNLSNLTLAHEIAVNENFQLKQEALPEKSLAGRVKHIVHQAFWDVLDSELNADPPEFEHAIKLFEEIREILLSFLTPGGNRLRNQICEVLDTDLIRQQAEHSAVDIQGLANYVISTMGKLCAPVRDNDIRELKATGNIVEVLRQIFHVLDLMQMDMANFTIMSLRPHLQRQLVEYERTKFQEILEETPSEYNIMCIYIEIRLK

SEQ ID NO: 8224 - protein, 583 aa, Homo sapiens
MLAIGSLDHAHIVRLLGLCPGSSLQLVTQYLPLGSLLDHVRQHRGALGPQLLLNWGVQIAKGMYYLEEHGMVHRNLAARNVLLKSPSQVQVADFGVADLLPPDDKQLLYSEAKTPIKWMALESIHFGKYTHQSDVWSYGVTVWELMTFGAEPYAGLRLAEVPDLLEKGERLAQPQICTIDVYMVMVKCWMIDENIRPTFKELANEFTRMARDPPRYLVIKRESGPGIAPGPEPHGLTNKKLEEVELEPELDLDLDLEAEEDNLATTTLGSALSLPVGTLNRPRGSQSLLSPSSGYMPMNQGNLGESCQESAVSGSSERCPRPVSLHPMPRGCLASESSEGHVTGSEAELQEKVSMCRSRSRSRSPRPRGDSAYHSQRHSLLTPVTPLSPPGLEEEDVNGYVMPDTHLKGTPSSREGTLSSVGLSSVLGTEEEDEDEEYEYMNRRRRHSPPHPPRPSSLEELGYEYMDVGSDLSASLGSTQSCPLHPVPIMPTAGTTPDEDYEYMNRQRDGGGPGGDYAAMGACPASEQGYEEMRAFQGPGHQAPHVHYARLKTLRSLEATDSAFDNPDYWHSRLFPKANAQRT

SEQ ID NO: 8225 - protein, 174 aa, Homo sapiens
MDTMMLNVRNLFEQLVRRVEILSEGNEVQFIQLAKDFEDFRKKWQRTDHELGKYKDLLMKAETERSALDVKLKHARNQVDVEIKRRQRAEADCEKLERQIQLIREMLMCDTSGSIQLSEEQKSALAFLNRGQPSSSNAGNKRLSTIDESGSILSDISFDKTDESLDWDSSLVKT

SEQ ID NO: 8226 - protein, 130 aa, Homo sapiens
MDTMMLNVRNLFEQLVRRVEILSEGNEVQFIQLAKDFEDFRKKWQRTDHELGKYKDLLMKAETERSALDVKLKHARNQVDVEIKRRQRAEADCEKLERQIQLIREMLMCDTSGSIQLSEEQKSALAFLNR

SEQ ID NO: 8227 - protein, 159 aa, Homo sapiens
MLYRFLARRTNSTFNQVVLKRLFMSRTNRPPLSLSRMIRKMKLPGRENKTAVVVGTITDDVRVQEVPKLKVCALRVTSRARSRILRAGGKILTFDQLALDSPKGCGTVLLSGPRKGREVYRHFGKAPGTPHSHTKPYVRSKGRKFERARGRRASRGYKN

SEQ ID NO: 8228 - protein, 281 aa, Homo sapiens
MPREDRATWKSNYFLKIIQLLDDYPKCFIVGADNVGSKQMQQIRMSLRGKAVVLMGKNTMMRKAIRGHLENNPALEKLLPHIRGNVGFVFTKEDLTEIRDMLLANKVPAAARAGAIAPCEVTVPAQNTGLGPEKTSFFQALGITTKISRGTIEILVFDNGSIYNPEVLDITEETLHSRFLEGVRNVASVCLQIGYPTVASVPHSIINGYKRVLALSVETDYTFPLAEKVKAFLADPSAFVAAAPVAAATTAAPAAAAAPAKVEAKEESEESDEDMGFGLFD

SEQ ID NO: 8229 - protein, 87 aa, Homo sapiens
MTTRQATKDPLLRGVSPTPSKIPVRSQKRTPFPTVTSCAVDQENQDPRRWVQKPPLNIQRPLVDSAGPRPKARHQAETSQRLRLQGP

SEQ ID NO: 8230 - protein, 156 aa, Homo sapiens
MTHEEHHAAKTLGIGKAIAVLTSGGDAQGMNAAVRAVVRVGIFTGARVFFVHEGYQGLVDGGDHIKEATWESVSMMLQLGGTVIGSARCKDFREREGRLRAAYNLVKRGITNLCVIGGDGSLTGADTFRSEWSDLLSDLQKADDDWEEHLCRRLSE

SEQ ID NO: 8231 - protein, 246 aa, Homo sapiens
MRECISIHVGQAGVQIGNACWELYCLEHGIQPDGQMPSDKTIGGGDDSFNTFFSETGAGKHVPRAVFVDLEPTVIDEVRTGTYRQLFHPEQLITGKEDAANNYARGHYTIGKEIIDLVLDRIRKLADQCTGLQGFLVSTAVVEPYNSILTTHTTLEHSDCAFMVDNEAIYDICRRNLDIERPTYTNLNRLISQIVSSITASLRFDGALNVDLTEFQTNLVPYPRIHFPLATYAPVISAEKAYHEQL

SEQ ID NO: 8232 - protein, 181 aa, Homo sapiens
MRRVVRQSKFRHVFGQAVKNDQCYDDIRVSRVTWDSSFCAVNPRFVAIIIEASGGGAFLVLPLHKTGRIDKSYPTVCGHTGPVLDIDWCPHNDQVIASGSEDCTVMVWQIPENGLTLSLTEPVVILEGHSKRVGIVAWHPTARNVLLSAGCDNAIIIWNVGTGEALINLDDMHSDMIYNVS

SEQ ID NO: 8233 - protein, 161 aa, Homo sapiens
MADIDNKEQSELDQDLDDVEEVEEEETGEETKLKARQLTVQMMQNPQILAALQERLDGLVETPTGYIERVSFCQPGWSAVVVQSCSIQPRHPRLSLPRVVKRRVNALKNLQVKCAQIEAKFYEEVHDLERKYAVLYQPLFDKRFEIINAIYEPTEEECEWK

SEQ ID NO: 8234 - protein, 29 aa, Homo sapiens
MAQSINITELNLPQLEMLKNQLDQAGAQW

SEQ ID NO: 8235 - protein, 123 aa, Homo sapiens
LRAAPAGGFQNIACLRSNAMKHLPNFFYKGQRTKHKWRIISPTLLAEYAYVLRVGGLVYTITDVLELHDWMCTHFEEHPLFERVPLEDLSEDPVVGHLGTSTEEGKKVLRNGGKNFPAIFRRI

SEQ ID NO: 8236 - protein, 81 aa, Homo sapiens
MPSDKTIGGGDDSFNTFFSETGAGKHVPRAVFVDLEPTVIDEVRTGTYRQLFHPEQLITGKEDAANNYARGHYTIGKEIID

SEQ ID NO: 8237 - protein, 118 aa, Homo sapiens
MAGEKVEKPDTKEKKPEAKKVDAGGKVKKGNLKAKKPKKGKPHCSRNPVLVRGIGRYSRSAMYSRKAMYKRKYSAAKSKVEKKKKEKVLATVTKPVGGDKNGGTRVVKLRKMPRYYPT

SEQ ID NO: 8238 - protein, 132 aa, Homo sapiens
MALLTAAARLLGTKNASCLVLAARHASASSTNLKDILADLIPKEQARIKTFRQQHGKTVVGQITVDMGIRFRGFSIPECQKLLPKAKGGEEPLPEGLFWLLVTGHIPTEEQVSWLSKEWAKRAALPSHVVTM

SEQ ID NO: 8239 - protein, 106 aa, Homo sapiens
MEAMAASTSLPDPGDFDRNVPRICGVCGDRATGFHFNAMTCEGCKGFFRRSMKRKALFTCPFNGDCRITKDNRRHCQACRLKRCVDIGMMKEFILTDEEVQRKREM

SEQ ID NO: 8240 - protein, 280 aa, Homo sapiens
QGNESIVAKTTVTVPNDGGPIEAVSTIETVPYWTRSRRKTGTLQPWNSDSTLNSRQLEPRTETDSVGTPQSNGGMRLHDFVSKTGMLADFVSQTSPMIPSIVVHCVNEIEQRGLTETGLYRISGCDRTVKELKEKFLRVKTVPLLSKVDDIHAICSLLKDFLRNLKEPLLTFRLNRAFMEAAEITDEDNSIAAMYQAVGELPQANRDTLAFLMIHLQRVAQSPHTKMDVANLAKVFGPTIVAHAVPNPDPVTMLQDIKRQPKVVERLLSLPLEYWSQFMM

SEQ ID NO: 8241 - protein, 49 aa, Homo sapiens
MDTMMLNVRNLFEQLVRRVEILSEGNEVRLGLFFGEDFQTEEERKEALY

SEQ ID NO: 8242 - protein, 325 aa, Homo sapiens
MPCIQAQYGTPAPSPGPRDHLASDPLTPEFIKPTMDLASPEAAPAAPTALPSFSTFMDGYTGEFDTFLYQLPGTVQPCSSASSSASSTSSSSATSPASASFKFEDFQVYGCYPGPLSGPVDEALSSSGSDYYGSPCSAPSPSTPSFQPPQLSPWDGSFGHFSPSQTYEGLRAWTEQLPKASGPPQPPAFFSFSPPTGPSPSLAQSPLKLFPSQATHQLGEGESYSMPTAFPGLAPTSPHLEGSGILDTPVTSTKARSGAPGGSEGRCAVCGDNASCQHYGVRTCEGCKGFFKVPRSPRWGLLLEMERGWPHPIGTCGLPLGSPPS

SEQ ID NO: 8243 - protein, 180 aa, Homo sapiens
MTTRQATKDPLLRGVSPTPSKIPVRSQKRTPFPTVTSCAVDQENQDPRGVRASAYLAPRTPTHRLDPARASCFSRLEGPGPRGRTLCPQRLQALISPSGPSFHPSTRPSFQELRRETAGSSRTSVSQASGLLLETPVQPAFSLPKGEREVVTHSDEGGVASLGLAQRVPLRENREMSHTR

SEQ ID NO: 8244 - protein, 110 aa, Homo sapiens
VSSTFGELKTVRLPKKMTGTGTHRGFGFVDFLTKQDAKRAFNALCHSTHLYGRRLVLEWADSEVTLQALRRKTAAHFHEPPKKKRSVVLDEILEQLEGSDSDSEEQTLQL

SEQ ID NO: 8245 - protein, 164 aa, Homo sapiens
MGVDIRHNKDRKVRRKEPKSQDIYLRLLVKLYRFLARRTNSTFNQVVLKRLFMSRTNRPPLSLSRMIRKMKLPGRENKTAVVVGTITDDVRVQEVPKLKVCALRVTSRARSRILRAGGKILTFDQLALDSPKGCGTVLLSGPRKGREVYRHFGKAPGTPHSHTK

SEQ ID NO: 8246 - protein, 177 aa, Homo sapiens
MSCPCFCPVALRMDTMMLNVRNLFEQLVRRVEILSEGNEVQFIQLAKDFEDFRKKWQRTDHELGKYKDLLMKAETERSALDVKLKHARNQVDVEIKRRQRAEADCEKLERQIQLIREMLMCDTSGSIQLSEEQKSALAFLNRGQPSSSNAGNKRLSTIDESGSILSDISFDKTDESL

SEQ ID NO: 8247 - protein, 165 aa, Homo sapiens
MHKDEFHLKFFMCVIQSRQLVRTPQRTAGEASTSSMLIPKPPPKTDILKSLDTMDDPDTVGSIPVFKTECAEVEIQVSKRKRAVVKARGDPTVETMKQREEWIMTHEEHHAAKTLGIGKAIAVLTSGGDAQGMNAAVRAVVRVGIFTGARVFFVHEGYQGLVDGG

SEQ ID NO: 8248 - protein, 327 aa, Homo sapiens
MMQNPQILAALQERLDGLVETPTGYIESLPRVVKRRVNALKNLQVKCAQIEAKFYEEVHDLERKYAVLYQPLFDKRFEIINAIYEPTEEECEWKPDEEDEISEELKEKAKIEDEKKDEEKEDPKGIPEFWLTVFKNVDLLSDMVQEHDEPILKHLKDIKVKFSDAGQPMSFVLEFHFEPNEYFTNEVLTKTYRMRSEPDDSDPFSFDGPEIMGCTGCQIDWKKGKNVTLKTIKKKQKHKGRGTVRTVTKTVSNDSFFNFFAPPEVPESGDLDDDAEAILAADFEIGHFLRERIIPRSVLYFTGEAIEDDDDDYDEEGEEADEVMFTK

SEQ ID NO: 8249 - protein, 125 aa, Homo sapiens
MVWQIPENGLTLSLTEPVVILEGHSKRVGIVAWHPTARNVLLSAGCDNAIIIWNVGTGEALINLDDMHSDMIYNVSWNRNGSLICTASKDKKVRVIDPRKQEIVAEKEKAHEGARPMRAIFLADG

SEQ ID NO: 8250 - protein, 155 aa, Homo sapiens
MDTMMLNVRNLFEQLVRRVEILSEGNEVQFIQLAKDFEDFRKKWQRTDHELGKYKDLLMKAETERSALDVKLKHARNQVDVEIKRRQRAEADCEKLERQIQLIREMLMCDTSGSIQLSEEQKSALAFLNRGQPSSSNAGNKRLSTIDESGSILSD

SEQ ID NO: 8251 - protein, 75 aa, Homo sapiens
MPSDKTIGGGDDSFNTFFSETGAGKHVPRAVFVDLEPTVIDEVRTGTYRQLFHPEQLITGKEDAANNYARGHYTI

SEQ ID NO: 8252 - protein, 111 aa, Homo sapiens
MAFEQLLDDYPKCFIVGADNVGSKQMQQIRMSLRGKAVVLMGKNTMMRKAIRGHLENNPALEKLLPHIRGNVGFVFTKEDLTEIRDMLLANKVPAAARAGAIAPCEVTVPA

SEQ ID NO: 8253 - protein, 116 aa, Homo sapiens
MTHEEHHAAKTLGIGKAIAVLTSGGDAQGMNAAVRAVVRVGIFTGARVFFVHEGYQGLVDGGDHIKEATWESVSMMLQLGGTVIGSARCKDFREREGRLRAAYNLVKRGITNLCVI

SEQ ID NO: 8254 - protein, 244 aa, Homo sapiens
MPREDRATWKSNYFLKIIQMQQIRMSLRGKAVVLMGKNTMMRKAIRGHLENNPALEKLLPHIRGNVGFVFTKEDLTEIRDMLLANKVPAAARAGAIAPCEVTVPAQNTGLGPEKTSFFQALGITTKISRGTIEILSDVQLIKTGDKVGASEATLLNMLNISPFSFGLVIQQVFDNGSIYNPEVLDITEETLHSRFLEGVRNVASVCLQIGYPTVASVPHSIINGYKRVLALSVETDYTFPLAEK

SEQ ID NO: 8255 - protein, 148 aa, Homo sapiens
MPCIQAQYGTPAPSPGPRDHLASDPLTPEFIKPTMDLASPEAAPAAPTALPSFSTFMDGYTGEFDTFLYQLPGTVQPCSSASSSASSTSSSSATSPASASFKFEDFQVAQCRKTPSTSAWLTRTALWTRGGETAASSAASRSAWRWAW

SEQ ID NO: 8256 - protein, 68 aa, Homo sapiens
MTTRQATKDPLLRGVSPTPSKIPVRSQKRTPFPTVTSCAVDQENQDPRQNVISPGAMACTCNHSYSGG

SEQ ID NO: 8257 - protein, 141 aa, Homo sapiens
MNCRSEVLEVSVEGRQVEEAMLAVLHTVLLHRSTGKFHYKKEGTYSIGTVGTQDVDCDFIDFTYVRVSSEELDRALRKVVGEFKDALRNSGGDGLGQMSLEFYQKKKSRWPFSDECIPWEVWTVKVHVVALATEQERQICR

SEQ ID NO: 8258 - protein, 111 aa, Homo sapiens
MDTMMLNVRNLFEQLVRRVEILSEGNEVQFIQLAKDFEDFRKKWQRTDHELGKYKDLLMKAETERSALDVKLKHARNQVDVEIKRRQRAEADCEKLERQIQLIREMLMCDT

SEQ ID NO: 8259 - protein, 152 aa, Homo sapiens
MKAETERSALDVKLKHARNQVDVEIKRRQRAEADCEKLERQIQLIREMLMCDTSGSIQLSEEQKSALAFLNRGQPSSSNAGNKRLSTIDESGSILSDISFDKTDESLDWDSSLVKTFKLKKREKRRSTSRQFVDGPPGPVKKTRSIGSAVDQ

SEQ ID NO: 8260 - protein, 126 aa, Homo sapiens
MTTRQATKDPLLRGVSPTPSKIPVRSQKRTPFPTVTSCAVDQENQDPRRWVQKPPLNIQRPLVDSAGPRPKARHQAETSQRLVGISQPRNPLEELRPSPRGQNVGPGPPAQTGTCWSHGNTASMAE

SEQ ID NO: 8261 - protein, 42 aa, Homo sapiens
MAPSVPAAEPEYPKGIRAVLLGPPGAGKGTQLEKLKFEWLVL

SEQ ID NO: 8262 - protein, 60 aa, Homo sapiens
MRLFVSDGVPGCLPVLAAAGRARGRAEVLISTVGPEDCTETARCPGSPALPPKAAPAQPR

SEQ ID NO: 8263 - protein, 166 aa, Homo sapiens
MPREDRATWKSNYFLKIIQLLDDYPKCFIVGADNVGSKQMQQIRMSLRGKAVVLMGKNTMMRKAIRGHLENNPALEKLLPHIRGNVGFVFTKEDLTEIRDMLLANKVPAAARAGAIAPCEVTVPAQNTGLGPEKTSFFQALGITTKISRGTIEILVFTAPLLSGSE

SEQ ID NO: 8264 - protein, 124 aa, Homo sapiens
MKAETERSALDVKLKHARNQVDVEIKRRQRAEADCEKLERQIQLIREMLMCDTSGSIQLSEEQKSALAFLNRGQPSSSNAGNKRLSTIDESGSILSDISFDKTDESLDWDSSLVKTFKLKKREK

SEQ ID NO: 8265 - protein, 37 aa, Homo sapiens
MAQSINITELNLPQLEMLKNQLDQTEFRSVAQAGAQW

SEQ ID NO: 8266 - protein, 67 aa, Homo sapiens
MCGICLSSLCAGWRFSVKEMKSERQIQLIREMLMCDTSGSIQLSEEQKSALAFLNRGQPSSSNAGNK

SEQ ID NO: 8267 - protein, 190 aa, Homo sapiens
MNCRSEVLEVSVEGRQVEEAMLAVLHTVLLHRSTGKFHYKKEGTYSIGTVGTQDVDCDFIDFTYVRVSSEELDRALRKVVGEFKDALRNSGGDGLGQMSLEFYQKKKSRWPFSDECIPWEVWTVKVHVVALATEQERQICREKVGEKLCEKIINIVEVMNRHEYLPKMPTQSEVDNVFDTGLRDVQPYLY

SEQ ID NO: 8268 - protein, 89 aa, Homo sapiens
MGCGNSTATSAGAGQGPAGAAKDVTEESVTEDDKRRNYGGVYVGLPSEAVNMVSSQTKTVRKKENNIMTQESRACSSVWKEFGSVGRCN

SEQ ID NO: 8269 - protein, 122 aa, Homo sapiens
CPTCNDFHGLVQKIMELQDILAKTSAKLSRAEQRMNRLDQCYCERTCTMKGTTYREFESWIDGCKNCTCLNGTIQCETLICPNPDCPLKSALAYVDGKCCKECKCEHNFYDEYFLWKNKALY

SEQ ID NO: 8270 - protein, 101 aa, Homo sapiens
MEAMAASTSLPDPGDFDRNVPRICGVCGDRATGFHFNAMTCEGCKGFFRRSMKRKALFTCPFNGDCRITKDNRRHCQACRLKRCVDIGMMKEFILTDEEVQ

SEQ ID NO: 8271 - protein, 391 aa, Homo sapiens
VPDSPARTPQPPEMNPLSAVNMFQKQNSKPSVPVSIPKSKEKQGRPPGALVPASSLKGGNLGSMSVRSKLPNSPAASSHPKLKSSKGITKKPQAPSNNASSSLASLNPVGKNTSSPALPRTAPCISESPRKCISSPNTPKAKVIPAQNSADLPESTLLPNKCSGKTQPKYLKHNHISSRDNAVSHLAAHSNSSSKCPKLPKANIPVRPKPSFQSSAKMTKTSSKTIATGLGTQSQPSDGAPQAKPVPAQKLKSALNLNQPVSVSSVSPVKATQKSKDKNIVSATKKQPQNKSAFQKTGPSSLKSPGRTPLSIVSLPQSSTKTQTAPKSAQTVAKSQHSTKGPPRSGKTPASIRKPPSSVKDADSGDKKPTAKKKEDDDHYFVMTGSKKPRK

SEQ ID NO: 8272 - protein, 133 aa, Homo sapiens
MAPSVPAAEPEYPKGIRAVLLGPPGAGKGTQAPRLAENFCVCHLATGDMLRAMVASGSELGKKLKATMDAGKLVSDEMVVELIEKNLETPLCKNGFLLDGFPRTVRQAEMADSPQEWPFLPRGVQPSKRAHER

SEQ ID NO: 8273 - protein, 153 aa, Homo sapiens
MAFEQLLDDYPKCFIVGADNVGSKQMQQIRMSLRGKAVVLMGKNTMMRKAIRGHLENNPALEKLLPHIRGNVGFVFTKEDLTEIRDMLLANKVPAAARAGAIAPCEVTVPAQNTGLGPEKTSFFQALGITTKISRGTIEILSDVQLIKTGDKV

SEQ ID NO: 8274 - protein, 416 aa, Homo sapiens
MASLSLAPVNIFKAGADEERAETARLTSFIGAIAIGDLVKSTLGPKGMDKILLSSGRDASLMVTNDGATILKNIGVDNPAAKVLVDMSRVQDDEVGDGTTSVTVLAAELLREAESLIAKKIHPQTIIAGWREATKAAREALLSSAVDHGSDEVKFRQDLMNIAGTTLSSKLLTHHKDHFTKLAVEAVLRLKGSGNLEAIHIIKKLGGSLADSYLDEGFLLDKKIGVNQPKRIENAKILIANTGMDTDKIKIFGSRVRVDSTAKVAEIEHAEKEKMKEKVERILKHGINCFINRQLIYNYPEQLFGAAGVMAIEHADFAGVERLALVTGGEIASTFDHPELVKLGSCKLIEEVMIGEDKLIHFSGVALGEACTIVLRGATQQILDEAERSLHDALCVLAQTVKDSRTVYGGVANHHS

SEQ ID NO: 8275 - protein, 142 aa, Homo sapiens
MPREDRATWKSNYFLKIIQLLDDYPKCFIVGADNVGSKQMQQIRMSLRGKAVVLMGKNTMMRKAIRGHLENNPALEKLLPHIRGNVGFVFTKEDLTEIRDMLLANKVPAAARAGAIAPCEVTVPAQNTGLGPEKTSFFQALE

SEQ ID NO: 8276 - protein, 385 aa, Homo sapiens
KEQSELDQDLDDVEEVEEEETGEETKLKARQLTVQMMQNPQILAALQERLDGLVETPTGYIESLPRVVKRRVNALKNLQVKCAQIEAKFYEEVHDLERKYAVLYQPLFDKRFEIINAIYEPTEEECEWKPDEEDEISEELKEKAKIEDEKKDEEKEDPKGIPEFWLTVFKNVDLLSDMVQEHDEPILKHLKDIKVKFSDAGQPMSFVLEFHFEPNEYFTNEVLTKTYRMRSEPDDSDPFSFDGPEIMGCTGCQIDWKKGKNVTLKTIKKKQKHKGRGTVRTVTKTVSNDSFFNFFAPPEVPESGDLDDDAEAILAADFEIGHFLRERIIPRSVLYFTGEAIEDDDDDYDEEGEEADEEGEEEGDEENDPDYDPKKDQNPAECKQQ

SEQ ID NO: 8277 - protein, 158 aa, Homo sapiens
MTTRQATKDPLLRGVSPTPSKIPVRSQKRTPFPTVTSCAVDQENQDPRRWVQKPPLNIQRPLVDSAGPRPKARHQAETSQRLVGISQPRNPLEELRPSPRGQNVGPGPPAQTEAPGTIEFVADPAALATILSGCSGLCIFGPQNPHPPTGPCQGFLLL

SEQ ID NO: 8278 - protein, 81 aa, Homo sapiens
PHVRLGQRRPHHSGRISKCKVVEELLSGNPHIEKESARSIADGAMMEAASVCMGQMIWQGIDIETKMHVRFLNMETMALCH

SEQ ID NO: 8279 - protein, 867 aa, Homo sapiens
MEQLNELELLMEKSFWEEAELPAELFQKKVVASFPRTVLSTGMDNRYLVLAVNTVQNKEGNCEKRLVITASQSLENKELCILRNDWCSVPVEPGDIIHLEGDCTSDTWIIDKDFGYLILYPDMLISGTSIASSIRCMRRAVLSETFRSSDPATRQMLIGTVLHEVFQKAINNSFAPEKLQELAFQTIQEIRHLKEMYRLNLSQDEIKQEVEDYLPSFCKWAGDFMHKNTSTDFPQMQLSLPSDNSKDNSTCNIEVVKPMDIEESIWSPRFGLKGKIDVTVGVKIHRGYKTKYKIMPLELKTGKESNSIEHRSQVVLYTLLSQERRADPEAGLLLYLKTGQMYPVPANHLDKRELLKLRNQMAFSLFHRISKSATRQKTQLASLPQIIEEEKTCKYCSQIGNCALYSRAVEQQMDCSSVPIVMLPKIEEETQHLKQTHLEYFSLWCLMLTLESQSKDNKKNHQNIWLMPASEMEKSGSCIGNLIRMEHVKIVCDGQYLHNFQCKHGAIPVTNLMAGDRVIVSGEERSLFALSRGYVKEINMTTVTCLLDRNLSVLPESTLFRLDQEEKNCDIDTPLGNLSKLMENTFVSKKLRDLIIDFREPQFISYLSSVLPHDAKDTVACILKGLNKPQRQAMKKVLLSKDYTLIVGMPGTGKTTTICTLVPAPEQVEKGGVSNVTEAKLIVFLTSIFVKAGCSPSDIGIIAPYRQQLKIINDLLARSIGMVEVNTVDKYQGRDKSIVLVSFVRSNKDGTVGELLKDWRRLNVAITRAKHKLILLGCVPSLNCYPPLEKLLNHLNSEKLISLIFHQENMKVFATYWVTFKENKTLFPLPFHTRAVSPLASAHTENSITIQNLMQYLCFKAQVYRKL

SEQ ID NO: 8280 - protein, 168 aa, Homo sapiens
MQTFLKGKRVGYWLSEKKIKKLNFQAFAELCRKRGMEVVQLNLSRPIEEQGPLDVIIHKLTDVILEADQNDSQSLELVHRFQEYIDAHPETIVLDPLPAIRTLLDRSKSYELIRKIEAYMEDDRICSPPFMELTSLCGDDTMRLLEKNGLTFPFICKTRVAHGTNSHE

SEQ ID NO: 8281 - protein, 152 aa, Homo sapiens
MPNSEPASLLELFNSIATQGELVRSLKAGNASKDEIDSAVKMLVSLKMSYKAAAGEDYKADCPPGNPAPTSNHGPDATEAEEDFVDPWTVQTSSAKGIDYDKLIVRFGSSKIDKELINRIERATGQRPHHFLRRGIFFSHRDMNQVLDAYEN

SEQ ID NO: 8282 - protein, 142 aa, Homo sapiens
MAIRAQHSNAAQTQTGEANRGWTGQESLSDSDPEMWELLQREKDRQCRGLELIASENFCSRAALEALGSCLNNKYSEGYPGKRYYGGAEVVDEIELLCQRRALEAFDLDPAQWGVNVQPYSGSPANLAVYTALLQPHDRIMG

SEQ ID NO: 8283 - protein, 54 aa, Homo sapiens
MAGAEGAAGRQSELEPVVSLVDVLEEDEELENEACAVLGGSDSEKCSYSQKFSL

SEQ ID NO: 8284 - protein, 434 aa, Homo sapiens
MLNYQGLQRVKIIASDNLWESISASMLLDAELFKVVDVIGAHYPGTHSAKDAKLTGKKLWSSEDFSTLNSDMGAGCWGRILNQNYINGYMTSTIAWNLVASYYEQLPYGRCGLMTAQEPWSGHYVVESPVWVSAHTTQFTQPGWYYLKTVGHLEKGGSYVALTDGLGNLTIIIETMSHKHSKCIRPFLPYFNVSQQFATFVLKGSFSEIPELQVWYTKLGKTSERFLFKQLDSLWLLDSDGSFTLSLHEDELFTLTTLTTGRKGSYPLPPKSQPFPSTYKDDFNVDYPFFSEAPNFADQTGVFEYFTNIEDPGEHHFTLRQVLNQRPITWAADASNTISIIGDYNWTNLTIKCDVYIETPDTGGVFIAGRVNKGGILIRSARGIFFWIFANGSYRVTGDLAGWIIYALGRVEVTAKKWYTLTLTIKVAGRRKKT

SEQ ID NO: 8285 - protein, 73 aa, Homo sapiens
MPHSSDSSDSSFSRSPPPGKQDSSDDVRRVQRREKNRIAAQKSRQRQTQKSIKKDAQVPWHRARRAGNGYFSK

SEQ ID NO: 8286 - protein, 189 aa, Homo sapiens
MQAGKPILYSYFRSSCSWRVRIALALKGIDYETVPINLIKDGGQQLAIIEYLEEMRPTPRLLPQDPKKRASVRMISDLIAGGIQPLQNLSVLKQVGEEMQLTWAQNAITCGFNALEQILQSTAGIYCVGDEVTMADLCLVPQVANAERFKVDLTPYPTISSINKRLLVLEAFQVSHPCRQPDTPTELRA

SEQ ID NO: 8287 - protein, 263 aa, Homo sapiens
GLIDYNQLALTARLFRPRLIIAGTSAYARLIDYARMREVCDEVKAHLLADMAHISGLVAAKVIPSPFKHADIVTTTTHKTLRGARSGLIFYRKGVKAVDPKTGREIPYTFEDRINFAVFPSLQGGPHNHAIAAVAVALKQACTPMFREYSLQVLKNARAMADALLERGYSLVSGGTDNHLVLVDLRPKGLDGARAERVLELVSITANKNTCPGDRSAITPGGLRLGAPALTSRQFREDDFRRVVDFIDEGVNIGLEVKSKTGE

SEQ ID NO: 8288 - protein, 212 aa, Homo sapiens
MPNSEPASLLELFNSIATQGELVRSLKAGNASKDEIDSAVKMLVSLKMSYKAAAGEDYKADCPPGNPAPTSNHGPDATEAEEDFVDPWTVQTSSAKGIDYDKLIVRFGSSKIDKELINRIERATGQRPHHFLRRGIFFSHRDMNQVLDAYENKKPFYLYTGRGPSSEAMHVGHLIPFIFTKWLQDVFNVPLVIQMTDDEKYLWKDLTLDQAY

SEQ ID NO: 8289 - protein, 188 aa, Homo sapiens
MPVSTSLHQDGSQERPVSLTSTTSSSGSSCDSRSAMEEPSSSEAPAKNGAGSLRSRHLPNSNNNSSSWLNVKGPLSPFNSRAAAGPAHHKLSYLGRVVREIVETERMYVQDLRSIVEDYLLKIIDTPGLLKPEQVSALFGNIENIYALNSQLLRDLDSCNSDPVAVASCFVERSQEFDIYTQYCNNYP

SEQ ID NO: 8290 - protein, 227 aa, Homo sapiens
MEVIRQVKGDLAFLNFQNNLQQTPLHLAVITNQPEIAEALLGAGCDPELRDFRGNTPLHLACEQGCLASVGVLTQSCTTPHLHSILKATNYNGHTCLHLASIHGYLGIVELLVSLGADVNAQEPCNGRTALHLAVDLQNPDLVSLLLKCGADVNRVTYQGYSPYQLTWGRPSTRIQQQLGQLTLENLQMLPESEDEESYDTESEFTEFTEDELPYDDCVFGGQRLTL

SEQ ID NO: 8291 - protein, 170 aa, Homo sapiens
MMFSGFNADYEASSSRCSSASPAGDSLSYYHSPADSFSSMGSPVNAQDFCTDLAVSSANFIPTVTAISTSPDLQWLVQPALVSSVAPSQTRAPHPFGVPAPSAGAYSRAGVVKTMTGGRAQSIGRRGKVEQVRNSSVLFLGMWGLGGKQPRRCRSPVQRMKPLMGLAAHP

SEQ ID NO: 8292 - protein, 60 aa, Homo sapiens
MAAAWGSSLTAATQRAVTPWPRGRLLTASLGPQARREASSSSPEAGEGQIRLTDSCVQGI

SEQ ID NO: 8293 - protein, 124 aa, Homo sapiens
MPNKNKKEKESPKAGKSGKSSKEGQDTVESEQISVRKNSLVAVPSTVSAKIKVPVSQPIVKKDKRQNSSRFSASNNRELQKLPSLKDCKCTRFETYVYRGPTFHTHGFCGPTVGLEYAWIWLRL

SEQ ID NO: 8294 - protein, 112 aa, Homo sapiens
MLIFLGCYRRRLEERAGTMSAETASGPTEDQVEILEYNFNKVDKHPDSTTLCLIAAEAGLSEEETQGSDLISRSKIWHPESSPQREGYPHDSLPCLAFDYFSLLPPQCKEMV

SEQ ID NO: 8295 - protein, 82 aa, Homo sapiens
MFQAAERPQEWAMEGPRDGLKKERLLDDRHDSGLDSMKDEEYEQMVKELQEIRLEPQEVPRGSEPWKQQLTEDGDSLHSTWL

SEQ ID NO: 8296 - protein, 189 aa, Homo sapiens
MDSVRSGAFGHLFRPDNFIFGQSGAGNNWAKGHYTEGAELVDSVLDVVRKECENCDCLQGFQLTHSLGGGTGSGMGTLLISKVREEYPDRIMNTFSVVPSPKVSDTVVEPYNATLSIHQLVENTDETYCIDNEALYDICFRTLKLATPTYGDLNHLVSATMSGVTTSLRFPGQLNADLRKLAVNMVPFP

SEQ ID NO: 8297 - protein, 86 aa, Homo sapiens
MPNSEPASLLELFNSIATQGELVRSLKAGNASKDEIDSAVKMLVSLKMSYKAAAGEDYKADCPPGNPAPTSNHGPDATEAEEDFVD

SEQ ID NO: 8298 - protein, 52 aa, Homo sapiens
MGLDLPDGGHLTHGYMSDVKRISATSIFFESMPYKLNGFSCLCVCPAQNWPH

SEQ ID NO: 8299 - protein, 176 aa, Homo sapiens
MLNYSAPSAGGCLLDRKAVGTPAGGGFPRRHSVTLPSSKFHQNQLLSSLKGEPAPALSSRDSRFRDRSFSEGGERLLPTQKQPGGGQVNSSRYKTELCRPFEENGACKYGDKCQFAHGIHELRSLTRHPKYKTELCRTFHTIGFCPYGPRCHFIHNAEERRALAGARDLSADRPRL

SEQ ID NO: 8300 - protein, 49 aa, Homo sapiens
MPKRGKKGAVAEDGDELRTGKGMKSALLPRSCGGGVCHSLDVRARGQEE

SEQ ID NO: 8301 - protein, 171 aa, Homo sapiens
MLYFSLFWAARPLQRCGQLVRMAIRAQHSNAAQTQTGEANRGWTGQESLSDSDPEMWELLQREKDRQCRGLELIASENFCSRAALEALGSCLNNKYSEGYPGKRYYGGAEVVDEIELLCQRRALEAFDLDPAQWGVNVQPYSGSPANLAVYTALLQPHDRIMGLDLPDGGQ

SEQ ID NO: 8302 - protein, 92 aa, Homo sapiens
MGKESGWDSGRAAVAAVVGGVVAVGTVLVALSAMGFTSVGIAASSIAAKMMSTAAIANGGGVAAGSLVAILQSVGECSGQDDQSQEMIQPRG

SEQ ID NO: 8303 - protein, 55 aa, Homo sapiens
MPNSEPASLLELFNSIATQGELVRSLKAGNASKDEIDSAVKMLVSLKMSYKAAAG

SEQ ID NO: 8304 - protein, 44 aa, Homo sapiens
MAAQIPESDQIKQFKEFLGTYNKLTETCFLDCVKDFTTREVKPE

SEQ ID NO: 8305 - protein, 130 aa, Homo sapiens
MAKPSHSSYVLQQLNNQREWGFLCDCCIAIDDIYFQAHKAVLAACSSYFRMFFMNHQHSTAQLNLSNMKISAECFDLILQFMYLGKIMTAPSSFEQFKVAMNYLQLYNVPDCLEDIQDADCSSSKCSSSA

SEQ ID NO: 8306 - protein, 203 aa, Homo sapiens
MKPPSSIQTSEFDSSDEEPIEDEQTPIHISWLSLSRVNCSQFLGLCALPGCKFKDVRRNVQKDTEELKSCGIQDIFVFCTRGELSKYRVPNLLDLYQQCGIITHHHPIADGGTPDIASCCEIMEELTTCLKNYRKTLIHCYGGLGRSCLVAACLLLYLSDTISPEQAIDSLRDLRGSGAIQTIKDLPTSQFLPQSVLGMDPLT

SEQ ID NO: 8307 - protein, 86 aa, Homo sapiens
MDTASHSLVLLQQLNMQREFGFLCDCTVAIGDVYFKAHRAVLAAFSNYFKMIFIHQTRQQITHLEVIKELEAAGCLCCSLDGLSQG

SEQ ID NO: 8308 - protein, 183 aa, Homo sapiens
MAAMAVGGAGGSRVSSGRDLNCVPEIADTLGAVAKQGFDFLCMPVFHPRFKREFIQEPAKNRPGPQTRSDLLLSGRDWNTLIVGKLSPWIRPDSKVEKIRRNSEALEVQFIITGTNHHSEKEFCSYLQYLEYLSQNRPPPNAYELFAKGYEDYLQSPLQPLMDNLESQTYEVFEKDPIKYSQY

SEQ ID NO: 8309 - protein, 164 aa, Homo sapiens
MREIVHIQAGQCGNQIGAKFWEVISDEHGIDPSGNYVGDSDLQLERISVYYNEASSHKYVPRAILVDLEPGTMDSVRSGAFGHLFRPDNFIFGKFPLLQALMADPITGKPRSVDGDGCEKQGMVSSSHDPEWWELISPFYSWALEAQRKGSVGRTETTHAFQVE

SEQ ID NO: 8310 - protein, 207 aa, Homo sapiens
MGRARKSGLGQRSRPTASRSEAAVQGNKMLNYSAPSAGGCLLDRKAVGTPAGGGFPRRHSVTLPSSKFHQNQLLSSLKGEPAPALSSRDSRFRDRSFSEGGERLLPTQKQPGGGQVNSSRYKTELCRPFEENGACKYGDKCQFAHGIHELRSLTRHPKYKTELCRTFHTIGFCPYGPRCHFIHNAEERRALAGARDLSADRPRLQHS

SEQ ID NO: 8311 - protein, 118 aa, Homo sapiens
MREIVHIQAGQCGNQIGAKFWEVISDEHGIDPSGNYVGDSDLQLERISVYYNEASSHKYVPRAILVDLEPGTMDSVRSGAFGHLFRPDNFIFAGHWRPRERVLWGEQKPLMHFKWNEV

SEQ ID NO: 8312 - protein, 67 aa, Homo sapiens
MSRGSSAGFDRHITIFSPEGRLYQVAWTSVVNSTQALEACYIPDTASPRRYKCECYTLFYTEAHSLE

SEQ ID NO: 8313 - protein, 62 aa, Homo sapiens
MGALLRKANLPGVPSPGSNARMPVSTSLHQDGSQERPVSLTSTTSSSGSSCDSRSAMEEPSS

SEQ ID NO: 8314 - protein, 232 aa, Homo sapiens
MAAAKCRNRRRELTDTLQAETDQLEDEKSALQTEIANLLKEKEKLEFILAAHRPACKIPDDLGFPEEMSVASLDLTGGLPEVATPESEEAFTLPLLNDPEPKPSVEPVKSISSMELKTEPFDDFLFPASSRPSGSETARSVPDMDLSGSFYAADWEPLHSGSLGMGPMATELEPLCTPVVTCTPSCTAYTSSFVFTYPEADSFPSCAAAHRKGSSSNEPSSDSLSSPTLLAL

SEQ ID NO: 8315 - protein, 160 aa, Homo sapiens
MAIRAQHSNAAQTQTGEANRGWTGQESLSDSDPEMWELLQREKDRQCRGLELIASENFCSRAALEALGSCLNNKYSEGYPGKRYYGGAEVVDEIELLCQRRALEAFDLDPAQWGVNVQPYSGSPANLAVYTALLQPHDRIMGLDLPDGGHLTHGYMSDVK

SEQ ID NO: 8316 - protein, 138 aa, Homo sapiens
MSGCRVFIGRLNPAAREKDVERFFKGYGRIRDIDLKRGFGFVEFEDPRDADDAVYELDGKELCSERVTIEHARARSRGGRGRGRYSDRFSSRRPRNDRRNAPPVRTENRLIVENLSSRVSWQPVCVVGLMTRSACGLS

SEQ ID NO: 8317 - protein, 185 aa, Homo sapiens
MAAMAVGGAGGSRVSSGRDLNCVPEIADTLGAVAKQGADWNTLIVGKLSPWIRPDSKVEKIRRNSEAAMLQELNFGAYLGLPAFLLPLNQEDNTNLARVLTNHIHTGHHSSMFWMRVPLVAPEDLRDDIIENAPTTHTEEYSGEEKTWMWWHNFRTLCDYSKRIAVALEIGADLPSNHVIDRWLG

SEQ ID NO: 8318 - protein, 65 aa, Homo sapiens
MAIRAQHSNAAQTQTGEANRGWTGQESLSDSDPEMWELLQREKDRQCRGLELIASEILWGSRGGG

SEQ ID NO: 8319 - protein, 234 aa, Homo sapiens
MGLDLPDGGHLTHGYMSDVKRISATSIFFESMPYKLNPKTGLIDYNQLALTARLFRPRLIIAGTSAYARLIDYARMREVCDEVKAHLLADMAHISGLVAAKVIPSPFKHADIVTTTTHKTLRGARSGLIFYRKGVKAVDPKTGREIPYTFEDRINFAVFPSLQGGPHNHAIAAVAVALKQACTPMFREYSLQVLKNARAMADALLERGYSLVSGGTDNHLVLVDLRPKGLDGAR

SEQ ID NO: 8320 - protein, 177 aa, Homo sapiens
MPNSEPASLLELFNSIATQGELVRSLKAGNASKAESHSVAQAGVHWHSLGSLQPLPPEFERFSCPGLDEIDSAVKMLVSLKMSYKAAAGEDYKADCPPGNPAPTSNHGPDATEAEEDFVDPWTVQTSSAKGIDYDKLIVRFGSSKIDKELINRIERATGQRPHHFLRRGIFFSHRDM

SEQ ID NO: 8321 - protein, 481 aa, Homo sapiens
MRPADPLIKAIKDGDEEALKTMIKEGKNLAEPNKEGWLPLHEAAYYGQVGCLKVLQRAYPGTIDQRTLQEETAVYLATCRGHLDCLLSLLQAGAEPDISNKSRETPLYKACERKNAEAVKILVQHNADTNHRCNRGWTALHESVSRNDLEVMQILVSGGAKVESKNAYGITPLFVAAQSGQLEALRFLAKYGADINTQASDNASALYEACKNEHEEVVEFLLSQGADANKTNKDGLLPLHIASKKGNYRIVQMLLPVTSRTRIRRSGVSPLHLAAERNHDEVLEALLSARFDVNTPLAPERARLYEDRRSSALYFAVVNNNVYATELLLQHGADPNRDVISPLLVAIRHGCLRTMQLLLDHGANIDAYIATHPTAFPATIMFAMKCLSLLKFLMDLGCDGEPCFSCLYGNGPHPPAPQPSSRFNDAPAADKEPSVVQFCEFVSAPEVSRWAGPIIDVLLDYVGNVQLCSRLKEHIDSFEDW

SEQ ID NO: 8322 - protein, 752 aa, Homo sapiens
MGKGRRESESSRSSRRPSGRSPTSTEKRMSFESISSLPEVEPDPEAGSEQEVFSAVEGPSAEETPSDTESPEVLETQLDAHQGLLGMDPPGDMVDFVAAESTEDLKALSSEEEEEMGGAAQEPESLLPPSVLDQASVIAERFVSSFSRRSSVAQEDSKSSGFGSPRLVSRSSSVLSLEGSEKGLARHGSATDSLSCQLSPEVDISVGVATEDSPSVNGMEPPSPGCPVEPDRSSCKKKESALSTRDRLLLDKIKSYYENAEHHDAGFSVRRRESLSYIPKGLVRNSISRFNSLPRPDPEPVPPVGSKRQVGSRPTSWALFELPGPSQAVKGDPPPISDAEFRPSSEIVKIWEGMESSGGSPGKGPGQGQANGFDLHEPLFILEEHELGAITEESATASPESSSPTEGRSPAHLARELKELVKELSSSTQGELVAPLHPRIVQLSHVMDSHVSERVKNKVYQLARQYSLRIKSNKPVMARPPLQWEKVAPERDGKSPTVPCLQEEAGEPLGGKGKRKPVLSLFDYEQLMAQEHSPPKPSSAGEMSPQRFFFNPSAVSQRTTSPGGRPSARSPLSPTETFSWPDVRELCSKYASRDEARRAGGGRPRGPPVNRSHSVPENMVEPPLSGRVGRCRSLSTKRGRGGGEAAQSPGPLPQSKPDGGETLYVTADLTLEDNRRVIVMEKGPLPSPTAGLEESSGQGPSSPVALLGQVQDFQQSAECQPKEEGSRDPADPSQQGRVRNLREKFQALNSVG

SEQ ID NO: 8323 - protein, 138 aa, Homo sapiens
SQLEVQFIITGTNHHSEKEFCSYLQYLEYLSQNRPPPNAYELFAKGYEDYLQSPLQPLMDNLESQTYEVFEKDPIKYSQYQQAIYKCLLDRVPEEEKDTNVQVLMVLGAGRGPLVNASLRAAKQADRRIKLLENWQFE

SEQ ID NO: 8324 - protein, 724 aa, Homo sapiens
MSFESISSLPEVEPDPEAGSEQEVFSAVEGPSAEETPSDTESPEVLETQLDAHQGLLGMDPPGDMVDFVAAESTEDLKALSSEEEEEMGGAAQEPESLLPPSVLDQASVIAERFVSSFSRRSSVAQEDSKSSGFGSPRLVSRSSSVLSLEGSEKGLARHGSATDSLSCQLSPEVDISVGVATEDSPSVNGMEPPSPGCPVEPDRSSCKKKESALSTRDRLLLDKIKSYYENAEHHDAGFSVRRRESLSYIPKGLVRNSISRFNSLPRPDPEPVPPVGSKRQVGSRPTSWALFELPGPSQAVKGDPPPISDAEFRPSSEIVKIWEGMESSGGSPGKGPGQGQANGFDLHEPLFILEEHELGAITEESATASPESSSPTEGRSPAHLARELKELVKELSSSTQGELVAPLHPRIVQLSHVMDSHVSERVKNKVYQLARQYSLRIKSNKPVMARPPLQWEKVAPERDGKSPTVPCLQEEAGEPLGGKGKRKPVLSLFDYEQLMAQEHSPPKPSSAGEMSPQRFFFNPSAVSQRTTSPGGRPSARSPLSPTETFSWPDVRELCSKYASRDEARRAGGGRPRGPPVNRSHSVPENMVEPPLSGRVGRCRSLSTKRGRGGGEAAQSPGPLPQSKPDGGETLYVTADLTLEDNRRVIVMEKGPLPSPTAGLEESSGQGPSSPVALLGQVQDFQQSAECQPKEEGSRDPADPSQQGRVRNLREKFQALNSVG

SEQ ID NO: 8325 - protein, 68 aa, Homo sapiens
MPNSEPASLLELFNSIATQGELVRSLKAGNASKDEIDSAVKMLVSLKMSYKAAAGEDYKADCPPGNPA

SEQ ID NO: 8326 - protein, 39 aa, Homo sapiens
MENFQKVEKIGEGTYGVVYKARNKLTGEVVALKKIRLDT

SEQ ID NO: 8327 - protein, 138 aa, Homo sapiens
RVCSLNEHFGNVLTPCTVLPVKLYSDARNVLSGIIDSHENLKEFKGDLIKVLVWILVQYCSKRPGMKENVHNTENKGKAPLMLPALNTLPPPKSPEDIDSLNSETFNDWSDDNIFDDEPTIKKVIEEKHQLKDLPGIL

SEQ ID NO: 8328 - protein, 70 aa, Homo sapiens
MPNSEPASLLELFNSIATQGELVRSLKAGNASKDEIDSAVKMLVSLKMSYKAAAGEDYKADCPPGNPAPT

SEQ ID NO: 8329 - protein, 105 aa, Homo sapiens
MRDAEGGSPRIRVEAHRGEGANHGKGEWMGLRQGCCSSCGRRSCGCGDCARGAQCHGLHLSRNRRILHSSQDDVYSSHCQRGRSCCWQSGGYSAVSGGSWTLCDI

SEQ ID NO: 8330 - protein, 94 aa, Homo sapiens
MDTASHSLVLLQQLNMQREFGFLCDCTVAIGDVYFKAHRAVLAAFSNYFKMIFIHQTRKRKMSCTICGHKFPRKSQLLEHMYTHKDSKSPTLRS

SEQ ID NO: 8331 - protein, 179 aa, Homo sapiens
MAESSSESDHFRCRDRLSPWAARSTHRGTRSLPTVEVTEKVNTITSTLQDTSRNLRQVDQMLGRYREYSNGQAGAIEHLKESLEQSIDQLRSQRLLRNSGGRSISVTSLSASDLDGGTGSELHHFPPTSPLKDYGDPQGIKRMRSRTGVRFVQETDDMTQLHGFHQSLRDLSSEQIRLG

SEQ ID NO: 8332 - protein, 15 aa, Homo sapiens
KEHYQVLGAFCLTLE

SEQ ID NO: 8333 - protein, 181 aa, Homo sapiens
MQTFLKGKRVGYWLSEKKIKKLNFQAFAELCRKRGMEVVQEYIDAHPETIVLDPLPAIRTLLDRSKSYELIRKIEAYMEDDRICSPPFMELTSLCGDDTMRLLEKNGLTFPFICKTRVAHGTNSHEMAIVFNQEGLNAIQPPCVVQNFINHNAVLYKVFVVGESYTVVQRPSLKNFSAGTS

SEQ ID NO: 8334 - protein, 86 aa, Homo sapiens
MLYFSLFWAARPLQRCGQLVRMAIRAQHSNAAQTQTGEANRGWTGQESLSDSDPEMWELLQREKDRQCRGLELIASEILWGSRGGG

SEQ ID NO: 8335 - protein, 456 aa, Homo sapiens
MPNPRPGKPSAPSLALGPSPGASPSWRAAPKASDLLGARGPGGTFQGRDLRGGAHASSSSLNPMPPSQLQLSTVDAHARTPVLQVHPLESPAMISLTPPTTATGVFSLKARPGLPPGINVASLEWVSREPALLCTFPNPSAPRKDSTLSAVPQSSYPLLANGVCKWPGCEKVFEEPEDFLKHCQADHLLDEKGRAQCLLQREMVQSLEQQLVLEKEKLSAMQAHLAGKMALTKASSVASSDKGSCCIVAAGSQGPVVPAWSGPREAPDSLFAVRRHLWGSHGNSTFPEFLHNMDYFKFHNMRPPFTYATLIRWAILEAPEKQRTLNEIYHWFTRMFAFFRNHPATWKVSSSEVAVTGMASSAIAAQSGQAWVWAHRHIGEERDVGCWWWLLASEVDAHLLPVPGLPQNAIRHNLSLHKCFVRVESEKGAVWTVDELEFRKKRSQRPSRCSNPTPGP

SEQ ID NO: 8336 - protein, 127 aa, Homo sapiens
MAESSSESDHFRCRDRLSPWAARSTHRGTRSLPTVEVTEKVNTITSTLQDTSRNLRQVDQMLGRYREYSNGQAGAIEHLKESLEQSIDQLRSQRLLRNSGGRSISVTSLSASDLDGGTGSELHHFPP

SEQ ID NO: 8337 - protein, 32 aa, Homo sapiens
RDKALQDYRKKLLEHKEIDGRLKECECTFLSI

SEQ ID NO: 8338 - protein, 223 aa, Homo sapiens
MLVSLKMSYKAAAGEDYKADCPPGNPAPTSNHGPDATEAEEDFVDPWTVQTSSAKGIDYDKLIVRFGSSKIDKELINRIERATGQRPHHFLRRGIFFSHRDMNQVLDAYENKKPFYLYTGRGPSSEAMHVGHLIPFIFTKWLQDVFNVPLVIQMTDDEKYLWKDLTLDQAYSYAVENAKDIIACGFDINKTFIFSDLDYMGMSSGFYKNVVKIQKHVTFNQVK

SEQ ID NO: 8339 - protein, 161 aa, Homo sapiens
MPVSTSLHQDGSQERPVSLTSTTSSSGSSCDSRSAMEEPSSSEAPAKNGAGSLRSRHLPNSNNNSSSWLNVKGPLSPFNSRAAAGPAHHKLSYLGRVVREIVETERMYVQDLRSIVEDYLLKIIDTPGLLKPEQVSALFGNIENIYALNSQLLRDLDSCNS

SEQ ID NO: 8340 - protein, 274 aa, Homo sapiens
MFQAAERPQEWAMEGPRDGLKKERLLDDRHDSGLDSMKDEEYEQMVKELQEIRLEPQEVPRGSEPWKQQLTEDGDSFLHLAIIHEEKALTMEVIRQVKGDLAFLNFQNNLQQTPLHLAVITNQPEIAEALLGAGCDPELRDFRGNTPLHLACEQGCLASVGVLTQSCTTPHLHSILKATNYNGHTCLHLASIHGYLGIVELLVSLGADVNAQLTWGRPSTRIQQQLGQLTLENLQMLPESEDEESYDTESEFTEFTEDELPYDDCVFGGQRLTL

SEQ ID NO: 8341 - protein, 55 aa, Homo sapiens
MREIVHIQAGQCGNQIGAKFWEVISDEHGIDPSGNYVGDSDLQLERISVYYNEAS

SEQ ID NO: 8342 - protein, 68 aa, Homo sapiens
MFQAAERPQEWAMEGPRDGLKKERLLDDRHDSGLDSMKDEEYEQMLTEDGDSFLHLAIIHEEKALTME

SEQ ID NO: 8343 - protein, 73 aa, Homo sapiens
MSETSFNLISEKCDILSILRDHPENRIYRRKIEELSKRFTAIRKTKGDGNCFYRALGYSYLESLLGKSREIFK

SEQ ID NO: 8344 - protein, 84 aa, Homo sapiens
MALASVLERPLPVNQRGFFGLGGRADLLDLGPGSLSDGLSLAAPGWGVPEEPGIEMLHGTTTLAFKASTTWTVKGTGFQGPPSL

SEQ ID NO: 8345 - protein, 631 aa, Homo sapiens
MSVSSGVQILTKPETVDRRRSAETTKEAGRPLEMAVSEPEASAAKEWKQLDPAQSNLYNDVMLENYCNQASMGCQAPKPDMISKLEKGEAPWLGKGKRPSQGCPSKIARPKQKETDGKVQKDDDQLENIQKSQNKLLREVAVKKKTQAKKNGSDCGSLGKKNNLHKKHVPSKKRLLKFESCGKILKQNLDLPDHSRNCVKRKSDAAKEHKKSFNHSLSDTRKGKKQTGKKHEKLSSHSSSDKCNKTGKKHDKLCCHSSSHIKQDKIQTGEKHEKSPSLSSSTKHEKPQACVKPYECNQCGKVLSHKQGLIDHQRVHTGEKPYECNECGIAFSQKSHLVVHQRTHTGEKPYECIQCGKAHGHKHALTDHLRIHTGEKPYECAECGKTFRHSSNLIQHVRSHTGEKPYECKECGKSFRYNSSLTEHVRTHTGEIPYECNECGKAFKYSSSLTKHMRIHTGEKPFECNECGKAFSKKSHLIIHQRTHTKEKPYKCNECGKAFGHSSSLTYHMRTHTGESPFECNQCGKGFKQIEGLTQHQRVHTGEKPYECNECGKAFSQKSHLIVHQRTHTGEKPYECNECEKAFNAKSQLVIHQRSHTGEKPYECNECGKTFKQNASLTKHVKTHSEDKSHE

SEQ ID NO: 8346 - protein, 53 aa, Homo sapiens
GAQHRCPGRTGAVQGLRFCGWSYKGSECEPMPHPTLPAEQRTVLQRQCHLHQQ

SEQ ID NO: 8347 - protein, 678 aa, Homo sapiens
EELRTQLTKAEGDRKGLQHQVSQISKQQSNYQDEQGEDWRFRRGVEREKQDLEKQMSDLRVQLNFSAMASELEEVKRCMERKDKEKAHLASQVENLTRELENGEKQQLQMLDRLKEIQNHFDTCEAERKHADLQISELTRHAEDATKQAERYLSELQQSEALKEEAEKRREDLKLKAQESIRQWKLKHKKLERALEKQSETVDELTGKNNQILKEKDELKTQLYAALQQIENLRKELNDVLTKRALQEEELHSKEEKLRDIKSHQADLELEVKNSLDTIHRLESELKKQSKIQSQMKVEKAHLEEEIAELKKSQAQDKAKLLEMQESIKDLSAIRADLANKLAEEERAKKAVLKDLSDLTAQAKSRDEETATIITQLKLERDVHQRELKDLTSSLQSVKTKHEQNIQELMKHFKKEKSEAENHIRTLKAESLEEKNMAKIHRGQLEKLKSQCDRLTEELTQNENENKKLKLKYQCLKDQLEEREKHISIEEEHLRRMEEARLQLKDQLLCLETEQESILGVIGKEIDAACKTFSKDSVEKLKVFSSGPDIHYDPHRWLAESKTKLQWLCEELKERENREKNLRHQLMLCRQQLRNLTENKESELQCLFQQIERQEQLLDEIHREKRDLLEETQRKDEEMGSLQDRVIALETSTQVALDHLESVPEKLSLLEDFKDFRR

SEQ ID NO: 8348 - protein, 34 aa, Homo sapiens
MAKPSHSSYVLQQLNNQREWGFLCDCCIAIDDIY

SEQ ID NO: 8349 - protein, 70 aa, Homo sapiens
MADPRDKALQDYRKKLLEHKEIDGRLKELREQLKELTKQYEKSENDLKALQSVGQIVGEVLKQLTEEKCE

SEQ ID NO: 8350 - protein, 237 aa, Homo sapiens
LLKEEKQRAKLQKMLPKLEEELKARIELWEQEHSKAFMVNGQKFMEYVAEQWEMHRLEKERAKQERQLKNKKQTETEMLYGSAPRTPSKRRGLAPNTPGKARKLNTTTMSNATANSSIRPIFGGTVYHSPVSRLPPSGSKPVAASTCSGKKTPRTGRHGANKENLELNGSILSGGYPGSAPLQRNFSINSVASTYSEFAKDPSLSDSSTVGLQDSLPPEENVFVCPKLRWPALLPKR

SEQ ID NO: 8351 - protein, 150 aa, Homo sapiens
MPNSEPASLLELFNSIATQGELVRSLKAGNASKDEIDSAVKMLVSLKMSYKAAAGEDYKADCPPGNPAPTSNHGPDATEAEEDFVDPWTVQTSSAKGIDYDKLIVRFGSSKIDKELINRIERATGQRPHHFLRRGIFFSHRDMNQVLDAY

SEQ ID NO: 8352 - protein, 122 aa, Homo sapiens
MATQISTRGSQCTIGQEEYSLYSSLSEDELVQMAIEQSLADKTRGPTTAEATASACTNRQPAHFYPWTRPADPLIKAIKDGDEEALKTMIKEGKNLAEPNKEGWLPLHEAAYYGQVGCLKVL

SEQ ID NO: 8353 - protein, 192 aa, Homo sapiens
MAIRAQHSNAAQTQTGEANRGWTGQESLSDSDPEMWELLQREKDRQCRGLELIASENFCSRAALEALGSCLNNKYSEGYPGKRYYGGAEVVDEIELLCQRRALEAFDLDPAQWGVNVQPYSGSPANLAVYTALLQPHDRIMGLDLPDGGHLTHGYMSDVKRISATSIFFESMPYKLNGFSCLCVCPAQNWPH

SEQ ID NO: 8354 - protein, 58 aa, Homo sapiens
MPNSEPASLLELFNSIATQGELVRSLKAGNASKDEIDSAVKMLVSLKMSYKAAAGEDY

SEQ ID NO: 8355 - protein, 148 aa, Homo sapiens
MREIVHIQAGQCGNQIGAKFWEVISDEHGIDPSGNYVGDSDLQLERISVYYNEASSHKYVPRAILVDLEPGTMDSVRSGAFGHLFRPDNFIFAHPAGRCQLASSPQLPGILGWLFGLLALPVGRKVCWSRRADPFTQDPLRRQSLALL

SEQ ID NO: 8356 - protein, 269 aa, Homo sapiens
MSGCRVFIGRLNPAAREKDVERFFKGYGRIRDIDLKRGFGFVDPRDADDAVYELDGKELCSERVTIEHARARSRGGRGRGRYSDRFSSRRPRNDRRNAPPVRTENRLIVENLSSRVSWQDLKDFMRQAGEVTFADAHRPKLNEGVVEFASYGDLKNAIEKLSGKEINGRKIKLIEGSKRHSRSRSRSRSRTRSSSRSRSRSRSRSRKSYSRSRSRSRSRSRSKSRSVSRSPVPEKSQKRGSSSRSKSPASVDRQRSRSRSRSRSVDSGN

SEQ ID NO: 8357 - protein, 114 aa, Homo sapiens
MPNSEPASLLELFNSIATQGELVRSLKAGNASKDEIDSAVKMLVSLKMSYKAAAGEDYKADCPPGNPAPTSNHGPDATEAEEDFVDPWTVQTSSAKGIDYDKLIVRFGSSKIDK

SEQ ID NO: 8358 - protein, 91 aa, Homo sapiens
MVRLDISEGRAAVAAVVGGVVAVGTVLVALSAMGFTSVGIAASSIAAKMMSTAAIANGGGVAAGSLVAILQSVGECSGQDDQSQEMIQPRG

SEQ ID NO: 8359 - protein, 87 aa, Homo sapiens
MREIVHIQAGQCGNQIGAKFWEVISDEHGIDPSGNYVGDSDLQLERISVYYNEASCWSRTPGLKRSTCLGLPKCWECRHEPLHLVDV

SEQ ID NO: 8360 - protein, 124 aa, Homo sapiens
MPNSEPASLLELFNSIATQGELVRSLKAGNASKDEIDSAVKMLVSLKMSYKAAAGEDYKADCPPGNPAPTSNHGPDATEAEEDFVDPWTVQTSSAKGIDYDKLIVRFGSSKIDKELINRIERAT

SEQ ID NO: 8361 - protein, 38 aa, Homo sapiens
MSESLVVCDVAEDLVEKLRKFRFRKETNNAAIIRHFTR

SEQ ID NO: 8362 - protein, 226 aa, Homo sapiens
MLVSLKMSYKAAAGEDYKADCPPGNPAPTSNHGPDATEAEEDFVDPWTVQTSSAKGIDYDKLIVRFGSSKIDKELINRIERATGQRPHHFLRRGIFFSHRDMNQVLDAYENKKPFYLYTGRGPSSEAMHVGHLIPFIFTKWLQDVFNVPLVIQMTDDEKYLWKDLTLDQAYSYAVENAKDIIACGFDINKTFIFSDLDYMGMSSGFYKNVVKIQKHVTFNQVKGIF

SEQ ID NO: 8363 - protein, 147 aa, Homo sapiens
MAIRAQHSNAAQTQTGEANRGWTGQESLSDSDPEMWELLQREKDRQCRGLELIASENFCSRAALEALGSCLNNKYSEGYPGKRYYGGAEVVDEIELLCQRRALEAFDLDPAQWGVNVQPYSGSPANLAVYTALLQPHDRIMGLDLPD

SEQ ID NO: 8364 - protein, 88 aa, Homo sapiens
MADNFSLHDALSGSGNPNPQGWPGAWGNQPAGAGGYPGASYPGAYPGQAPPGAYPGQAPPGAYPGAPGAYPGAPAPGVYPGPPSGPGA

SEQ ID NO: 8365 - protein, 140 aa, Homo sapiens
MLVSLKMSYKAAAGEDYKADCPPGNPAPTSNHGPDATEAEEDFVDPWTVQTSSAKGIDYDKLIVRFGSSKIDKELINRIERATGQRPHHFLRRGIFFSHRDMNQVLDAYENKKPFYLYTGRGPSSEAMHVGHLIPFIFTK

SEQ ID NO: 8366 - protein, 635 aa, Homo sapiens
MATQISTRGSQCTIGQEEYSLYSSLSEDELVQMAIEQSLADKTRGPTTAEATASACTNRQPAHFYPWTRSTAPPESSPARAPMGLFQGVMQKYSSSLFKTSQLAPADPLIKAIKDGDEEALKTMIKEGKNLAEPNKEGWLPLHEAAYYGQVGCLKVLQRAYPGTIDQRTLQEETAVYLATCRGHLDCLLSLLQAGAEPDISNKSRETPLYKACERKNAEAVKILVQHNADTNHRCNRGWTALHESVSRNDLEVMQILVSGGAKVESKNAYGITPLFVAAQSGQLEALRFLAKYGADINTQASDNASALYEACKNEHEEVVEFLLSQGADANKTNKDGLLPLHIASKKGNYRIVQMLLPVTSRTRIRRSGVSPLHLAAERNHDEVLEALLSARFDVNTPLAPERARLYEDRRSSALYFAVVNNNVYATELLLQHGADPNRDVISPLLVAIRHGCLRTMQLLLDHGANIDAYIATHPTAFPATIMFAMKCLSLLKFLMDLGCDGEPCFSCLYGNGPHPPAPQPSSRFNDAPAADKEPSVVQFCEFVSAPEVSRWAGPIIDVLLDYVGNVQLCSRLKEHIDSFEDWAVIKEKAEPPRPLAHLCRLRVRKAIGKYRIKLLDTLPLPGRLIRYLKYENTQ

SEQ ID NO: 8367 - protein, 155 aa, Homo sapiens
MAKPSHSSYVLQQLNNQREWGFLCDCCIAIDDIYFQAHKAVLAACSSYFRMFFMNHQHSTAQLNLSNMKISAECFDLILQFMYLGKIMTAPSSFEQFKVAMNYLQLYNVPDCLEDIQDADCSSSKCSSSASSKQNSKMIFGVRMYEDTVARNGNE

SEQ ID NO: 8368 - protein, 154 aa, Homo sapiens
MLVSLKMSYKAAAGEDYKADCPPGNPAPTSNHGPDATEAEEDFVDPWTVQTSSAKGIDYDKLIVRFGSSKIDKELINRIERATGQRPHHFLRRGIFFSHRDMNQVLDAYENKKPFYLYTGRGPSSEAMHVGHLIPFIFTKWLQDVFNVPLVIQM

SEQ ID NO: 8369 - protein, 378 aa, Homo sapiens
MDSVRSGAFGHLFRPDNFIFGQSGAGNNWAKGHYTEGAELVDSVLDVVRKECENCDCLQGFQLTHSLGGGTGSGMGTLLISKVREEYPDRIMNTFSVVPSPKVSDTVVEPYNATLSIHQLVENTDETYCIDNEALYDICFRTLKLATPTYGDLNHLVSATMSGVTTSLRFPGQLNADLRKLAVNMVPFPRLHFFMPGFAPLTARGSQQYRALTVPELTQQMFDAKNMMAACDPRHGRYLTVATVFRGRMSMKEVDEQMLAIQSKNSSYFVEWIPNNVKVAVCDIPPRGLKMSSTFIGNSTAIQELFKRISEQFTAMFRRKAFLHWYTGEGMDEMEFTEAESNMNDLVSEYQQYQDATAEEEGEMYEDDEEESEAQGPK

SEQ ID NO: 8370 - protein, 502 aa, Homo sapiens
MAPERLRSRALSAFKLRGLLLRGEAIKYLTEALQSISELELEDKLEKIINAVEKQPLSSNMIERSVVEAAVQECSQSVDETIEHVFNIIGAFDIPRFVYNSERKKFLPLLMTNHPAPNLFGTPRDKAEMFRERYTILHQRTHRHELFTPPVIGSHPDESGSKFQLKTIETLLGSTTKIGDAIVLGMITQLKEGKFFLEDPTGTVQLDLSKAQFHSGLYTEACFVLAEGWFEDQVFHVNAFGFPPTEPSSTTRAYYGNINFFGGPSNTSVKTSAKLKQLEEENKDAMFVFLSDVWLDQVEVLEKLRIMFAGYSPAPPTCFILCGNFSSAPYGKNQVQALKDSLKTLADIICEYPDIHQSSRFVFVPGPEDPGFGSILPRPPLAESITNEFRQRVPFSVFTTNPCRIQYCTQEITVFREDLVNKMCRNCVRFPSSNLAIPNHFVKTILSQGHLTPLPLYVCPVYWAYDYALRVYPVPDLLVIADKYDPFTTTNTECLCINPVRM

SEQ ID NO: 8371 - protein, 111 aa, Homo sapiens
MGLFQGVMQKYSSSLFKTSQLAPADPLIKAIKDGDEEALKTMIKEGKNLAEPNKEGWLPLHEAAYYGQVGCLKVLQRAYPGTIDQRTLQEETAVYLATCRGHLDCLLSLLQ

SEQ ID NO: 8372 - protein, 35 aa, Homo sapiens
MAAERQEALREFVAVTGAEEDRARFFLESAGWDLQ

SEQ ID NO: 8373 - protein, 36 aa, Homo sapiens
MPNSEPASLLELFNSIATQGELVRSLKAGNASKGKL

SEQ ID NO: 8374 - protein, 135 aa, Homo sapiens
MRPADPLIKAIKDGDEEALKTMIKEGKNLAEPNKEGWLPLHEAAYYGQVGCLKVLQRACERKNAEAVKILVQHNADTNHRCNRGWTALHESVSRNDLEVMQILVSGGAKVESKNAYGITPLFVAAQSGQLEALRF

SEQ ID NO: 8375 - protein, 97 aa, Homo sapiens
MPNSEPASLLELFNSIATQGELVRSLKAGNASKDEIDSAVKMLVSLKMSYKAAAGEDYKADCPPGNPAPTSNHGPDATEAEEDFVDPWTVQTSSAKG

SEQ ID NO: 8376 - protein, 636 aa, Homo sapiens
MMSRACWAKSKHLIHSKTFRGMTLLHLAAAQGYATLIQTLIKWRTKHADSIDLELEVDPLNVDHFSCTPLMWACALGHLEAAVVLYKWDRRAISIPDSLGRLPLGIARSRGHVKLAECLEHLQRDEQAQLGQNPRIHCPASEEPSTESWMAQWHSEAISSPEIPKGVTVIASTNPELRRPRSEPSNYYSSESHKDYPAPKKHKLNPEYFQTRQEKLLPTALSLEEPNIRKQSPSSKQSVPETLSPSEGVRDFSRELSPPTPETAAFQASGSQPVGKWNSKDLYIGVSTVQVTGNPKGTSVGKEAAPSQVRPREPMSVLMMANREVVNTELGSYRDSAENEECGQPMDDIQVNMMTLAEHIIEATPDRIKQENFVPMESSGLERTDPATISSTMSWLASYLADADCLPSAAQIRSAYNEPLTPSSNTSLSPVGSPVSEIAFEKPNLPSAADWSEFLSASTSEKVENEFAQLTLSDHEQRELYEAARLVQTAFRKYKGRPLREQQEVAAAVIQRCYRKYKQLTWIALKYALYKKMTQAAILIQSKFRSYYEQKKFQQSRRAAVLIQKYYRSYKKCGKRRQARRTAVIVQQKLRSSLLTKKQDQAARKIMRFLRRCRHRVKELKKAKELEDIQQHPLAM

SEQ ID NO: 8377 - protein, 234 aa, Homo sapiens
MSSSHFASRHRKDISTEMIRTKIAHRKSLSQKENRHKEYERNRHFGLKDVNIPTLEGRILVELDETSQGLVPEKTNVKPRAMKTILGDQRKQMLQKYKEEKQLQKLKEQREKAKRGIFKVGRYRPDMPCFLLSNQNAVKAEPKKAIPSSVRITRSKAKDQMEQTKIDNESDVRAIRPGPRQTSEKKVSDKEKKVVQPVMPTSLRMTRSATQAAKQVPRTVSSTTARKPVTRAAN

SEQ ID NO: 8378 - protein, 83 aa, Homo sapiens
RLLRGPIADQSPSPFRSPRPLRWGLLQGWRCEDHDRRPSAEHWQEGQGGTEEEEKRRIRRERNKMAAAKCRNRRRELTDTLQA

SEQ ID NO: 8379 - protein, 117 aa, Homo sapiens
GIEMLHGTTTLAFKFRHGVIVAADSRATAGAYIASQTVKKVIEINPYLLGTMAGGAADCSFWERLLARQCRIYELRNKERISVAAASKLLANMVYQYKGMGLSMGTMICGWDKRGPG

SEQ ID NO: 8380 - protein, 70 aa, Homo sapiens
VRMISDLIAGGIQPLQNLSVLKQVGEEMQLTWAQNAITCGFNALEQILQSTAGIYCVGDESRSGHTQSSH

SEQ ID NO: 8381 - protein, 43 aa, Homo sapiens
MTEYKLVVVGAGGVGKSALTIQLIQNHFVDEYDPTIEVLLSSM

SEQ ID NO: 8382 - protein, 184 aa, Homo sapiens
KNVVKIQKHVTFNQVKGIFGFTDSDCIGKISFPAIQAAPSFSNSFPQIFRDRTDIQCLIPCAIDQDPYFRMTRDVAPRIGYPKPALLHSTFFPALQGAQTKMSASDPNSSIFLTDTAKQIKTKVSSGPGRGQPAGSETCPGGHTHTHTTAQCFGPQPPSHRSNAELQDCQLCSLQNSRQPVLPT

SEQ ID NO: 8383 - protein, 295 aa, Homo sapiens
MEDDRICSPPFMELTSLCGDDTMRLLEKNGLTFPFICKTRVAHGTNSHEMAIVFNQEGLNAIQPPCVVQNFINHNAVLYKVFVVGESYTVVQRPSLKNFSAGTSDRESIFFNSHNVSKPESSSVLTELDKIEGVFERPSDEVIRELSRALRQALGVSLFGIDIIINNQTGQHAVIDINAFPGYEGVSEFFTDLLNHIATVLQGQSTAMAATGDVALLRHSKLLAEPAGGLVGERTCSASPGCCGSMMGQDAPWKAEADAGGTAKLPHQRLGCNAGVSPSFQQHCVASLATKASSQ

SEQ ID NO: 8384 - protein, 105 aa, Homo sapiens
MPNSEPASLLELFNSIATQGELVRSLKAGNASKAESHSVAQAGVHWHSLGSLQPLPPEFERFSCPGLDEIDSAVKMLVSLKMSYKAAAGEDYKADCPPGNPAPTS

SEQ ID NO: 8385 - protein, 104 aa, Homo sapiens
MPNSEPASLLELFNSIATQGELVRSLKAGNASKDEIDSAVKMLVSLKMSYKAAAGEDYKADCPPGNPAPTSNHGPDATEAEEDFVDPWTVQTSSAKGIDYDKLI

SEQ ID NO: 8386 - protein, 40 aa, Homo sapiens
MPNSEPASLLELFNSIATQGELVRSLKAGNASKLGSFRWK

SEQ ID NO: 8387 - protein, 292 aa, Homo sapiens
MVLLSTLGIVFQGEGPPISSCDTGTMANCERTFIAIKPDGVQRGLVGEIIKRFEQKGFRLVGLKFMQASEDLLKEHYVDLKDRPFFAGLVKYMHSGPVVAMVWEGLNVVKTGRVMLGETNPADSKPGTIRGDFCIQVGRTMANLERTFIAIKPDGVQRGLVGEIIKRFEQKGFRLVAMKFLRASEEHLKQHYIDLKDRPFFPGLVKYMNSGPVVAMVWEGLNVVKTGRVMLGETNPADSKPGTIRGDFCIQVGRNIIHGSDSVKSAEKEISLWFKPEELVDYKSCAHDWVYE

SEQ ID NO: 8388 - protein, 63 aa, Homo sapiens
MPNSEPASLLELFNSIATQGELVRSLKAGNASKDEIDSAVKMLVSLKMSYKAAAGEDYKADCP

SEQ ID NO: 8389 - protein, 41 aa, Homo sapiens
MSRGSSAGFDRHITIFSPEGRLYQVGQIIGFQHSDSLIQDN

SEQ ID NO: 8390 - protein, 149 aa, Homo sapiens
MAIRAQHSNAAQTQTGEANRGWTGQESLSDSDPEMWELLQREKDRQCRGLELIASENFCSRAALEALGSCLNNKYSEGYPGKRYYGGAEVVDEIELLCQRRALEAFDLDPAQWGVNVQPYSGSPANLAVYTALLQPHDRIMGLDLPDGG

SEQ ID NO: 8391 - protein, 217 aa, Homo sapiens
MTESGKPILYSYFRSSCSWRVRIALALKGIDYETVPINLIKDGGQQFSKDFQALNPMKQVPTLKIDGITIHQSLAIIEYLEEMRPTPRLLPQDPKKRASVRMISDLIAGGIQPLQNLSVLKQVGEEMQLTWAQNAITCGFNALEQILQSTAGIYCVGDEVTMADLCLVPQVANAERFKVDLTPYPTISSINKRLLVLEAFQVSHPCRQPDTPTELRA

SEQ ID NO: 8392 - protein, 237 aa, Homo sapiens
MLYFSLFWAARPLQRCGQLVRMAIRAQHSNAAQTQTGEANRGWTGQESLSDSDPEMWELLQREKDRQCRGLELIASENFCSRAALEALGSCLNNKYSEGYPGKRYYGGAEVVDEIELLCQRRALEAFDLDPAQWGVNVQPYSGSPANLAVYTALLQPHDRIMGLDLPDGGHLTHGYMSDVKRISATSIFFESMPYKLNVCDEVKAHLLADMAHISGLVAAKVIPSPFKHADIVTTTT

SEQ ID NO: 8393 - protein, 159 aa, Homo sapiens
MAIRAQHSNAAQTQTGEANRGWTGQESLSDSDPEMWELLQREKDRQCRGLELIASENFCSRAALEALGSCLNNKYSEGYPGKRYYGGAEVVDEIELLCQRRALEAFDLDPAQWGVNVQPYSGSPANLAVYTALLQPHDRIMGLDLPDGGHLTHGYMSDV

SEQ ID NO: 8394 - protein, 194 aa, Homo sapiens
MADPRDKALQDYRKKLLEHKEIDGRLKEFIVKATNGPRYVVGCRRQLDKSKLKPGTRVALDMTTLTIMRYLPREVDPLVYNMSHEDPGNVSYSEIGGLSEQIRELREVIELPLTNPELFQRVGIIPPKGCLLYGPPGTGKTLLARAVASQLDCNFLKVVSSSIVDKYIGESARLIREMFNYARDHQPCIIFMDE

SEQ ID NO: 8395 - protein, 97 aa, Homo sapiens
MADPRDKALQDYRKKLLEHKEIDGRLKELREQLKELTKQYEKSENDLKALQSVGQIVGEVLKQLTEEKFIVKATNGPRYVVGCRRQIFAERGGSTGL

SEQ ID NO: 8396 - protein, 124 aa, Homo sapiens
MSGCRVFIGRLNPAAREKDVERFFKGYGRIRDIDLKRGFGFVEFEDPRDADDAVYELDGKELCSERVTIEHARARSRGGRGRGRYSDRFSSRRPRNDRRNAPPVRTENRLIVENLSSRVSWQVC

SEQ ID NO: 8397 - protein, 66 aa, Homo sapiens
MAAQIPESDQIKQFKEFLGTYNKLTETCFLDCVKDFTTREVKPEEEYHIQQNEALAAKAGLLGQPR

SEQ ID NO: 8398 - protein, 42 aa, Homo sapiens
MAAMAVGGAGGSRVSSGRDLNCVPEIADTLGAVAKQGFPAAP

SEQ ID NO: 8399 - protein, 189 aa, Homo sapiens
MGRARKSGLGQRSRPTASRSEAAVQPGVRKARGAGNWRVGLQTGEAAPSPHRDLRDTPDPRPWLARTHRMTTTLVSATIFDLSEVLCKGNKMLNYSAPSAGGCLLDRKAVGTPAGGGFPRRHSVTLPSSKFHQNQLLSSLKGEPAPALSSRDSRFRDRSFSEGGERLLPTQKQPGGGQVNSSRYKTELC

SEQ ID NO: 8400 - protein, 72 aa, Homo sapiens
NQPVAFVRRIPWTAASSQLKEHFAQFGHVRRCILPFESLFRDTQWTAKGERPPQANGRKAAQSQPARFTPPK

SEQ ID NO: 8401 - protein, 111 aa, Homo sapiens
MSSSHFASRHRKDISTEMIRTKIAHRKSLSQKENRHKEYERNRHFGLKDVNIPTLEGRILVELDETSQGLVPEKTNVKPRAMKTILGDQRKQMLQKYKEEKQLQKLKEQRE

SEQ ID NO: 8402 - protein, 284 aa, Homo sapiens
MQEIIQNFVRVHVDAPGMEEGAPVFPLGYQYPSLDQLADMIPCVLQYLNFSTIIGVGVGAGAYILARYALNHPDTVEGLVLINIDPNAKGWMDWAAHKLTGLTSSIPEMILGHLFSQEELSGNSELIQKYRNIITHAPNLDNIELYWNSYNNRRDLNFERGGDITLRCPVMLVVGDQAPHEDAVVECNSKLDPTQTSFLKMADSGGQPQLTQPGKLTEAFKYFLQGMGYMASSCMTRLSRSRTASLTSAASVDGNRSRSRTLSQSSESGTLSSGPPGHTMEVSC

SEQ ID NO: 8403 - protein, 180 aa, Homo sapiens
MAAMAVGGAGGSRVSSGRDLNCVPEIADTLGAVAKQGFDFLCMPVFHPRFKREFIQEPAKNRPGPQTRSDLLLSGRDWNTLIVGKLSPWIRPDSKVEKIRRNSEAFWMRVPLVAPEDLRDDIIENAPTTHTEEYSGEEKTWMWWHNFRTLCDYSKRIAVALEIGADLPSNHVIDRWLGEP

SEQ ID NO: 8404 - protein, 80 aa, Homo sapiens
MPPCSGGDGSTPPGPSLRDRDCPAQSAEYPRDRLDPRPGSPSEASSPPFLRRCLRKPRPKTNRWRRRRLRRSPFRQKLPS

SEQ ID NO: 8405 - protein, 206 aa, Homo sapiens
MQTFLKGKRVGYWLSEKKIKKLNFQAFAELCRKRGMEVVQLNLSRPIEEQGPLDVIIHKLTDVILEADQNDSQSLELVHRFQEYIDAHPETIVLDPLPAIRTLLDRSKSYELIRKIEAYMEGLPSALDDRICSPPFMELTSLCGDDTMRLLEKNGLTFPFICKTRVAHGTNSHEMAIVFNQEGLNAIQPPCVVQNFINHNAVLYKV

SEQ ID NO: 8406 - protein, 494 aa, Homo sapiens
MLYFSLFWAARPLQRCGQLVRMAIRAQHSNAAQTQTGEANRGWTGQESLSDSDPEMWELLQREKDRQCRGLELIASENFCSRAALEALGSCLNNKYSEGYPGKRYYGGAEVVDEIELLCQRRALEAFDLDPAQWGVNVQPYSGSPANLAVYTALLQPHDRIMGLDLPDGGHLTHGYMSDVKRISATSIFFESMPYKLNLALTARLFRPRLIIAGTSAYARLIDYARMREVCDEVKAHLLADMAHISGLVAAKVIPSPFKHADIVTTTTHKTLRGARSGLIFYRKGVKAVDPKTGREIPYTFEDRINFAVFPSLQGGPHNHAIAAVAVALKQACTPMFREYSLQVLKNARAMADALLERGYSLVSGGTDNHLVLVDLRPKGLDGARAERVLELVSITANKNTCPGDRSAITPGGLRLGAPALTSRQFREDDFRRVVDFIDEGVNIGLEVKSKTAKLQDFKSFLLKDSETSQRLANLRQRVEQFARAFPMPGFDEH

SEQ ID NO: 8407 - protein, 133 aa, Homo sapiens
MKLHCEVEVISRHLPALGLRNRGKGVRAVLSLCQQTSRSQPPVRAFLLISTLKDKRGTRYELRENIEQFFTKFVDEGKATVRLKEPPVDICLSKMESHSVTQVGVQWEELGSLQPTGHFQQFKRFPFSYETGS

SEQ ID NO: 8408 - protein, 25 aa, Homo sapiens
MPNSEPASLLELFNSIATQGELVRS

SEQ ID NO: 8409 - protein, 33 aa, Homo sapiens
MPNSEPASLLELFNSIATQGELVRSLKAGNASK

SEQ ID NO: 8410 - protein, 176 aa, Homo sapiens
MMFSGFNADYEASSSRCSSASPAGDSLSYYHSPADSFSSMGSPVNAQDFCTDLAVSSANFIPTVTAISTSPDLQWLVQPALVSSVAPSQTRAPHPFGVPAPSAGAYSRAGVVKTMTGGRAQSIGRRGKVEQLSPEEEEKRRIRRERNKMAAAKCRNRRRELTDTLQAVGTLWVAPF

SEQ ID NO: 8411 - protein, 99 aa, Homo sapiens
MSGCRVFIGRLNPAAREKDVERFFKGYGRIRDIDLKRGFGFVEFEDPRDADDAVYELDGKELCSERVTIEHARARSRGGRGRGRYSDRFSSRRPRNDRR

SEQ ID NO: 8412 - protein, 215 aa, Homo sapiens
MAIRAQHSNAAQTQTGEANRGWTGQESLSDSDPEMWELLQREKDRQCRGLELIASENFCSRAALEALGSCLNNKYSEGYPGKRYYGGAEVVDEIELLCQRRALEAFDLDPAQWGVNVQPYSGSPANLAVYTALLQPHDRIMGLDLPDGGHLTHGYMSDVKRISATSIFFESMPYKLNPKTGLIDYNQLALTARLFRPRLIIAGTSAYARLIDYAR

SEQ ID NO: 8413 - protein, 130 aa, Homo sapiens
IGAKALVKLIKPKKEGSRERLKSTVDSPPWQLESSDPASPAASQPLRSQAENPDTPALGSNCAEERDAHNGSVGKAPPRKKSPFLKSKNKDKDKSPTTHPALSKRLRFWSSSDIPSSPNEPLSFSDIGDF

SEQ ID NO: 8414 - protein, 279 aa, Homo sapiens
RRNSEAAMLQELNFGAYLGLPAFLLPLNQEDNTNLARVLTNHIHTGHHSSMFWMRVPLVAPEDLRDDIIENAPTTHTEEYSGEEKTWMWWHNFRTLCDYTLEIGADLPSNHVIDRWLGEPIKAAILPTSIFLTNKKGFPVLSKMHQRLIFRLLKLEVQFIITGTNHHSEKEFCSYLQYLEYLSQNRPPPNAYELFAKGYEDYLQSPLQPLMDNLESQTYEVFEKDPIKYSQYQQAIYKCLLDRVPEEEKDTNVQVLMVLGAGRGPLVNASLRAAKQADR

SEQ ID NO: 8415 - protein, 169 aa, Homo sapiens
MPVFHPRFKREFIQEPAKNRPGPQTRSDLLLSGRDWNTLIVGKLSPWIRPDSKVEKIRRNSEAAMLQELNFGAYLGLPAFLLPLNQEDNTNLARVLTNHIHTGHHSSMFWMRVPLVAPEDLRDDIIENAPTTHTEEYSGEEKTWMWWHNFRTLCDYSKRIAVALEIGAD

SEQ ID NO: 8416 - protein, 203 aa, Homo sapiens
MALASVLERPLPVNQRGFFGLGGRADLLDLGPGSLSDGLSLAAPGWGVPEEPGIEMLHGTTTLAFKFRHGVIVAADSRATAGAYIASQTVKKVIEINPYLLGTMAGGAADCSFWERLLARQCRIYELRNKERISVAAASKLLANMVYQYKGMGLSMGTMICGWDKRGPVSEVLCLKPKSFGMYLFCGCAERIGNMARPLLRGQ

SEQ ID NO: 8417 - protein, 142 aa, Homo sapiens
MTGGRAQSIGRRGKVEQETDQLEDEKSALQTEIANLLKEKEKLEFILAAHRPACKIPDDLGFPEEMSVASLDLTGGLPEVATPESEEAFTLPLLNDPEPKPSVEPVKSISSMELKTEPFDDFLFPASSRPSGSETARSVPDM

SEQ ID NO: 8418 - protein, 137 aa, Homo sapiens
MMFSGFNADYEASSSRCSSASPAGDSLSYYHSPADSFSSMGSPVNAQCQLHSHGHCHLDQSGPAVAGAARPRLLRGPIADQSPSPFRSPRPLRWGLLQGWRCEDHDRRPSAEHWQEGQGGTVISRRRREKENPKGKE

SEQ ID NO: 8419 - protein, 202 aa, Homo sapiens
MQAGKPILYSYFRSSCSWRVRIALALKGIDYETVPINLIKDGGQQFSKDFQALNPMKQLAIIEYLEEMRPTPRLLPQDPKKRASVRMISDLIAGGIQPLQNLSVLKQVGEEMQLTWAQNAITCGFNALEQILQSTAGIYCVGDEVTMADLCLVPQVANAERFKVDLTPYPTISSINKRLLVLEAFQVSHPCRQPDTPTELRA

SEQ ID NO: 8420 - protein, 60 aa, Homo sapiens
IRPETHSPGMFSWFPILFPIKQPITVREGQTICVRFWRCSNSKKGSSHQSMKTSGQGVRN

SEQ ID NO: 8421 - protein, 104 aa, Homo sapiens
MHQRLIFRLLKLEVQFIITGTNHHSEKEFCSYLQYLEYLSQNRPPPNAYELFAKGYEDYLQSPLQPLMDNLESQTYEVFEKDPIKYSQYQQAIYKCLLDRVPEE

SEQ ID NO: 8422 - protein, 36 aa, Homo sapiens
MADPRDKALQDYRKKLLEHKEIDGRLKECECTFLSI

SEQ ID NO: 8423 - protein, 153 aa, Homo sapiens
MLVSLKMSYKAAAGEDYKADCPPGNPAPTSNHGPDATEAEEDFVDPWTVQTSSAKGIDYDKLIVRFGSSKIDKELINRIERATGQRPHHFLRRGIFFSHRDMNQVLDAYENKKPFYLYTGRGPSSEAMHVGHLIPFIFTKWLQDVFNVPLVIQ

SEQ ID NO: 8424 - protein, 59 aa, Homo sapiens
MKQVPTLKIDGITIHQSLAIIEYLEEMRPTPRLLPQDPKKRASVRMISDLIAGGIQPLQ

SEQ ID NO: 8425 - protein, 107 aa, Homo sapiens
MPNSEPASLLELFNSIATQGELVRSLKAGNASKDEIDSAVKMLVSLKMSYKAAAGEDYKADCPPGNPAPTSNHGPDATEAEEDFVDPWTVQTSSAKGIDYDKLIVRF

SEQ ID NO: 8426 - protein, 645 aa, Homo sapiens
MSVSSGVQILTKPETVDRRRSAETTKEAGRPLEMAVSEPEASAAVSVTFKHVTMAFTQKEWKQLDPAQSNLYNDVMLENYCNQASMGCQAPKPDMISKLEKGEAPWLGKGKRPSQGCPSKIARPKQKETDGKVQKDDDQLENIQKSQNKLLREVAVKKKTQAKKNGSDCGSLGKKNNLHKKHVPSKKRLLKFESCGKILKQNLDLPDHSRNCVKRKSDAAKEHKKSFNHSLSDTRKGKKQTGKKHEKLSSHSSSDKCNKTGKKHDKLCCHSSSHIKQDKIQTGEKHEKSPSLSSSTKHEKPQACVKPYECNQCGKVLSHKQGLIDHQRVHTGEKPYECNECGIAFSQKSHLVVHQRTHTGEKPYECIQCGKAHGHKHALTDHLRIHTGEKPYECAECGKTFRHSSNLIQHVRSHTGEKPYECKECGKSFRYNSSLTEHVRTHTGEIPYECNECGKAFKYSSSLTKHMRIHTGEKPFECNECGKAFSKKSHLIIHQRTHTKEKPYKCNECGKAFGHSSSLTYHMRTHTGESPFECNQCGKGFKQIEGLTQHQRVHTGEKPYECNECGKAFSQKSHLIVHQRTHTGEKPYECNECEKAFNAKSQLVIHQRSHTGEKPYECNECGKTFKQNASLTKHVKTHSEDKSHE

SEQ ID NO: 8427 - protein, 97 aa, Homo sapiens
MREIVHIQAGQCGNQIGAKFWEVISDEHGIDPSGNYVGDSDLQLERISVYYNEASSHKYVPRAILVDLEPGTMDSVRSGAFGHLFRPDNFIFGPHLL

SEQ ID NO: 8428 - protein, 593 aa, Homo sapiens
MAAMAVGGAGGSRVSSGRDLNCVPEIADTLGAVAKQGFDFLCMPVFHPRFKREFIQEPAKNRPGPQTRSDLLLSGRAFLLPLNQEDNTNLARVLTNHIHTGHHSSMFWMRVPLVAPEDLRDDIIENAPTTHTEEYSGEEKTWMWWHNFRTLCDYSKRIAVALEIGADLPSNHVIDRWLGEPIKAAILPTSIFLTNKKGFPVLSKMHQRLIFRLLKLEVQFIITGTNHHSEKEFCSYLQYLEYLSQNRPPPNAYELFAKGYEDYLQSPLQPLMDNLESQTYEVFEKDPIKYSQYQQAIYKCLLDRVPEEEKDTNVQVLMVLGAGRGPLVNASLRAAKQADRRIKLYAVEKNPNAVVTLENWQFEEWGSQVTVVSSDMREWVAPEKADIIVSELLGSFADNELSPECLDGAQHFLKDDGVSIPGEYTSFLAPISSSKLYNEVRACREKDRDPEAQFEMPYVVRLHNFHQLSAPQPCFTFSHPNRDPMIDNNRYCTLEFPVEVNTVLHGFAGYFETVLYQDITLSIRPETHSPGMFSWFPILFPIKQPITVREGQTICVRFWRCSNSKKVWYEWAVTAPVCSAIHNPTGRSYTIGL

SEQ ID NO: 8429 - protein, 266 aa, Homo sapiens
MTGGRAQSIGRRGKVEQLSPEEEEKRRIRRERNKMAAAKCRNRRRELTDTLQAETDQLEDEKSALQTEIANLLKEKEKLEFILAAHRPACKIPDDLGFPEEMSVASLDLTGGLPEVATPESEEAFTLPLLNDPEPKPSVEPVKSISSMELKTEPFDDFLFPASSRPSGSETARSVPDMDLSGSFYAADWEPLHSGSLGMGPMATELEPLCTPVVTCTPSCTAYTSSFVFTYPEADSFPSCAAAHRKGSSSNEPSSDSLSSPTLLAL

SEQ ID NO: 8430 - protein, 68 aa, Homo sapiens
MSVNVNRSVSDQFYRYKMPRLIAKVEGKGNGIKTVIVNMVDVAKALNRPPTYPTKYFGCELGAQTQFD

SEQ ID NO: 8431 - protein, 51 aa, Homo sapiens
MSVNVNRSVSDQFYRYKMPRLIAKVEGKGNGIKTVIVNMVDVAKALNRPPT

SEQ ID NO: 8432 - protein, 146 aa, Homo sapiens
MGLRYSGCLGSHVENAGEPDSWSSLSYEIPYGDCSVRHHRELDIYTLTSESDSHHEHPFPGDGCTGPIFKLMNIQQQLMKTNLKQMDSLMPLMMTAQDPSSAPETDGQFLPCAPEPTDPQRLSSSEETESTQCCPGSPVAQTESPC

SEQ ID NO: 8433 - protein, 335 aa, Homo sapiens
RRRRLLFWDKETQISPEKFQEQLQTRAHCWECPMVQPPERTIRGPAELFRTPTLSGWLPPELLGLWTHCAQPPPKALRRELPEEAAAEEERRKIEVPSEIEVPREALEPSVPLMVSLEISLEAAEEEKSRISLIPPEERWAWPEVEAPEAPALPVVPELPEVPMEMPLVLPPELELLSLEAVHRAVALELQANREPDFSSLVSPLSPRRMAARVFYLLLGECMHVCVCMWGRDTETRGPYRDSPDLPSPRLLTSALSATDSSRETRKAIWSPPDPAGAQIPLRLESIYKAARKPATSSKPRRASLGPAYLISECAFPAFLLSELLFKQKTSCFYY

SEQ ID NO: 8434 - protein, 37 aa, Homo sapiens
MQLCGPQAQDEHLAAIVDAVGTMLPCFCPTEQALALV

SEQ ID NO: 8435 - protein, 108 aa, Homo sapiens
MAKAFKPVMSIPVSEHPDTEAALRAVSENETADNSFSQEEEPVVAGEDLPPPSPQESDVQPVQPEEVSARDFLQRLDLQIKLSTQAAKKLKEESRDEESPYATSLYHS

SEQ ID NO: 8436 - protein, 76 aa, Homo sapiens
MIIPSLEELDSLKYSDLQNLAKSLGLRANLRATKLLKALKGYIKHEARKGNENQFHSCCPGWSAMTRSRLTATSTS

SEQ ID NO: 8437 - protein, 198 aa, Homo sapiens
GEGSAGASGAPEKVPENDGYMEPYEAQKMMAEIRGSKETATQPLPLYDTPYEPEEDGATAEGEGAPWPRESRLPEDDERPPEEYDQPWEWKKERISKAFAAQFEGPEKSCLSPGREEKGRLPPRLSAGNPKSAKPLSMEPSSPLGEWTDPALPLENQVWYHGAISRTDAENLLRLCKEASYLVRNSETSKNDFSLSLK

SEQ ID NO: 8438 - protein, 148 aa, Homo sapiens
EVSKEILLEMFKYNKFKCRILNEKVNTATTTVYRCGPLIDLCKGPHVRHTGKIKTIKIFKNSSTYWEGNPEMETLQRIYGISFPDNKMMRDWEKFQEEAKNRDHRKIGKEQELFFFHDLSPGSCFFLPRGAFIYNTLTDFIRMQDRCG

SEQ ID NO: 8439 - protein, 64 aa, Homo sapiens
VAAGNLLNESEKDCGQDRRAPGVQPCRLVTMTSVVKTVYSLQPPSALSGGQPAVQLLLQLQTTE

SEQ ID NO: 8440 - protein, 170 aa, Homo sapiens
MSAHLQWMVVRNCSSFLIKRNKQTYSTEPNNLKARNSFRYNGLIHRKTVGVEPAADGKGVVVVIKRRSGQRKPATSYVRTTINKNARATLSSIRHMIRKNKYRPDLRMLAGRVGRQQAVSSLEHQPRPGRLHLSNTAARSFCVMEPSRTLQDLGSTLGLHPLDASGTPEL

SEQ ID NO: 8441 - protein, 123 aa, Homo sapiens
VAAGNLLNESEKDCGQDRRAPGVQPCRLVTMTSVVKTVYSLQPPSALSGGQPADTQTRATSKSLLPVRSKEVDVSKQLHSGGPENDVTKITKLRRENGQMKATDTATRRNVRKGTTIITATNH

SEQ ID NO: 8442 - protein, 94 aa, Homo sapiens
MGEVEISALAYVKMCLHAARYPHAAVNGLFLAPAPRSGECLCLTDCVPLFHSHLALSVMLEVALNQVDVWGAQAGLVVAGYYHANAAVNDQSNI

SEQ ID NO: 8443 - protein, 154 aa, Homo sapiens
MESAGLEQLLRELLLPDTERIRRATEQLQIVLRAPAALPALCDLLASAADPQTTEHPLATAGGGATGEPQVPDPDGPAERNRALCEPQPGPALSHHFSKGRLGGLATAFAAASAQYPQPPQPRERDGAFAAKCGGDLPARGLPTPPPGASSASE

SEQ ID NO: 8444 - protein, 161 aa, Homo sapiens
RAIDQASFTTSMEWDTQVVKGSSPLGPAGLGAEEPAAGPQLPSWLQPERCAVFQCAQCHAVLADSVHLAWDLSRSLGAVVFSRVTNNVVLEAPFLVGIEGSLKGSYLLKTKAIVNASEMDIQNVPLSEKIAELKEKIVLTHNRLKSLMKILSEVTPDQSKP

SEQ ID NO: 8445 - protein, 109 aa, Homo sapiens
MSVNVNRSVSDQFYRYKMPRLIAKVEGKGNGIKTVIVNMVDVAKALNRPPTYPTKYFGCELGAQTQFDVKNDRYIVNGSHEANKLQDMLDGFIKKFVLCPECENPETDL

SEQ ID NO: 8446 - protein, 191 aa, Homo sapiens
MGRVRTKTVKKAARVIIEKYYTRLGNDFHTNKRVCEEIAIIPSKKLRNKIAGYVTHLMKRIQRGPVRGISIKLQEEERERRDNYVPEVSALDQEIIEVDPDTKEMLKLLLAYVAPFVSALAESACFSSVKAFLWCLHANHSEMSFGPFPGLRQSVQPSGHSAYSWDEFQNASGTCLNFFCSAVLFSINLGQ

SEQ ID NO: 8447 - protein, 169 aa, Homo sapiens
MSAHLQWMVVRNCSSFLIKRNKQTYSTEPNNLKARNSFRYNGLIHRKTVGVEPAADGKGVVVVIKRRSGQRKPATSYVRTTINKNARATLSSIRHMIRKNKYRPDLRMDMLASTGSGLCCSVAVQPWASSSTSLCLRTLICNMRVDRPYYSGLMRRLNVQNLLDCAHKS

SEQ ID NO: 8448 - protein, 242 aa, Homo sapiens
PLFKRFTHTRWAAPVETLENIIATVDTRLPEFSELQGCFREELMEALHLHLVKEYIIQLSKGRLVLKTAEQQQQLAGYILANADTIQHFCTQHGSPATWLQPALPTLAEIIRLQDPSAIKIEVATYATCYPDFSKGHLSAILAIKGNLSNSEVKRIRSILDVSMGAQEPSRPLFSLIKPRAAVSGIQQWWNGRQNWKRKKEKMSSRLAGAFRVLWRAVSTASIRRHIQVAPRPLQAGPAMGP

SEQ ID NO: 8449 - protein, 84 aa, Homo sapiens
MVRTKADSVPGTYRKAENKYAGGNPVCVRPTPKWQKGIGEFFRLSPKDSEKENQIPEEAGSSGLGKAKRKACPLQPDHTNDEKE

SEQ ID NO: 8450 - protein, 417 aa, Homo sapiens
MNDRCPRPGSSSLARGCLLSVADGAGREGGPGPALPGLGRCCWRLALHQASLWQESELCRGRRLRMMPQLQFKDAFWCRDFTAHTGYEVLLQRLLDGRKMCKDMEELLRQRAQAEERYGKELVQIARKAGGQTEINSLRASFDSLKQQMENVGSSHIQLALTLREELRSLEEFRERQKEQRKKYEAVMDRVQKSKLSLYKKAMESKKTYEQKCRDADDAEQAFERISANGHQKQVEKSQNKARQCKDSATEAERVYRQSIAQLEKVRAEWEQEHRTTCEAFQLQEFDRLTILRNALWVHSNQLSMQCVKDDELYEEVRLTLEGCSIDADIDSFIQAKSTGTEPPGEVRLADSAASSSGALPELLRSGGHPADQQPWHTAVLRHDKEVLWTAARKSQDHFVGSFCCVHRDPDPHPRAE

SEQ ID NO: 8451 - protein, 35 aa, Homo sapiens
GPAWISKVSRLLGAFHNPKQVTRGFTGGINFAKLM

SEQ ID NO: 8452 - protein, 312 aa, Homo sapiens
MAGYLRVVRSLCRASGSRPAWAPAALTAPTSQEQPRRHYADKRIKVAKPVVEMDGDEMTRIIWQFIKEKYKATDFVADRAGTFKMVFTPKDGSGVKEWEVYNFPAGGVGMGMYNTDESISGFAHSCFQYAIQKKWPLYMSTKNTILKAYDGRFKDIFQEIFDKHYKTDFDKNKIWYEHRLIDDMVAQVLKSSGGFVWACKNYDGDVQSDILAQGFGSLGLMTSVLVCPDGKTIEAEAAHGTVTRHYREHQKGRPTSTNPIASIFAWTRGLEHRGKLDGNQDLISVKLNEHFLNTTDFLDTIKSNLDRALGRQ

SEQ ID NO: 8453 - protein, 163 aa, Homo sapiens
MSAHLQWMVVRNCSSFLIKRNKQTYSTEPNNLKARNSFRYNGLIHRKTVGVEPAADGKGVVVVIKRRSGQRKPATSYVRTTINKNARATLSSIRHMIRKNKYRPDLRMVSWGLGIRLGETGQCCGEGPPTTGCNMGWRGMDSCFQPTPHTQHWPRGRLVECMG

SEQ ID NO: 8454 - protein, 207 aa, Homo sapiens
PKCTACQESIVKDKVFKDNCCKREILALQIYCRNESRGCAEQLMLGHLLVHLKNDCHFEELPCVRPDCKEKVLRKDLRDHVEKACKYREATCSHCKSQVPMIALQKHEDTDCPCVVVSCPHKCSVQTLLRSELSAHLSECVNAPSTCSFKRYGCVFQGTNQQIKAHEASSAVQHVNLLKEWSNSLEKKGYENKESENSVPSLTDGNE

SEQ ID NO: 8455 - protein, 37 aa, Homo sapiens
MAGPAWISKVSRLLGAFHNPKQVTRGFTGGINFAKLM

SEQ ID NO: 8456 - protein, 967 aa, Homo sapiens
MADWLRDYQDLLQVKTGLSLEVATYRALLEGESNPEIVIWAEHVENMPSEFRNKSYHYTDSLLQRENERNLFSRQKAPLASFNHSSALYSNLSGHRGSQTGTSIGGDARRGFLGSGYSSSATTQQENSYGKAVSSQTNVRTFSPTYGLLRNTEAQVKTFPDRPKAGDTREVPVYIGEDSTIARESYRDRRDKVAAGASESTRSNERTVILGKKTEVKATREQERNRPETIRTKPEEKMFDSKEKASEERNLRWEELTKLDKEARQRESQQMKEKAKEKDSPKEKSVREREVPISLEVSQDRRAEVSPKGLQTPVKDAGGGTGREAEARELRFRLGTSDATGSLQGDSMTETVAENIVTSILKQFTQSPETEASADSFPDTKVTYVDRKELPGERKTKTEIVVESKLTEDVDVSDEAGLDYLLSKDIKEVGLKGKSAEQMIGDIINLGLKGREGRAKVVNVEIVEEPVSYVSGEKPEEFSVPFKVEEVEDVSPGPWGLVKEEEGYGESDVTFSVNQHRRTKQPQENTTHVEEVTEAGDSEGEQSYFVSTPDEHPGGHDRDDGSVYGQIHIEEESTIRYSWQDEIVQGTRRRTQKDGAVGEKVVKPLDVPAPSLEGDLGSTHWKEQARSGEFHAEPTVIEKEIKIPHEFHTSMKGISSKEPRQQLVEVIGQLEETLPERMREELSALTREGQGGPGSVSVDVKKVQGAGGSSVTLVAEVNVSQTVDADRLDLEELSKDEASEMEKAVESVVRESLSRQRSPAPGSPDEEGGAEAPAAGIRFRRWATRELYIPSGESEVAGGASHSSGQRTPQGPVSATVEVSSPTGFAQSQVLEDVSQAARHIKLGPSEVWRTERMSYEGPTAEVVEMDVSNVEAIRSRTQEAGALGVSDRGSWRDADSRNDQAVGVSFKASAGEGDQAHREQGKEQAMFDKKVQLQRMVDQRSVISDEKKVALLYLDNEEEENDGHWF

SEQ ID NO: 8457 - protein, 194 aa, Homo sapiens
YSQEQRQAFAPFCAEDYTESLLQLHDAEIVRLKNYYEVHKELFEGVQKWEETWRLFLEFERKASDPNRFTNRGGNLLKEEKQRAKLQKMLPKLEEELKARIELWEQEHSKAFMVNGQKFMEYVAEQWEMHRLEKERAKQERQLKNKKQTETEMLYGSAPRTPSKRRGLAPNTPGKARKPVAASTCSGKKTPRTG

SEQ ID NO: 8458 - protein, 54 aa, Homo sapiens
MASVSELACIYSALILHDDEVTVTLRRRKWKQRKKNPRSLMMTWALVFLTKPLL

SEQ ID NO: 8459 - protein, 101 aa, Homo sapiens
MESAGLEQLLRELLLPDTERIRRATEQLQIVLRAPAALPALCDLLASAADPQIRQFAAVLTRRRLNTRWRRLAAEQRESLKSLILTALQRETESLLFAGTV

SEQ ID NO: 8460 - protein, 110 aa, Homo sapiens
MRRSEVLAEESIVCLQKALNHLREIWELIGIPEDQRLQRTEVVKKHIKELLDMMIAEEESLKERLIKSISVCQKELNTLCSELHVEPFQEFTWNLITVVRCLIQEEGETT

SEQ ID NO: 8461 - protein, 127 aa, Homo sapiens
FETQAADLAGGTTVAAGNLLNESEKDCGQDRRAPGVQPCRLVTMTSVVKTVYSLQPPSALSGGQPADTQTRATSKSLLPVRSKEVDVSKQLHSGGPENDVTKITKLRRENGQMKATDTATRRNVRKG

SEQ ID NO: 8462 - protein, 347 aa, Homo sapiens
VRARHLHAAALGAEPLPQANVRELMDRALELEARRWAEDVPPQRLDGHCHSELAIDIIQITSQAQAKAESITLDLGSQIKRVLLVELPAFLRSYQRAFNEFLERGKQLTNYRANVIANINNCLSFRMSMEQNWQVPQDTLSLLLGPLGELKSHGFDTLLQNLHEDLKPLFKRFTHTRWAAPVETLENIIATVDTRLPEFSELQGCFREELMEALHLHLVKEYIIQLSKGRLVLKTAEQQQQLAGYILANADTIQHFCTQHGSPATWLQPALPTLAEIIRLQDPSAIKIEVATYATCYPDFSKGHLSAILAIKGNLSNSEVKRIRSILDVSMGAQEPSRPLFSLIKVG

SEQ ID NO: 8463 - protein, 749 aa, Homo sapiens
MAHRKLESVGSGMLDHRVRPGPVPHSQEPESEDMELPLEGYVPEGLELAALRPESPAPEEQECHNHSPDGDSSSDYVNNTSEEEDYDEGLPEEEEGITYYIRYCPEDDSYLEGMDCNGEEYLAHSAHPVDTDECQEAVEEWTDSAGPHPHGHEAEGSQDYPDGQLPIPEDEPSVLEAHDQEEDGHYCASKEGYQDYYPEEANGNTGASPYRLRRGDGDLEDQEEDIDQIVAEIKMSLSMTSITSASEASPEHGPEPGPEDSVEACPPIKASCSPSRHEARPKSLNLLPEAKHPGDPQRGFKPKTRTPEERLKWPHEQVCNGLEQPRKQQRSDLNGPVDNNNIPETKKVASFPSFVAVPGPCEPEDLIDGIIFAANYLGSTQLLSERNPSKNIRMMQAQEAVSRVKRMQKAAKIKKKANSEGDAQTLTEVDLFISTQRIKVLNADTQETMMDHALRTISYIADIGNIVVLMARRRMPRSASQDCIETTPGAQEGKKQYKMICHVFESEDAQLIAQSIGQAFSVAYQEFLRANGINPEDLSQKEYSDIINTQEMYNDDLIHFSNSENCKELQLEKHKGEILGVVVVESGWGSILPTVILANMMNGGPAARSGKLSIGDQIMSINGTSLVGLPLATCQGIIKGLKNQTQVKLNIVSCPPVTTVLIKRPDLKYQLGFSVQNGIICSLMRGGIAERGGVRVGHRIIEINGQSVVATAHEKIVQALSNSVGEIHMKTMPAAMFRLLTGQETPLYI

SEQ ID NO: 8464 - protein, 161 aa, Homo sapiens
MSFIPVAEDSDFPIHNLPYGVFSTRGDPRPRIGVAIGDQILDLSIIKHLFTGPVLSKHQDVFNQPTLNSFMGLGQAAWKEARVFLQNLLSVSQARLRDDTELRKCAFISQASATMHLPATIGDYTDFYSSRQHATNVGIMFRDKENALMPNWLHLPVGYHG

SEQ ID NO: 8465 - protein, 48 aa, Homo sapiens
MAKPCGVRLSGEARKQVEVFRQNLFQEILATENHIPESALARGLPQCG

SEQ ID NO: 8466 - protein, 290 aa, Homo sapiens
MLLSGAPPAGSRPGPRTQGSAGGGPGGSRRGAGGAGAGPGGGGSGGVAKWLREHLGFRGGGGGGGGSKPAPPEPDYRPPAPSPAAPPAPPPDILAAYRLQRERDFEDPYSGGSSGSAALATPVAPGPTPPPRHGSPPHRLIRVETPGPPAPPADERISGPPASSDRLAILEDYADPFDVQETGEGSAGASGAPEKVPENDGYMEPYEAQKMMAEIRGSKETATQPLPLYDTPYEPEEDGATAEGEGAPWPRESRLPEDDERPPEEYDQPWEWKKERISKAFAGAARDSCT

SEQ ID NO: 8467 - protein, 45 aa, Homo sapiens
MKGLGTDEDSLIEIICSRTNQELQEINRVYKEMYKTDLEKDIISD

SEQ ID NO: 8468 - protein, 187 aa, Homo sapiens
IKQLGKTKEMDVYGITDKQPSLELLAFPAYLLGINQDRLKEKLTSRQMDSKWGGKSESIHVTLNVEQACYTRDALAKALHARVFDFLVDSINKAMEKDHEEYNIGVLDIYGFEIFQKNGFEQFCINFVNEKLQQIFIELTLKAEQEEYVQEGIRWTPIEYFNNKIVCDLIENKVNPPGIMSILDDVC

SEQ ID NO: 8469 - protein, 42 aa, Homo sapiens
MAGPAWISKVSRLLGAFHNPKQVTRGFTGGEMVLAQKFQLQL

SEQ ID NO: 8470 - protein, 39 aa, Homo sapiens
MAKPCGVRLSGEARKQVEVFRQNLFQEVFSFLICKSWTQ

SEQ ID NO: 8471 - protein, 126 aa, Homo sapiens
MAAPEAPPLDRVFRTTWLSTECDSHPLPPSYRKFLFETQAADLAGGTTVAAGNLLNESEKDCGQDRRAPGVQPCRLVTMTSVVKTVYSLQPPSALSGGQPAGPKKSMFPNSFIQEVQRMMLQKSPN

SEQ ID NO: 8472 - protein, 145 aa, Homo sapiens
MASCRDFTAHTGYEVLLQRLLDGRKMCKDMEELLRQRAQAEERYGKELVQIARKAGGQTEINSLRASFDSLKQQMENVGSSHIQLALTLREELRSLEEFRERQKEQRKKYEAVMDRVQKSKLSLYKKAMESKKTYEQKCRDADDA

SEQ ID NO: 8473 - protein, 276 aa, Homo sapiens
GKYFEIQFSPGGEPDGGKISNFLLEKSRVVMRNPGERSFHIFYQLIEGASAEQKHSLGITSMDYYYYLSLSGSYKVDDIDDRREFQETLHAMNVIGIFAEEQTLVLQIVAGILHLGNISFKEVGNYAAVESEEFLAFPAYLLGINQDRLKEKLTSRQMDSKWGGKSESIHVTLNVEQACYTRDALAKALHARVFDFLVDGVKRDLLLTPKCLYLIGREKVKQGPDKGLVKEVLKRKIEIERILSVSLSTMQDDIFILHEQEYDSLLESVFKTEFLS

SEQ ID NO: 8474 - protein, 38 aa, Homo sapiens
MAGYLRVVRSLCRASGSRPAWAPAALTAPTSQEQPRRH

SEQ ID NO: 8475 - protein, 414 aa, Homo sapiens
MLLSGAPPAGSRPGPRTQGSAGGGPGGSRRGAGGAGAGPGGGGSGGVAKWLREHLGFRGGGGGGGGSKPAPPEPDYRPPAPSPAAPPAPPPDILAAYRLQRERDFEDPYSGGSSGSAALATPVAPGPTPPPRHGSPPHRLIRVETPGPPAPPADERISGPPASSDRLAILEDYADPFDVQETGEGSAGASGAPEKVPENDGYMEPYEAQKMMAEIRGSKETATQPLPLYDTPYEPEEDGATAEGEGAPWPRESRLPEDDERPPEEYDQPWEWKKERISKAFAVDIKVIKDLPWPPPVGQLDSSPSLPDGDRDISGPASPLPEPSLEDSSAQFEGPEKSCLSPGREEKGRLPPRLSAGNPKSAKPLSMEPSSPLGEWTDPALPLENQLVSRGHQPNRRREPAPAVQRGQLPGAQQ

SEQ ID NO: 8476 - protein, 175 aa, Homo sapiens
MNDRCPRPGSSSLARGCLLSVADGAGREGGPGPALPGLGRCCWRLALHQASLWQESELCRGRRLRMMPQLQFKDAFWCRDFTAHTGYEVLLQRLLDGRKMCKDMEELLRQRAQAEERYGKELVQIARKAGGQTEINSLRASFDSLKQQMENVGSSHIQLALTLREELRSLEEFRE

SEQ ID NO: 8477 - protein, 89 aa, Homo sapiens
MSAHLQWMVVRNCSSFLIKRNKQTYSTEPNNLKARNSFRYNGLIHRKTVGVEPAADGKGVVVASGSLPPPMCGPPSTRMLAPRSAASDT

SEQ ID NO: 8478 - protein, 1909 aa, Homo sapiens
MACCHKVMLLLDTAGGAARHSRVRRAALRLLTYLSCRFGLARVHWAFKFFDSQGARSRPSRVSDFRELGSRSWEDFEEELEARLEDRAHLPGPAPRATHTHGALMETLLDYQWDRPEITSPTKPILRSSGRRLLDVESEAKEAEAALGGLVNAVFLLAPCPHSQRELLQFVSGCEAQAQRLPPTPKQVMEKLLPKRVREVMVARKITFYWVDTTEWSKLWESPDHLGYWTVCELLHHGGGTVLPSESFSWDFAQAGEMLLRSGIKLSSEPHLSPWISMLPTDATLNRLLYNSPEYEASFPRMEGMLFLPVEGKEIQETWTVTLEPLAMHQRHFQKPVRIFLKGSVAQWSLPTSSTLGTDSWMLGSPEESTATQRLLFQQLVSRLTAEELHLVADVDPGEGRPPITGVISPLSASAMILTVCRTKEAEFQRHVLQTAVADSPRDTASLFSDVVDSILNQTHDSLADTASAASPVPEWAQQELGHTTPWSPAVVEKWFPFCNISGASSDLMESFGLLQAASANKEESSKTEGELIHCLAELYQRKSREESTIAHQEDSKKKRGVPRTPVRQKMNTMCRSLKMLNVARLNVKAQKLHPDGSPDVAGEKGIQKIPSGRTVDKLEDRGRTLRSSKPKDFKTEEELLSYIRENYQKTVATGEIMLYACARNMISTVKMFLKSKGTKELEVNCLNQVKSSLLKTSKSLRQNLGKKLDKEDKVRECQLQVFLRLEMCLQCPSINESTDDMEQVVEEVTDLLRMVCLTEDSAYLAEFLEEILRLYIDSIPKTLGNLYNSLGFVIPQKLAGVLPTDFFSDDSMTQENKSPLLSVPFLSSARRSVSGSPESDELQELRTRSAKKRRKNALIRHKSIAEVSQNLRQIEIPKVSKRATKKENSHPAPQQPSQPVKDTVQEVTKVRRNLFNQELLSPSKRSLKRGLPRSHSVSAVDGLEDKLDNFKKNKGYHKLLTKSVAETPVHKQISKRLLHRQIKGRSSDPGPDIGVVEESPEKGDEISLRRSPRIKQLSFSRTHSASFYSVSQPKSRSVQRVHSFQQDKSDQRENSPVQSIRSPKSLLFGAMSEMISPSEKGSARMKKRSRNTLDSEVPAAYQTPKKSHQKSLSFSKTTPRRISHTPQTPLYTPERLQKSPAKMTPTKQAAFKESLKDSSSPGHDSPLDSKITPQKRHTQAGEGTSLETKTPRTPKRQGTQPPGFLPNCTWPHSVNSSPESPSCPAPPTSSTAQPRRECLTPIRDPLRTPPRAAAFMGTPQNQTHQQPHVLRAARAEEPAQKLKDKAIKTPKRPGNSTVTSSPPVTPKKLFTSPLCDVSKKSPFRKSKIECPSPGELDQKEPQMSPSVAASLSCPVPSTPPELSQRATLDTVPPPPPSKVGKRCRKTSDPRRSIVECQPDASATPGVGTADSPAAPTDSRDDQKGLSLSPQSPPERRGYPGPGLRSDWHASSPLLITSDTEHVTLLSEAEHHGIGDLKSNVLSVEEGEGLRTADAEKSSLSHPGIPPSPPSCGPGSPLMPSRDVHCTTDGRQCQASAQLDNLPASAWHSTDSASPQTYEVELEMQASGLPKLRIKKIDPSSSLEAEPLSKEESSLGEESFLPALSMPRASRSLSKPEPTYVSPPCPRLSHSTPGKSRGQTYICQACTPTHGPSSTPSPFQTDGVPWTPSPKHSGKTTPDIIKDWPRRKRAVGCGAGSSSGRGEVGADLPGSLSLLESEGKDHGLELSIHRTPILEDFELEGVCQLPDQSPPRNSMPKAEEASSWGQFGLSSRKRVLLAKEEADRGAKRICDLREDSEVSKSKEGSPSWSAWQLPSTGDEEVFVSGSTPPPSCAVRSCLSASALQALTQSPLLFQGKTPSSQSKDPRDEDVDVLPSTVEDSPFSRAFSRRRPISRTYTRKKLMGTWLEDL

SEQ ID NO: 8479 - protein, 153 aa, Homo sapiens
MRVTVAPQTKPVFSTNELAHLSPPSAPASQRESGVGLRASCPTEWGQKVVRGAFRGALRAEKRPAATAQIEIIPCKICGDKSSGIHYGVITCEGCKGFFRRSQQSNATYSCPRQKNCLIDRTSRNRCQHCRLQKCLAVGMSRDAVKFGRMSKK

SEQ ID NO: 8480 - protein, 98 aa, Homo sapiens
MESAGLEQLLRELLLPDTERIRRATEQLQIVLRAPAALPALCDLLASAADPQIRQFAAVLTRRRLNTRWRRLAAEQRESLKSLILTALQRETEWGFCC

SEQ ID NO: 8481 - protein, 413 aa, Homo sapiens
MAAVPQNNLQEQLERHSARTLNNKLSLSKPKFSGFTFKKKTSSDNNVSVTNVSVAKTPVLRNKDVNVTEDFSFSEPLPNTTNQQRVKDFFKNAPAGQETQRGGSKSLLPDFLQTPKEVVCTTQNTPTVKKSRDTALKKLEFSSSPDSLSTINDWDDMDDFDTSETSKSFVTPPQSHFVRVSTAQKSKKGKRNFFKAQLYTTNTVKTDLPPPSSESEQIDLTEEQKDDSEWLSSDVICIDDGPIAEVHINEDAQESDSLKTHLEDERDNSEKKKNLEEAELHSTEKVPCIEFDDDDYDTDFVPPSPEEIISASSSSSKCLSTLKDLDTSDRKEDVLSTSKDLLSKPEKMSMQELNPETSTDCDGSHCVAQAGLELLDLSNPPALASPKGWDYSHEPPCLAKTFFFFPQRKILTT

SEQ ID NO: 8482 - protein, 367 aa, Homo sapiens
MLLSGAPPAGSRPGPRTQGSAGGGPGGSRRGAGGAGAGPGGGGSGGVAKWLREHLGFRGGGGGGGGSKPAPPEPDYRPPAPSPAAPPAPPPDILAAYRLQRERDFEDPYSGGSSGSAALATPVAPGPTPPPRHGSPPHRLIRVETPGPPAPPADERISGPPASSDRLAILEDYADPFDVQETGEGSAGASGAPEKVPENDGYMEPYEAQKMMAEIRGSKETATQPLPLYDTPYEPEEDGATAEGEGAPWPRESRLPEDDERPPEEYDQPWEWKKERISKAFAAQFEGPEKSCLSPGREEKGRLPPRLSAGNPKSAKPLSMEPSSPLGEWTDPALPLENQLVSRGHQPNRRREPAPAVQRGQLPGAQQ

SEQ ID NO: 8483 - protein, 208 aa, Homo sapiens
MMPQLQFKDAFWCRDFTAHTGYEVLLQRLLDGRKMCKDMEELLRQRAQAEERYGKELVQIARKAGGQTEINSLRASFDSLKQQMENVGSSHIQLALTLREELRSLEEFRERQKEQRKKYEAVMDRVQKSKLSLYKKAMESKKTYEQKCRDADDAEQAFERISANGHQKQSQNKARQCKDSATEAERVYRQSIAQLEKVRAEWEQEHRT

SEQ ID NO: 8484 - protein, 182 aa, Homo sapiens
MAGQRTCQRRSSRAGPGKMQEPPKSIEEFLKFQNWDYWPREIHFRDDDKWSCTLKKIKEDSSFVSIYTHLWENVPRIFEALLIMESKLKEYSLILQNHTSEIFKWKSMISETSSYRKLERYGEFLKKYHKKKKIMLSDEMETEKNIEGCSFTGFKANELTQLPRHLDAEQIYLFILKAHNFD

SEQ ID NO: 8485 - protein, 252 aa, Homo sapiens
AQAEERYGKELVQIARKAGGQTEINSLRASFDSLKQQMENVGSSHIQLALTLREELRSLEEFRERQKEQRKKGMAVPRQSDCMEVKSPSWEYEAVMDRVQKSKLSLYKKAMESKKTYEQKCRDADDAEQAFERISANGHQKQVEKSQNKARQCKDSATEAERVYRQSIAQLEKVRAEWEQEHRTTCEAFQLQEFDRLTILRNALWVHSNQLSMQCVKDDELYEEVRLTLEGCSIDADIDSFIQAKSTGTEPP

SEQ ID NO: 8486 - protein, 810 aa, Homo sapiens
MKSARAKTPRKPTVKKGSQTNLKDPVGVYCRVRPLGFPDQECCIEVINNTTVQLHTPEGYRLNRNGDYKETQYSFKQVFGTHTTQKELFDVVANPLVNDLIHGKNGLLFTYGVTGSGKTHTMTGSPGEGGLLPRCLDMIFNSIGSFQAKRYVFKSNDRNSMDIQCEVDALLERQKREAMPNPKTSSSKRQVDPEFADMITVQEFCKAEEVDEDSVYGVFVSYIEIYNNYIYDLLEEVPFDPIKPKWNSCSTPMRNTDFVPPQSKLLREDKNHNMYVAGCTEVEVKSTEEAFEVFWRGQKKRRIANTHLNRESSRSHSVFNIKLVQAPLDADGDNVLQEKEQITISQLSLVDLAGSERTNRTRAEGNRLREAGNINQSLMTLRTCMDVLRENQMYGTNKMVPYRDSKLTHLFKNYFDGEGKVRMIVCVNPKAEDYEENLQVMRFAEVTQEVEVARPVDKAICGLTPGRRYRNQPRGPVGNEPLVTDVVLQSFPPLPSCEILDINDEQTLPRLIEALEKRHNLRQMMIDEFNKQSNAFKALLQEFDNAVLSKENHMQGKLNEKEKMISGQKLEIERLEKKNKTLEYKIEILEKTTTIYEEDKRNLQQELETQNQKLQRQFSDKRRLEARLQGMVTETTMKWEKECLLFQPDQNAPPIRLRHRRSRSAGDRWVDHKPASNMQTETVMQPHVPHAITVSVANEKALAKCEKYMLTHQELASDGEIETKLIKGDIYKTRGGGQSVQFTDIETLKQESPNGSRKRRSSTVAPAQPDGAESEWTDVETRCSVAVEMRAGSQLGPGYQHHAQPKRKKP

SEQ ID NO: 8487 - protein, 146 aa, Homo sapiens
MSVNVNRSVSDQFYRYKMPRLIAKVEGKGNGIKTVIVNMVDVAKALNRPPTYPTKYFGCELGAQTQFDVKNDRYIVNGSHEANKLQDMLDGFIKKFVLCPECENPETDLHVNPKKQTIGNSCKACGYRGMLDTHHKLCTFILKNPP

SEQ ID NO: 8488 - protein, 441 aa, Homo sapiens
MIIPSLEELDSLKYSDLQNLAKSLGLRANLRATKLLKALKGYIKHEARKGNENQDESQTSASSCDETEIQISNQEEAERQPLGHVTKTRRRCKTVRVDPDSQQNHSEIKISNPTEFQNHEKQESQDLRATAKVPSPPDEHQEAENAVSSGNRDSKVPSEGKKSLYTDESSKPGKNKRTAITTPNFKKLHEAHFKEMESIDQYIERKKKHFEEHNSMNELKQQPINKGGVRTPVPPRGRLSVASTPISQRRSQGRSCGPASQSTLGLKGSLKRSAISAAKTGVRFSAATKDNEHKRSLTKTPARKSAHVTVSGGTPKGEAVLGTHKLKTITGNSAAVITPFKLTTEATQTPVSNKKPVFDLKASLSRPLNYEPHKGKLKPWGQSKENNYLNQHVNRINFYKKTYKQPHLQTKEEQRKKREQERKEKKAKVLGMRRGLILAED

SEQ ID NO: 8489 - protein, 216 aa, Homo sapiens
LNESEKDCGQDRRAPGVQPCRLVTMTSVVKTVYSLQPPSALSGGQPADTQTRATSKSLLPVRSKEVDVSKQLHSGGPENDVTKITKLRRENGQMKATDTATRRNVRKGRSFALVATQAGVQWRNLSSPQPPPPGFKRLSCLSLPNTWDYSYKPLSKQKSEEELKDKNQLLEAVNKQLHQKLTETQGELKDLTQKVELLEKFRDNCLAILESKGLDP

SEQ ID NO: 8490 - protein, 379 aa, Homo sapiens
MESSPESLQPLEHGVAAGPASGTGSSQEGLQETRLAAGDGPGVWAAETSGGNGLGAAAARRSLPDSASPAGSPEVPGPCSSSAGLDLKDSGLESPAAAEAPLRGQYKVTASPETAVAGVGHELGTAGDAGARPDLAGTCQAELTAAGSEEPSSAGGLSSSCSDPSPPGESPSLDSLESFSNLHSFPSSCEFNSEEGAENRVPEEEEGAAVLPGAVPLCKEEEGEETAQVLAASKERFPGQSVYHIKWIQWKEENTPIITQNENGPCPLLAILNVLLLAWKVKLPPMMEIITAEQLMEYLGDYMLDAKPKEISEIQRLNYEQNMSDAMAILHKLQTGLDVNIDDIVKAVGNCSYNQLVEKIISCKQSDNSELVSEGGLCS

SEQ ID NO: 8491 - protein, 67 aa, Homo sapiens
LKALKGYIKHEARKGNENQDSSTSKRKTLCGFYSHQPTTLARPVLWPCKSEYLGSEGVTQALCYLCS

SEQ ID NO: 8492 - protein, 1321 aa, Homo sapiens
MEGTHCTLQLHKPITELCYISFCLPKGEVRGFSYKGTVTLDRSNKGFHNCYQVREESDIISLSQEPDEHPGDIFFKQTPTKDILTELYKLTTERERLLTNLLSSDHILGITMGNQEGKLQELSVSLAPEDDCFQSAGDWQGELPVGPLNKRSTHGNKKPRRSSGRRESFGALPQKRTKRKGRGGRESAPLMGKDKICSSHSLPLSRTRPNLWVLEEKGNLLPNGALACSLQRRESCPPDIPKTPDTDLGFGSFETAFKDTGLGREVLPPDCSSTEAGGDGIRRPPSGLEHQQTGLSESHQDPEKHPEAEKDEMEKPAKRTCKQKPVSKVVAKVQDLSSQVQRVVKTHSKGKETIAIRPAAHAEFVPKADLLTLPGAEAGAHGSRRQGKERQGDRSSQSPAGETASISSVSASAEGAVNKVPLKVIESEKLDEAPEGKRLGFPVHTSVPHTRPETRNKRRAGLPLGGHKSLFLDLPHKVGPDSSQPRGDKKKPSPPAPAALGKVFNNSASQSSTHKQTSPVPSPLSPRLPSPQQHHRILRLPALPGEREAALNDSPCRKSRVFSGCVSADTLEPPSSAKVTETKGASPAFLRAGQPRLVPGETLEKSLGPGKTTAEPQHQSPPEYQAAILHLKREHKEEIENLQAQFELRAFHIRGEHAMITARLEETIENLKHELEHRWRGGCEERKDVCISTDDDCPPKTFRNVCVQTDRETFLKPCESESKTTRSNQLVPKKLNISSLSQLSPPNDHKDIHAALQPMEGMASNQQKALPPPPASIPPPPPLPSGLGSLSPAPPMPPVSAGPPLPPPPPPPPPLPPPSSAGPPPPPPPPPLPNSPAPPNPGGPPPAPPPPGLAPPPPPGLFFGLGSSSSQCPRKPAIEPSCPMKPLYWTRIQISDRSQNATPTLWDSLEEPDIRDPSEFEYLFSKDTTQQKKKPLSETYEKKNKVKKIIKLLDGKRSQTVGILISSLHLEMKDIQQAIFNVDDSVVDLETLAALYENRAQEDELVKIRKYYETSKEEELKLLDKPEQFLHELAQIPNFAERAQCIIFRSVFSEGITSLHRKVEIITRASKDLLHVKSVKDILALILAFGNYMNGGNRTRGQADGYSLEILPKLKDVKSRDNGINLVDYVVKYYLRYYDQEAGTEKSVFPLPEPQDFFLASQVKFEDLIKDLRKLKRQLEASEKQMVVVCKESPKEYLQPFKDKLEEFFQKAKKEHKMEESHLENAQKSFETTVRYFGMKPKSGEKEITPSYVFMVWYEFCSDFKTIWKRESKNISKERLKMAQESVSKLTSEKKVETKKINPTASLKERLRQKEASVTTN

SEQ ID NO: 8493 - protein, 509 aa, Homo sapiens
MGGGASKSGAEEWTQSSNGRDGLNWHGLSPLGWPSCRSIQTLRVLSGDLGQLPTGIRDFVEHSARLCQPEGIHICDGTEAENTATLTLLEQQGLIRKLPKYNNCWLARTDPKDVARVESKTVIVTPSQRDTVPLPPGGARGQLGNWMSPADFQRAVDERFPGCMQGRTMYVLPFSMGPVGSPLSRIGVQLTDSAYVVASMRIMTRLGTPVLQALGDGDFVKCLHSVGQPLTGQGEPVSQWPCNPEKTLIGHVPDQREIISFGSGYGGNSLLGKKCFALRIASRLARDEGWLAEHMLILGITSPAGKKRYVAAAFPSACGKTNLAMMRPALPGWKVECVGDDIAWMRFDSEGRLRAINPENGFFGVAPGTSATTNPNAMATIQSNTIFTNVAETSDGGVYWEGIDQPLPPGVTVTSWLGKPWKPGDKEPCAHPNSRFCAPARQCPIMDPAWEAPEGVPIDAIIFGGRRPKGVPLVYEAFNWRHGVFVGSAMRSESTAAAEHKGLLGTGGS

SEQ ID NO: 8494 - protein, 154 aa, Homo sapiens
MRRSEVLAEESIVCLQKALNHLREIWELIGIPEDQRLQRTEVVKKHIKEEGETTILQLEKDLRTQVELMRKQKKERKQELKLLQEQDQELCEILCMPHYDIDSASVPSLEELNQFRQHVTTLRETKASRREEFVSIKRQIILCMEALDHTPDTS

SEQ ID NO: 8495 - protein, 85 aa, Homo sapiens
MGRKKIQITRIMDERNRQVTFTKRKFGLMKKAYELSVLCDCEIALIIFNSSNKLFQYASTDMDKVLLKYTEYNEPHESRTNSDIV

SEQ ID NO: 8496 - protein, 46 aa, Homo sapiens
MKIFDAAKAPIQWEERNVTAIQGPGGKWMIPSEAKESMDKNKMGLK

SEQ ID NO: 8497 - protein, 83 aa, Homo sapiens
FKSRTPETITIEELGTLVTYQLLAFLDFNNTRKRMSVIVRNPEGQIKLYSKGADTILFEKLHPSNEVLLSLTSDHLSEASMVF

SEQ ID NO: 8498 - protein, 308 aa, Homo sapiens
LDGSDEASCPVLTCGPASFQCNSSTCIPQLWACDNDPDCEDGSDEWPQRCRGLYVFQGDSSPCSAFEFHCLSGECIHSSWRCDGGPDCKDKSDEENCAVATCRPDEFQCSDGNCIHGSRQCDREYDCKDMSDEVGCVNVTLCEGPNKFKCHSGECITLDKVCNMARDCRDWSDEPIKECDIDECQDPDTCSQLCVNLEGGYKCQCEEGFQLDPHTKACKAVGSIAYLFFTNRHEVRKMTLDRSEYTSLIPNLRNVVALDTEVASNRIYWSDLSQRMICSTQLDRAHGVSSYDTVISRDIQAPDGLAVD

SEQ ID NO: 8499 - protein, 115 aa, Homo sapiens
MVRTKADSVPGTYRKVVAARAPRKVLGSSTSATNSTSVSSRKAENKYAGGNPVCVRPTPKWQKGIGEFFRLSPKDSEKENQIPEEAGSSGLGKAKRNQEPPILQHTEQQAGHTAH

SEQ ID NO: 8500 - protein, 121 aa, Homo sapiens
VGSPLSRIGVQLTDSAYVVASMRIMTRLGTPVLQALGDGDFVKCLHSVGQPLTGQGEPVSQWPCNPEKTLIGHVPDQREIISFGSGYGGNSLLGKKCFALRIASRLARDEGWLAEHMLVRA

SEQ ID NO: 8501 - protein, 136 aa, Homo sapiens
MMPQLQFKDAFWCRDFTAHTGYEVLLQRLLDGRKMCKDMEELLRQRAQAEERYGKELVQIARKAGGQTEINSLRASFDSLKQQMENVGSSHIQLALTLREELRSLEEFRERQKEQRKKGSLPRPRPSAQNLVSPAV

SEQ ID NO: 8502 - protein, 144 aa, Homo sapiens
QEAENAVSSGNRDSKVPSEGKKSLYTDESSKPGKNKRTAITTPNFKKLHEAHFKEMESIDQYIERKKKHFEEHNSMNELKQPINKGGVRTPVPPRGRLSVASTPISQRRSQGRSCGPASQSTLGLKGSLKRSAISAAKTGVRFK

SEQ ID NO: 8503 - protein, 371 aa, Homo sapiens
MKSARAKTPRKPTVKKGSQTNLKDPVGVYCRVRPLGFPDQECCIEVINNTTVQLHTPEGYRLNRNGDYKETQYSFKQVFGTHTTQKELFDVVANPLVNDLIHGKNGLLFTYGVTGSGKTHTMTGSPGEGGLLPRCLDMIFNSIGSFQAKRYVFKSNDRNSMDIQCEVDALLERQKREAMPNPKTSSSKRQVDPEFADMITVQEFCKAEEVDEDSVYGVFVSYIEIYNNYIYDLLEEVPFDPIKPKWNSCSTPMRNTDFVPPQSKLLREDKNHNMYVAGCTEVEVKSTEEAFEVFWRGQKKRRIANTHLNRESSRSHSVFNIKLVQAPLDADGDNVLQFWEAGYRILEPEFCCEKSLQIFKNPFGRSDKIRL

SEQ ID NO: 8504 - protein, 112 aa, Homo sapiens
MSAHLQWMVVRNCSSFLIKRNKQTYSTEPNNLKARNSFRYNGLIHRKTVGVEPAADGKGVVVVIKRRSGRKSGNCHRGGHPWRQGVGLGTGFPLGRLVSSVSRARLSPCPHL

SEQ ID NO: 8505 - protein, 109 aa, Homo sapiens
MKSARAKTPRKPTVKKGSQTNLKDPVGVYCRVRPLGFPDQECCIEVINNTTVQLHTPEGYRLNRNGDYKETQYSFKQVFGTHTTQKELFDVVANPLVNDLIHGKNGFQI

SEQ ID NO: 8506 - protein, 179 aa, Homo sapiens
MVPREAPESAQCLCPSLTIPNAKDVLRKRHKRRSRQHQRFMARKALLQEQGLLSMPPEPGSSPLPTPFGAATATEAASSGKQCLRAGSGSAPCSRRPAPGKASGPLPSKCVAIDCEMVGTGPRGRVSELARCSIVSYHGNVLYDKYIRPEMPIADYRTRWSGITRQHMRKAVPFQVAQK

SEQ ID NO: 8507 - protein, 101 aa, Homo sapiens
MSVNVNRSVSDQFYRYKMPRLIAKVEGKGNGIKTVIVNMVDVAKALNRPPTYPTKYFGCELGAQTQFDVKNDRYIVNGSHEANKLQDMLDGFIKKFVLCPE

SEQ ID NO: 8508 - protein, 67 aa, Homo sapiens
MVGDEQSDPELMQHLGASKRRALGNNFYEYYVDDPPRIVLDKLERRGFRVLSMTGVGQTLVWCLHKE

SEQ ID NO: 8509 - protein, 65 aa, Homo sapiens
QFQARVSRQTLLALEKEEEEEVFESSVPQRSTLAELKSKGKKTARAPIIRVGGALKGHHVKLNLV

SEQ ID NO: 8510 - protein, 440 aa, Homo sapiens
MIIPSLEELDSLKYSDLQNLAKSLGLRANLRATKLLKALKGYIKHEARKGNENQDESQTSASSCDETEIQISNQEEAERQPLGHVTKTRRRCKTVRVDPDSQNHSEIKISNPTEFQNHEKQESQDLRATAKVPSPPDEHQEAENAVSSGNRDSKVPSEGKKSLYTDESSKPGKNKRTAITTPNFKKLHEAHFKEMESIDQYIERKKKHFEEHNSMNELKQQPINKGGVRTPVPPRGRLSVASTPISQRRSQGRSCGPASQSTLGLKGSLKRSAISAAKTGVRFSAATKDNEHKRSLTKTPARKSAHVTVSGGTPKGEAVLGTHKLKTITGNSAAVITPFKLTTEATQTPVSNKKPVFDLKASLSRPLNYEPHKGKLKPWGQSKENNYLNQHVNRINFYKKTYKQPHLQTKEEQRKKREQERKEKKAKVLGMRRGLILAED

SEQ ID NO: 8511 - protein, 160 aa, Homo sapiens
SPSLPDGDRDISGPASPLPEPSLEDSSAQFEGPEKSCLSPGREEKGRLPPRLSAGNPKSAKPLSMEPSSPLGEWTDPALPLENQVWYHGAISRTDAENLLRLCKEASYLLSYSRSLNCKIKEAFPRKVFVKNLIYITSEMCIALKIIKFMEHTKQPVYHF

SEQ ID NO: 8512 - protein, 270 aa, Homo sapiens
MALLRRPTGPSPTPEDVSMKEENLCQAFSDALLCKIEDIDNEDWENPQLCSDYVKDIYQYLRQLEVLQSINPHFLDGRDINGRMRAILVDWLVQVHSKFRLLQETLYMCVGIMDRFLQVQPVSRKKLQLVGITALLLASKYEEMFSPNIEDFVYITDNAYTSSQIREMETLILKELKFELGRPLPLHFLRRASKAGENLKQQYYTGYTENEVLEVMQHMAKNVVKVNENLTKFIAIKNKYASSKLLKISMIPQLNSKAVKDLASPLIGRS

SEQ ID NO: 8513 - protein, 169 aa, Homo sapiens
NVVALDTEVASNRIYWSDLSQRMICSTQLDRAHGVSSYDTVISRDIQAPDGLAVDWIHSNIYWTDSVLGTVSVADTKGVKRKTLFRENGSKPRAIVVDPVHGFMYWTDWGTPAKIKKGGLNGVDIYSLVTENIQWPNGITLGQSILDRYHQRSHFQCQPPHRFRCQLVG

SEQ ID NO: 8514 - protein, 546 aa, Homo sapiens
QPVQIQSLETLGVLARAVGEPMRPLAEECCQLGLGLCDQVDDPDLRRCTYSLFAALSGLMGEGLAPHLEQITTLMLLSLRSTEGIVPQYDGSSSFLLFDDESDGEEEEELMDEDVEEEDDSEISGYSVENAFFDEKEDTCAAVGEISVNTSVAFLPYMESVFEEVFKLLECPHLNVRKAAHEALGQFCCALHKACQSCPSEPNTAALQAALARVVPSYMQAVNRERERQVVMAVLEALTGVLRSCGTLTLKPPGRLAELCGVLKAVLQRKTACQDTDEEEEEEDDDQAEYDAMLLEHAGEAIPALAAAAGGDSFAPFFAGFLPLLVCKTKQGCTVAEKSFAVGTLAETIQGLGAASAQFVSRLLPVLLSTAQEADPEVRSNAIFGMGVLAEHGGHPAQEHFPKLLGLLFPLLARERHDRVRDNICGALARLLMASPTRKPEPQVLAALLHALPLKEDLEEWVTIGRLFSFLYQSSPDQVIDVAPELLRICSLILADNKIPPGEDTKAALLLLLTFLAKQHTDSFQAALGSLPVDKAQELQAVLGLS

SEQ ID NO: 8515 - protein, 263 aa, Homo sapiens
MAHRKLESVGSGMLDHRVRPGPVPHSQEPESEDMELPLEGYVPEGLELAALRPESPAPEEQECHNHSPDGDSSSDYVNNTSEEEDYDEGLPEEEEGITYYIRYCPEDDSYLEGMDCNGEEYLAHSAHPVDTDECQEAVEEWTDSAGPHPHGHEAEGSQDYPDGQLPIPEDEPSVLEAHDQEEDGHYCASKEGYQDYYPEEANGNTGASPYRLRRGDGDLEDQEEDIDQIVAEIKMSLSMTSITSASEASPEHGPEPGPEDSVE

SEQ ID NO: 8516 - protein, 112 aa, Homo sapiens
MGSKGVYQYHWQSHNVKHSGVDDMVLLSKITENSIVENLKKRYMDDYIFTYIGSVLISVNPFKQMPYFGEKEIEMYQGAAQYENPPHIYALADNMYRNMIIDRENQCVIIST

SEQ ID NO: 8517 - protein, 311 aa, Homo sapiens
PSEPNTAALQAALARVVPSYMQAVNRERERQVVMAVLEALTGVLRSCGTLTLKPPGRLAELCGVLKAVLQRKTACQDTDEEEEEEDDDQAEYDAMLLEHAGEAIPALAAAAGGDSFAPFFAGFLPLLVCKTKQGCTVAEKSFAVGTLAETIQGLGAASAQFVSRLLPVLLSTAQEADPEVRSNAIFGMGVLAEHGGHPAQEHFPKLLGLLFPLLARERHDRVRDNICGALARLLMASPTRKPEPQVIDVAPELLRICSLILADNKIPPDTKAALLLLLTFLAKQHTDSFQAALGSLPVDKAQELQAVLGLS

SEQ ID NO: 8518 - protein, 911 aa, Homo sapiens
MESAGLEQLLRELLLPDTERIRRATEQLQIVLRAPAALPALCDLLASAADPQIRQFAAVLTRRRLNTRWRRLAAEQRESLKSLILTALQRETEHCVSLSLAQLSATIFRKEGLEAWPQLLQLLQHSTHSPHSPEREMGLLLLSVVVTSRPEAFQPHHRELLRLLNETLGEVGSPGLLFYSLRTLTTMAPYLSTEDVPLARMLVPKLIMAMQTLIPIDEAKACEALEALDELLESEVPVITPYLSEVLTFCLEVARNVALGNAIRIRILCCLTFLVKVKSKALLKNRLLPPLLHTLFPIVAAEPPPGQLDPEDQDSEEEELEIELMGETPKHFAVQVVDMLALHLPPEKLCPQLMPMLEEALRSESPYQRKAGLLVLAVLSDGAGDHIRQRLLPPLLQIVCKGLEDPSQVVRNAALFALGQFSENLQPHISSYSREVMPLLLAYLKSVPLGHTHHLAKACYALENFVENLGPKVQPYLPELMECMLQLLRNPSSPRAKELAVSALGAIATAAQASLLPYFPAIMEHLREFLLTGREDLQPVQIQSLETLGVLARAVGEPMRPLAEECCQLGLGLCDQVDDPDLRRCTYSLFAALSGLMGEGLAPHLEQITTLMLLSLRSTEGIVPQYDGSSSFLLFDDESDGEEEEELMDEDVEEEDDSEISGYSVENAFFDEKEDTCAAVGEISVNTSVAFLPYMESVFEEVFKLLECPHLNVRKAAHEALGQFCCALHKACQSCPSEPNTAALQAALARVVPSYMQAVNRERERQVVMAVLEALTGVLRSCGTLTLKPPGRLAELCGVLKAVLQRKTACQDTDEEEEEEDDDQPLTWLHRLNTTPCCWSTLERPSLPWQPRLGETPLPHSLPVSCHYWCARQNRAAQWQRSPLQWGPWQRLFRAWVLPQPSLCLGCSLCC

SEQ ID NO: 8519 - protein, 145 aa, Homo sapiens
DQPWEWKKERISKAFAVDIKVIKDLPWPPPVGQLDSSPSLPDGDRDISGPASPLPEPSLEDSSAQFEGPEKSCLSPGREEKGRLPPRLSAGNPKSAKPLSMEPSSPLGEWTDPALPLENQVGHPQWVGLDSEGPSRDAPLPLSHP

SEQ ID NO: 8520 - protein, 200 aa, Homo sapiens
MSVNVNRSVSDQFYRYKMPRLIAKVEGKGNGIKTVIVNMVDVAKALNRPPTYPTKYFGCELGAQTQFDVKNDRYIVNGSHEANKLQDMLDGFIKKFVLCPECENPETDLHVNPKKQTIGNSCKACGYRGMLDTHHKLCTFILKNPPENSDSGTGKKEKEKKNRKGKDKENGSVSSSETPPPPPPPNEINPPPHTMEEEED

SEQ ID NO: 8521 - protein, 80 aa, Homo sapiens
MDGVSSEANEENDNIERPVRRRHSSILKPPRSPLQDLRGPHLDTETPTEQSPRQFYCKHTTYSRRPDVKSICLPTQDTDL

SEQ ID NO: 8522 - protein, 96 aa, Homo sapiens
MAAVKKEGGALSEAMSLEGDEWELSKENVQPLRQGRIMSTLQGALAQESACNNTLQQQKRDGVSLFRPGWSAVARSWLTGSSASWVHANLLPQPPE

SEQ ID NO: 8523 - protein, 26 aa, Homo sapiens
TSVVKTVYSLQPPSALSGGQPAATNH

SEQ ID NO: 8524 - protein, 59 aa, Homo sapiens
MKGLGTDEDSLIEIICSRTNQELQEINRVYKEMYKTDLEKDIISDTSGDFRKLMVALAK

SEQ ID NO: 8525 - protein, 73 aa, Homo sapiens
MPYLLISTQIRMSDPELMQHLGASKRRALGNNFYEYYVDDPPRIVLDKLERRGFRVLSMTGVGQTLVWCLHKE

SEQ ID NO: 8526 - protein, 58 aa, Homo sapiens
RVRTKTVKKAARVIIEKYYTRLGNDFHTNKRVCEEIAIIPSKKLRNKIAGCSYCSRDL

SEQ ID NO: 8527 - protein, 136 aa, Homo sapiens
MGRVRTKTVKKAARVIIEKYYTRLGNDFHTNKRVCEEIAIIPSKKLRNKIAGYVTHLMKRIQRGPVRGISIKLQEEERERRDNYVPEVSALDQEIIEVDPDTKEMLKLLVSVCWIPKVVFSWSKTISRSYYPRSPS

SEQ ID NO: 8528 - protein, 129 aa, Homo sapiens
MEPSQCVEELEDDVFQPEDGEPVTQPGSLLSADLFAQSLLDCPLSRLQLFPLTHCCGPGLRPTSQEDKATQTLSPASPSQGVMLPCGVTEEPQRLFYAPAEPKSCVVADPPLPAQPCFEWRREQERGRP

SEQ ID NO: 8529 - protein, 213 aa, Homo sapiens
SSSGRGEVGADLPGSLSLLESEGKDHGLELSIHRTPILEDFELEGVCQLPDQSPPRNSMPKAEEASSWGQFGLSSRKRVLLAKEEADRGAKRICDLREDSEVSKSKEGSPSWSAWQLPSTGDEEVFVSGSTPPPSCAVRSCLSASALQALTQSPLLFQGKTPSSQSKDPRDEDVDVLPSTVEDSPFSRAFSRRRPISRTYTRKKLMGTWLEDL

SEQ ID NO: 8530 - protein, 1181 aa, Homo sapiens
MSLLNPVLLPPKVKAYLSQGERFIKWDDETTVASPVILRVDPKGYYLYWTYQSKEMEFLDITSIRDTRFGKFAKMPKSQKLRDVFNMDFPDNSFLLKTLTVVSGPDMVDLTFHNFVSYKENVGKAWAEDVLALVKHPLTANASRSTFLDKILVKLKMQLNSEGKIPVKNFFQMFPADRKRVEAALSACHLPKGKNDAINPEDFPEPVYKSFLMSLCPRPEIDEIFTSYHAKAKPYMTKEHLTKFINQKQRDSRLNSLLFPPARPDQVQGLIDKYEPSGINAQRGQLSPEGMVWFLCGPENSVLAQDKLLLHHDMTQPLNHYFINSSHNTYLTAGQFSGLSSAEMYRQVLLSGCRCVELDCWKGKPPDEEPIITHGFTMTTDIFFKEAIEAIAESAFKTSPYPIILSFENHVDSPRQQAKMAEYCRTIFGDMLLTEPLEKFPLKPGVPLPSPEDLRGKILIKNKKNQFSGPTSSSKDTGGEAEGSSPPSAPAVWAGEEGTELEEEEVEEEEEEESGNLDEEEIKKMQSDEGTAGLEVTAYEEMSSLVNYIQPTKFVSFEFSAQKNRSYVISSFTELKAYDLLSKASVQFVDYNKRQMSRIYPKGTRMDSSNYMPQMFWNAGCQMVALNFQTMDLPMQQNMAVFEFNGQSGYLLKHEFMRRPDKQFNPFSVDRIDVVVATTLSITVISGQFLSERSVRTYVEVELFGLPGDPKRRYRTKLSPSTNSINPVWKEEPFVFEKILMPELASLRVAVMEEGNKFLGHRIIPINALNSGYHHLCLHSESNMPLTMPALFIFLEMKDYIPGAWADLTVALANPIKFFSAHDTKSVKLKEAMGGLPEKPFPLASPVASQVNGALAPTSNGSPAARAGAREEAMKEAAEPRTASLEELRELKGVVKLQRRHEKELRELERRGARRWEELLQRGAAQLAELGPPGVGGVGACKLGPGKGSRKKRSLPREESAGAAPGEGPEGVDGRVRELKDRLELELLRQGEEQYECVLKRKEQHVAEQISKMMELAREKQAAELKALKETSENDTKEMKKKLETKRLERIQGMTKVTTDKMAQERLKREINNSHIQEVVQVIKQMTENLERHQEKLEEKQAACLEQIREMEKQFQKEALAEYEARMKGLEAEVKESVRACLRTCFPSEAKDKPERACECPPELCEQDPLIAKADAQESRL

SEQ ID NO: 8531 - protein, 63 aa, Homo sapiens
SIRPIFGGTVYHSPVSRLPPSGSKPVAASTCSGKKTPRTGRHGANKENLELNGSILSEGSVPL

SEQ ID NO: 8532 - protein, 26 aa, Homo sapiens
MEPYEAQKMMAEIRGSKETATQPLPL

SEQ ID NO: 8533 - protein, 134 aa, Homo sapiens
MGFAHSWLLTPLIFPLHSPGPLALKIAGRIAEFFPDAVLIMLDNQKLVPQPRVPPVIVLENQGLRWVPKDKNLVMWRDWEESRQMVGALLEDRAHQHLVDFDCHLDDIRQDWTNQRLNTQITQWVGPTNGNGNA

SEQ ID NO: 8534 - protein, 162 aa, Homo sapiens
PWPRESRLPEDDERPPEEYDQPWEWKKERISKAFAGDTHNGWAWTARDPAEMPPFLSLILSWYHGAISRTDAENLLRLCKEASYLVRNSETSKNDFSLSLKSSQGFMHMKLSRTKEHKYVLGQNSPPFSSVPEIVHHYASRKLPIKGAEHMSLLYPVAIRTL

SEQ ID NO: 8535 - protein, 44 aa, Homo sapiens
MPYLLISTQIRMEVGPTMVGDEQSDPELMQHLGASKRRALGNNL

SEQ ID NO: 8536 - protein, 66 aa, Homo sapiens
TVAAGNLLNESEKDCGQDRRAPGVQPCRLVTMTSVVKTVYSLQPPSALSGGQPAEHLNGNPGTSGD

SEQ ID NO: 8537 - protein, 439 aa, Homo sapiens
MIIPSLEELDSLKYSDLQNLAKSLGLRANLRATKLLKALKGYIKHEARKGNENQDESQTSASSCDETEIQISNQEEAERQPLGHVTKTRRRCKTVRVDPDSQNHSEIKISNPTEFQNHEKQESQDLRATAKVPSPPDEHQEAENAVSSGNRDSKVPSEGKKSLYTDESSKPGKNKRTAITTPNFKKLHEAHFKEMESIDQYIERKKKHFEEHNSMNELKQPINKGGVRTPVPPRGRLSVASTPISQRRSQGRSCGPASQSTLGLKGSLKRSAISAAKTGVRFSAATKDNEHKRSLTKTPARKSAHVTVSGGTPKGEAVLGTHKLKTITGNSAAVITPFKLTTEATQTPVSNKKPVFDLKASLSRPLNYEPHKGKLKPWGQSKENNYLNQHVNRINFYKKTYKQPHLQTKEEQRKKREQERKEKKAKVLGMRRGLILAED

SEQ ID NO: 8538 - protein, 316 aa, Homo sapiens
DQTLLQKLQMQIGSHEHFNSWNQGFIIHHYAGKVSYDMDGFCERNRDVLFMDLIELMQSSELPFIKSLFPENLQADKKGRPTTAGSKIKKQANDLVSTLMKCTPHYIRCIKPNETKKPRDWEESRYAILTKATWPSWQGEEKQGVLHLLQSVNMDSDQFQLGRSKVFIKAPESLFLLEEMRERKYDGYARVIQKSWRKFVARKKYVQMREEASDLLLNKKERRRNSINRNFIGDYIGMEEHPELQQFVGKREKIDFADTVTKYDRRFKGVKRDLLLTPKCLYLIGREKVKQGPDKGLVKEVLKRKIEIERILSVSL

SEQ ID NO: 8539 - protein, 101 aa, Homo sapiens
MCKDMEELLRQRAQAEERYGKELVQIARKAGGQTEINSLRASFDSLKQQMENVGSSHIQLALTLREELRSLEEFRERQKEQRKKSQERCCASSQGHSVLLA

SEQ ID NO: 8540 - protein, 61 aa, Homo sapiens
MEPSQCVEELEDDVFQPEDGEPVTQPGSLLSADLFAQSLLDCPLSRLQLFPLTHCCGPGLR

SEQ ID NO: 8541 - protein, 242 aa, Homo sapiens
MAMQMQLEANADTSVEEESFGPQPISRLEQCGINANDVKKLEEAGFHTVEAVAYAPKKELINIKGISEAKADKILAVAERYGLSGSDVLDNVAYARAFNTDHQTQLLYQASAMMVESRYALLIVDSATALYRTDYSGRGELSARQMHLARFLRMLLRLADEFGVAVVITNQVVAQVDGAAMFAADPKKPIGGNIIAHASTTRLYLRKGRGETRICKIYDSPCLPEAEAMFAINADGVGDAKD

SEQ ID NO: 8542 - protein, 561 aa, Homo sapiens
MLKLAQQCLERAQSTAAKLGKTRLKPTMPAAAPIPQPAGRHRRVYSDEGGKLSPFLPPEIFQKLQGAESQSCKKELTPLEEASLQNQKLKAAYEARMARLDPSQAMQKTSLTLSLQRQMMENLVIAKAREETLQRKMEERRLRLQEAANRRFCSQVALTPEEREQRALYAAILEYEQDHDWPKHWKAKLKRNPGDLSLVTSLVSHLLSLPDHPIAQLLRRLQCSVYSALYPAVSRAAAPAPGCCPPTPNPGSRRLRPSQSLHCMLSPPEPSAAPRPQDSPPTPPLQPGPVGSPSPLGDTASGLPDKDSSFEDLEQFLGTSERQGRGRGVQPEPQLQQLKTAVEEIHNAVDRLLSLTLLAFEGLNTAASKDRCLACIEEPFFSPLWPLLLALYRSVHRAREAALSRSMELYRNAPPTAIGIPTKLLPQNPEAKGATGYPYCAAAQELGLLVLESCPQKKLECIVRTLRIICVCAEDYCPTPEATPQAGPPPIAAAAIGADDLLPILSFVVLRSGLPQLVSECAALEEFIHEGYLIGEEGYCLTSLQSALSYVELLPRGGLAK

SEQ ID NO: 8543 - protein, 333 aa, Homo sapiens
MCRGGRMFAPTKTWRRWHRRVNTTQKRYAICSALAASALPALVMSKGHRIEEVPELPLVVEDKVEGYKKTKEAVLLLKKLKAWNDIKKVYASQRMRAGKGKMRNRRRIQRRGPCIIYNEDNGIIKAFRNIPGITLLNVSKLNILKLAPGGHVGRFCIWTESAFRKLDELYGTWRKAASLKSNYNLPMHKMINTDLSRILKSPEIQRALRAPRKKIHRRVLKKNPLKNLRIMLKLNPYAKTMRRNTILRQARNHKLRVDKAAAAAAALQAKSDEKAAVAGKKPVVGKKGKKAAVGVKKQKKPLVGKKAAATKKPAPEKKPAEKKPTTEEKKPAA

SEQ ID NO: 8544 - protein, 177 aa, Homo sapiens
MDETVAEFIKRTILKIPMNELTTILKAWDFLSENQLQTVNFRQRKESVVQHLIHLCEEKRASISDAALLDIIYMQFHQHQKVWEVFQMSKGPGEDVDLFDMKQFKNSFKKILQRALKNVTVSFRETEENAVWIRIAWGTQYTKPNQYKPTYVVYYSQTPYAFTSSSMLRRNTPLLGQ

SEQ ID NO: 8545 - protein, 78 aa, Homo sapiens
MVNSNYYAMDLLYILPTHIQAARAGNAIHAILLYRRKLDREEIKPIRLLGSTIPLCSAQWERMFNTSRIPGEETDDLP

SEQ ID NO: 8546 - protein, 76 aa, Homo sapiens
MDETVAEFIKRTILKIPMNELTTILKAWDFLSENQLQTVNFRQRKESVVQHLIHLCEEKRASISDAALLDIICKCQ

SEQ ID NO: 8547 - protein, 103 aa, Homo sapiens
MVRISKPKTFQAYLDDCHRRYSCAHCRAHLANHDDLISKSFQGSQGRAYLFNSVVNVGCGPAEERVLLTGLHAVADIHCENCKTTLGWKYEQAFESSQKYKEG

SEQ ID NO: 8548 - protein, 48 aa, Homo sapiens
LRVFRSGRPRRLRVLRINRTSVALRLAGTGRFVAKTPGHPGSWEMGPV

SEQ ID NO: 8549 - protein, 226 aa, Homo sapiens
MDQKILSLAAEKTADKLQEFLQTLREGDLTNLLQNQAVKGKVAGALLRAIFKGSPCSEEAGTLRRRKIYTCCIQLVESGDLQKEIASEIIGLLMLEAHHFPGPLLVELANEFISAVREGSLVNGKSLELLPIILTALATKKENLAYGKGVLSGEECKKQLINTLCSGRWDQQYVIQLTSMFKDVPLTAEEVEFVVEKALSMFSKMNLQEIPPLVYQLLVLSSKVQM

SEQ ID NO: 8550 - protein, 45 aa, Homo sapiens
KCGKTLTSGGHAEHEGKPYCNHPCYAAMFGPKGFGRGGAESHTFK

SEQ ID NO: 8551 - protein, 81 aa, Homo sapiens
MAEAGPQAPPPPGTPSRHEKSLGLLTTKFVSLLQEAKDGVLDLKLAADTLAVRQKRRIYDITNVLEGVWGLAAIPGRLLTN

SEQ ID NO: 8552 - protein, 84 aa, Homo sapiens
MAQSINITELNLPQLEMLKNQLDQTAEDAKDFFKRKIDFLTKQMEKIQPALQEKHAMKQAVMEMMSQKIQQLTALGAAQATAKA

SEQ ID NO: 8553 - protein, 164 aa, Homo sapiens
TIASKPPRDHVFQVNNFEALKTIQNQLREKIFAIEGTQTGSSSSFEHEMSQEGFSAAITSNGPLLSTVGSYDWAGGVFLYTSKEKSTFINMTRVDSDMNDAYLDRRLLRGLPLLRGRGQQRQHRPGPHRGPPLLRADPRGPGVRVPLAQGGQIQSVVTYDLALD

SEQ ID NO: 8554 - protein, 501 aa, Homo sapiens
MWDQRLVRLALLQHLRAFYGIKVKGVRGQCDRRRHETAATEIGGKIFGVPFNALPHSAVPEYGHIPSFLVDACTSLEDHIHTEGLFRKSGSVIRLKALKNKVDHGEGCLSSAPPCDIAGLLKQFFRELPEPILPADLHEALLKAQQLGTEEKNKATLLLSCLLADHTVHVLRYFFNFLRNVSLRSSENKMDSSNLAVIFAPNLLQTSEGHEKMSSNTEKKLRLQAAVVQTLIDYASDIGRVPDFILEKIPAMLGIDGLCATPSLEGFEEGEYETPGEYKRKRRQSVGDFVSGALNKFKPNRTPSITPQEERIAQLSESPVILTPNAKRTLPVDSSHGFSSKKRKSIKHNFNFELLPSNLFNSSSTPVSVHIDTSSEGSSQSSLSPVLIGGNHLITAGVPRRSKRIAGKKVCRVESGKAGCFSPKISHKEKVRRSLRLKFNLGKNGREVNGCSGVNRYESVGWRLANQQSLKNRIESVKTGLLFSPDVDEKLPKKGTFTYYC

SEQ ID NO: 8555 - protein, 122 aa, Homo sapiens
MPDRENTFVVKVEGPSEYIMETVDAQHVKAWVSDIQECLSPGENTDSLELSCLNHSESLPSQDLLLGPSESNDRLSQGAYGGLSDRPSASISPSSASIAASHFDSMELLPPELPPRIPIEEG

SEQ ID NO: 8556 - protein, 84 aa, Homo sapiens
MNCRSEVLEVSVEGRQVEEAMLAVLHTVLLHRSTGKFHYKKEGTYSIGTVGTQDVDCDFIDFTYVRVSSEELDRALRKVVGEFK

SEQ ID NO: 8557 - protein, 202 aa, Homo sapiens
KKFSDSVKSTFRHFKDTTKNIFDEKGNKRFGATKEAAEKPRTVFSDYLHPQYKAPTENHHNRGPTMQNDGRKEKPVHFKEFRKNTNSKKCSPGHDCRENSHSFRKACSGVFDCAQQESMSLFNTVVNPIRMDEFRQIIQSRPDKKQRMVNIENSRHRKQEQKHLQPQPYKREGKWHKYGRTNGRQMANLEIELGQLPFDPQY

SEQ ID NO: 8558 - protein, 51 aa, Homo sapiens
MSKPHSEAGTAFIQTQQLHAAMADTFLEHMCRLDIDSPPITARNTGIICTI

SEQ ID NO: 8559 - protein, 145 aa, Homo sapiens
ECKKQLINTLCSGRWDQQYVIQLTSMFKDVPLTAEEVEFVVEKALSMFSKMNLQEIPPLVYQLLVLSSKGSRKSVLEGIIAFFSALDKQHNEEQSGDELLDVVTVPSGELRHVEGTIILHIVFAIKLDYELGRELVKHLKVASNL

SEQ ID NO: 8560 - protein, 148 aa, Homo sapiens
MSRQVVRSSKFRHVFGQPAKADQCYEDVRVSQTTWDSGFCAVNPKFVALICEASGGGAFLVLPLGKTGRVDKNAPTVCGHTAPVLDIAWCPHNDNVIASGSEDCTVMVWEIPDGGLMLPLREPVVTLEGHTKRVGIVAWHTTAQNVLL

SEQ ID NO: 8561 - protein, 50 aa, Homo sapiens
QLRVFRSGRPRRLRVLRINRTSVALRLAGTGRFVAKTPGHPGSWEMNCLG

SEQ ID NO: 8562 - protein, 127 aa, Homo sapiens
MNPFWSMSTSSVRKRSEGEEKTLTGDVKTSPPRTAPKKQLPSIPKNALPITKPTSPAPAAQSTNGTHASYGPFYLEYSLLAEFTLVVKQKLPGVYVQPSYRSALMWFGVIFIRHGLYQDGVFKFTVY

SEQ ID NO: 8563 - protein, 141 aa, Homo sapiens
MSEARKGPDEAEESQYDSGIESLRSLRSLPESTSAPASGPSDGSPQPCTHPPGPVKEPQEKEDADGERADSTYGSSSLTYTLSLLGGPEAEDPAPRLPLPHVGALSPQQLEALTYISEDGDTQHSIWLYIWTNRAQFGHWC

SEQ ID NO: 8564 - protein, 584 aa, Homo sapiens
MLFPTSAQESSRGLPDANDLCLGLQSLSLTGWDRPWSTQDSDSSAQSSTHSVLSMLHNPLGNVLGKPPLSFLPLDPLGSDLVDKFPAPSVRGSRLDTRPILDSRSSSPSDSDTSGFSSGSDHLSDLISSLRISPPLPFLSLSGGGPRDPLKMGVGSRMDQEQAALAAVTPSPTSASKRWPGASVWPSWDLLEAPKDPFSIEREARLHRQAAAVNEATCTWSGQLPPRNYKNPIYSCKVFLGGVPWDITEAGLVNTFRVFGSLSVEWPGKDGKHPRCPPKGYVYLVFELEKSVRSLLQACSHDPLSPDGLSEYYFKMSSRRMRCKEVQVIPWVLADSNFVRSPSQRLDPSRTVFVGALHGMLNAEALAAILNDLFGGVVYAGIDTDKHKYPIGSGRVTFNNQRSYLKAVSAAFVEIKTTKFTKKVQIDPYLEDSLCHICSSQPGPFFCRDQGRVRTKTVKKAARVIIEKYYTRLGNDFHTNKRVCEEIAIIPSKKLRNKIAGYVTHLMKRIQRGPVRGISIKLQEEERERRDNYVPEVSALDQEIIEVDPDTKEMLKLLDFGSLSNLQVTQPTVGMNFKTPRGPV

SEQ ID NO: 8565 - protein, 405 aa, Homo sapiens
MLPAGCSRRLVAELQGALDACAQRQLQLEQSLRVCRRLLHAWEPTGTRALKPPPGPETNGEDPLPACTPSPQDLKELEFLTQALEKAVRVRRGITKAGERDKAPSLKSRSIVTSSGTTASAPPHSPGQAGGHASDTRPTKGLRQTTVPAKGHPERRLLSVGDGTRVGMGARTPRPGAGLRDQQMAPSAAPQAPEAFTLKEKGHLLRLPAAFRKAASQNSSLWAQLSSTQTSDSTDAAAAKTQFLQNMQTASGGPQPRLSAVEVEAEAGRLRKACSLLRLRMREELSAAPMDWMQEYRCLLTLEGLQAMVGQCLHRLQELRAAVAEQPPRPCPVGRPPGASPSCGGRAEPAWSPQLLVYSSTQELQTLAALKLRVAVLDQQIHLEKVLLEEEVGVQQRSAALRTRG

SEQ ID NO: 8566 - protein, 74 aa, Homo sapiens
MASRVLSAYVSRLPAAFAPLPRVRMLAVARPLSTALCSAGTQTRLGTLQPALVLAQHLLPVSRTPGSNSRKQAK

SEQ ID NO: 8567 - protein, 105 aa, Homo sapiens
MEATRRRQHLGATGGPGAQLGASFLQARHGSVSADEAARTAPFHLDLWFYFTLQNWVLDFGRPIAMLVFPLEWFPLNKPSVGDYFHMAYNVITPFLLLKRLLYCL

SEQ ID NO: 8568 - protein, 808 aa, Homo sapiens
MAETAAGVGRFKTNYAVERKIEPFYKGGKAQLDQTGQHLFCVCGTRVNILEVASGAVLRSLEQEDQEDITAFDLSPDNEVLVTASRALLLAQWAWQEGSVTRLWKAIHTAPVATMAFDPTSTLLATGGCDGAVRVWDIVRHYGTHHFRGSPGVVHLVAFHPDPTRLLLFSSATDAAIRVWSLQDRSCLAVLTAHYSAVTSLAFSADGHTMLSSGRDKICIIWDLQSCQATRTVPVFESVEAAVLLPEEPVSQLGVKSPGLYFLTAGDQGTLRVWEAASGQCVYTQAQPPGPGQELTHCTLAHTAGVVLTATADHNLLLYEARSLRLQKQFAGYSEEVLDVRFLGPEDSHVVVASNSPCLKVFELQTSACQILHGHTDIVLALDVFRKGWLFASCAKDQSVRIWRMNKAGQVMCVAQGSGHTHSVGTVCCSRLKESFLVTGSQDCTVKLWPLPKALLSKNTAPDNGPILLQAQTTQRCHDKDINSVAIAPNDKLLATGSQDRTAKLWALPQCQLLGVFSGHRRGLWCVQFSPMDQVLATASADGTIKLWALQDFSCLKTFEGHDASVLKVAFVSRGTQLLSSGSDGLVKLWTIKNNECVRTLDAHEDKVWGLHCSRLDDHALTGASDSRVILWKDVTEAEQAEEQARQEEQVVRQQELDNLLHEKRYLRALGLAISLDRPHTVLTVIQAIRRDPEACEKLEATMLRLRRDQKEALLRFCVTWNTNSRHCHEAQAVLGVLLRREAPEELLAYEGVRAALEALLPYTERHFQRLSRTLQAAAFLDFLWHNMKLPVPAAAPTPWETHKGALP

SEQ ID NO: 8569 - protein, 59 aa, Homo sapiens
NLKGEGMSQAATICKSNFKYMYWTMLQQLTHHSVNGCNLRPGDLLASGTISGPVSIWLH

SEQ ID NO: 8570 - protein, 132 aa, Homo sapiens
MSGSREVMLLQLTVIKVMTTRILSVKTEFHAKEQYRDVIKILLESAKVDSKLICMFQNSDKLLSHMAAQCLALLLYFQLREKITLSNSWIAFCQKNLSEYSESNKAIYCLWTLTAIIKEIFKDSCSQKTEIL

SEQ ID NO: 8571 - protein, 131 aa, Homo sapiens
MSSEPPPPPQPPTHQASVGLLDTPRSRERSPSPLRGNVVPSPLPTRRTRTFSATVRASQGPVYKGVCKCFCRSKGHGFITPADGGPDIFLHISDVEGEYVPVEGDEVTYKMCSIPPKNEKLQAVEVVITHL

SEQ ID NO: 8572 - protein, 253 aa, Homo sapiens
MKEAAAAALKKKGWEVVESDLYAMNFNPIISRKDITGKLKDPANFQYPAESVLAYKEGHLSPDIVAEQKKLEAADLVIFQFPLQWFGVPAILKGWFERVFIGEFAYTYAAMYDKGPFRSKKAVLSITTGGSGSMYSLQGIHGDMNVILWPIQSGILHFCGFQVLEPQLTYSIGHTPADARIQILEGWKKRLENIWDETPLYFAPSSLFDLNFQAGFLMKKEVQDEEKNKKFGLSVGHHLGKSIPTDNQIKARK

SEQ ID NO: 8573 - protein, 151 aa, Homo sapiens
AWAVFKGKFKEGDKAEPATWKTRLRCALNKSPDFEEVTDRSQLDISEPYKVYRIVPEEEQKCKLGVATAGCVNEVTEMECGRSEIDELIKESCSSSITARAGFLTAGWCCALGKSFRIWPPCAPNSFSCRLSSCMSGNWQKRLGRAVEPAL

SEQ ID NO: 8574 - protein, 263 aa, Homo sapiens
MASNDYTQQATQSYGAYPTQPGQGYSQQSSQPYGQQSYSGYSQSTDTSGYGQSSYSSYGQSQNTGYGTQSTPQGYGSTGGYGSSQSSQSSYGQQSSYPGYGQQPAPSSTSGSYGSSSQSSSYGQPQSGSYSQQPSYGGQQQSYGQQQSYNPPQGYGQQNQYNSSSGGGGGGGGGGNYGQDQSSMSSGGGSGGGYGNQDQSGGGGSGGYGQQDRGGRGRGGSGGGGGGGGGGYNRSSGGYEPRGRGGGRGGRGGMGPSGPRITS

SEQ ID NO: 8575 - protein, 383 aa, Homo sapiens
MASELAMSNSDLPTSPLAMEYVNDFDLMKFEVKKEPVETDRIISQCGRLIAGGSLSSTPMSTPCSSVPPSPSFSAPSPGSGSEQKAHLEDYYWMTGYPQQLNPEALGFSPEDAVEALISNSHQLQGGFDGYARGAQQLAAAAGAGAGASLGGSGEEMGPAAAVVSAVIAAAAAQSGAGPHYHHHHHHAAGHHHHPTAGAPGAAGSAAASAGGAGGAGGGGPASAGGGGGGGGGGGGGGAAGAGGALHPHHAAGGLHFDDRFSDEQLVTMSVRELNRQLRGVSKEEVIRLKQKRRTLKNRGYAQSCRFKRVQQRHVLESEKNQLLQQVDHLKQEISRLVRERDAYKEKYEKLVSSGFRENGSSSDNPSSPEFFMYPRESSTSVM

SEQ ID NO: 8576 - protein, 746 aa, Homo sapiens
MAGSRGAGRTAAPSVRPEKRRSEPELEPEPEPEPPLLCTSPLSHSTGSDSGVSDSEESVFSGLEDSGSDSSEDDDEGDEEGEDGALDDEGHSGIKKTTEEQVQASTPCPRTEMASARIGDEYAEDSSDEEDIRNTVGNVPLEWYDDFPHVGYDLDGRRIYKPLRTRDELDQFLDKMDDPDYWRTVQDPMTGRDLRLTDEQVALVRRLQSGQFGDVGFNPYEPAVDFFSGDVMIHPVTNRPADKRSFIPSLVEKEKVSRMVHAIKMGWIQPRRPRDPTPSFYDLWAQEDPNAVLGRHKMHVPAPKLALPGHAESYNPPPEYLLSEEERLAWEQQEPGERKLSFLPRKFPSLRAVPAYGRFIQERFERCLDLYLCPRQRKMRVNVDPEDLIPKLPRPRDLQPFPTCQALVYRGHSDLVRCLSVSPGGQWLVSGSDDGSLRLWEVATARCVRTVPVGGVVKSVAWNPSPAVCLVAAAVEDSVLLLNPALGDRLVAGSTDQLLSAFVPPEEPPLQPARWLEASEEERQVGLRLRICHGKPVTQVTWHGRGDYLAVVLATQGHTQVLIHQLSRRRSQSPFRRSHGQVQRVAFHPARPFLLVASQRSVRLYHLLRQELTKKLMPNCKWVSSLAVHPAGDNVICGSYDSKLVWFDLDLSTKPYRMLRHHKKALRAVAFHPRYPLFASGSDDGSVIVCHGMVYNDLLQNPLLVPVKVLKGHVLTRDLGVLDVIFHPTQPWVFSSGADGTVRLFT

SEQ ID NO: 8577 - protein, 117 aa, Homo sapiens
MAEAHQAVAFQFTVTPDGIDLRLSHEALRQIYLSGLHSWKKKFIRFKNGIITGVYPASPSSWLIVVVGVMTTMYAKIDPSLGIIAKINRTLETANCMSSQTKNVVSGVLFGTGLWVA

SEQ ID NO: 8578 - protein, 271 aa, Homo sapiens
MASEKPLAAVTCTAPVNIAVIKYWGKRDEELVLPINSSLSVTLHQDQLKTTTTAVISKDFTEDRIWLNGREEDVGQPRLQACLREIRCLARKRRNSRDGDPLPSSLSCKVHVASVNNFPTAAGLASSAAGYACLVAAGVGLSPVIPVLKRLMGEKHCRPGVQDQPGQHTYTLARVYGVESDLSEVARRGSGSACRSLYGGFVEWQMGEQADGKDSIARQVAPESHWPELRVLILVVSAEKKLTGSTVGMRASVETSPLLRFRAESVVPARM

SEQ ID NO: 8579 - protein, 125 aa, Homo sapiens
MGRARDAILDALENLTAEELKKFKLKLLSVPLREGYGRIPRGALLSMDALDLTDKLVSFYLETYGAELTANVLRDMGLQEMAGQLQAATHQGGSPRLAYRPTGPRPHGGKGREGDHLAHILPGSG

SEQ ID NO: 8580 - protein, 60 aa, Homo sapiens
SIKMLVTLCQSDTEEIRNVASETLLSLGEDGRLAYEQLDKFPRDCVKVGGRHGTEVATAF

SEQ ID NO: 8581 - protein, 149 aa, Homo sapiens
MDAEGLALLLPPVTLAALVDSWLREDCPGLNYAALAVRAARQAADFTLKVEVECSSLQEAVQAAEAGADLVLLDNFKPEELHPTATVLKAQFPSVAVEASGGITLDNLPQFCGPHIDVISMGMLTQAAPALDFSLKLFAKEVAPVPKIH

SEQ ID NO: 8582 - protein, 1089 aa, Homo sapiens
IQLTSMFKDVPLTAEEVEFVVEKALSMFSKMNLQEIPPLVYQLLVLSSKGSRKSVLEGIIAFFSALDKQHNEEQSGDELLDVVTVPSGELRHVEGTIILHIVFAIKLDYELGRELVKHLKVGQQGDSNNNLSPFSIALLLSVTRIQRFQDQVLDLLKTSVVKSFKDLQLLQGSKFLQNLVPHRSYVSTMILEVVKNSVHSWDHVTQGLVELGFILMDSYGPKKVLDGKTIETSPSLSRMPNQHACKLGANILLETFKIHEMIRQEILEQVLNRVVTRASSPISHFLDLLSNIVMYAPLVLQSCSSKVTEAFDYLSFLPLQTVQRLLKAVQPLLKVSMSMRDCLILVLRKAMFANQLDARKSAVAGFLLLLKNFKVLGSLSSSQCSQSLSVSQVHVDVHSHYNSVANETFCLEIMDSLRRCLSQQADVRLMLYEGFYDVLRRNSQLANSVMQTLLSQLKQFYEPKPDLLPPLKLEACILTQGDKISLQEPLDYLLCCIQHCLAWYKNTVIPLQQGEEEEEEEEAFYEDLDDILESITNRMIKSELEDFELDKSADFSQSTSIGIKNNICAFLVMGVCEVLIEYNFSISSFSKNRFEDILSLFMCYKKLSDILNEKAGKAKTKMANKTSDSLLSMKFVSSLLTALFRVLLWRYTSIPTSVEESGKKEKGKSISLLCLEGLQKIFSAVQQFYQPKIQQFLRALDVTDKEGEEREDADVSVTQRTAFQIRQFQRSLLNLLSSQEEDFNSKEALLLVTVLTSLSKLLEPSSPQFVQMLSWTSKICKENSREDALFCKSLMNLLFSLHVSYKSPVILLRDLSQDIHGHLGDIDQDVEVEKTNHFAIVNLRTAAPTVCLLVLSQAEKVLEEVDWLITKLKGQVSQETLSEASSQATLPNQPVEKAIIMQLGTLLTFFHELVQTALPSGSCVDTLLKDLCKMYTTLTALVRYYLQVCQSSGGIPKNMEKLVKLSGSHLTPLCYSFISYVQNKSKSLNYTGEKKEKPAAVATAMARVLRETKPIPNLIFAIEQYEKFLIHLSKKSKVNLMQHMKLSTSRDFKIKGNILDMVLREDGEDENEEGTASEHGGQNKEPAKK

SEQ ID NO: 8583 - protein, 267 aa, Homo sapiens
MLEQMQGVVRLELSGCNDFTEAGLWSSLSARITSLSVSDCINVADDAIAAISQLLPNLAELSLQAYHVTDTALAYFTARQGHSTHTLRLLSCWEITNHGVVNVVHSLPNLTALSLSGCSKVTDDGVELVAENLRKLRSLDLSWCPRITDMALEYVACDLHRLEELVLDRCVRITDTGLSYLSTMSSLRSLYLRWCCQVQDFGLKHLLALGSLRLLSLAGCPLLTTTGLSGLVQLQELEELELTNCPGATPELFKYFSQHLPRCLVIE

SEQ ID NO: 8584 - protein, 148 aa, Homo sapiens
MGEFKVHRVRFFNYVPSGIRCVAYNNQSNRLAVSRTDGTVEIYNLSANYFQEKFFPGHESRATEALCWAEGQRLFSAGLNGEIMEYDLQALNIKYAMDAFGGPIWSMAASPSGSQLLVGCEDGSVKLFQITPDKIQFERNFDRQKSRI

SEQ ID NO: 8585 - protein, 151 aa, Homo sapiens
NITELNLPQLEMLKNQLDQEVEFLSTSIAQLKVVQTKYVEAKDCLNVLNKSNEDGISLCRPGWSAMMYVPGKLHDVEHVLIDVGTGYYVEKTAEDAKDFFKRKIDFLTKQMEKIQPALQEKHAMKQAVMEMMSQKIQQLTALGAAQATAKA

SEQ ID NO: 8586 - protein, 48 aa, Homo sapiens
TVWQLSDSSPIDHLNFHKPDFSELTLNGSLEERIFFTNMVTCSQVHFK

SEQ ID NO: 8587 - protein, 93 aa, Homo sapiens
WDKETAPRLPQHRGWNPGDAPQTSQGRGTGTPVGAETKTLPSTDVAQPPSDSDAVGPRSGFPPQPSLPLCRAPGQLGEKQLPSSTSDDRRRLE

SEQ ID NO: 8588 - protein, 150 aa, Homo sapiens
MDLASPEAAPAAPTALPSFSTFMDGYTGEFDTFLYQLPGTVQPCSSASSSASSTSSSSATSPASASFKFEDFQVYGCYPGPLSGPVDEALSSSGSDYYGSPCSAPSPSTPSFQPPQLSPWDGSFGHFSPSQTYEGLRAWTEQLPKASGPP

SEQ ID NO: 8589 - protein, 31 aa, Homo sapiens
RKIHEDELNDMKDYLSQCQQEQESFIDYKST

SEQ ID NO: 8590 - protein, 959 aa, Homo sapiens
TGDEFLLLFTMASNHPAFSFHQKQVLRQELTQIQSSLNGGGGHGGKGAPGPGGALPTCPACHKITPRTEAPVSSVSNSLENALHTSAHSTEESLPKRPLGKHSKVSVEKIDLKGLSHTKNDRNVECSFEVLWSDSSITSVTKSSSEVTEFISKLCQLYPEENLEKLIPCLAGPDAFYVERNHVDLDSGLRYLASLPSHVLKNDHVRRFLSTSSPPQQLQSPSPGNPSLSKVGTVMGVSGRPVCGVAGIPSSQSGAQHHGQHPAGSAAPLPHCSHAGSAGSALAYRTQMDTSPAILMPSSLQTPQTQEQNGILDWLRKLRLHKYYPVFKQLSMEKFLSLTEEDLNKFESLTMGAKKKLKTQLELEKEKSERRCLNPSAPPLVTSSGVARVPPTSHVGPVQSGRGSHAAELRVEVEQPHHQLPREGSSSEYSSSSSSPMGVQAREESSDSAEENDRRVEIHLESSDKEKPVMLLNHFTSSSARPTAQVLPVQNEASSNPSGHHPLPPQMLSAASHITPIRMLNSVHKPERGSADMKLLSSSVHSLLSLEERNKGSGPRSSMKVDKSFGSAMMDVLPASAPHQPVQVLSGLSESSSMSPTVSFGPRTKVVHASTLDRVLKTAQQPALVVETSTAATGTPSTVLHAARPPIKLLLSSSVPADSAISGQTSCPNNVQISVPPAIINPRTALYTANTKVAFSAMSSMPVGPLQGGFCANSNTASPSSHPSTSFANMATLPSCPAPSSSPALSSVPESSFYSSSGGGGSTGNIPASNPNHHHHHHHQQPPAPPQPAPPPPGCIVCTSCGCSGSCGSSGLTVSYANYFQHPFSGPSVFTFPFLPFSPMCSSGYVSAQQYGGGSTFPVVHAPYSSSGTPDPVLSGQSTFAVPPMQNFMAGTAGVYQTQGLVGSSNGSSHKKSGNLSCYNCGATGHRAQDCKQPSMDFNRPGTFRLKYAPPAESLDSTD

SEQ ID NO: 8591 - protein, 222 aa, Homo sapiens
MVISFYYGGKLVGQATTTCPEGCRLSLSQPGLPGTKLYGPEGLELVRFPPADAIPSERQRQVTRKLFGHLERGVLLHSSRQGVFVKRLCQGRVFCSGNAVVCKGRPNKLERDEVVQVFDTSQFFRELQQFYNSQGRLPDGRVVLCFGEEFPDMAPLRSKLILVQIEQLYVRQLAEEAGKSCGAGSVMQAPEEPPPDQVFRMFPDICASHQRSFFRENQQITV

SEQ ID NO: 8592 - protein, 91 aa, Homo sapiens
MLENYRNLVSLGLVVSKPDLITFLEQRKEPWNVKSEETVAIQPDVFSHYNKDLLTEHCTEASFQKVISRRHGSCDLENLHLRKRWKREECE

SEQ ID NO: 8593 - protein, 125 aa, Homo sapiens
MSSEPPPPPQPPTHQASVGLLDTPRSRERSPSPLRGNVVPSPLPTRRTRTFSATVRASQGPVYKGVCKCFCRSKGHGFITPADGGPDIFLHISDVEGEYVPVEGDEVTYKMCSIPPKNEKLQAVE

SEQ ID NO: 8594 - protein, 182 aa, Homo sapiens
SAGPLETSSGPPVLDVRTTTALEMPDRENTFVVKVEGPSEYIMETVDAQHVKAWVSDIQECLSPGPCPATSPRPMTLPLAPGTSFLTRENTDSLELSCLNHSESLPSQDLLLGPSESNDRLSQGAYGGLSDRPSASISPSSASIAASHFDSMELLPPELPPRIPIEEGPPTGTVHPLSAPYP

SEQ ID NO: 8595 - protein, 148 aa, Homo sapiens
GGDSGLEAQYTCPICLEVYHRPVAIGSCGHTFCGECLQPCLQVPSPLCPLCRLPFDPKKVDKATHVEKQLSSYKAPCRGCNKKVTLAKMRVHISSCLKVQEQMANCPKFVPVVPTSQPIPSGGRAWGPGQGPAWRAGQHVNILFCSWH

SEQ ID NO: 8596 - protein, 57 aa, Homo sapiens
MSFLLPKLTSKKEVDQAIKSTAEKVLVLRFGRDEDPVCLQLDDICAASSMCLMQRET

SEQ ID NO: 8597 - protein, 281 aa, Homo sapiens
MSKPHSEAGTAFIQTQQLHAAMADTFLEHMCRLDIDSPPITARNTGIICTIGPASRSVETLKEMIKSGMNVARLNFSHGTHEYHAETIKNVRTATESFASDPILYRPVAVALDTKGPEIRTGLIKGSGTAEVELKKGATLKITLDNAYMEKCDENILWLDYKNICKVVEVGSKIYVDDGLISLQVKQKGADFLVTEVENGGSLGSKKGVNLPGAAVDLPAVSEKDIQDLKFGVEQDVDMVFASFIRKASDVHEVRKVLGEKGKNIKIISKIENHEGVRRQV

SEQ ID NO: 8598 - protein, 206 aa, Homo sapiens
FVSGALNKFKPNRTPSITPQEERIAQLSESPVILTPNAKRTLPVDSSHGFSIHIDTSSEGSSQSSLSPVLIGGNHLITAGVPRRSKRIAGKKVCRVESGKAGCFSPKISHKEKVRRSLRLKFNLGKNGREVNGCSGVNRYESVGWRLANQQSLKNRIESVKTGLLFSPDVDEKLPKKGSEKISKSEETLLTPERLVGTNYRMSWTG

SEQ ID NO: 8599 - protein, 91 aa, Homo sapiens
MASEKPLAAVTCTAPVNIAVIKYWGKRDEELVLPINSSLSVTLHQDQLKTTTTAVISKDFTEDRIWLNGREEDVGQPRLQACLRESELGSP

SEQ ID NO: 8600 - protein, 45 aa, Homo sapiens
ISSCLKVQEQMANCPKFVPVVPTSQPIPSNIPNRVLALARCHLQS

SEQ ID NO: 8601 - protein, 74 aa, Homo sapiens
MLEPQENGVIDLPDYEHVEDETFPPFPPPASPERQDGEGTEPDEESGNGAPVRVPPKRTVKRNIPKLDAQRLKT

SEQ ID NO: 8602 - protein, 89 aa, Homo sapiens
MAAGGSTQQRRREMAAASAAAISGAGRCRLSKIGATRRPPPARVRVAVRLRPFVDGTAGASDPPCVRGMDSCSLEIANWRNHQETLKYQ

SEQ ID NO: 8603 - protein, 157 aa, Homo sapiens
MDQKILSLAAEKTADKLQEFLQTLREGDLTNLLQNQAVKGKVAGALLRAIFKGSPCSEEAGTLRRRKIYTCCIQLVESGDLQKEIASEIIGLLMLEAHHFPGPLLVELANEFISAVREGSLVNGKSLELLPIILTALATKKENLAYGKGVLSGEECK

SEQ ID NO: 8604 - protein, 154 aa, Homo sapiens
MNKLQPGSVPKINRSMQNWHQLENLSNFIKAMVSYGMNPVDLFEANDLFESGNMTQVQVSLLALAGKMGTNKCASQSGMTAYGTRRHLYDPKNHILPPMDHSTISLQMGTNKCASQVGLARVPPTPLPAPLHPVVSAPPWGHLQLLSPLSVSAP

SEQ ID NO: 8605 - protein, 159 aa, Homo sapiens
MCDRNGGRRLRQWLIEQIDSSMYPGLIWENEEKSMFRIPWKHAGKQDYNQEVDASIFKAWAVFKGKFKEGDKAEPATWKTRLRCALNKSPDFEEVTDRSQLDISEPYKVYRIVPEEEQKCKLGVATAGCVNEVTEMECGRSEIDELIKEPSVDDYMGMI

SEQ ID NO: 8606 - protein, 47 aa, Homo sapiens
MCDRNGGRRLRQWLIEQIDSSMYPGLIWENEEKSMFRIPWKHAGKQD

SEQ ID NO: 8607 - protein, 124 aa, Homo sapiens
MLTQAAVRLVRGSLRKTSWAEWGHRELRLGQLAPFTAPHKDKSFSDQRSELKRRLKAEKKVAEKEAKQKELSEKQLSQATAAATNHTTDNGVGPEEESVDPNVGSMPKELLGESSSSMIFEERG

SEQ ID NO: 8608 - protein, 7592 aa, Homo sapiens
MSSSDEETLSERSCRSERSCRSERSYRSERSGSLSPCPPGDTLPWNLPLHEQKKRKSQDSVLDPAERAVVRVADERDRVQKKTFTKWVNKHLMKVRKHINDLYEDLRDGHNLISLLEVLSGIKLEPAGLKTLRLVSMPSWCHTNNEEQAEEDDDDVPREKGRMRFHRLQNVQIALDFLKQRQVKLVNIRNDDITDGNPKLTLGLIWTIILHFQISDIYISGESGDMSAKEKLLLWTQKVTAGYTGIKCTNFSSCWSDGKMFNALIHRYRPDLVDMERVQIQSNRENLEQAFEVAERLGVTRLLDAEDVDVPSPDEKSVITYVSSIYDAFPKVPEGGEGISATEVDSRWQEYQSRVDSLIPWIKQHTILMSDKTFPQNPVELKALYNQYIHFKETEILAKEREKGRIEELYKLLEVWIEFGRIKLPQGYHPNDVEEEWGKLIIEMLEREKSLRPAVERLELLLQIANKIQNGALNCEEKLTLAKNTLQADAAHLESGQPVQCESDVIMYIQECEGLIRQLQVDLQILRDENYYQLEELAFRVMRLQDELVTLRLECTNLYRKGHFTSLELVPPSTLTTTHLKAEPLTKATHSSSTSWFRKPMTRAELVAISSSEDEGNLRFVYELLSWVEEMQMKLERAEWGNDLPSVELQLETQQHIHTSVEELGSSVKEARLYEGKMSQNFHTSYAETLGKLETQYCKLKETSSFRMRHLQSLHKFVSRATAELIWLNEKEEEELAYDWSDNNSNISAKRNYFSELTMELEEKQDVFRSLQDTAELLSLENHPAKQTVEAYSAAVQSQLQWMKQLCLCVEQHVKENTAYFQFFSDARELESFLRNLQDSIKRKYSCDHNTSLSRLEDLLQDSMDEKEQLIQSKSSVASLVGRSKTIVQLKPRSPDHVLKNTISVKAVCDYRQIEITICKNDECVLEDNSQRTKWKVISPTGNEAMVPSVCFLIPPPNKDAIEMASRVEQSYQKVMALWHQLHVNTKSLISWNYLRKDLDLVQTWNLEKLRSSAPGECHQIMKNLQAHYEDFLQDSRDSVLFSVADRLRLEEEVEACKARFQHLMKSMENEDKEETVAKMYISELKNIRLRLEEYEQRVVKRIQSLASSRTDRDAWQDNALRIAEQEHTQEDLQQLRSDLDAVSMKCDSFLHQSPSSSSVPTLRSELNLLVEKMDHVYGLSTVYLNKLKTVDVIVRSIQDAELLVKGYEIKLSQEEVVLADLSALEAHWSTLRHWLSDVKDKNSVFSVLDEEIAKAKVVAEQMSRLTPERNLDLERYQEKGSQLQERWHRVIAQLEIRQSELESIQEVLGDYRACHGTLIKWIEETTAQQEMMKPGQAEDSRVLSEQLSQQTALFAEIERNQTKLDQCQKFSQQYSTIVKDYELQLMTYKAFVESQQKSPGKRRRMLSSSDAITQEFMDLRTRYTALVTLTTQHVKYISDALRRLEEEEKVVEEEKQEHVEKVKELLGWVSTLARNTQGKATSSETKESTDIEKAILEQQVLSEELTTKKEQVSEAIKTSQIFLAKHGHKLSEKEKKQISEQLNALNKAYHDLCDGSANQLQQLQSQLAHQTEQKECRAVAGVIDLGTVEIFPIFKAMQKGLLDQDTGLVLLESQVIMSGLIAPETGENLSLEEGIARNLINPQMYQQLRELQDALALISRLTESRGPLSVVEAIEKRIISETVGLKILEAHLATGGFSLSPSENCINLEEAFHQGLISAWLHSVLESYLRTSKNLIDPNTAEKIGLLDLMQRCIVHQESGFKLLPVKQLAGGMVSLKSGRKVSIFRAVQEGLIDRQVTVRLLEAQLFAGGIVDPRTGHRLTVEEAVRHNLIDQDMACAILIRQLQTGGIIDTVTGQRLTIDEAVSNDLVAAKIALVILESLWSFMGLLWPESGEILPITDALEQGIVSTELAHKILSNRQHIKALFLPATTEILSWKKAIESGILDRDLANNLKSICIPDVMPHMQLADSAEQNINPGAAVLPCSKSHPKATASQSENLLFQLMTHSYINVQNGQRLLLLDKELMETLTSRDEYQTSPPKVVEIGHQRQKTPEGLQESANVKISGTFSSGWTVRLPEFQFSSQNKEYPDREDCTTEKGKKTTVETEDSSVENPEQDLFVEQKERNPNIDALKVINKVKLEVQRQLIGTQREDQTAVSVRENASRGHLLTIPPAEAEGVPLVVDKDVFSVETPKKEHQPLRNTSFTCQNEQAHTLETEYIHDETGGSHIKPQSKKLQVQVKKTLGIKLELKSETDGNVHPLDKKEMLKKTFLAKDDHKESQEAQNIAGGSMMMSEKTDEEDSGREIFLSCSHPLELLEEATLNVLSAQLLDGGIFHEQTGQKLLLNEAISRGIVPSHTAVKLMEKLNMFQGFFDSQTCESLTTEEVINEGLMDEKLLHNVLMADKAISGVLDPRTQTLCSVKDAVTVGLLDKETATRILERQVVTGGIIDLKRGKKVSVTLASTLGLVDVADQPELINLEKASKGRDAEKTVRERLISLQMETTGLIDPDSKAPLTVVQSIDRGLLEREEAVRLLTKQVVDGGIIHHISGMRLSVDNAFRHGLIGEDLAEKLKRVENLNIHQIFNPETKENISLPKAIKLDLITSDLKREIQEVQAFTGNFVDLISGQRLTLAEAKKEGLLTNEAVLSPGMMHGIVDPENCRIVPYSELVKKCKIDIESGQRYLEVIPFSDIKDGVSDKVLTLSQAIQLGKVDFASTLKVLEAQANTGGIIDTATGKRLTLASALEEKLVDENMVRIIASHQVLNGGIVDIFSDQRVTLVEAIEKRLISPELANMIQIDSSEFSDHRAQIEKQEGIEVCALQNEFLGKDMLIACNQTAEMSCNKVEESERLFQVENQSAQEKVKVRVSDGEQAKKSREISLKEFGCKDQRKPRMSSDAKEFISIINPHNLKGKSLGQVSLTHPYSECDFKLKEVARNNMGNDTNEEQEKAVTKIEIISHMKQSTSCLDSEEIRENQGEVILEVQETYCETSGKLPSEQVLQQPMNARVKSKREKREVIVEESIRTCKPAFLSEEKLYQETAIRDEHDSHIKSQPREMTSSEKGKEADTEMGFSITFKIEESSSQVVPQGISVKHLDALTLFSSKQANEGKVNNLSLCLTLKPEENLSREIACGAQSEPFPCMTPRPEGLHYQESDGKAQVTGPSQISKTDKSFQGTTRQETNYQDSWVTSKTKETKHQISSSNECKEKSYQEVSFDPARGLKLEEITVSRPDSKEVRYLEFSDRKDLHHQGSKSDDKLCGTLKSEIATQELTGEKFLEMANPNVAGLEAGSIEDIVTQRGSRVLGSFLPEKLFKGVSQKENTGQQNAIISPTVLETSEEKTVSLTVCSAVKTEKTPQEKLRESPGSEQTPFMTAPEGKGNGGVNPEPFRATQNVFTRQLCLEHDEKLVSYLSLLRNIEMRTKQIQPLELNLAELQDLLCQAKVLERELKDLTTLVSQELECVNQIIISQPQEVPAQLLKALEKDAKNLQKSLSSVSDTWNSRLLHFQNAVEIEKTKVLNQHTQLEGRLQDLRAWVGNKNLILNSKGSNSEIDVDSLNLCLQQYEDLKQPMAERKAQLDALAFDIQFFISEHAQDLSPQQNRQMLRLLNELQRSFQDILEQTAAQVDALQGHLQQMEQEALVKTLQKQQNTCHQQLEDLCSWVGQAERALAGHQGRTTQQDLSALQKNQSDLKDLQDDIQNRATSFATVVKDIEGFMEENQTKLSPRELTALREKLHQAKEQYEALQEETRVAQKELEEAVTSALQQETEKSKAAKELAENKKKIDALLDWVTSVGSSGGQLLTNLPGMEQLSGASLEKGALDTTDGYMGVNQAPEKLDKQCEMMKARHQELLSQQQNFILATQSAQAFLDQHGHNLTPEEQQMLQQKLGELKEQYSTSLAQSEAELKQVQTLQDELQKFLQDHKEFESWLERSEKELENMHKGGSSPETLPSLLKRQGSFSEDVISHKGDLRFVTISGQKVLDMENSFKEGKEPSEIGNLVKDKLKDATERYTALHSKCTRLGSHLNMLLGQYHQFQNSADSLQAWMQACEANVEKLLSDTVASDPGVLQEQLATTKQLQEELAEHQVPVEKLQKVARDIMEIEGEPAPDHRHVQETTDSILSHFQSLSYSLAERSSLLQKAIAQSQSVQESLESLLQSIGEVEQNLEGKQVSSLSSGVIQEALATNMKLKQDIARQKSSLEATREMVTRFMETADSTTAAVLQGKLAEVSQRFEQLCLQQQEKESSLKKLLPQAEMFEHLSGKLQQFMENKSRMLASGNQPDQDITHFFQQIQELNLEMEDQQENLDTLEHLVTELSSCGFALDLCQHQDRVQNLRKDFTELQKTVKEREKDASSCQEQLDEFRKLVRTFQKWLKETEGSIPPTETSMSAKELEKQIEHLKSLLDDWASKGTLVEEINCKGTSLENLIMEITAPDSQGKTGSILPSVGSSVGSVNGYHTCKDLTEIQCDMSDVNLKYEKLGGVLHERQESLQAILNRMEEVHKEANSVLQWLESKEEVLKSMDAMSSPTKTETVKAQAESNKAFLAELEQNSPKIQKVKEALAGLLVTYPNSQEAENWKKIQEELNSRWERATEVTVARQRQLEESASHLACFQAAESQLRPWLMEKELMMGVLGPLSIDPNMLNAQKQQVQFMLKEFEARRQQHEQLNEAAQGILTGPGDVSLSTSQVQKELQSINQKWVELTDKLNSRSSQIDQAIVKSTQYQELLQDLSEKVRAVGQRLSVQSAISTQPEAVKQQLEETSEIRSDLEQLDHEVKEAQTLCDELSVLIGEQYLKDELKKRLETVALPLQGLEDLAADRINRLQAALASTQQFQQMFDELRTWLDDKQSQQAKNCPISAKLERLQSQLQENEEFQKSLNQHSGSYEVIVAEGESLLLSVPPGEEKRTLQNQLVELKNHWEELSKKTADRQSRLKDCMQKAQKYQWHVEDLVPWIEDCKAKMSELRVTLDPVQLESSLLRSKAMLNEVEKRRSLLEILNSAADILINSSEADEDGIRDEKAGINQNMDAVTEELQAKTGSLEEMTQRLREFQESFKNIEKKVEGAKHQLEIFDALGSQACSNKNLEKLRAQQEVLQALEPQVDYLRNFTQGLVEDAPDGSDASQLLHQAEVAQQEFLEVKQRVNSGCVMMENKLEGIGQFHCRVREMFSQLADLDDELDGMGAIGRDTDSLQSQIEDVRLFLNKIHVLKLDIEASEAECRHMLEEEGTLDLLGLKRELEALNKQCGKLTERGKARQEQLELTLGRVEDFYRKLKGLNDATTAAEEAEALQWVVGTEVEIINQQLADFKMFQKEQVDPLQMKLQQVNGLGQGLIQSAGKDCDVQGLEHDMEEINARWNTLNKKVAQRIAQLQEALLHCGKFQDALEPLLSWLADTEELIANQKPPSAEYKVVKAQIQEQKLLQRLLDDRKATVDMLQAEGGRIAQSAELADREKITGQLESLESRWTELLSKAAARQKQLEDILVLAKQFHETAEPISDFLSVTEKKLANSEPVGTQTAKIQQQIIRHKALEEDIENHATDVHQAVKIGQSLSSLTSPAEQGVLSEKIDSLQARYSEIQDRCCRKAALLDQALSNARLFGEDEVEVLNWLAEVEDKLSSVFVKDFKQDVLHRQHADHLALNEEIVNRKKNVDQAIKNGQALLKQTTGEEVLLIQEKLDGIKTRYADITVTSSKALRTLEQARQLATKFQSTYEELTGWLREVEEELATSGGQSPTGEQIPQFQQRQKELKKEVMEHRLVLDTVNEVSRALLELVPWRAREGLDKLVSDANEQYKLVSDTIGQRVDEIDAAIQRSQQYEQAADAELAWVAETKRKLMALGPIRLEQDQTTAQLQVQKAFSIDIIRHKDSMDELFSHRSEIFGTCGEEQKTVLQEKTESLIQQYEAISLLNSERYARLERAQVLVNQFWETYEELSPWIEETRALIAQLPSPAIDHEQLRQQQEEMRQLRESIAEHKPHIDKLLKIGPQLKELNPEEGEMVEEKYQKAENMYAQIKEEVRQRALALDEAVSQSTQFHDKIEPMLETLENLSSRLRMPPLIPAEVDKIRECISDNKSATVELEKLQPSFEALKRRGEELIGRSQGADKDLAAKEIQDKLDQMVFFWEDIKARAEEREIKFLDVLELAEKFWYDMAALLTTIKDTQDIVHDLESPGIDPSIIKQQVEAAETIKEETDGLHEELEFIRILGADLIFACGETEKPEVRKSIDEMNNAWENLNKTWKERLEKLEDAMQAAVQYQDTLQAMFDWLDNTVIKLCTMPPVGTDLNTVKDQLNEMKEFKVEVYQQQIEMEKLNHQGELMLKKATDETDRDIIREPLTELKHLWENLGEKIAHRQHKLEGALLALGQFQHALEELMSWLTHTEELLDAQRPISGDPKVIEVELAKHHVLKNDVLAHQATVETVNKAGNELLESSAGDDASSLRSRLEAMNQCWESVLQKTEEREQQLQSTLQQAQGFHSEIEDFLLELTRMESQLSASKPTGGLPETAREQLDTHMELYSQLKAKEETYNQLLDKGRLMLLSRDDSGSGSKTEQSVALLEQKWHVVSSKMEERKSKLEEALNLATEFQNSLQEFINWLTLAEQSLNIASPPSLILNTVLSQIEEHKVFANEVNAHRDQIIELDQTGNQLKFLSQKQDVVLIKNLLVSVQSRWEKVVQRSIERGRSLDDARKRAKQFHEAWKKLIDWLEDAESHLDSELEISNDPDKIKLQLSKHKEFQKTLGGKQPVYDTTIRTGRALKEKTLLPEDSQKLDNFLGEVRDKWDTVCGKSVERQHKLEEALLFSGQFMDALQALVDWLYKVEPQLAEDQPVHGDLDLVMNLMDAHKVFQKELGKRTGTVQVLKRSGRELIENSRDDTTWVKGQLQELSTRWDTVCKLSVSKQSRLEQALKQAEVFRDTVHMLLEWLSEAEQTLRFRGALPDDTEALQSLIDTHKEFMKKVEEKRVDVNSAVAMGEVILAVCHPDCITTIKHWITIIRARFEEVLTWAKQHQQRLETALSELVANAELLEELLAWIQWAETTLIQRDQEPIPQNIDRVKALIAEHQTFMEEMTRKQPDVDRVTKTYKRKNIEPTHAPFIEKSRSGGRKSLSQPTPPPMPILSQSEAKNPRINQLSARWQQVWLLALERQRKLNDALDRLEELKEFANFDFDVWRKKYMRWMNHKKSRVMDFFRRIDKDQDGKITRQEFIDGILASKFPTTKLEMTAVADIFDRDGDGYIDYYEFVAALHPNKDAYRPTTDADKIEDEVTRQVAQCKCAKRFQVEQIGENKYRFFLGNQFGDSQQLRLVRILRSTVMVRVGGGWMALDEFLVKNDPCRVHHPGSKIKRSDSSSSISSQSPIARGRTNIELREKFILPEGASQGMTPFRSRGRRSKPSSRAASPTRSSSSASQSNHSCTSMPSSPATPASGTKTSLQFSRCYDKPWLVNSKAGTPIRDSHSPDLQLPTPEVIPSSGSKLKRPTPTFHSSRTSLAGDTSNSSSPASTGAKTNRADPKKSASRPGSRAGSRAGSRASSRRGSDASDFDLLETQSACSDTSESSAAGGQGNSRRGLNKPSKIPTMSKKTTTASPRTPGPKR

SEQ ID NO: 8609 - protein, 175 aa, Homo sapiens
MQKMVKEHYKTFEKGHIRDITDSLIEHCQEKQLDENANVQLSDEKIINIVLDLFGAGFDTVTTAISWSLMYLVMNPRVQRKIQEELDTVIGRSRRPRLSDRSHLPYMEAFILETFRHSSFVPFTIPHSTTRDTSLKGFYIPKGRCVFVNQWQINHDQKLWVNPSEFLPERFLTPD

SEQ ID NO: 8610 - protein, 130 aa, Homo sapiens
MNSLSVGLLPQRDTKFREDCPPDREELGRHSWAVLHTLAAYYPDLPTPEQQQDMAQFIHLFSKFYPCEECAEDLRKRLCRNHPDTRTRACFTQWLCHLHNEVNRKLGKPDFDCSKVDERWRDGWKDGSCD

SEQ ID NO: 8611 - protein, 74 aa, Homo sapiens
MVSCLVDHRGNITEYQCHQYITKMTAIIFSDYRLICGFMDDCKNDINILKCGSIRLGEKDAHSQGEVVSCLEKG

SEQ ID NO: 8612 - protein, 159 aa, Homo sapiens
MSTTVNVDSLAEYEKSQIKRALELGTVMTVFSFRKSTPERRTVQVIMETRQVAWSKTADKIEGFLDIMEIKEIRPGKNSKDFERAKAVRQKEDCCFTILYGTQFVLSTLSLAADSKEDAVNWLSGLKILHQEAMNASTPTIIESWLRKQIYSVDQTRRN

SEQ ID NO: 8613 - protein, 242 aa, Homo sapiens
MSSTVSYWILNSTRNSIATLQGGRRLYSRYVSNRNKLKWRLFSRVPPTLNSSPCGGFTLCKAYRHTSTEEDDFHLQLSPEQINEVLRAGETTHKILDLESRVPNSVLRFESNQLAANSPVEDRRGVASCLQTNGLMFGIFDGHGGHACAQAVSERLFYYVAVSLMSHQTLEHMEGAMESMKPLLPILHWLKHPGDSIYKDVTSVHLDHLRVYWQELLDLHMEMGLSIEEALMYSFQRLDSDI

SEQ ID NO: 8614 - protein, 114 aa, Homo sapiens
MPPPPEGQPCHLSLPHHHSPPPIKLQSGCWTPLGAVSAHHPLCGATWSQAHCPLAGRGPSRRRCGLHRAPSTKESANASAGPRAMASLLQLMAAPTSSCTSLMWKGSMSQWKAT

SEQ ID NO: 8615 - protein, 69 aa, Homo sapiens
MSKPHSEAGTAFIQTQQLHAAMADTFLEHMCRLDIDSPPITARNTGIICTIVPCGDHQECAHSHGKLCF

SEQ ID NO: 8616 - protein, 473 aa, Homo sapiens
MWDQRLVRLALLQHLRAFYGIKVKGVRGQCDRRRHETAATEIGGKIFGVPFNALPHSAVPEYGHIPSFLVDACTSLEDHIHTEGLFRKSGSVIRLKALKNKVDHGEGCLSSAPPCDIAGLLKQFFRELPEPILPADLHEALLKAQQLGTEEKNKATLLLSCLLADHTVHVLRYFFNFLRNVSLRSSENKMDSSNLAVIFAPNLLQTSEGHEKMSSNTEKKLRLQAAVVQTLIDYASDIGRVPDFILEKIPAMLGIDGLCATPSLEGFEEGEYETPGEYKRKRRQSVGDFVSGALNKFKPNRTPSITPQEERIAQLSESPVILTPNAKRTLPVDSSHGFSSKKRKSIKHNFNFELLPSNLFNSSSTPVSGVPRRSKRIAGKKVCRVESGKAGCFSPKISHKEKVRRSLRLKFNLGKNGREVNGCSGVNRYESVGWRLANQQSLKNRIESVKTGLLFSPDVDEKLPKKGTFTYYC

SEQ ID NO: 8617 - protein, 217 aa, Homo sapiens
MAGSRGAGRTAAPSVRPEKRRSEPELEPEPEPEASTPCPRTEMASARIGDEYAEDSSDEEDIRNTVGNVPLEWYDDFPHVGYDLDGRRIYKPLRTRDELDQFLDKMDDPDYWRTVQDPMTGRDLRLTDEQVALVRRLQSGQFGDVGFNPYEPAVDFFSGDVMIHPVTNRPADKRSFIPSLVEKEKVSRMVHAIKMGWIQPRRPRDPTPSFYDLWAQE

SEQ ID NO: 8618 - protein, 366 aa, Homo sapiens
MSKPHSEAGTAFIQTQQLHAAMADTFLEHMCRLDIDSPPIKKGVNLPGAAVDLPAVSEKDIQDLKFGVEQDVDMVFASFIRKASDVHEVRKVLGEKGKNIKIISKIENHEGVRRFDEILEASDGIMVARGDLGIEIPAEKVFLAQKMMIGRCNRAGKPVICATQMLESMIKKPRPTRAEGSDVANAVLDGADCIMLSGETAKGDYPLEAVRMQHLIAREAEAAMFHRKLFEELVRASSHSTDLMEAMAMGSVEASYKCLAAALIVLTESGRSAHQVARYRPRAPIIAVTRNPQTARQAHLYRGIFPVLCKDPVQEAWAEDVDLRVNFAMNVGKARGFFKKGDVVIVLTGWRPGSGFTNTMRVVPVP

SEQ ID NO: 8619 - protein, 5063 aa, Homo sapiens
MAATLGAGTPPRPQARSIAGVYVEASGQAQSVYAAMEQGLLPAGLGQALLEAQAATGGLVDLARGQLLPVSKALQQGLVGLELKEKLLAAERATTGYPDPYGGEKLALFQAIGKEVVDRALGQSWLEVQLATGGLVDPAQGVLVAPEPACHQGLLDRETWHKLSELEPGTGDLRFLDPNTLERLTYHQLLERCVRAPGSGLALLPLKITFRSMGGAVSAAELLEVGILDEQAVQGLREGRLAAVDVSARAEVRRYLEGTGSVAGVVLLPEGHKKSFFQAATEHLLPMGTALPLLEAQAATHTLVDPITGQRLWVDEAVRAGLVSPELHEQLLVAEQAVTGHHDPFSGSQIPLFQAMKKGLVDRPLALRLLDAQLATGGLVCPARRLRLPLEAALRCGCLDEDTQRQLSQAGSFSDGTHGGLRYEQLLALCVTDPETGLAFLPLSGGPRGGEPQGPPFIKYSTRQALSTATATVSVGKFRGRPVSLWELLFSEAISSEQRAMLAQQYQEGTLSVEKLAAKLSATLEQAAATARVTFSGLRDTVTPGELLKAEIIDQDLYERLEHGQATAKDVGSLASVQRYLQGTGCIAGLLLPGSQERLSIYEARCKGLLRPGTALILLEAQAATGFIIDPKANKGHSVEEALRAAVIGPDVFAKLLSAERAVTGYTDPYTGQQISLFQAMQKGLIVREHGIRLLEAQIATGGVIDPVHSHRVPVDVAYRRGYFDQMLNLILLDPSDDTKGFFDPNTHENLTYLQLLERCVRDPETGLYLLPLSSTQSPLVDSATQQAFQNLLLSVKYGRFQGQRVSAWELINSEYFSEGRRRQLLRRYRQREVTLGQVAKLLEAETQRQADIMLPALRSRVTVHQLLEAGIIDQQLLDQVLAGTISPEALLLMDGVRRYLCGLGAVGGVRLLPSGQRLSLYQAMRQKLLGPRVALALLEAQAATGTIMDPHSPESLSVDEAVRRGVVGPELYGRLKRAEGAIAGFRDPFSGKQVSVFQAMKKGLIPWEQAARLLEAQVATGGIIDPTSHHHLPMPVAIQRGYVDQEMETALSSSSETFPTPDGQGRTSYAQLLEECPRDETSGLHLLPLPESAPALPTEEQVQRSLQAVPGAKDGTSLWDLLSSCHFTEEQRRGLLEDVQEGRTTVPQLLASVQRWVQETKLLAQARVMVPGPRGEVPAVWLLDAGIITQETLEALAQGTQSPAQVAEQPAVKACLWGTGCVAGVLLQPSGAKASIAQAVRDGLLPTGLGQRLLEAQVASGFLVDPLNNQRLSVEDAVKVGLVGRELSEQLGQAERAAAGYPDPYSRASLSLWQAMEKGLVPQNEGLPLLQVQLATGGVVDPVHGVHLPQAAACRLGLLDTQTSQVLTAVDKDNKFFFDPSARDQVTYQQLRERCVCDSETGLLLLPLPSDTVLEVDDHTAVALRAMKVPVSTGRFKGCSVSLWDLLLSEYVGADKRRELVALCRSGRAAALRQVVSAVTTLVEAAERQPLQATFRGLRKQVSARDLFRAQLISRKTLDELSQGTTTVKEVAEMDSVKRSLEGGNFIAGVLIQGTQERMSIPEALRRHILRPGTALVLLEAQAATGFIIDPVENRKLTVEEAFKAGMFGKETYVKLLSAERAVTGYTDPYTGQQISLFQAMQKDLIVREHGIRLLEAQIATGGIIDPVHSHRVPVDVAYRCGYFDEEMNRILADPSDDTKGFFDPNTHENLTYLQLLERCVEDPETGLYLLQIIKKGENYVYINEATRHVLQSRTAKMRVGRFADQVVSFWDLLSSPYFTEDRKRELIQEYGAQSGGLEKLLEIITTTIEETETQNQGIKVAAIRGEVTAADLFNSRVIDQKTLHTLRVGRTGGQALSTLECVKPYLEGSGCIAGVTVPSTREVMSLHEASRKELIPAAFATWLLEAQAATGFLLDPCTRQKLSVDEAVDVGLVNEELRERLLKAERAATGYRDPATGDTIPLFQAMQKQLIEKAEALRLLEVQVATGGVIDPQHHHRLPLETAYRRGCLHKDIYALISDQKHMRKRFVDPNTQEKVSYRELQERCRPQEDTGWLLFPVNKAARDSEHIDDETRRALEAEQVEITVGRFRGQKPTLWALLNSEYVTEEKKLQLVRMYRTHTRRALQTVAQLILELIEKQETSNKHLWFQGIRRQITASELLSSAIITEEMLQDLETGRSTTQELMEDDRVKRYLEGTSCIAGVLVPAKDQPGRQEKMSIYQAMWKGVLRPGTALVLLEAQAATGFVIDPVRNLRLSVEEAVAAGVVGGEIQEKLLSAERAVTGYTDPYTGQQISLFQAMQKDLIVREHGIRLLEAQIATGGVIDPVHSHRVPVDVAYRRGYFDEEMNRVLADPSDDTKGFFDPNTHENLTYVQLLRRCVPDPDTGLYMLQLAGRGSAVHQLSEELRCALRDARVTPGSGALQGQSVSVWELLFYREVSEDRRQDLLSRYRAGTLTVEELGATLTSLLAQAQAQARAEAEAGSPRPDPREALRAATMEVKVGRLRGRAVPVWDVLASGYVSRAAREELLAEFGSGTLDLPALTRRLTAIIEEAEEAPGARPQLQDAWRGPREPGPAGRGDGDSGRSQREGQGEGETQEAAAAAAAAAARRQEQTLRDATMEVQRGQFQGRPVSVWDVLFSSYLSEARRDELLAQHAAGALGLPDLVAVLTRVIEETEERLSKVSFRGLRRQVSASELHTSGILGPETLRDLAQGTKTLQEVTEMDSVKRYLEGTSCIAGVLVPAKDQPGRQEKMSIYQAMWKGVLRPGTALVLLEAQAATGFVIDPVRNLRLSVEEAVAAGVVGGEIQEKLLSAERAVTGYTDPYTGQQISLFQAMQKDLIVREHGIRLLEAQIATGGVIDPVHSHRVPVDVAYQRGYFDEEMNRVLADPSDDTKGFFDPNTHENLTYVQLLRRCVPDPDTGLYMLQLAGRGSAVHQLSEELRCALRDARVTPGSGALQGQSVSVWELLFYREVSEDRRQDLLSRYRAGTLTVEELGATLTSLLAQAQAQARAEAEAGSPRPDPREALRAATMEVKVGRLRGRAVPVWDVLASGYVSRAAREELLAEFGSGTLDLPALTRRLTAIIEEAEEAPGARPQLQDAWRGPREPGPAGRGDGDSGRSQREGQGEGETQEAAAAARRQEQTLRDATMEVQRGQFQGRPVSVWDVLFSSYLSEARRDELLAQHAAGALGLPDLVAVLTRVIEETEERLSKVSFRGLRCQVSASELHTSGILGPETLRDLAQGTKTLQEVTEMDSVKRYLEGTSCIAGVLVPAKDQPGRQEKMSIYQAMWKGVLRPGTALVLLEAQAATGFVIDPVRNLRLSVEEAVAAGVVGGEIQEKLLSAERAVTGYTDPYTGQQISLFQAMQKDLIVREHGIRLLEAQIATGGVIDPVHSHRVPVDVAYRRGYFDEEMNRVLADPSDDTKGFFDPNTHENLTYVQLLRRCVPDPDTGLYMLQLAGRGSAVHQLSEELRCALRDARVTPGSGALQGQSVSVWELLFYREVSEDRRQDLLSRYRAGTLTVEELGATLTSLLAQAQAQARAEAEAGSPRPDPREALRAATMEVKVGRLRGRAVPVWDVLASGYVSRAAREELLAEFGSGTLDLPALTRRLTAIIEEAEEAPGARPQLQDAWRGPREPGPAGRGDGDSGRSQREGQGEGETQEAAAATAAARRQEQTLRDATMEVQRGQFQGRPVSVWDVLFSSYLSEARRDELLAQHAAGALGLPDLVAVLTRVIEETEERLSKVSFRGLRRQVSASELHTSGILGPETLRDLAQGTKTLQEVTEMDSVKRYLEGTSCIAGVLVPAKDQPGRQEKMSIYQAMWKGVLRPGTALVLLEAQAATGFVIDPVRNLRLSVEEAVAAGVVGGEIQEKLLSAERAVTGYTDPYTGQQISLFQAMQKDLIVREHGIRLLEAQIATGGVIDPVHSHRVPVDVAYRRGYFDEEMNRVLADPSDDTKGFFDPNTHENLTYVQLLRRCVPDPDTGLYMLQLAGRGSAVHQLSEELRCALRDARVTPGSGALQGQSVSVWELLFYREVSEDRRQDLLSRYRAGTLTVEELGATLTSLLAQAQAQARAEAEAGSPRPDPREALRAATMEVKVGRLRGRAVPVWDVLASGYVSRAAREELLAEFGSGTLDLPALTRRLTAIIEEAEEAPGARPQLQDAWRGPREPGPAGRGDGDSGRSQREGQGEGETQEAAAATAAARRQEQTLRDATMEVQRGQFQGRPVSVWDVLFSSYLSEARRDELLAQHAAGALGLPDLVAVLTRVIEETEERLSKVSFRGLRRQVSASELHTSGILGPETLRDLAQGTKTLQEVTEMDSVKRYLEGTSCIAGVLVPAKDQPGHQEKMSIYQAMWKGVLRPGTALVLLEAQAATGFVIDPVRNLRLSVEEAVAAGVVGGEIQEKLLSAERAVTGYTDPYTGQQISLFQAMQKDLIVREHGIRLLEAQIATGGVIDPVHSHRVPVDVAYRRGYFDEEMNRVLAHPSDDTKGFFDPNTHENLTYVQLLRRCVPDPDTGLYMLQLAGRGSAVHQLSEELRCALRDARVMPGSGALQGQSVSVWELLFYREVSEDRRQDLLSRYRAGTLTVEELGATLTSLLAQAQAQARAEAEAEAGSPRPDPREALRAATMEVKVGRLRGRAVPVWDVLASGYVSGAAREELLAEFGSGTLDLPALTRRLTAIIEEAEEAPGARPQLQDAWRGPREPGPAGRGDGDSGRSQREGQGEGETQEAAAAARRQEQTLRDATMEVQRGQFQGRPVSVWDVLFSSYLSEAHRDELLAQHAAGALGLPDLVAVLTRVIEETEERLSKVSFRGLRRQVSASELHTSGILGPETLRDLAQGTKTLQEVTEMDSVKRYLEGTSCIAGVLVPAKDQPGRQEKMSIYQAMWKGVLRPGTALVLLEAQAATGFVIDPVRNLRLSVEEAVAAGVVGGEIQEKLLSAERAVTGYTDPYTGQQISLFQAMQKDLIVREHGIRLLEAQIATGGVIDPVHSHRVPVDVAYRRGYFDEEMNRVLADPSDDTKGFFDPNTHENLTYLQLLQRATLDPETGLLFLSLSLQ

SEQ ID NO: 8620 - protein, 611 aa, Homo sapiens
MDSCSLEIANWRNHQETLKYQFDAFYGERSTQQDIYAGSVQPILRHLLEGQNASVLAYGPTGAGKTHTMLGSPEQPGVIPRALMDLLQLTREEGAEGRPWALSVTMSYLEIYQEKVLDLLDPASGDLVIREDCRGNILIPGLSQKPISSFADFERHFLPASRNRTVGATRLNQRSSRSHAVLLVKVDQRERLAPFRQREGKLYLIDLAGSEDNRRTGNKGLRLKESGAINTSLFVLGKVVDALNQGLPRVPYRDSKLTRLLQDSLGGSAHSILIANIAPERRFYLDTVSALNFAARSKEVINRPFTNESLQPHALGPVKLSQKELLGPPEAKRARGPEEEEIGSPEPMAAPASASQKLSPLQKLSSMDPAMLERLLSLDRLLASQGSQGAPLLSTPKRERMVLMKTVEEKDLEIERLKTKQKELEAKMLAQKAEEKENHCPTMLRPLSHRTVTGAKPLKKAVVMPLQLIQEQAASPNAEIHILKNKGRKRKVKVAGGLGYTWSPELESLDALEPEEKAEDCWELQISPELLAHGRQKILDLLNEGSARDLRSLQRIGPKKAQLIVGWRELHGPFSQVEDLERVEGITGKQMESFLKANILGLAAGQRCGAS

SEQ ID NO: 8621 - protein, 76 aa, Homo sapiens
MAAVQAAEVKVDGSEPKLSKNELKRRLKAEKKVAEKEAKQKELSEKQLSQATAAATNHTTDNGVGPEEESVDPNKL

SEQ ID NO: 8622 - protein, 59 aa, Homo sapiens
MALLHSGRVLPGIAAAFHPGLAAAASARARQRPRLPQKIWTRNTCPLGDWLNFARHLQN

SEQ ID NO: 8623 - protein, 54 aa, Homo sapiens
MVRISKPKTFQAYLDDCHRRYSCAHCRAHLANHDDLISKSFQGSQGRAYLFNSV

SEQ ID NO: 8624 - protein, 84 aa, Homo sapiens
MLGAALRRCAVAATTRADPRGLLHSARTPGPAVAIQSVRCYSHGSQETDEEFDARWVTYFNKPDIDAWELRKDGLPQGFIDIAT

SEQ ID NO: 8625 - protein, 269 aa, Homo sapiens
MVGRRALIVLAHSERTSFNYAMKEAAAAALKKKGWEVVESDLYAMNFNPIISRKDITGKLKDPANFQYPAESVLAYKEGHLSPDIVAEQKKLEAADLVIFQSKKAVLSITTGGSGSMYSLQGIHGDMNVILWPIQSGILHFCGFQVLEPQLTYSIGHTPADARIQILEGWKKRLENIWDETPLYFAPSSLFDLNFQAGFLMKKEFHSVTQVGVHAQPPCRDSLQHLGILGSPHQQEGSHQTQPLHLDFSASMAVRNSFSLYIAQLQVFC

SEQ ID NO: 8626 - protein, 37 aa, Homo sapiens
EEWITYSNSCYYIGKERRTWEERVCWPVLRRTLICFL

SEQ ID NO: 8627 - protein, 211 aa, Homo sapiens
KNADHLLHLKTKGPENIICSCISPCGSWIAYSTVSRFFLYRLNYEHDNISLKRVSKMPAFLRSALQILFSEDSTKLFVASNQGALHIVQLSGGSFKHLHAFQPQSGTVEAMCLLAVSPDGNWLAASGTSAGVHVYNVKQLKLHCTVPAYNFPVTAMAIAPNTNNLVIAHSDQQPLLFMDLLDERTLVAVERPLDDIIAQLPPPIKKKKFGT

SEQ ID NO: 8628 - protein, 48 aa, Homo sapiens
KCEKCGKTLTSGGHAEHEGKPYCNHPCYAAMFGPKGFGRGGAESHTFK

SEQ ID NO: 8629 - protein, 220 aa, Homo sapiens
MVISFYYGGKLVGQATTTCPEGCRLSLSQPGLPGTKLYGPEGLELVRFPPADAIPSERQRQVTRKLFGHLERGVLLHSSRQGVFVKRLCQGRVFCSGNAVVCKGRPNKLERDEVVQVFDTSQFFRELQQFYNSQGRLPDGRVVLCFGEEFPDMAPLRSKLILVQIEQLYVRQLAEEAGKSCGAGSVMQAPEEPPPDQVFRMFPDICASHQRSFFRENQQI

SEQ ID NO: 8630 - protein, 149 aa, Homo sapiens
MNPFWSMSTSSVRKRSEGEEKTLTGDVKTSPPRTAPKKQLPSIPKNALPITKPTSPAPAAQSTNGTHASYGPFYLEYSLLAEFTLVVKQKLPGVYVQPSYRSALMWFGVIFIRHGLYQDGVFKFTVYIPDNYPDGDCPRLVFDIPVFHP

SEQ ID NO: 8631 - protein, 330 aa, Homo sapiens
MSSTQFNKGPSYGLSAEVKNRLLSKYDPQKEAELRTWIEGLTGLSIGPDFQKGLKDGTILCTLMNKLQPGSVPKINRSMQNWHQLENLSNFIKAMVSYGMNPVDLFEANDLFESGNMTQVQVSLLALAGKGLDLGSLAALCWYSRPLSLTQAKTKGLQSGVDIGVKYSEKQERNFDDATMKAGQCVIGLQMGTNKCASQSGMTAYGTRRHLYDPKNHILPPMDHSTISLQMGTNKCASQVGMTAPGTRRHIYDTKLGTDKCDNSSMSLQMGYTQGANQSGQVFGLGRQIYDPKYCPQGTVADGAPSGTGDCPDPGEVPEYPPYYQEEAGY

SEQ ID NO: 8632 - protein, 316 aa, Homo sapiens
MSDSWVPNSASGQDPGGRRRAWAELLAGRVKREKYNPERAQKLKESAVRLLRSHQDLNALLLEVEGPLCKKLSLSKVIDCDSSEAYANHSSSFIGSALQDQASRLGVPVGILSAGMVASSVGQICTAPAETSHPVLLTVEQRKKLSSLLEFAQYLLAHSMFSRLSFCQELWKIQSSLLLEAVWHLHVQGIVSLQELLESHPDMHAVGSWLFRNLCCLCEQMEASCQHADVARAMLSDFVQMFVLRGFQKNSDLRRTVEPEKMPQVTVDVLQRMLIFALDALAAGVQEESSTHKIVRCWYVPEGGLPECAAGRCLPN

SEQ ID NO: 8633 - protein, 195 aa, Homo sapiens
MRSFKRVNFGTLLSSQKEAEELLPALKEFLSNPPAGFPSSRSDAERRQACDAILRACNQQLTAKLACPRHLGSLLELAELACDGYLVSTPQRPPLYLERILFVLLRNAAAQGSPEATLRLAQPLHACLVQCSREAAPQDYEAVARGSFSLLWKGAEALLERRAAFAARLKALSFLVLLEDESTPCEVPHFASPTA

SEQ ID NO: 8634 - protein, 41 aa, Homo sapiens
MASEKPLAAVTCTAPVNIAVIKYLEMGFHRVSQAGLKLLTS

SEQ ID NO: 8635 - protein, 845 aa, Homo sapiens
FEVLWSDSSITSVTKSSSEVTEFISKLCQLYPEENLEKLIPCLAGPDAFYVERNHVDLDSGLRYLASLPSHVLKNDHVRRFLSTSSPPQQLQSPSPGNPSLSKVGTVMGVSGRPVCGVAGIPSSQSGAQHHGQHPAGSAAPLPHCSHAGSAGSALAYRTQMDTSPAILMPSSLQTPQTQEQNGILDWLRKLRLHKYYPVFKQLSMEKFLSLTEEDLNKFESLTMGAKKKLKTQLELEKEKSERRCLNPSAPPLVTSSGVARVPPTSHVGPVQSGRGSHAAELRVEVEQPHHQLPREGSSSEYSSSSSSPMGVQAREESSDSAEENDRRVEIHLESSDKEKPVMLLNHFTSSSARPTAQVLPVQNEASSNPSGHHPLPPQMLSAASHITPIRMLNSVHKPERGSADMKLLSSSVHSLLSLEERNKGSGPRSSMKVDKSFGSAMMDVLPASAPHQPVQVLSGLSESSSMSPTVSFGPRTKVVHASTLDRVLKTAQQPALVVETSTAATGTPSTVLHAARPPIKLLLSSSVPADSAISGQTSCPNNVQISVPPAIINPRTALYTANTKVAFSAMSSMPVGPLQGGFCANSNTASPSSHPSTSFANMATLPSCPAPSSSPALSSVPESSFYSSSGGGGSTGNIPASNPNHHHHHHHQQPPAPPQPAPPPPGCIVCTSCGCSGSCGSSGLTVSYANYFQHPFSGPSVFTFPFLPFSPMCSSGYVSAQQYGGGSTFPVVHAPYSSSGTPDPVLSGQSTFAVPPMQNFMAGTAGVYQTQGLVGSSNGSSHKKSGNLSCYNCGATGHRAQDCKQPSMDFNRPGKRAPWPRPPGSRRTSAHKCLVFMKSKLLSL

SEQ ID NO: 8636 - protein, 125 aa, Homo sapiens
MDQKILSLAAEKTADKLQEFLQTLREGDLTNLLQNQAVKGKVAGALLRAIFKGSPCSEEAGTLRRRKIYTCCIQLVESGDLQKEIASEIIGLLMLEAHHFPGPLLVELANEFISAVREGSLVNGK

SEQ ID NO: 8637 - protein, 155 aa, Homo sapiens
MSSTVSYWILNSTRNSIATLQGGRRLYSRYVSNRNKLKWRLFSRVPPTLNSSPCGGFTLCKAYRHTSTEEDDFHLQLSPEQINEVLRAGETTHKILDLESRVPNSVLRFESNQLAANSPVEDRRGVASCLQTNGLMFGIFDGHGGHACAQAVSER

SEQ ID NO: 8638 - protein, 119 aa, Homo sapiens
MWLAKACWSIQSEMPCIQAQYGTPAPSPGPRDHLASDPLTPEFIKPTMDLASPEAAPAAPTALPSFSTFMDGYTGEFDTFLYQLPGTVQPCSSASSSASSTSSSSATSPASASFKFEDF

SEQ ID NO: 8639 - protein, 101 aa, Homo sapiens
MPRVVPDQRSKFENEEFFRKLSRECEIKYTGFRDRPHEERQARFQNACRDGRSEIVYLKAPMILNGVCVIWKGWIDLQRLDGMGCLEFDEERAQQEDALAQ

SEQ ID NO: 8640 - protein, 155 aa, Homo sapiens
MRGEQGAAGARVLQFTNCRILRGGKLLREDLWVRGGRILDPEKLFFEERRVADERRDCGGRILAPGFIDVQINGGFGVDFSQATEDVGSGVALVARRILSHGVTSFCPTLVTSPPEVYHKIPVKSGGPHGAGVLGLHLEGPFISREKRGAHPEAH

SEQ ID NO: 8641 - protein, 700 aa, Homo sapiens
RSTSGAEPESARARGAGAERGEHREGERGAAGIRCVAYNNQSNRLAVSRTDGTVEIYNLSANYFQEKFFPGHESRATEALCWAEGQRLFSAGLNGEIMEYDLQALNIKYAMDAFGGPIWSMAASPSGSQLLVGCEDGSVKLFQITPDKIQFERNFDRQKSRILSLSWHPSGTHIAAGSIDYISVFDVKSGSAVHKMIVDRQYMGVSKRKCIVWGVAFLSDGTIISVDSAGKVQFWDSATGTLVKSHLIANADVQSIAVADQEDSFVVGTAEGTVFHFQLVPVTSNSSEKQWVRTKPFQHHTHDVRTVAHSPTALISGGTDTHLVFRPLMEKVEVKNYDAALRKITFPHRCLISCSKKRQLLLFQFAHHLELWRLGSTVATGKNGDTLPLSKNADHLLHLKTKGPENIICSCISPCGSWIAYSTVSRFFLYRLNYEHDNISLKRVSKMPAFLRSALQILFSEDSTKLFVASNQGALHIVQLSGGSFKHLHAFQPQSGTVEAMCLLAVSPDGNWLAASGTSAGVHVYNVKQLKLHCTVPAYNFPVTAMAIAPNTNNLVIAHSDQQVFEYSIPDKQYTDWSRTVQKQGFHHLWLQRDTPITHISFHPKRPMHILLHDAYMFCIIDKSLPLPNDKTLLYNPFPPTNESDVIRRRTAHAFKISKIYKPLLFMDLLDERTLVAVERPLDDIIAQLPPPIKKKKFGT

SEQ ID NO: 8642 - protein, 66 aa, Homo sapiens
MAPVEHVVADAGAFLRHAALQDIGKNIYTIREVVTEIRDKATRRRLAVLPYELRFKEPLPEYVRLG

SEQ ID NO: 8643 - protein, 46 aa, Homo sapiens
RLPPSGSKPVAASTCSGKKTPRTGRHGANKENLELNGSILSGQPSS

SEQ ID NO: 8644 - protein, 218 aa, Homo sapiens
MPDYFSRRAGVFPMKPGDPGRRSDSRGHPCLDLRARMSRQVVRSSKFRHVFGQPAKADQCYEDVRVSQTTWDSGFCAVNPKFVALICEASGGGAFLVLPLGKTGRVDKNAPTVCGHTAPVLDIAWCPHNDNVIASGSEDCTVMVWEIPDGGLMLPLREPVVTLEGHTKRVGIVAWHTTAQNVLLSAGCDNVIMVWDVGTGAAMLTLGPEVHPDTIYSV

SEQ ID NO: 8645 - protein, 85 aa, Homo sapiens
DGSEPKLSKNELKRRLKAEKKVAEKEAKQKELSEKQLSQATAAATNHTTDNGVGPEEESVDPNVGSMPKELLGESSSSMIFEERG

SEQ ID NO: 8646 - protein, 36 aa, Homo sapiens
MDTGVIEGGLNVTLTIRLLMHGKEVGSIIGKKGESV

SEQ ID NO: 8647 - protein, 137 aa, Homo sapiens
MCVAQVLTAHLLPPRQALGSLCSPWAAPRVGPLPPAPAMVRISKPKTFQAYLDDCHRRYSCAHCRAHLANHDDLISKSFQGSQGRAYLFNSVVNVGCGPAEERVLLTGLHAVADIHCENCKTTLGWKYVSHPPLTPG

SEQ ID NO: 8648 - protein, 131 aa, Homo sapiens
MLTLASKLKRDDGLKGSRTAATASDSTRRVSVRDKLLVKEVAELEANLPCTCKVHFPDPNKLHCFQLTVTPDEGYYQGGKFQFETEVPDAYNMVDLLNFDDPLNIEAAEHHLRDKEDFRNKVDDYIKRYAR

SEQ ID NO: 8649 - protein, 68 aa, Homo sapiens
MDPNCSCAAGVSCTCASSCKCKECKCTSCKKSECGAISRNLGLWLRLGGNPRLSLSACFWGTGLPLSL

SEQ ID NO: 8650 - protein, 112 aa, Homo sapiens
MSSEPPPPPQPPTHQASVGLLDTPRSRERSPSPLRGNVVPSPLPTRRTRTFSATVRASQGPVYKGVCKCFCRSKGHGFITPADGGPDIFLHISDVEGEYVPVEGDEVTYKMC

SEQ ID NO: 8651 - protein, 189 aa, Homo sapiens
ASYRFRQERSVPTFKDGTRRSDYQLTIEPLLEQEADGAAPQLTASRLLQRRQIFSQKLVEHVKEHHKAFLASLSPAMVVPEDQLTRWHPRFNVDEVPDIEPAALPQPPATEKLTTAQEMEKALSQLALRSAAPSSPGSPRPALPATPPATPPAASPSALKGVSQDLLERIRAKEAQKQLAQMTRCPEQE

SEQ ID NO: 8652 - protein, 165 aa, Homo sapiens
LAWRPGERGAPASRPRLALLLLLLLLPLPSGAWYKHVASPRYHTVGRAAGLLMGLRRSPYLWRRALRAAAGPLARDTLSPEPAAREAPLLLPSWVQELWETRRRSSQAGIPVRAPRSPRAPEPALEPESLDFSGAGQRLRRDVSRPAVDPAANRLGLPCLAPGPF

SEQ ID NO: 8653 - protein, 38 aa, Homo sapiens
MVPLVAVVSGPRAQLFACLLRLGTQQVGPLQLHTGASH

SEQ ID NO: 8654 - protein, 203 aa, Homo sapiens
MCLDLAASWMKCPLDRAYLIKLSGLNKETYQSCLKSFECLLGLNSNIGIRDLAVQFSCIEAVNMASKILKSYESSLPQTQQVDLDLSRPLFTSAALLSACKILKLKVDKNKMVATSGVKKAIFDRLCKQLEKIGQQVDREPGDVATPPRKRKKIVVEAPAKEMEKVEEMPHKPQKDEDLTQDYEEWKRKILENAASAQKATAE

SEQ ID NO: 8655 - protein, 151 aa, Homo sapiens
MSKPHSEAGTAFIQTQQLHAAMADTFLEHMCRLDIDSPPITARNTGIICTIGPASRSVETLKEMIKSGMNVARLNFSHGTHEYHAETIKNVRTATESFASDPILYRPVAVALDTKGPEIRTGLIKGSGTAEVELKKGATLKITLDNAYMEK

SEQ ID NO: 8656 - protein, 328 aa, Homo sapiens
MCDRNGGRRLRQWLIEQIDSSMYPGLIWENEEKSMFRIPWKHAGKQDYNQEVDASIFKAWAVFKGKFKEGDKAEPATWKTRLRCALNKSPDFEEVTDRSQLDISEPYKVYRIVPEEEQKCKLGVATAGCVNEVTEMECGRSEIDELIKEPSVDDYMGMIKRSPSPPEACRSQLLPDWWAQQPSTGVPLVTGYTTYDAHHSAFSQMVISFYYGGKLVGQATTTCPEGCRLSLSQPGLPGTKLYGPEGLELVRFPPADAIPSERQRQVTRKLFGHLERGVLLHSSRQGVFVKRLCQGRVFCSGNAVVCKGRPNKLERDEVVQVFDTSQFF

SEQ ID NO: 8657 - protein, 50 aa, Homo sapiens
MVRMNVLADALKSINNAEKRGKRQVLIRPCSKVIVRFLTVMMKHELGKLL

SEQ ID NO: 8658 - protein, 215 aa, Homo sapiens
MDQKILSLAAEKTADKLQEFLQTLREGDLTNLLQNQAVKGKVAGALLRAIFKGSPCSEEAGTLRRRKIYTCCIQLVESGDLQKEIASEIIGLLMLEAHHFPGPLLVELANEFISAVREGSLVNGKSLELLPIILTALATKKENLAYGKGVLSGEECKKQLINTLCSGRWDQQYVIQLTSMFKDVPLTAEEVEFVVEKALSMFSKMNLQEIPPLVY

SEQ ID NO: 8659 - protein, 73 aa, Homo sapiens
MSKRSKFALITWIGENVSGLQRAKTGTDKTLVKEVVQNFAKEFVISDRKELEEDFIKSELKKAGGANYDAQTE

SEQ ID NO: 8660 - protein, 130 aa, Homo sapiens
MDPLGTRARECLAQHGPHHRGHRGHSWALHPVVLWCLLHCGGRVCVPAGVPPGEEEEGLHHGALGTEVHDRRGEAVRALYQELLCSGRPASPALGARRLPAGHHPWDRLPGHCERHLPTGGCAWRAVDAH

SEQ ID NO: 8661 - protein, 302 aa, Homo sapiens
MWLAKACWSIQSEMPCIQAQYGTPAPSPGPRDHLASDPLTPEFIKPTMDLASPEAAPAAPTALPSFSTFMDGYTGEFDTFLYQLPGTVQPCSSASSSASSTSSSSATSPASASFKFEDFQVYGCYPGPLSGPVDEALSSSGSDYYGSPCSAPSPSTPSFQPPQLSPWDGSFGHFSPSQTYEGLRAWTEQLPKASGPPQPPAFFSFSPPTGPSPSLAQSPLKLFPSQATHQLGEGESYSMPTAFPGLAPTSPHLEGSGILDTPVTSTKARSGAPGGSEGRCAVCGDNASCQHYGVRTCEGCKG

SEQ ID NO: 8662 - protein, 140 aa, Homo sapiens
KEHLQVFWDGSFWKLSQNISELKDGELWNKFFVRILNANDEATVSVLGELAAEMNGVFDTTFQSHLNKALWKGVPLPGLETSTSLQWRTQDPAAQKEQPRPAEDWPSKVPGLPSPQRLRERPSAGEESRGRGGRRRKTVE

SEQ ID NO: 8663 - protein, 285 aa, Homo sapiens
MLPAGCSRREPTGTRALKPPPGPETNGEDPLPACTPSPQDLKELEFLTQALEKAVRVRRGITKAGERDKAPSLKSRSIVTSSGTTASAPPHSPGQAGGHASDTRPTKGLRQTTVPAKGHPERRLLSVGDGTRVGMGARTPRPGAGLRDQQMAPSAAPQAPEAFTLKEKGHLLRLPAAFRKAASQNSSLWAQLSSTQTSDSTDAAAAKTQFLQNMQTASGGPQPRLSAVEVEAEAGRLRKACSLLRLRMREELSAAPMDWMQEYRCLLTLEGLQAMVGQCLHRLQE

SEQ ID NO: 8664 - protein, 141 aa, Homo sapiens
MLEPQENGVIDLPDYEHVEDETFPPFPPPASPERQDGEGTEPDEESGNGAPVRVPPKRTVKRNIPKLDAQRLISERGLPALRHVFDKAKFKGKGHEAEDLKMLIRHMEHWAHRLFPKLQFEDFIDRVEYLGSKKEVQVSVE

SEQ ID NO: 8665 - protein, 63 aa, Homo sapiens
MAPSRNGMVLKPHFHKDWQRRVATWFNQPARKIRRRWPGPSAFLWIRGGGTSPRSPCRPTCSG

SEQ ID NO: 8666 - protein, 185 aa, Homo sapiens
MDSCSLEIANWRNHQETLKYQFDAFYGERSTQQDIYAGSVQPILRHLLEGQNASVLAYGPTGAGKTHTMLGSPEQPGVIPRALMDLLQLTREEGAEGRPWALSVTMSYLEIYQEKVLDLLDPASGDLVIREDCRGNILIPGLSQKPISSFADFERHFLPASRNRTVGATRLNQRSSRSHAVLLVK

SEQ ID NO: 8667 - protein, 168 aa, Homo sapiens
MSKPHSEAGTAFIQTQQLHAAMADTFLEHMCRLDIDSPPITARNTGIICTIGPASRSVETLKEMIKSGMNVARLNFSHGTHEYHAETIKNVRTATESFASDPILYRPVAVALDTKGPEIRTGLIKGSGTAEVELKKGATLKITLDNAYMEKCDENILWLDYKNICKVV

SEQ ID NO: 8668 - protein, 433 aa, Homo sapiens
MGHCRLCHGKFSSRSLRSISERAPGASMERPSAEERVLVRDFQRLLGVAVRQDPTLSPFVCKSCHAQFYQCHSLLKSFLQRVNASPAGRRKPCAKVGAQPPTGAEEGACLAPSACTAWWGGCMDMRPAAGPCPTFRGHCPPSTAASSRSCGAATRATTTPWIPAPAARPSCWTVRWQSSGHGTKRRRHGCPSTEGGTLGMPLRPPRVEGQGPQLGLRPRPCPARMWPSLLRTATRWGPGRASHLSQACPFAGPQGSWVRSSFHLQPRMIGDVLSEDENDKKQNAQSSDESFEPYPERKVSGKKSESKEAKKSEEPRIRKKPGPKPGWKKKLRCEREELPTIYKCPYQGCTAVYRGADGMKKHIKEHHEEVRERPCPHPGCNKVFMIDRYLQRHVKLIHTEVRNYICDECGQTFKQRKHLLVHQMRHSGAKPLQ

SEQ ID NO: 8669 - protein, 71 aa, Homo sapiens
MSSEPPPPPQPPTHQASVGLLDTPRSRERSPSPLRGNVVPSPLPTRRTRTFSATVRASQGPVYKGVCKCFC

SEQ ID NO: 8670 - protein, 485 aa, Homo sapiens
MSKPHSEAGTAFIQTQQLHAAMADTFLEHMCRLDIDSPPITARNTGIICTIGPASRSVETLKEMIKSGMNVARLNFSHGTHEYHAETIKNVRTATESFASDPILYRPVAVALDTKGPEIRTGLIKGSGTAEVELKKGATLKITLDNAYMEKCDENILWLDYKNICKVVEVGSKIYVDDGLISLQVKQKGADFLVTEVENGGSLGSKKGVNLPGAAVDLPAVSEKDIQDLKFGVEQDVDMVFASFIRKASDVHEVRKVLGEKGKNIKIISKIENHEGVRRFDEILEASDGIMVARGDLGIEIPAEKVFLAQKMMIGRCNRAGKPVICATQMLESMIKKPRPTRAEGSDVANAVLDGADCIMLSGETAKGDYPLEAVRMQHLIAREAEAAMFHRKLFEELVRASSHSTDLMEAMAMGSVEASYKCLAAALIVLTESGRSAHQVARYRPRAPIIAVTRNPQTARQAHLYRGIFPVLCKDPVQEAWAED

SEQ ID NO: 8671 - protein, 170 aa, Homo sapiens
MACARPLISVYSEKGESSGKNVTLPAVFKAPIRPDIVNFVHTNLRKNNRQPYAVSELAGHQTSAESWGTGRAVARIPRVRGGGTHRSGQGAFGNMCRGGRMFAPTKTWRRWHRRVNTTQKRYAICSALAASALPALVMSKVEDKVEGYKKTKEAVLLLKKLKAWNDIKKV

SEQ ID NO: 8672 - protein, 167 aa, Homo sapiens
MGSELIGRLAPRLGLAEPDMLRKAEEYLRLSRVKCVGLSARTTETSSAVMCLDLAASWMKCPLDRAYLIKLSGLNKETYQSCLKSFECLLGLNSNIGIRDLAVQFSCIEAVNMASKILKSYESSLPQTQQVDLDLSRPLFTSAALLSACKRTWRCSYSTTEEKEDSG

SEQ ID NO: 8673 - protein, 164 aa, Homo sapiens
MFRNQYDNDVTVWSPQGRIHQIEYAMEAVKQGSATVGLKSKTHAVLVALKRAQSELAAHQKKILHVDNHIGISIAGLTADARLLCNFMRQECLDSRFVFDRPLPVSRLVSLIGSSILFMIWALTFSKPVHLLTILTAEPCPLEPVPNQLVLTWRDICLNLWSVI

SEQ ID NO: 8674 - protein, 151 aa, Homo sapiens
MSSTVSYWILNSTRNSIATLQGGRRLYSRYVSNRNKLKWRLFSRVPPTLNSSPCGGFTLCKAYRHTSTEEDDFHLQLSPEQINEVLRAGETTHKILDLESRVPNSVLRFESNQLAANSPVEDRRGVASCLQTNGLMFGIFDGHGGHACAQA

SEQ ID NO: 8675 - protein, 156 aa, Homo sapiens
MAMFRSLVASAQQRQPPAGPAGGDSGLEAQYTCPICLEVQEQMANCPKFVPVVPTSQPIPSNIPNRSTFACPYCGARNLDQQELVKHCVESHRSDPNRVVCPICSAMPWGDPSYKSANFLQHLLHRHKFSYDTFVDYSIDEEAAFQAALALSLSEN

SEQ ID NO: 8676 - protein, 165 aa, Homo sapiens
MRVHISSCLKVQEQMANCPKFVPVVPTSQPIPSNIPNRSTFACPYCGARNLDQQELVKHCVESHRSDPNRVVCPICSAMPWGDPSYKSANFLQHLLHRHKFSYDTFVVGIPPAPSSPTPSSSTLLLLGPLASLRVRRVQRKPETEASFQVATFPQVLWGLPAGGE

SEQ ID NO: 8677 - protein, 294 aa, Homo sapiens
MLEPQENGVIDLPDYEHVEDETFPPFPPPASPERQDGEGTEPDEESGNGAPVRVPPKRTVKRNIPKLDAQRLISERGLPALRHVFDKAKFKGKGHEAEDLKMLIRHMEHWAHRLFPKLQFEDFIDRVEYLGSKKEVQTCLKRIRLDLPILHEDFVSNNDEVAENNEHDVTSTELDPFLTNLSESEMFASELSRSLTEEQQQRIERNKQLALERRQAKLLSNSQTLGNDMLMNTPRAHTVEEVNTDEDQKEESNGLNEDILDNPCNDAIANTLNEEETLLDQSFKNVQQQLDATS

SEQ ID NO: 8678 - protein, 82 aa, Homo sapiens
MSKPHSEAGTAFIQTQQLHAAMADTFLEHMCRLDIDSPPITARNTGIICTIGPASRSVETLKEMIKSGMNVARLNFSHGTHE

SEQ ID NO: 8679 - protein, 171 aa, Homo sapiens
MACARPLISVYSEKGESSGKNVTLPAVFKAPIRPDIVNFVHTNLRKNNRQPYAVSELAGHQTSAESWGTGRAVARIPRVRGGGTHRSGQGAFGNMCRGGRMFAPTKTWRRWHRRKNPLKNLRIMLKLNPYAKTMRRNTILRQARNHKLRVDKAAAAAAALQAKSDEKAAVA

SEQ ID NO: 8680 - protein, 75 aa, Homo sapiens
MATVLKTIVLIPCIGVLEQNNFSLNRRMQKARHCGHCPEEWITYSNSCYYIGKERRTWEERVCWPVLRRTLICFL

SEQ ID NO: 8681 - protein, 165 aa, Homo sapiens
MSRQVVRSSKFRHVFGQPAKADQCYEDVRVSQTTWDSGFCAVNPKFVALICEASGGGAFLVLPLGKTGRVDKNAPTVCGHTAPVLDIAWCPHNDNVIASGSEDCTVMVWEIPDGGLMLPLREPVVTLEGHTKRVGIVAWHTTAQNVLLSAGCDNVIMVWDVGTGA

SEQ ID NO: 8682 - protein, 39 aa, Homo sapiens
MDPNCSCATGCCSCCPVGCAKCAQGCVCKGASEKCSCCA

SEQ ID NO: 8683 - protein, 382 aa, Homo sapiens
MATRRLTDAFLLLRNNSIQNRQLLAEQVSSHITSSPLHSRSIAAELDELADDRMALVSGISLDPEAAIGVTKRPPPKWVDGVDEIQYDVGRIKQKMKELASLHDKHLNRPTLDDSSEEEHAIEITTQEITQLFHRCQRAVQALPSRARACSEQEGRLLGNVVASLAQALQELSTSFRHAQSGYLKRMKNREERSQHFFDTSVPLMDDGDDNTLYHRGFTEDQLVLVEQNTLMVEEREREIRQIVQSISDLNEIFRDLGAMIVEQGTVLDRIDYNVEQSCIKTEDGLKQLHKDFSHVEGLLSQSLRLWKSYYICQGMALVSHPLGRSSSCLSPLECRVPVCNVFANRKKSERSSYTLACSVPGTGGKKNNKKSKRPAFRMLKL

SEQ ID NO: 8684 - protein, 185 aa, Homo sapiens
ASSEIVCQLFQASQAVSKQQVFSVQKGLNDTMRYILIDWLVEVATMKDFTSLCLHLTVECVDRYLRRRLVPRYRLQLLGIACMVICTRFISKEILTIREAVWLTDNTYKYEDLVRMMGEIVSALEGKIRPWSRRPRLHHVAICAGALRVQHRREHHPGQTLRWACMRHCTKEPPSAESPHPVPAV

SEQ ID NO: 8685 - protein, 73 aa, Homo sapiens
MVPLVAVVSGPRAQLFACLLRLGTQQVGPLQLHTGASHAARNHYEVLVLGGGSGGITMAARMKRKVGAENVAI

SEQ ID NO: 8686 - protein, 75 aa, Homo sapiens
MVRISKPKTFQAYLDDCHRRYSCAHCRAHLANHDDLISKSFQGSQGRAYLFNSVNRPLRAARSTKRGSTSLNSTT

SEQ ID NO: 8687 - protein, 93 aa, Homo sapiens
MAEAHQAVAFQFTVTPDGIDLRLSHEALRQIYLSGLHSWKKKFIRFKNGIITGVYPASPSSWLIVVVGVMTTMYAKIDPSLGIIAKINRTLET

SEQ ID NO: 8688 - protein, 157 aa, Homo sapiens
MQKMVKEHYKTFEKGHIRDITDSLIEHCQEKQLDENANVQLSDEKIINIVLDLFGAGFDTVTTAISWSLMYLVMNPRVQRKIQEELDTVIGRSRRPRLSDRSHLPYMEAFILETFRHSSFVPFTIPHSTTRDTSLKGFYIPKGRCVFVNQWQINHDQ

SEQ ID NO: 8689 - protein, 54 aa, Homo sapiens
MPVRNVYKKEKARVITEEEKNFKAFASLRMARANARLFGIRAKRAKEAAEQDVE

SEQ ID NO: 8690 - protein, 199 aa, Homo sapiens
WFHGMLSRLKAAQLVLTGGTGSHGVFLVRQSETRRGEYVLTFNFQGKAKHLRLSLNEEGQCRVQHLWFQSIFDMLEHFRVHPIPLESGGSSDVVLVSYVPSSQRQQGEQSRSAGEEVPVHPRSENRPPPMTHPSPLNPLHGQIPHSLGQKRRRGRQKWRQQQPQQPKRGKRKRKRAVEGSRKSWSPWLSWSPWLNWKRP

SEQ ID NO: 8691 - protein, 162 aa, Homo sapiens
MSKPHSEAGTAFIQTQQLHAAMADTFLEHMCRLDIDSPPITARNTGIICTIGPASRSVETLKEMIKSGMNVARLNFSHGTHEYHAETIKNVRTATESFASDPILYRPVAVALDTKGPEIRTGLIKGSGTAEVELKKGATLKITLDNAYMEKCDENILWLDYK

SEQ ID NO: 8692 - protein, 124 aa, Homo sapiens
MSSEPPPPPQPPTHQASVGLLDTPRSRERSPSPLRGNVVPSPLPTRRTRTFSATVRASQGPVYKGVCKCFCRSKGHGFITPADGGPDIFLHISDVEGEYVPVEGDEVTYKMCSIPPKNEKLQAV

SEQ ID NO: 8693 - protein, 49 aa, Homo sapiens
MVRMNVLADALKSINNAEKRGKRQVLIRPCSKVIVRFLTVMMKHVSYLL

SEQ ID NO: 8694 - protein, 103 aa, Homo sapiens
MSSTVSYWILNSTRNSIATLQGGRRLYSRYVSNRNKLKWRLFSRVPPTLNSSPCGGFTLCKAYRHTSTEEDDFHLQLSPEQINEVLRAGETTHKILDLESRVP

SEQ ID NO: 8695 - protein, 298 aa, Homo sapiens
MSSTQFNKGPSYGLSAEVKNRLLSKYDPQKEAELRTWIEGLTGLSIGPDFQKGLKDGTILCTLMNKLQPGSVPKINRSMQNWHQLENLSNFIKAMVSYGMNPVDLFEANDLFESGNMTQAKTKGLQSGVDIGVKYSEKQERNFDDATMKAGQCVIGLQMGTNKCASQSGMTAYGTRRHLYDPKNHILPPMDHSTISLQMGTNKCASQVGMTAPGTRRHIYDTKLGTDKCDNSSMSLQMGYTQGANQSGQVFGLGRQIYDPKYCPQGTVADGAPSGTGDCPDPGEVPEYPPYYQEEAGY

SEQ ID NO: 8696 - protein, 17 aa, Homo sapiens
KFPEPQEVVEELKKYLS

SEQ ID NO: 8697 - protein, 252 aa, Homo sapiens
MDQKILSLAAEKTADKLQEFLQTLREGDLTNLLQNQAVKGKVAGALLRAIFKGSPCSEEAGTLRRRKIYTCCIQLVESGDLQKEIASEIIGLLMLEAHHFPGPLLVELANEFISAVREGSLVNGKSLELLPIILTALATKKENLAYGKGVLSGEECKKQLINTLCSGRWDQQYVIQLTSMFKDVPLTAEEVEFVVEKALSMFSKMNLQEIPPLVYQLLVLSSKGSRKSVLEGIIAFFSALDKQHNEEQSGDE

SEQ ID NO: 8698 - protein, 126 aa, Homo sapiens
MCDRNGGRRLRQWLIEQIDSSMYPGLIWENEEKSMFRIPWKHAGKQDYNQEVDASIFKAWAVFKGKFKEGDKAEPATWKTRLRCALNKSPDFEEVTDRSQLDISEPYKVYRIVPEEEQKCNYPLWA

SEQ ID NO: 8699 - protein, 51 aa, Homo sapiens
MASEKPLAAVTCTAPVNIAVIKYWSPGACPLAITELSKSSIIDSHESGQAR

SEQ ID NO: 8700 - protein, 116 aa, Homo sapiens
MLEPQENGVIDLPDYEHVEDETFPPFPPPASPERQDGEGTEPDEESGNGAPVRVPPKRTVKRNIPKLDAQRLISERGLPALRHVFDKAKFKGKGHEAEDLKMLIRHMEHWAHRLFP

SEQ ID NO: 8701 - protein, 136 aa, Homo sapiens
MNPFWSMSTSSVRKRSEGEEKTLTGDVKTSPPRTAPKKQLPSIPKNALPITKPTSPAPAAQSTNGTHASYGPFYLEYSLLAEFTLVVKQKLPGVYVQPSYRSALMWFGVIFIRHGLYQDGVFKFTVYIPDNYPDGD

SEQ ID NO: 8702 - protein, 261 aa, Homo sapiens
MSSTQFNKGPSYGLSAEVKNRLLSKYDPQKEAELRTWIEGLTGLSIGPDFQKGLKDGTILCTLMNKLQPGSVPKINRSMQNWHQLENLSNFIKAMVSYGMNPVDLFEANDLFESGNMTQVQVSLLALAGKAKTKGLQSGVDIGVKYSEKQERNFDDATMKAGQCVIGLQMGTNKCASQSGMTAYGTRRHLYDPKNHILPPMDHSTISLQMGTNKCASQDLTLLSRLECSGTISAHCNLCLPGSRDSPSCLSLPSSWDYRWA

SEQ ID NO: 8703 - protein, 75 aa, Homo sapiens
MARYEEVSVSGFEEFHRAVEQHNGKTIFAYFTGSKDAGGKSWCPDCVQAEPVVREGLKHISEGCVFIYCQVGEKP

SEQ ID NO: 8704 - protein, 495 aa, Homo sapiens
MVADRVEVYSRSAAPGSLGYQWLSDGSGVFEIAEASGVRTGTKIIIHLKSDCKEFSSEARVRDVVTKYSNFVSFPLYLNGRRMNTLQAIWMMDPKDVREWQHEEFYRYVAQAHDKPRYTLHYKTDAPLNIRSIFYVPDMKPSMFDVSRELGSSVALYSRKVLIQTKATDILPKWLRFIRGVVDSEDIPLNLSRELLQESALIRKLRDVLQQRLIKFFIDQSKKDAEKYAKFFEDYGLFMREGIVTATEQEVKEDIAKLLRYESSALPSGQLTSLSEYASRMRAGTRNIYYLCAPNRHLAEHSPYYEAMKKKDTEVLFCFEQFDELTLLHLREFDKKKLISVETDIVVDHYKEEKFEDRSPAAECLSEKETEELMAWMRNVLGSRVTNVKVTLRLDTHPAMVTVLEMGAARHFLRMQQLAKTQEERAQLLQPTLEINPRHALIKKLNQLRASEPGLAQLLVDQIYENAMIAAGLVDDPRAMVGRLNELLVKALERH

SEQ ID NO: 8705 - protein, 274 aa, Homo sapiens
MSCPVPACCALLLVLGLCRARPRNALLLLADRALSVSHLTQRMTEALRVARTTTAPSPPRTWTPWPAAASSFAMPSPRSAAALPAAPASSLACPSIRMGCTGCTRTCTTSTPSTRCGACRCCSAKLVCAQASSGRSTWGRRPCTRLTLRTRRRMAPSSRWGGTSLELSCSSGNSCRLRMTGLSSSTSPSTTPTAVGTPSPSTEPSVRSLATERAAWVVSQTGPPRPTTHWTCWCLTSSPTPRQPEPTWPLSTPPSAAWTKELDWCSRSCVTPVS

SEQ ID NO: 8706 - protein, 141 aa, Homo sapiens
MEGDFSVCRNCKRHVVSANFTLHEAYCLRFLVLCPECEEPVPKETMEEHCKLEHQQVGCTMCQQSMQKSSLEFHKANECQERPVECKFCKLDMQLSKLELHESYCGSRTELCQGCGQFIMHRMLAQHRDVCRSEQAQLGKG

SEQ ID NO: 8707 - protein, 32 aa, Homo sapiens
TTEERRKVGNNLQRLLEMVATHVGSVERRMLG

SEQ ID NO: 8708 - protein, 35 aa, Homo sapiens
MAGGAWGRLACYLEFLKKEELKEFQLLLANKAHSR

SEQ ID NO: 8709 - protein, 164 aa, Homo sapiens
MEGDFSVCRNCKRHVVSANFTLHEAYCLRFLVLCPECEEPVPKETMEEHCKLEHQQVGCTMCQQSMQKSSLEFHKANECQERPVECKFCKLDMQLSKLELHESYCGSRTELCQGCGQFIMHRMLAQHRDVCRSEQAQLGKETSPDPGKCLSITVAAALSAHLWP

SEQ ID NO: 8710 - protein, 38 aa, Homo sapiens
MDDREDLVYQAKLAEQAERYDGEEQNKEALQDVEDENQ

SEQ ID NO: 8711 - protein, 361 aa, Homo sapiens
MHRAVDPPGARAAREAFALGGLSCAGAWSSCPPHPPPRSAWLPGGRCSASIGQPPLPAPLPPSHGSSSGHPSKPYYAPGAPTPRPLHGKLESLHGCVQALLREPAQPGLWEQLGQLYESEHDSEEATRCYHSALRYGGSFAELGPRIGRLQQAQLWNFHTGSCQHRAKVLPPLEQVWNLLHLEHKRNYGAKRGGPPVKRAAEPPVVQPVPPAALSGPSGEEGLSPGGKRRRGCNSEQEQRHSLPHPYPYPAPAYTAHPPGHRLVPAAPPGPGPRPPGAESHGCLPATRPPGSDLRESRVQRSRMDSSVSPAATTACVPYAPSRPPGLPGTTTSSSSSSSSNTGLRGVEPNPGIPGADHYQT

SEQ ID NO: 8712 - protein, 71 aa, Homo sapiens
MVPFGPFAFMPGKLVHTNEVTVLLGDNWFAKCSAKQAVGLVEHRKEHVRKTIDDLKKVMKNFESRVEFTED

SEQ ID NO: 8713 - protein, 33 aa, Homo sapiens
MTFVNCHGAGGSVAVRKTRVRPRRRLGFGKMSV

SEQ ID NO: 8714 - protein, 274 aa, Homo sapiens
MPMPTEGTPPPLSGTPIPVPAYFRHAEPGFSLKRPRGLSRSLPPPPPAKGSIPISRLFPPRTPGWHQLQPRRVSFRGEASETLQSPGYDPSRPESFFQQSFQRLSRLGHGSYGEVFKVRSKEDGRLYAVKRSMSPFRGPKDRARKLAEVGSHEKVGQHPCCVRLEQAWEEGGILYLQTELCGPSLQQHCEAWGASLPEAQVWGYLRDTLLALAHLHSQGLVHLDVKPANIFLGPRGRCKLGDFGLLVELGTAGAGEVQEGDPRYMAPELLQGSY

SEQ ID NO: 8715 - protein, 320 aa, Homo sapiens
HFPAIQYAVLYTLYSHCTRHDHFISSSLSSSSPSLFDGAVISTVTTATKKHFSIILNLLGILLKKDNLNQDTRKLLMTWALEAAVLMKKSETYAPLFSLPSFHKFCKGLLANTLVEDVNICLQACSSLHALSSSLPDDLLQRCVDVCRVQLVHSGTRIRQAFGKLLKSIPLDVVLSNNNHTEIQEISLALRSHMSKAPSNTFHPQDFSDVISFILYGNSHRTGKDNWLERLFYSCQRLDKRDQSTIPRNLLKTDAVLWQWAIWEAAQFTVLSKLRTPLGRAQDTFQTIEGIIRSLAAHTLNPDQDVSQWTTADNDEGHGH

SEQ ID NO: 8716 - protein, 9 aa, Homo sapiens
MSGGWELEL

SEQ ID NO: 8717 - protein, 92 aa, Homo sapiens
DSASASLSSAAATGTSTSTPAAPTARKQLDKEQVRKAVDALLTHCKSRKNNYGLLLNENESLFLMVVLWKIPSKELRVRLDEILRCCPAGVQ

SEQ ID NO: 8718 - protein, 66 aa, Homo sapiens
MCAQYCISFADVEKAHINIRDSIHLTPVLTSSILNQLTGRNLFFKCELFQKTGSFKIRGALNAVRS

SEQ ID NO: 8719 - protein, 147 aa, Homo sapiens
MLERPPALAMPMPTEGTPPPLSGTPIPVPAYFRHAEPGFSLKRPRGLSRSLPPPPPAKGSIPISRLFPPRTPGWHQLQPRRVSFRGEASETLQSPGYDPSRPESFFQQSFQRLSRLGHGSYGEVFKVRSKEDGRLYAVKRSMSPFRG

SEQ ID NO: 8720 - protein, 382 aa, Homo sapiens
MGDDQEDDFPRRLSESMEDLSLDLGALQGSEYLQDLGLGAPSHSQPGETPDSRPTGEEPGRDSLFSSLAGSQDLSRRRSWERSRSCSESWRRLSLDASAVDEEPCLPRTLASLALNLPGGGLKTWTQGCLSGGGTPAESPGKECDSPKKRGRSRSVPVSFYEIRSPEISPGLEVPTPPVQGLEPPVLECMEKDHVEPDHVLIVQQVLQELRQYHGARQRACMSASPGGAHSNLTWFEFLSESEDGAGKNEKSDKSTSVKRRLSCLRSRVTRQKEKGKSPAHLKDKGQDARERRECVNGHQLLQGTFSGPSSCPLCGKPFLSSGKSGGPIHPPGGQPLSLLHVLSIILLGSLLMCASSFCFALSSAAPWREPGISPWAQGPLG

SEQ ID NO: 8721 - protein, 314 aa, Homo sapiens
MIRNGRGAAGGAEQPGPGGRRAVRVWCDGCYDMVHYGHSNQLRQARAMGDYLIVGVHTDDDITLTVDGRDTYEEVKQAGRYRECKRTQGVSTTDLVGRMLLVTKAHHSSQEMSSEYREYADSFGKCPGGRNPWTGVSQFLQTSQKIIQFASGKEPQPGETVIYVAGAFDLFHIGHVDFLEKVHRLAERPYIIAGLHFDQEVNHYKGKNYPIMNLHERTLSVLACRYVSEVVIGAPYAVTAELLSHFKVDLVCHGKTEIIPDRDGSDPYQEPKRRGIFRQIDSGSNLTTDLIVQRIITNRLEYEARNQKKEAKEL

SEQ ID NO: 8722 - protein, 490 aa, Homo sapiens
MPMPTEGTPPPLSGTPIPVPAYFRHAEPGFSLKRPRGLSRSLPPPPPAKGSIPISRLFPPRTPGWHQLQPRRVSFRGEASETLQSPGYDPSRPESFFQQSFQRLSRLGHGSYGEVFKVRSKEDGRLYAVKRSMSPFRGPKDRARKLAEVGSHEKVGQHPCCVRLEQAWEEGGILYLQTELCGPSLQQHCEAWGASLPEAQVWGYLRDTLLALAHLHSQGLVHLDVKPANIFLGPRGRCKLGDFGLLVELGTAGAGEVQEGDPRYMAPELLQGSYGTAADVFSLGLTILEVACNMELPHGGEGWQQLRQGYLPPEFTAGLSSELRSVLVMMLEPDPKLRATAEALLALPVLRQPRAWGVLWCMAAEALSRGWALWQALLALLCWLWHGLAHPASWLQPLGPPATPPGSPPCSLLLDSSLSSNWDDDSLGPSLSPEAVLARTVGSTSTPRSRCTPRDALDLSDINSEPPRGSFPSFEPRNLLSLFEDTLDPT

SEQ ID NO: 8723 - protein, 153 aa, Homo sapiens
MQSFREQSSYHGNQQSYPQEVHGSSRLEEFSPRQAQMFQNFGGTGGSSGSSGSGSGGGRRGAAAAAAAMASETSGHQGYQGFRKEAGDFYYMAGNKDPVTTGTPQPPQRRPSGPVQSYGPPQGSSFGNQYGSEGHVGQFQAQHSGLGGVSHYQ

SEQ ID NO: 8724 - protein, 368 aa, Homo sapiens
MAAHRPGPLKQQNKAHKGGRHRGRGSAQRDGKGRLALKTLSKKVRKELSRVDQRHRASQLRKQKKEAVLAEKRQLGGKDGPPHQVLVVPLHSRISLPEAMQLLQDRDTGTVHLNELGNTQNFMLLCPRLKHRWFFTSARPGDLHVVLDMAKVADTILFLLDPLEGWDSTALAVQGISGLPLKKQIDTRKKLSKAVEKRFPHDKLLLLDTQQEAGMLLRQLANQKQQHLAFRDRRAYLFAHAVDFVPSEENNLVGTLKISGYVRGQTLNVNRLLHIVGYGDFQMKQIDAPGDPFPLNPRGIKPQKDPDMAMEICATDAVDDMEEGLKVLMKADPGRQESLQAEVIPDPMEGEQTWPTEEELSEAKGQYW

SEQ ID NO: 8725 - protein, 215 aa, Homo sapiens
MPRERRERDAKERDTMKEDGGAEFSARSRKRKANVTVDPDEEMAKIDRTARDQCGSQPWDNNAVCADPCSLIPTPDKEDDDRVYPNSTCKPRIIAPSRGSPLPVLSWANREEVWKIMLNKEKTYLRDQHFLEQHPLLQPKMRAILLDWLMEVCEVYKLHRETFYLAQDFFDRYMATQENVVKTLLQLIGISSLFIAAKLEEIYPPKLHQFAYVTD

SEQ ID NO: 8726 - protein, 367 aa, Homo sapiens
MIRNGRGAAGGAEQPGPGGRRAVRVWCDGCYDMVHYGHSNQLRQARAMGDYLIVGVHTDEEIAKHKGPPVFTQEERYKMVQAIKWVDEVVPAAPYVTTLETLDKYNCDFCVHGNDITLTVDGRDTYEEVKQAGRYRECKRTQGVSTTDLVGRMLLVTKAHHSSQEMSSEYREYADSFGKCPGGRNPWTGVSQFLQTSQKIIQFASGKEPQPGETVIYVAGAFDLFHIGHVDFLEKVHRLAERPYIIAGLHFDQEVNHYKGKNYPIMNLHERTLSVLACRYVSEVVIGAPYAVTAELLSHFKEPKRRGIFRQIDSGSNLTTDLIVQRIITNRLEYEARNQKKEAKELAFLEAARQQAAQPLGERDGDF

SEQ ID NO: 8727 - protein, 47 aa, Homo sapiens
MEDSASASLSSAAATGTSTSTPAAPTARKQLDKEQDFQKNCQRSGRA

SEQ ID NO: 8728 - protein, 62 aa, Homo sapiens
MTKAGSKGGNLRDKLDGNELDLSLSDLNEVPVKELVSIVPRGPGAHLRRALAPTWATYFPLL

SEQ ID NO: 8729 - protein, 183 aa, Homo sapiens
MPTWFCSRAWFSHVGPFNEGGQGVPEDLLFFYEHLRKGGGVIRVDQSLLLYRHHPQAATHCVLETTIWTHRVRFLEEQALPRWAAFTIWNAGKQGRRLYRSLTAGSQRKVVAFCDVDENKIRKGFYCHEDSQERPKPRIPILHFRAARPPFVICVKLDLTGGAFEDNLRSLHLQEGQDFLHFS

SEQ ID NO: 8730 - protein, 215 aa, Homo sapiens
SLYSEKEVYSRSAAPGSLGYQWLSDGSGVFEIAEASGVRTGTKIIIHLKSDCKEFSSEARVRDVVTKYSNFVSFPLYLNGRRMNTLQAIWMMDPKDVREWQHEEFYRYVAQAHDKPRYTLHYKTDAPLNIRSIFYVPDMKPSMFDVSRELGSSVALYSRKVLIQTKATDILPKWLRFIRGVVDSEDIPLNLSRELLQESALIRKLRDVLQQRLIK

SEQ ID NO: 8731 - protein, 111 aa, Homo sapiens
MVRMNVLADALKSINNAEKRGKRQVLIRPCSKVIVRFLTVMMKHGYIGEFEIIDDHRAGKIVVNLTGRLNKVGVQWHDLGYCNLCLPGSSDSPASASLVAEITVWGDQPQI

SEQ ID NO: 8732 - protein, 58 aa, Homo sapiens
RHALIKKLNQLRASEPGLAQLLVDQIYENAMIAAGLVDDPRAMVGRLNELLVKALERH

SEQ ID NO: 8733 - protein, 107 aa, Homo sapiens
ADRVEVYSRSAAPGSLGYQWLSDGSGVFEIAEASGVRTGTKIIIHLKSDCKEFSSEARVRDVVTKYSNFVSFPLYLNGRRMNTLQEPVQGQALHWLRPARWWRRRAW

SEQ ID NO: 8734 - protein, 177 aa, Homo sapiens
MELGPLEGGYLELLNSDADPLCLYHFYDQMDLAGEEEIELYSEPDTDTINCDQFSRLLCDMEGDEETREAYANIAELDQYVFQDSQLEGLSKDIFKHIGPDEVIGESMEMPAEVGQKSQKRPFPEELPADLKHWKPAEPPTVVTGSLLVGPVSDCSTLPCLPLPALFNQEPASGQMR

SEQ ID NO: 8735 - protein, 1071 aa, Homo sapiens
MTSPAKFKKDKEIIAEYDTQVKEIRAQLTEQMKCLDQQCELRVQLLQDLQDFFRKKAEIEMDYSRNLEKLAERFLAKTRSTKDQQFKKDQNVLSPVNCWNLLLNQVKRESRDHTTLSDIYLNNIIPRFVQVSEDSGRLFKKSKEVGQQLQDDLMKVLNELYSVMKTYHMYNADSISAQSKLKEAEKQEEKQIGKSVKQEDRQTPRSPDSTANVRIEEKHVRRSSVKKIEKMKEKRQAKYTENKLKAIKARNEYLLALEATNASVFKYYIHDLSDLIDQCCDLGYHASLNRALRTFLSAELNLEQSKHEGLDAIENAVENLDATSDKQRLMEMYNNVFCPPMKFEFQPHMGDMASQLCAQQPVQSELVQRCQQLQSRLSTLKIENEEVKKTMEATLQTIQDIVTVEDFDVSDCFQYSNSMESVKSTVSETFMSKPSIAKRRANQQETEQFYFTKMKEYLEGRNLITKLQAKHDLLQKTLGESQRTDCSLARRSSTVRKQDSSQAIPLVVESCIRFISRHGLQHEGIFRVSGSQVEVNDIKNAFERGEDPLAGDQNDHDMDSIAGVLKLYFRGLEHPLFPKDIFHDLMACVTMDNLQERALHIRKVLLVLPKTTLIIMRYLFAFLNHLSQFSEENMMDPYNLAICFGPSLMSVPEGHDQVSCQAHVNELIKTIIIQHENIFPSPRELEGPVYSRGGSMEDYCDSPHGETTSVEDSTQDVTAEHHTSDDECEPIEAIAKFDYVGRTARELSFKKGASLLLYQRASDDWWEGRHNGIDGLIPHQYIVVQDTEDGVVERSSPKSEIEVISEPPEEKVTARAGASCPSGGHVADIYLANINKQRKRPESGSIRKTFRSDSHGLSSSLTDSSSPGVGASCRPSSQPIMSQSLPKEGPDKCSISGHGSLNSISRHSSLKNRLDSPQIRKTATAGRSKSFNNHRPMDPEVIAQDIEATMNSALNELRELERQSSVKHTPDVVLDTLEPLKTSPVVAPTSEPSSPLHTQLLKDPEPAFQRSASTAGDIACAFRPVKSVKMAAPVKPPATRPKPTVFPKTNATSPGVNSSTSPQSTDKSCTV

SEQ ID NO: 8736 - protein, 43 aa, Homo sapiens
MEDSASASLSSAAATGTSTSTPAAPTARKQLDKEQVKRQWTLS

SEQ ID NO: 8737 - protein, 105 aa, Homo sapiens
MYTLLVGKPPFETSCLKETYLRIKKNEYSIPKHINPVAASLIQKMLQTDPTARPTINELLNDEFFTSGYIPARLPITCLTIPPRFSIAPSSLDPSNRKPLTVLNK

SEQ ID NO: 8738 - protein, 176 aa, Homo sapiens
MADSAQAQKLVYLVTGGCGFLGEHVVRMLLQREPRLGELRVFDQHLGPWLEELKTGPVRVTAIQGDVTQAHEVAAAVAGAHVVIHTAGLVDVFGRASPKTIHEVNVQGTRNVIEACVQTGTRFLVYTSSMEVVGPNTKGHPFYRGNEDTPYEAVHRHPYPCSKALAEWLVLEANGR

SEQ ID NO: 8739 - protein, 105 aa, Homo sapiens
ARPRNALLLLADDGGFESGAYNNSAIATPHLDALARRSLLFRNAFTSVSSCSPSRASLLTGLPQHQNGMYGLHQDVHHFNSFDKVRSLPLLLSQAGVRTGGAEHH

SEQ ID NO: 8740 - protein, 61 aa, Homo sapiens
MAKYLAQIIVMGVQVVGRAFARALRQEFAGVSHQLGRPRVKCGLLRTERSPTCPHSQPGRS

SEQ ID NO: 8741 - protein, 172 aa, Homo sapiens
MRCLAPRPAGSYLSEPQGSSQCATMELGPLEGGYLELLNSDADPLCLYHFYDQMDLAGEEEIELYSEPDTDTINCDQFSRLLCDMEGDEETREAYANIAELDQYVFQDSQLEGLSKDIFKHIGPDEVIGESMEMPAEVGQKSQKRPFPEELPADLKHWKPALRVEALGSCSA

SEQ ID NO: 8742 - protein, 205 aa, Homo sapiens
MESVALYSFQATESDELAFNKGDTLKILNMEDDQNWYKAELRGVEGFIPKNYIRVKPHPWYSGRISRQLAEEILMKRNHLGAFLIRESESSPGEFSVSVNHLGPALPRPSLTSQPRTPRSSASAVATSLRSWSAQTPTGGGAGPAGALASSHGVTCSPCTCEQPGGRSGQRAFLQELRSREDMDTPSSVRVTRGSVDGLGLNVGS

SEQ ID NO: 8743 - protein, 286 aa, Homo sapiens
MIRNGRGAAGGAEQPGPGGRRAVRVWCDGCYDMVHYGHSNQLRQARAMGDYLIVGVHTDEEIAKHKGPPVFTQEERYKMVQAIKWVDEVVPAAPYVTTLETLDKYNCDFCVHGNDITLTVDGRDTYEEVKQAGRYRECKRTQGVSTTDLVGRMLLVTKAHHSSQCPGGRNPWTGVSQFLQTSQKIIQFASGKEPQPGETVIYVAGAFDLFHIGHVDFLEKVHRLAERPYIIAGLHFDQEVNHYKGKNYPIMNLHERTLSVLACRYVSEVVIGAPYAVTAELLSHFK

SEQ ID NO: 8744 - protein, 219 aa, Homo sapiens
MADSAQAQKLVYLVTGGCGFLGEHVVRMLLQREPRLGELRVFDQHLGPWLEELKTGSCWGSLWWRGCGRFPNPSQAGIPTPAVEQMMLVSVHMDGSRPVRVTAIQGDVTQAHEVAAAVAGAHVVIHTAGLVDVFGRASPKTIHEVNVQGTRNVIEACVQTGTRFLVYTSSMEVVGPNTKGHPFYRGNEDTPYEAVHRHPYPCSKALAEWLVLEANGRKV

SEQ ID NO: 8745 - protein, 52 aa, Homo sapiens
MVRMNVLADALKSINNAEKRGKRQVLIRPCSKVIVRFLTVMMKHVWGDQPQI

SEQ ID NO: 8746 - protein, 58 aa, Homo sapiens
MYTLLVGKPPFETSCLKETYLRIKKNEYSIPKHINPVAASLIQKMLQTDPTARPTINE

SEQ ID NO: 8747 - protein, 164 aa, Homo sapiens
MLLNGDCPESLKKEAAAAEPPRENGLDEAGPGDETTGQEVIVIQDTGFSVKILAPGIEPFSLQVSPQEMVQEIHQVLMDREDTCHRTCFSLHLDGNVLDHFSELRSVEGLQEGSVLRVVEEPYTVREARIHVRHVRDLLKSLDPSDAFNGVDCNSLSFLSVFTD

SEQ ID NO: 8748 - protein, 37 aa, Homo sapiens
QMAPSGGPPQQQPPVAQQPQAQGPPAQGSEAQLISFD

SEQ ID NO: 8749 - protein, 91 aa, Homo sapiens
MLLNGDCPESLKKEAAAAEPPRENGLDEAGPGDETTGQEVIVIQDTGFSVKILAPGIEPFSLQVSPQEMVQEIHQVLMDREDTCHRTCFSL

SEQ ID NO: 8750 - protein, 173 aa, Homo sapiens
MSAAVTAGKLARAPADPGKAGVPGVAAPGAPAAAPPAKEIPEVLVDPRSRRRYVRGRFLGKGGFAKCFEISDADTKEVFAGKIVPKSLLLKPHQREKMSMEISIHRSLAHQHVVGFHGFFEDNDFVFVVLELCRRRVSVAAGELELPAGQLERPDLELLERVPSKGEPGTWSC

SEQ ID NO: 8751 - protein, 146 aa, Homo sapiens
MADDLDFETGDAGASATFPMQCSALRKNGFVVLKGRPCKIVEMSTSKTGKHGHAKVHLVGIDIFTGKKYEDICPSTHNMDVPNIKRNDFQLIGIQDGYLSLLQDSGEVREDLRLPEGDLGKEIEQKYDCGEEILITVLSAMTEEAA

SEQ ID NO: 8752 - protein, 123 aa, Homo sapiens
QELRRGSQAANIYCINFNQDASLICVSSDHGTVHIFAAEDPKRNKQSSLASASFLPKYFSSKWSFSKFQVPSGSPCICAFGTEPNAVIAICADGSYYKFLFNPKGECIRDVYAQFLEMTDDKL

SEQ ID NO: 8753 - protein, 190 aa, Homo sapiens
MEGDFSVCRNCKRHVVSANFTLHEAYCLRFLVLCPECEEPVPKETMEEHCKLEHQQERWDLGVTEWVQSSLQERWGLRVGGRGSSPPCRLGVRCVSRACRSPRWSFIRPMSARSALLSVSSANWTCSSASWSSTSPTVAAGQSSAKAVASSSCTACSPSTEMSVAVNRPSSGKGKEFQLLKGKSTVIIAT

SEQ ID NO: 8754 - protein, 133 aa, Homo sapiens
MEGDFSVCRNCKRHVVSANFTLHEAYCLRFLVLCPECEEPVPKETMEEHCKLEHQQVGCTMCQQSMQKSSLEFHKANECQERPVECKFCKLDMQLSKLELHESYCGSRTELCQGCGQFIMHRMLAQHRDVCRS

SEQ ID NO: 8755 - protein, 153 aa, Homo sapiens
LTASEAKKLPIQEFHLSRILQELGLNQEQFVDLCILLGSDYCESIRGIGPKRAVDLIQKHKSIEEIVRRLDPNKYPVPENWLHKEAHQLFLEPEVLDPESVELKWSEPNEEELIKFMCGEKQFSEERIRSGVKRLSKSRQGSTQGRLDDFFKP

SEQ ID NO: 8756 - protein, 137 aa, Homo sapiens
MESALTARDRVGVQDFVLLENFTSEAAFIENLRRRFRENLIYTYIGPVLVSVNPYRDLQIYSRQHMERYRGVSFYEVPPHLFAVADTVYRALRTERRDQAVMISGESGAGKTEATKRLLQFYAETCPAPERGGAVRD

SEQ ID NO: 8757 - protein, 86 aa, Homo sapiens
MARELRALLLWGRRLRPLLRAPALAAVPGGKPILCPRRTTAQLGPRRNPAWSLQAGRLFSTQTAEDKEEPLHSIISSTESVQGRVL

SEQ ID NO: 8758 - protein, 80 aa, Homo sapiens
MARYEEVSVSGFEEFHRAVEQHNGKTIFAYFTGSKDAGGKSWCPDCVQAEPVVREGLKHISEGCVFIYCQVGEKPYLKNW

SEQ ID NO: 8759 - protein, 100 aa, Homo sapiens
MCAQYCISFADVEKAHINIRDSIHLTPVLTSSILNQLTGRNLFFKCELFQKTGSFKIRGALNAVRSLVPDALERKPKAVVTHSSGNHGQALTYAAKLEGI

SEQ ID NO: 8760 - protein, 215 aa, Homo sapiens
MLERPPALAMPMPTEGTPPPLSGTPIPVPAYFRHAEPGFSLKRPRGLSRSLPPPPPAKGSIPISRLFPPRTPGWHQLQPRRVSFRGEASETLQSPGYDPSRPESFFQQSFQRLSRLGHGSYGEVFKLLFPPRDTSKRSPGVSAGRPWLLRRWVSTDPARGMEVRSKEDGRLYAVKRSMSPFRGPKDRARKLAEVGSHEKVGQHPCCVRLEQAWEE

SEQ ID NO: 8761 - protein, 100 aa, Homo sapiens
MVRMNVLADALKSINNAEKRGKRQVLIRPCSKVIVRFLTVMMKHGYIGEFEIIDDHRAGKIVVNLTGRLNKCGVISPRFDVQLKDLEKWQNNLLPSRQFG

SEQ ID NO: 8762 - protein, 63 aa, Homo sapiens
MEGDFSVCRNCKRHVVSANFTLHEAYCLRFLVLCPECEEPVPKETMEEHCKLEHQQAWRAVEN

SEQ ID NO: 8763 - protein, 296 aa, Homo sapiens
MEDSASASLSSAAATGTSTSTPAAPTARKQLDKEQVRKAVDALLTHCKSRKNNYGLLLNENESLFLMVVLWKIPSKELRVRLTLPHSIRSDSEDICLFTKDEPNSTPEKTEQFYRKLLNKHGIKTVSQIISLQTLKKEYKSYEAKLRLLSSFDFFLTDARIRRLLPSLIGRHFYQRKNAIRIGHVGMQIEHIIENIVAVTKGLSEKLPEKWESVKLLFVKTEKSAALPIFSSFVSNWDEATKRSLLNKKKKEARRKRRERNFEKQKERKKKRQQARKTASVLSKDDVAPESGDTTV

SEQ ID NO: 8764 - protein, 206 aa, Homo sapiens
KAHHSSQEMSSEYREYADSFGKCPGGRNPWTGVSQFLQTSQKIIQFASGKEPQPGETVIYVAGAFDLFHIGHVDFLEKVHRLAERPYIIAGLHFDQYVSEVVIGAPYAVTAELLSHFKVDLVCHGKTEIIPDRDGSDPYQEPKRRGIFRQIDSGSNLTTDLIVQRIITNRLEYEARNQKKEAKELAFLEAARQQAAQPLGERDGDF

SEQ ID NO: 8765 - protein, 202 aa, Homo sapiens
MAGGMSAECPEPGPGGLQGQSPGPGRQCPPPITPTSWSLPPWRAYVAAAVLCYINLLNYMNWFIIAGVLLDIQEVFQISDNHAGLLQTVFLALLPVPGHRGHWLGQLLHHRAHRPGRPLREGPAHPRAGCLLHLYPRWKWSGLRAGVGCDDADWELALGPPSHALPGGRGLDPAYPAGSRPTPGSCRDTGGGGRGRLQEQLV

SEQ ID NO: 8766 - protein, 102 aa, Homo sapiens
TLLAARGAGPAPAWGPEAFTPDWESREVSTGTTIMAVQFDGGVVLGADSRTTTGSYIANRVTDKLTPIHDRIFCCRSGSAADTQAVADAVTYQLGFHSSQPL

SEQ ID NO: 8767 - protein, 94 aa, Homo sapiens
MSSEPPPPPQPPTHQASVGLLDTPRSRERSPSPLRGNVVPSPLPTRRTRTFSATVRASQGPVYKGVCKCFCRSKGHGFITPADGGPDIFLHISE

SEQ ID NO: 8768 - protein, 170 aa, Homo sapiens
MESALTARDRVGVQDFVLLENFTSEAAFIENLRRRFRENLIYTYIGPVLVSVNPYRDLQIYSRQHMERYRGVSFYEVPPHLFAVADTVYRALRTERRDQAVMISGESGAGKTEATKRLLQFYAETCPAPERGGAVRDRLLQSNPVLEAFGNAKTLRNDNSSRFGKYMDVQ

SEQ ID NO: 8769 - protein, 154 aa, Homo sapiens
DSGVFDQTALAIEHVRFFYQNIWRSWDEEEEDEYDYFVRCVEPRLRLYVFGYQKNSNIQAKGVRSSGQKITHVVSSTMMAGLLRSLLTDRLCQEPGEEEREIQFHSDPLSAINACFEGDTVIVCPGHYVVHGTFSIADSIELEGYGLPDDIVIE

SEQ ID NO: 8770 - protein, 430 aa, Homo sapiens
MLERWHQLQPRRVSFRGEASETLQSPGYDPSRPESFFQQSFQRLSRLGHGSYGEVFKVRSKEDGRLYAVKRSMSPFRGPKDRARKLAEVGSHEKVGQHPCCVRLEQAWEEGGILYLQTELCGPSLQQHCEAWGASLPEAQVWGYLRDTLLALAHLHSQGLVHLDVKPANIFLGPRGRCKLGDFGLLVELGTAGAGEVQEGDPRYMAPELLQGSYGTAADVFSLGLTILEVACNMELPHGGEGWQQLRQGYLPPEFTAGLSSELRSVLVMMLEPDPKLRATAEALLALPVLRQPRAWGVLWCMAAEALSRGWALWQALLALLCWLWHGLAHPASWLQPLGPPATPPGSPPCSLLLDSSLSSNWDDDSLGPSLSPEAVLARTVGSTSTPRSRCTPRDALDLSDINSEPPRGSFPSFEPRNLLSLFEDTLDPT

SEQ ID NO: 8771 - protein, 490 aa, Homo sapiens
MEDSASASLSSAAATGTSTSTPAAPTARKQLDKEQVRKAVDALLTHCKSRKNNYGLLLNENESLFLMVVLWKIPSKELRVRLTLPHSIRSDSEDICLFTKDEPNSTPEKTEQFYRKLLNKHGIKTVSQIISLQTLKKEYKSYEAKLRLLSSFDFFLTDARIRRLLPSLIGRHFYQRKKVPVSVNLLSKNLSREINDCIGGTVLNISKSGSCSAIRIGHVGMQIEHIIENIVAVTKGLSEKLPEKWESVKLLFVKTEKSAALPIFSSFVSNWDEATKRSLLNKKKKEARRKRRERNFEKQKERKKKRQQARKTASVLSKDDVAPESGDTTVKKPESKKEQTPEHGKKKRGRGKAQVKATNESEDEIPQLVPIGKKTPANEKVEIQKHATGKKSPAKSPNPSTPRGKKRKALPASETPKAAESETPGKSPEKKPKIKEEAVKEKSPSLGKKDARQTPKKPEAKFFTTPSKSVRKASHTPKKWPKKPKVPQST

SEQ ID NO: 8772 - protein, 283 aa, Homo sapiens
DDRVYPNSTCKPRIIAPSRGSPLPVLSWANREEVWKIMLNKEKTYLRDQHFLEQHPLLQPKMRAILLDWLMEVCEVYKLHRETFYLAQDFFDRYMATQENVVKTLLQLIGISSLFIAAKLEEIYPPKLHQFAYVTDGACSGDEILTMELMIMKLLDLCVLDVDCLEFPYGILAASALYHFSSSELMQKVSGYQWCDIENCVKWMVPFAMVIRETGSSKLKHFRGVADEDAHNIQTHRDSLDLLDKARAKKAMLSEQNRASPLPSGLLTPPQSGKKQSSGPEMA

SEQ ID NO: 8773 - protein, 208 aa, Homo sapiens
MISLIIPPKDQISRVAKMLADEFGTASNIKSRVNRLSVLGAITSVQQRLKLYNKVPPNGLVVYCGTIVTEEGKEKKVNIDFEPFKPINTSLYLCDNKFHTEALTALLSDDSKFGFIVIDGSGALFGTLQGNTREVLHKFTVDLPKKHGRGGQSALRFARLRMEKRHNYVRKVAETAVQLFISGDKVNVAGLVLAGSADFKTELSQSDM

SEQ ID NO: 8774 - protein, 150 aa, Homo sapiens
MCAQYCISFADVEKAHINIRDSIHLTPVLTSSILNQLTGRNLFFKCELFQKTGSFKIRGALNAVRSLVPDALERKPKAVVTHSSGNHGQALTYAAKLEGIPAYIVVPQTAPDCKKLAIQAYGASIVYCEPSDESKLKGKLMPNLYPPETI

SEQ ID NO: 8775 - protein, 250 aa, Homo sapiens
MEQVQTGGLRTGSGFLTSTLHVIQEIIGCRVRRDPPNSTERYTRWINQLTPEQLLTQVFTSNGPTVIMPTWFCSRAWFSHVGPFNEGGQGVPEDLLFFYEHLRKGGGVIRVDQSLLLYRHHPQAATHCVLETTIWTHRVRFLEEQALPRWAAFTIWNAGKQGRRLYRSLTAGSQRKVVAFCDVDENKIRKGFYCHEDSQERPKPRIPILHFRAARPPFVICVKLDLTGGAFEDNLRSLHLQEGQDFLHFS

SEQ ID NO: 8776 - protein, 110 aa, Homo sapiens
MYGLHQDVHHFNSFDKVRSLPLLLSQAGVRTGIIGKKHVGPETVYPFDFAYTEENGSVLQVGRNITRIKLLVRKFLQTQDDRPFFLYVAFHDPHRCGHSQPQYGTFCEKF

SEQ ID NO: 8777 - protein, 78 aa, Homo sapiens
GRLSKDFCAREFEALRSCFAAAVGQEDAGGRLLGGTLSFTPVCCHGCRALVLMAPGGTYRMPRAERKWEWRRCDIPRC

SEQ ID NO: 8778 - protein, 357 aa, Homo sapiens
MVHYGHSNQLRQARAMGDYLIVGVHTDEEIAKHKGPPVFTQEERYKMVQAIKWVDEVVPAAPYVTTLETLDKYNCDFCVHGNDITLTVDGRDTYEEVKQAGRYRECKRTQGVSTTDLVGRMLLVTKAHHSSQEMSSEYREYADSFGKCPGGRNPWTGVSQFLQTSQKIIQFASGKEPQPGETVIYVAGAFDLFHIGHVDFLEKVHRLAERPYIIAGLHFDQEVNHYKGKNYPIMNLHERTLSVLACRYVSEVVIGAPYAVTAELLSHFKVDLVCHGKTEIIPDRDGSDPYQEPKRRGIFRQIDSGSNLTTDLIVQRIITNRLEYEARNQKKEAKELAFLEAARQQAAQPLGERDGDF

SEQ ID NO: 8779 - protein, 52 aa, Homo sapiens
EVEGAEVGWYVTLHVSEVPVSVVECFRQGTPLIAFSLLPHEQKRTNINCRDS

SEQ ID NO: 8780 - protein, 122 aa, Homo sapiens
MEGDFSVCRNCKRHVVSANFTLHEAYCLRFLVLCPECEEPVPKETMEEHCKLEHQQANECQERPVECKFCKLDMQLSKLELHESYCGSRTELCQGCGQFIMHRMLAQHRDVCRSEQAQLGKG

SEQ ID NO: 8781 - protein, 84 aa, Homo sapiens
MKQTQVGSLFSLGIRNPEPGPVSGTAVPRQLAWKSGKYVMVMGVVQACSPEPCLQAVKMTDLSDNPIHESMWELEVEDLHRNIP

SEQ ID NO: 8782 - protein, 141 aa, Homo sapiens
MKRSSVSSGGAGRLSMQELRSQDVNKQGLYTPQTKEKPTFGKLSINKPTSERKVSLFGKRWSLALSPRLECSGAISAHCNLCLASSSNSPASASRVAGITELVDMDPGIVNLVYFPVLRKSRTRDHLMTKHSFSSVFDNSV

SEQ ID NO: 8783 - protein, 77 aa, Homo sapiens
MGLLTFRDVAVEFSLEEWEHLEPAQKNLYQDVMLENYRNLVSLGLVVSKPDLITFLEQRKEPWNVKSEETVAIQPGH

SEQ ID NO: 8784 - protein, 442 aa, Homo sapiens
MLPAAARPLWGPCLGLRAAAFRLARRQVPCVCAVRHMRSSGHQRCEALAGAPLDNAPKEYPPKIQQLVQDIASLTLLEISDLNELLKKTLKIQDVGLVPMGGVMSGAVPAAAAQEAVEEDIPIAKERTHFTVRLTEAKPVDKVKLIKEIKNYIQGINLVQAKKLVESLPQEIKANVAKAEAEKIKAALEATQQEVKLRMTGMALRVVRTDGILALYSGLSASLCRQMTYSLTRFAIYETVRDRVAKGSQGPLPFHEKVLLGSVSGLAGGFVGTPADLVNVRMQNDVKLPQGQRRNYAHALDGLYRVAREEGLRRLFSGATMASSRGALVTVGQLSCYDQAKQLVLSTGYLSDNIFTHFVASFIAGGCATFLCQPLDVLKTRLMNSKGEYQGVFHCAVETAKLGPLAFYKGLVPAGIRLIPHTVLTFVFLEQLRKNFGIKVPS

SEQ ID NO: 8785 - protein, 169 aa, Homo sapiens
MLERPPALAMPMPTEGTPPPLSGTPIPVPAYFRHAEPGFSLKRPRGLSRSLPPPPPAKGSIPISRLFPPRTPGWHQLQPRRVSFRGEASETLQSPGYDPSRPESFFQQSFQRLSRLGHGSYGEVFKVRSKEDGRLYAVKRSMSPFRGPKDRARKLAEVGSHEKVGQHPC

SEQ ID NO: 8786 - protein, 78 aa, Homo sapiens
MVHPNQEPAVIAGQGTIALEVLNQVPLVDALVVPVGGGGMLAGIAITVKALKPSVKVYAAEPSNADDCYQSKLKGKLM

SEQ ID NO: 8787 - protein, 46 aa, Homo sapiens
MEDSASASLSSAAATGTSTSTPAAPTARKQLDKEQCYTYWSRWNAN

SEQ ID NO: 8788 - protein, 93 aa, Homo sapiens
MCAQYCISFADVEKAHINIRDSIHLTPVLTSSILNQLTGRNLFFKCELFQKTGSFKIRGALNAVRSLVPDALERKPKAVVTHSSGNHGQALTY

SEQ ID NO: 8789 - protein, 50 aa, Homo sapiens
MLERPPALAMPMPTEGTPPPLSGTPIPVPAYFRHAEPGFSLKRPRGLSRS

SEQ ID NO: 8790 - protein, 128 aa, Homo sapiens
MEGDFSVCRNCKRHVVSANFTLHEAYCLRFLVLCPECEEPVPKETMEEHCKLEHQQAYGSGIGKRFWFQERLAVLLRSVKRGCEKGRSWKAVRWSPVSRLSMSIPPGAPDLSLWRYSSSGSRCQLRLV

SEQ ID NO: 8791 - protein, 168 aa, Homo sapiens
MPCALGSDGVRVTMESALTARDRVGVQDFVLLENFTSEAAFIENLRRRFRENLIYTYIGPVLVSVNPYRDLQIYSRQHMERYRGVSFYEVPPHLFAVADTVYRALRTERRDQAVMISGESGAGKTEATKRLLQFYAETCPAPERGGAVRDRLLQSNPVLEAFGNAKTL

SEQ ID NO: 8792 - protein, 186 aa, Homo sapiens
MADDLDFETGDAGASATFPMQCSALRKNGFVVLKGRPCKIVEMSTSKTGKHGHAKVHLVGIDIFTGKKYEDICPSTHNMDVPNIKRNDFQLIGIQDGYLSLLQDSGEVREDLRLPEGDLGKEIEQKYDCGEEILVWCLPPCFCAQLCSVRFFLSSDISWLSLLLLQITVLSAMTEEAAVAIKAMAK

SEQ ID NO: 8793 - protein, 145 aa, Homo sapiens
MEGDFSVCRNCKRHVVSANFTLHEAYCLRFLVLCPECEEPVPKETMEEHCKLEHQQANECQERPVECKFCKLDMQLSKLELHESYCGSRTELCQGCGQFIMHRMLAQHRDVCRSEQAQLGKETSPDPGKCLSITVAAALSAHLWP

SEQ ID NO: 8794 - protein, 129 aa, Homo sapiens
MVRYSLDPENPTKSCKSRGSNLRVHFKNTRETAQAIKGMHIRKATKYLKDVTLQKQCVPFRRYNGGVGRCAQAKQWGWTQGRWPKKSAEFLLHMLKNAESNAELKGLDVDSLVIEHIQVNKAPKMRRRT

SEQ ID NO: 8795 - protein, 39 aa, Homo sapiens
MFFSAALRARAAGLTAHWVRRLKLSPALPPPFSCSPCLP

SEQ ID NO: 8796 - protein, 85 aa, Homo sapiens
MSASQDSRTEPNPEERPREAPGAHPAPGGRVHFAAQAGLLANCGWAGPPSFGGERPEIQRQWPRWDGARRRHRVTGMRLLTALMT

SEQ ID NO: 8797 - protein, 156 aa, Homo sapiens
FVSSLIYNWEGEYFWTALQDLNSTGSFFWLSGDEVMYTHWNRDQPGYSRGGCVALATGSAMGLWEVKNCTSFRARYICRQSLGTPVTPELPGPDPTPSLTGSCPQGWASDTKLRYCYKVFSSERLQDKKSWVQAQGACQELGAQLLSLASYEEEHF

SEQ ID NO: 8798 - protein, 123 aa, Homo sapiens
MAQKENSYPWPYGRQTAPSGLSTLPQRVLRKEPVTPSALVLMSRSNVQPTAAPGQKVMENSSGTPDILTRHFTIDDFEIGRPLGKDHGGVGRCSNVLPWEEGDSQRHKARKSALRAQGRAEDC

SEQ ID NO: 8799 - protein, 98 aa, Homo sapiens
MASFPPRVNEKEIGKLLLNLVDHTEVVRDLTFAPDGSLILVSASRDKTLRVWDLKDDGNMMKVLRGHQNWVYSCAFSPDSSMLCSVGASKAVVAAILV

SEQ ID NO: 8800 - protein, 99 aa, Homo sapiens
PPALECRRCHVKCHRDHLDKKEDLICPCKVSYDVTSARDMLLLACSQDEQKKWVTHLVKKIPKNPPSGFVRASPRTLSTRSTANQSFRKVVKNTSGKTR

SEQ ID NO: 8801 - protein, 188 aa, Homo sapiens
MKCEHCTRKECSKKTKTDDQENVSADAPSPAQENGEKGEFHKLADAKIFLSDCLACDSCMTAEEGVQLSQQNAKDFFRVLNLNKKCDTSKHKVLVVSVCPQSLPYFAAKFNLSVTDASRRLCGFLKSLGVHYVFDTTIAADFSILESQKEFVRRYRQHSEEERTLPMLTSACPGMLPFPSSLQACRFP

SEQ ID NO: 8802 - protein, 58 aa, Homo sapiens
MEGAGAGSGFRKELVSRLLHLHFKDDKTKEAAVRGVRQAQAEDALRVDVDQLEKLLDF

SEQ ID NO: 8803 - protein, 184 aa, Homo sapiens [sequence omitted]

SEQ ID NO: 8804 - protein, 69 aa, Homo sapiens
MSRSNVQPTAAPGQKVMENSSGTPDILTRHFTIDDFEIGRPLGKGKFGNVYLAREKKSHFIVALKVLFK

SEQ ID NO: 8805 - protein, 128 aa, Homo sapiens
MTMPVNGAHKDADLWSSHDKMLAQPLKDSDVEVYNIIKKESNRQRVGLELIASENFASRAVLEALGSCLNNKYSEGYPGQRLPCKLCCVHCPGGTPWAHHGPGPSGWGPPDPWVHDRQEENLCHVHLL

SEQ ID NO: 8806 - protein, 197 aa, Homo sapiens
PDQRSKFENEEFFRKLSRECEIKYTGFRDRPHEERQARFQNACRDGRSEIVSRLARGARGSLVARGRGGPGRFRTAARLLRLPELSGRRLTSYSGFKMRNQMPRAGTRGETLFLGLAAVARVGQRSTASGARTRARLNKRRALFRRRHRRRVQGICSKQTPIRKKKWSFIQGFCGHRNQSVSPVFSGQLAGRTATNT

SEQ ID NO: 8807 - protein, 483 aa, Homo sapiens
MASRCWRWWGWSAWPRTRLPPAGSTPSFCHHFSTQEKTPQICVVGSGPAGFYTAQHLLKHPQAHVDIYEKQPVPFGLVRFGVAPDHPEVKTAHSGRCAFWGNVEVGRDVTVPELQEAYHAVVLSYGAEDHRALEIPGEELPGVCSARAFVGWYNGLPENQELEPDLSCDTAVILGQGNVALDVARILLTPPEHLERTDITKAALGVLRQSRVKTVWLVGRRGPLQVAFTIKELREMIQLPGARPILDPVDFLGLQDKIKEVPRPRKRLTELLLRTATEKPGPAEAARQASASRAWGLRFFRSPQQVLPSPDGRRAAGVRLAVTRLEGVDEATRAVPTGDMEDLPCGLVLSSIGYKSRPVDPSVPFDSKLGVIPNVEGRVMDVPGLYCSGWVKRGPTGVIATTMTDSFLTGQMLLQDLKAGLLPSGPRPGYAAIQALLSSRGVRPVSFSDWEKLDAEEVARGQGTGKPREKLVDPQEMLRLLGH

SEQ ID NO: 8808 - protein, 174 aa, Homo sapiens
MVRYSLDPENPTKSCKSRGSNLRVHFKNTRETAQAIKGMHIRKATKYLKDVTLQKQCVPFRRYNGGVGRCAQAKQWGWTQGRWPKKSAEFLLHMLKNAESNAELKGLDVDSLVIEHIQVNKAPKMRRRTYRAHGRINPYMSSPCHIEMILTEKEQIVPKPEEEVAQKKKISQKK

SEQ ID NO: 8809 - protein, 312 aa, Homo sapiens
MAQKENSYPWPYGRQTAPSGLSTLPQRVLRKEPVTPSALVLMSRSNVQPTAAPGQKVMENSSGTPDILTRHFTIDDFEIGRPLGKALLCLWPEASSVSSPSHPNILRLYNYFYDRRRIYLILEYAPRGELYKELQKSCTFDEQRTATIMEELADALMYCHGKKVIHRDIKPENLLLGLKGELKIADFGWSVHAPSLRRKTMCGTLDYLPPEMIEGRMHNEKVDLWCIGVLCYELLVGNPPFESASHNETYRRIVKVDLKFPASVPMGAQDLISKLLRHNPSERLPLAQVSAHPWVRANSRRVLPPSALQSVA

SEQ ID NO: 8810 - protein, 44 aa, Homo sapiens
MPLPVQVFNLQSPGRGARCLAHVAGGRGAHADRRGPPGRPAECT

SEQ ID NO: 8811 - protein, 167 aa, Homo sapiens
MTMPVNGAHKDADLWSSHDKMLAQPLKDSDVEVYNIIKKESNRQRVGLELIASENFASRAVLEALGSCLNNKYSEGYPGQRYYGGTEFIDELETLCQKRALQAYKLDPQCWGVNVQPYSGSPANFAVYTALVEPHGRIMGLDLPDGGHLTHGFMTDKKKISATSIFF

SEQ ID NO: 8812 - protein, 69 aa, Homo sapiens
MSSMWSEYTIGGVKIYFPYKAYPSQLAMMNSILRGLNSKQHCLLESPTGSGKSLALLCSALAWQQSLSG

SEQ ID NO: 8813 - protein, 187 aa, Homo sapiens
MSASQDSRDNGPDGMEPEGVIESNWNEIVDSFDDMNLSESLLRGIYAYGFEKPSAIQQRAILPCIKGYDVIAQAQSGTGKTATFAISILQQIELDLKATQALVLAPTRELAQQIQKVVMALGDYMGASCHACIGGTNVRAEVQKLQMEAPHIIVGTPGRVFDMLNRRYLSPKYIKMFVLDEADEMLS

SEQ ID NO: 8814 - protein, 217 aa, Homo sapiens
MKCEHCTRKECSKKTKTDDQENVSADAPSPAQENGEKGEFHKLADAKIFLSDCLACDSCMTAEEGVQLSQQNAKDFFRVLNLNKKCDTSKHKVLVVSVCPQSLPYFAAKFNLSVTDASRRLCGFLKSLGWVRYAERVLGRPITAHLCTAKSPQQVMGSLVKDYFARQQNLSPEKIFHVIVAPCYDKKLEALQESLPPALHGSRGADCVLTSGESQAW

SEQ ID NO: 8815 - protein, 28 aa, Homo sapiens
MVFKAQLFALTGVQPARQKVMVKGGTLK

SEQ ID NO: 8816 - protein, 145 aa, Homo sapiens [sequence omitted]

SEQ ID NO: 8817 - protein, 143 aa, Homo sapiens
MSTNENANTPAARLHRFKNKGKDSTEMRRRRIEVNVELRKAKKDDQMLKRRNVSSFPDDATSPLQENRNNQGTVNWSVDDIVKGINSSNVENQLQATQAARKLLSREKQPPIDNIIRAGLIPKFVSFLGRTDCSPIQFESAWA

SEQ ID NO: 8818 - protein, 71 aa, Homo sapiens
MSSSGLNSEKVAALIQKLNSDPQFVLAQNVGTTHDLLDICLKRATVQRAQHVFQHAVPQEGKPITNQKSSG

SEQ ID NO: 8819 - protein, 85 aa, Homo sapiens
MEPEGVIESNWNEIVDSFDDMNLSESLLRGIYAYGFEKPSAIQQRAILPCIKGYDVIAQAQSGTGKTATFAISILQQIELDLKAT

SEQ ID NO: 8820 - protein, 77 aa, Homo sapiens
PVMPVRNVSEHLLKSRLQTRSVGEHVYKKEKARVITEEEKNFKAFASLRMARANARLFGIRAKRAKEAAEQDVEKKK

SEQ ID NO: 8821 - protein, 109 aa, Homo sapiens
MASSPDMDLATVSALRKMGVKLTPHNKETVQHSDVLFLAVKPHIIPFILDEIGADIEDRHIVVSCAAGVTISSIEKKLSAFRPAPRVIRCMTNTPVVVREGATVYATGT

SEQ ID NO: 8822 - protein, 78 aa, Homo sapiens
MEYDLQALNIKYAMDAFGGPIWSMAASPSGSQLLVGCEDGSVKLFQITPDKIQFERNFDRQKSRILSLSWHPSGTHIA

SEQ ID NO: 8823 - protein, 262 aa, Homo sapiens
MGSERALVLDRLASNVAKRKSSMPQKFIGEKRHCFDVNYNSSYMYEKESELIQTRMMDQAINNAISYLGAEALRPLVQTPPAPTSEMVPVISSMYPIALTRAEMSNGAPQELEKKSIHLPEKSVPSERGLSPNNSGHDSTDTDSNHEERQNHIYQQNHMVLSRARNGMPLLKEVPRSYELLKPPPICPRDSVKVINKEGEVMDVYRCDHCRVLFLDYVMFTIHMGCHGFRDPFECNMCGYRSHDRYEFSSHIARGEHRALLK

SEQ ID NO: 8824 - protein, 128 aa, Homo sapiens
MKKWEDMANLPPHFRERTERLERNFTVSAVIFKKYEPIFQDIFKYPQEEQPRQQRGRKQRRQPCTVSEIFHFCWVLFIYAKGNFPMISDDLVNSYHLLLCALDLVYGNALQCSNRKELVNPNFKGLSE

SEQ ID NO: 8825 - protein, 93 aa, Homo sapiens
MASNIFGTPEENQASWAKSAGAKSSGGREDLESSGLQRRNSSEASSGDFLDLKGEGDIHENVDTDLPGSLGQSEEKPVPAAPVPSPVAPAPVP

SEQ ID NO: 8826 - protein, 198 aa, Homo sapiens
MVFLQFFPGHESRATEALCWAEGQRLFSAGLNGEIMEYDLQALNIKYAMDAFGGPIWSMAASPSGSQLLVGCEDGSVKLFQITPDKIQFERNFDRQKSRILSLSWHPSGTHIAAGSIDYISVFDVKSGSAVHKMIVDRQYMGVSKRKCIVWGVAFLSDGTIISVDSAGKVQFWDSATGTLVKSHLIANADVQSIAVAD

SEQ ID NO: 8827 - protein, 56 aa, Homo sapiens
MVRYSLDPENPTKSCKSRGSNLRVHFKNTRETAQAIKGMHIRKATKYLKDVTLQKQ

SEQ ID NO: 8828 - protein, 65 aa, Homo sapiens
HILYGKIIHLEKPFAVLVKHTPGDQDCDELGRETGTRYLVTALIKDKILFKTRPKPIITSVPKKV

SEQ ID NO: 8829 - protein, 391 aa, Homo sapiens
MVMFKKIKSFEVVFNDPEKVYGSGEKVAGRVIVEVCEVTRVKAVRILACGVAKVLWMQGSQQCKQTSEYLRYEDTLLLEDQPTGENEMVIMRPGNKYEYKFGFELPQGPLGTSFKGKYGCVDYWVKAFLDRPSQPTQETKKNFEVVDLVDVNTPDLMAPVSAKKEKKVSCMFIPDGRVSVSARIDRKGFCEGDEISIHADFENTCSRIVVPKAAIVARHTYLANGQTKVLTQKLSSVRGNHIISGTCASWRGKSLRVQKIRPSILGCNILRVEYSLLIYVSVPGSKKVILDLPLVIGSRSGLSSRTSSMASRTSSEMSWVDLNIPDTPEAPPCYMDVIPEDHRLESPTTPLLDDMDGSQDSPIFMYAPEFKFMPPPTYTEVDPCILNNNVQ

SEQ ID NO: 8830 - protein, 42 aa, Homo sapiens
MADGGSERADGRIVKMEVDYSATVDQRLPECAKLAKACLYRY

SEQ ID NO: 8831 - protein, 109 aa, Homo sapiens
MEAEVDKLELMFQKAESDLDYIQYRLEYEIKTNHPDSASEKNPVTLLKELSVIKSRYQTLYARFKPVAVEQKESKSRICATVKKTMNMIQKLQKQTDLEVMLSVDSCHH

SEQ ID NO: 8832 - protein, 72 aa, Homo sapiens
MLLEPGRGCCALAILLAIVDIQSGETGNYTVTGLKQRQHLEFSHNEGTLSSGFLQEKVWVMLVTSLVALQAL

SEQ ID NO: 8833 - protein, 54 aa, Homo sapiens
MASFPPRVNEKEIGNMMKVLRGHQNWVYSCAFSPDSSMLCSVGASKAVVAAILV

SEQ ID NO: 8834 - protein, 112 aa, Homo sapiens
MALVTVQRSPTPSTTSSPCASEADSGEEECRSQPRSISESFLTVKGAALFLPRGNGSSTPRISHRRNKHAGDLQQHLQAMFILLRPEDNIRLAVRLESTYQNRTRYMVVVST

SEQ ID NO: 8835 - protein, 63 aa, Homo sapiens
MKFNPFVTSDRSKNRKRHFNAPSHIRRKIMSSPLSKELRQKYNVRSMPIRKDDEVQEVSMFGH

SEQ ID NO: 8836 - protein, 122 aa, Homo sapiens
MQMIIIWALLDTEAESSAKGVHSFYNNISGLTDFGEKVVAEMNRLGMMVDLSHVSDAVARRALEVSQAPVIFSHSAARGVCNSARNVPDDILQLLKKNGGVVMVSLSMGVIQCNPSANVSTV

SEQ ID NO: 8837 - protein, 72 aa, Homo sapiens
MWRVKKLSLSLSPSPQTGKPSMRTPLRELTLQPGALTNSGKRSPACSSLTPSLCKLGLQISVSIMWTQRRKL

SEQ ID NO: 8838 - protein, 175 aa, Homo sapiens
MPHSYPALSAEQKKELSDIALRIVAPGKGILAADESVGSMAKRLSQIGVENTEENRRLYRQVLFSADDRVKKCIGGVIFFHETLYQKDDNGVPFVRTIQDKGIVVGIKVDKGVVPLAGTDGETTTQGLDGLSERCAQYKKDGADFAKWRCVLKISERTPSALAILENANVLARYA

SEQ ID NO: 8839 - protein, 28 aa, Homo sapiens
RAVLQLPGFCLPPPFPPSQANSGEMEPL

SEQ ID NO: 8840 - protein, 45 aa, Homo sapiens
MEAATGQEVELCLECIEWAKSEKRTFLRQALEARLVSLYFDTKRY

SEQ ID NO: 8841 - protein, 129 aa, Homo sapiens
MVGKARSSNFTLSEKLDLLKLVKPYVKILEEHTNKHSVIVEKNRCWDIIAVNYNAIGVDRPPRTAQGLRTLYKRLKEYAKQELLQQKETQSDFKSNISEPTKKVMEMIPQISSFCLVRDRNHIQSSFGS

SEQ ID NO: 8842 - protein, 93 aa, Homo sapiens
MPLPVQVFNLQQPASSVSGSGGAESQDRMRDSSAPSSASSSVTDLYCTPHSSRSDLVLPGTAGDFSLSASLSAWGRGAHADRRGPPGRPAECT

SEQ ID NO: 8843 - protein, 26 aa, Homo sapiens
QLAPRSSTFNSQEPHNILPLASSQIR

SEQ ID NO: 8844 - protein, 85 aa, Homo sapiens
MGRSTFLRGSRDNGPDGMEPEGVIESNWNEIVDSFDDMNLSESLLRGIYAYGFEKPSAIQQRAILPCIKGYDVIAQAQSGTGKTA

SEQ ID NO: 8845 - protein, 341 aa, Homo sapiens
MSASQDSRSRDNGPDGMEPEGVIESNWNEIVDSFDDMNLSESLLRGIYAYGFEKPSAIQQRAILPCIKGYDVIAQAQSGTGKTATFAISILQQIELDLKATQALVLAPTRELAQQIQKVVMALGDYMGASCHACIGGTNVRAEVQKLQMEAPHIIVGTPGRVFDMLNRRYLSPKYIKMFVLDEADEMLSRGFKDQIYDIFQKLNSNTQVVLLSATMPSDVLEVTKKFMRDPIRILVKKEELTLEGIRQFYINVEREEWKLDTLCDLYETLTITQAVIFINTRRKVDWLTEKMHARDFTVSAMHGDMDQKERDVIMREFRSGSSRVLITTDLLNRSRWTVWP

SEQ ID NO: 8846 - protein, 63 aa, Homo sapiens
GRENRMPILISKIFPGLAADQSRALRLGDAILSVNGTDLRQATHDQAVQALKRAGKEVLLEGL

SEQ ID NO: 8847 - protein, 122 aa, Homo sapiens
MSKRGRGGSSGAKFRISLGLPVGAVINCADNTGAKNLYIISVKGIKGRLNRLPAAGVGDMVMATVKKGKPELRKKVHPAVVIRQRKSYRRKDGVFLYFEDNAGVIVNNKGEMKGRKSVQLVP

SEQ ID NO: 8848 - protein, 262 aa, Homo sapiens
MKCEHCTRKECSKKTKTDDQENVSADAPSPAQENGEKGEFHKLADAKIFLSDCLACDSCMTAEEGVQLSQQNAKDFFRVLNLNKKCDTSKHKVLVVSVCPQSLPYFAAKFNLSVTDASRRLCGFLKSLGWVRYAERVLGRPITAHLCTAKSPQQVMGSLVKDYFARQQNLSPEKIFHVIVAPCYDKKLEALQESLPPALHGSRGADCVLTSGEIAQIMEQGDLSVRDAAVDTLFGDLKEDKVTRHDGASSDGHLAHIFRHAA

SEQ ID NO: 8849 - protein, 104 aa, Homo sapiens
MTTTTTFKGVDPNSRNSSRVLRPPGGGSNFSLGFDEPTEQPVRKNKMASNIFGTPEENQASWAKSAGAKSSGGREDLESSGLQRRNSSEASSGDFLDLKVSVTA

SEQ ID NO: 8850 - protein, 93 aa, Homo sapiens
GRSRWSNLEKVCTSVNLNKACRKQEELDSSMEALTLNLTEVVKRQNSKSKKGFNQISTSQIKVDKVQIIGSNSCPFAVCLDQDERKILQSVVR

SEQ ID NO: 8851 - protein, 241 aa, Homo sapiens
RHFTIDDFEIGRPLGKGKFGNVYLAREKKSHFIVALKVLFKSQIEKEGVEHQLRREIEIQAHLHHPNILRLYNYFYDRRRIYLILEYAPRGELYKELQKSCTFDEQRTATIMEELADALMYCHGKKVIHRDIKPENLLLGLKGELKIADFGWSVHAPSLRRKTMCGTLDYLPPEMIEGRMHNEKVDLKFPASVPMGAQDLISKLLRHNPSERLPLAQVSAHPWVRANSRRVLPPSALQSVA

SEQ ID NO: 8852 - protein, 115 aa, Homo sapiens
MEVVKVGGPVYRIGVGGGAASSVQVQGDNTSDLDFGAVQRGDPEMEQKMNRVIRACVEAPKGNPICSLHDQGAGGNGNVLKELSDPAGAIIYTSRFQIVLVDDRECPVRRNGQGD

SEQ ID NO: 8853 - protein, 84 aa, Homo sapiens
MSVGFIGAGQLAFALAKGFTAAGVLAAHKIMASSPDMDLATVSALRKMGVKLTPHNKETVQHSDVLFLAVKPHIIPFILDEIGA

SEQ ID NO: 8854 - protein, 143 aa, Homo sapiens
MASFPPRVNEKEIGKLLLNLVDHTEVVRDLTFAPDGSLILVSASRDKTLRVWDLKDDGNMMKVLRGHQNWVYSCAFSPDSSMLCSVGASKAVFLWNMDKYTMIRKLEGHHHDVVACDFSPDGALLATASYDTRVYIWDPHNGD

SEQ ID NO: 8855 - protein, 147 aa, Homo sapiens
MQVNKIKKNEDAKKRLSVERIYQKKTQLEHILLRPDTYIGSVELVTQQMWVYDEDVGINYREVTFVPGLYKIFDEILVNAADNKQRDPKMSCIRVTIDPENNLISIWNNGKGIPVVEHKVEKMYVPALIFGQLLTSSNYDDDEKKVT

SEQ ID NO: 8856 - protein, 146 aa, Homo sapiens
KGHKRKSPFGSTERKTPVKKLAPEFSKVKTKTPKHSPIKEEPCGSLSETVCKRELRSQETPEKPRSSVDTPPRLSTPQKGPSTHPKEKAFSSEIEDLPYLSTTEMYLCRWHQPPPSPLPLRESSPKKEETVARSTFTHLPCSEFKV

SEQ ID NO: 8857 - protein, 68 aa, Homo sapiens
MALRYPMAVGLNKGHKVTKNVSKPRHSRRRGREHLESGAGQRVWGSDAGVGVRSWSWPEVAVCEVEGF

SEQ ID NO: 8858 - protein, 228 aa, Homo sapiens
MAQKENSYPWPYGRQTAPSGLSTLPQRVLRKEPVTPSALVLMSRSNVQPTAAPGQKVMENSSGTPDILTRHFTIDDFEIGRPLGKGKFGNVYLAREKKSHFIVALKVLFKSQIEKEGVEHQLRREIEIQAHLHHPNILRLYNYFYDRRRIYLILEYAPRGELYKELQKSCTFDEQRTATIMEELADALMYCHGKKVIHRDIKPENLLLGLKGELKIADFGWSVHAPSL

SEQ ID NO: 8859 - protein, 59 aa, Homo sapiens
RKLSRECEIKYTGFRDRPHEERQARFQNACRDGRSEIARRQQDPSPGSNLGGGDDLKLR

SEQ ID NO: 8860 - protein, 194 aa, Homo sapiens
MLRLQKRLASSVLRCGKKKVWLDPNETNEIANANSRQQIRKLIKDGLIIRKPVTVHSRARCRKNTLARRKGRHMGIGKRKGTANARMPEKVTWMRRMRILRRLLRRYRESKKIDRHMYHSLYLKVKGNVFKNKRILMEHIHKLKADKARKKLLADQAEARRSKTKEARKRREERLQAKKEEIIKTLSKEEETKK

SEQ ID NO: 8861 - protein, 497 aa, Homo sapiens
MASRCWRWWGWSAWPRTRLPPAGSTPSFCHHFSTQEKTPQICVVGSGPAGFYTAQHLLKHPQAHVDIYEKQPVPFGLVRFGVAPDHPEVKNVINTFTQTAHSGRCAFWGNVEVGRDVTVPELQEAYHAVVLSYGAEDHRALEIPGEELPGVCSARAFVGWYNGLPENQELEPDLSCDTAVILGQGNVALDVARILLTPPEHLEALLLCQRTDITKAALGVLRQSRVKTVWLVGRRGPLQVAFTIKELREMIQLPGARPILDPVDFLGLQDKIKEVPRPRKRLTELLLRTATEKPGPAEAARQASASRAWGLRFFRSPQQVLPSPDGRRAAGVRLAVTRLEGVDEATRAVPTGDMEDLPCGLVLSSIGYKSRPVDPSVPFDSKLGVIPNVEGRVMDVPGLYCSGWVKRGPTGVIATTMTDSFLTGQMLLQDLKAGLLPSGPRPGYAAIQALLSSRGVRPVSFSDWEKLDAEEVARGQGTGKPREKLVDPQEMLRLLGH

SEQ ID NO: 8862 - protein, 90 aa, Homo sapiens
MGILEKISEIEKEIARTQKNKATEYHLGLLKAKLAKYRAQLLEPSKSASSKGEGFDVMKSGDARVALIGFPSVVHILESDDLHGQRGSVL

SEQ ID NO: 8863 - protein, 867 aa, Homo sapiens
MPAGLTEPAGAAPPAAVSASGTVTMAPAGALPVRVESTPVALGAVTKAPVSVCVEPTASQPLRSPVGTLVTKVAPVSAPPKVSSGPRLPAPQIVAVKAPNTTTIQFPANLQLPPGTVLIKSNSGPLMLVSPQQTVTRAETTSNITSRPAVPANPQTVKICTVPNSSSQLIKKVAVTPVKKLAQIGTTVVTTVPKPSSVQSVAVPTSVVTVTPGKPLNTVTTLKPSSLGASSTPSNEPNLKAENSAAVQINLSPTMLENVKKCKNFLAMLIKLACSGSQSPEMGQNVKKLVEQLLDAKIEAEEFTRKLYVELKSSPQPHLVPFLKKSVVALRQLLPNSQSFIQQCVQQTSSDMVIATCTTTVTTSPVVTTTVSSSQSEKSIIVSGATAPRTVSVQTLNPLAGPVGAKAGVVTLHSVGPTAATGGTTAGTGLLQTSKPLVTSVANTVTTVSLQPEKPVVSGTAVTLSLPAVTFGETSGAAICLPSVKPVVSSAGTTSDKPVIGTPVQIKLAQPGPVLSQPAGIPQAVQVKQLFSLFQVVQQPSGGNEKQVTTISHSSTLTIQKCGQKTMPVNTIIPTSQFPPASILKQITLPGNKILSLQASPTQKNRIKENVTSCFRDEDDINDVTSMAGVNLNEENACILATNSELVGTLIQSCKDEPFLFIGALQKRILDIGKKHDITELNSDAVNLISQATQERLRGLLEKLTAIAQHRMTTYKASENYILCSDTRSQLKFLEKLDQLEKQRKDLEEREMLLKAAKSRSNKEDPEQLRLKQKAKELQQLELAQIQHRDANLTALAAIGPRKKRPLESGIEGLKDNLLASGTSSLTATKQLHRPRITRICLRDLIFCMEQEREMKYSRALYLALLK

SEQ ID NO: 8864 - protein, 116 aa, Homo sapiens
MSGEPGQTSVAPPPEEVEPGSGVRIVVEYCEPCGFEATYLELASAVKEQYPGIEIESRLGGTGAFEIEINGQLVFSKLENGGFPYEKDVSIYSVGRTSWSPYPNSASSCHSTPLAH

SEQ ID NO: 8865 - protein, 81 aa, Homo sapiens
MVMATVKKGKPELRKKVHPAVVIRQRKSYRRKDGVFLYFEDNAGVIVNNKGEMKGSAITGPVAKECADLWPRIASNAGSIA

SEQ ID NO: 8866 - protein, 38 aa, Homo sapiens
MADGGSERADGRIVKMEVDYSATVDQRLPECAKLAKVV

SEQ ID NO: 8867 - protein, 143 aa, Homo sapiens
MKCEHCTRKECSKKTKTDDQENVSADAPSPAQENGEKGEFHKLADAKIFLSDCLACDSCMTAEEGVQLSQQNAKDFFRVLNLNKKCDTSKHKVLVVSVCPQSLPYFAAKFNLSVTDASRRLCGFLKSLGMLPFPSSLQACRFP

SEQ ID NO: 8868 - protein, 237 aa, Homo sapiens
PHPETQDSSTQTDTSHSGITNKLQHLKESHEMGQALQQARNVMQSWVLISKELISLLHLSLLHLEEDKTTVSQESRRAETLVCCCFDLLKKLRAKLQSLKAEREEARHREEMALRGKDAVGLHAKQEELVQQTVSLTSTLQQDWRSMQLDYTTWTALLSRSRQLTEKLTVKSQQALQERDVAIEEKQEVSRVLEQVSAQLEECKGQTEQLELENSRLATDLRAQLQILANMDSQLKE

SEQ ID NO: 8869 - protein, 154 aa, Homo sapiens
MAPGSFAEYTVVPASIATPVPSVKPEYLTLLVSGTTAYISLKELGGLSEGKKVLVTAAAGGTGQFAMQLSKKAKCHVIGTCSSDEKSAFLKSLGCDRPINYKTEPVGTVLKQEYPEGVDVVYESVGGAMFDLAVDALATKGRLIVIGFISGYQT

SEQ ID NO: 8870 - protein, 142 aa, Homo sapiens
MEYDLQALNIKYAMDAFGGPIWSMAASPSGSQLLVGCEDGSVKLFQITPDKIQFERNFDRQKSRILSLSWHPSGTHIAAGSIDYISVFDVKSGSAVHKMIVDRQYMGVSKRKCIVWGVAFLSDGTIISVDSAGKVQFWDSAT

SEQ ID NO: 8871 - protein, 122 aa, Homo sapiens
MPHSYPALSAEQKKELSDIALRIVAPGKGILAADESVGSMAKRLSQIGVENTEENRRLYRQVLFSADDRVKKCIGGVIFFHETLYQKDDNGVPFVRTIQDKGIVVGIKVDKGVVPLAGTDGE

SEQ ID NO: 8872 - protein, 180 aa, Homo sapiens
MPHSYPALSAEQKKELSDIALRIVAPGKGILAADESVGSMAKRLSQIGVENTEENRRLYRQVLFSADDRVKKCIGGVIFFHETLYQKDDNGVPFVRTIQDKGIVVGIKVDKGVVPLAGTDGETTTQGLDGLSERCAQYKKDGADFAKWRCVLKISERTPSALAILENANVLARYASICQQ

SEQ ID NO: 8873 - protein, 46 aa, Homo sapiens
MESPASSQPASMPQSKGRWMQRPVHIPPRPARSVVPTHPAHMCKCP

SEQ ID NO: 8874 - protein, 94 aa, Homo sapiens
MSVGFIGAGQLAFALAKGFTAAGVLAAHKIMASSPDMDLATVSALRKMGVKLTPHNKETVQHSDVLFLAVKPHIIPFILDEIGADIEDRHIVVS

SEQ ID NO: 8875 - protein, 242 aa, Homo sapiens
MASSPDMDLATVSALRKMGVKLTPHNKETVQHSDVLFLAVKPHIIPFILDEIGADIEDRHIVVSCAAGVTISSIEKKLSAFRPAPRVIRCMTNTPVVVREGATVYATGTHAQVEDGRLMEQLLSSVGFCTEVEEDLIDAVTGLSGSGPAYAFTALDALADGGVKMGLPRRLAVRLGAQALLGAAKMLLHSEQHPGQLKDNVSSPGGATIHALHVLESGGFRSLLINAVEASCIRTRELQSMA

SEQ ID NO: 8876 - protein, 144 aa, Homo sapiens
MGHCSLKLLCSREPPASPFRVARTIEIMPKFKQRRRKLKAKAERLFKKKEASHFQSKLITPPPPPPSPERVGISSIDISQSRSWLTSSWNFNFPNIRDAIKLWTNRVWSIYSWCQNCITQSLEVLKDTIFPSRICHRELYSVKQ

SEQ ID NO: 8877 - protein, 118 aa, Homo sapiens
MGNCHTVGPNEALVVSGGCCGSDYKQYVFGGWAWAWWCISDTQRLSLEVMTILCRCENIETSEGVPLFVTGVAQDFPRDYDVAAPLRGRRDGRGGSFNCDGCRPGEDHDGEGTPGRGL

SEQ ID NO: 8878 - protein, 164 aa, Homo sapiens
MEDKDREQHPQAHVDIYEKQPVPFGLVRFGVAPDHPEVKNVINTFTQTAHSGRCAFWGNVEVGRDVTVPELQEAYHAVVLSYGAEDHRALEIPGEELPGVCSARAFVGWYNGLPENQELEPDLSCDTAVILGQGNVALDVARILLTPPEHLERTDITKAALGVL

SEQ ID NO: 8879 - protein, 159 aa, Homo sapiens
EEHMRKKQQEFENIRQQNLKLITELMNERNTLQEENKKLSEQLQQKIENDQQHQAAELECEEDVIPDSPITAFSFSGVNRLRRKENPHVRYIEQTHTKLEHSVCANEMRKVSKSSTHPQHNPNENEILVADTYDQSQSPMATTVVAETLGLGVQEESET

SEQ ID NO: 8880 - protein, 66 aa, Homo sapiens
MFQKAESDLDYIQYRLEYEIKTNHPDSASEKNPVTLLKELSVIKSRYQTLYARFKPVAVEQKESKS

SEQ ID NO: 8881 - protein, 130 aa, Homo sapiens
MSYGRPPPDVEGMTSLKVDNLTYRTSPDTLRRVFEKYGRVGDVYIPRDRYTKESRGFAFVRFHDKRDAEDAMDAMDGAVLDGRELRVQMARYGRPPDSHHSRRGPPPRSRSRSRSRSRSRSRSRYSRSKS

SEQ ID NO: 8882 - protein, 50 aa, Homo sapiens
MSTNENANTPAARLHRFKNKGKDSTVKRHVIFSQGNEASQNRGQCGAEES

SEQ ID NO: 8883 - protein, 173 aa, Homo sapiens
ALAKGFTAAGVLAAHKIMASSPDMDLATVSALRKMGVKLTPHNKETVQHSDVLFLAVKPHIIPFILDEIGADIEDRHIVVSCAAGVTISSIEKKLSAFRPAPRVIRCMTNTPVVVREGATVYATGTHAQVEDGRLMEQLLSSVGFCTEVEEDLIDAVTGLSGSGPAYGAAVHG

SEQ ID NO: 8884 - protein, 225 aa, Homo sapiens
MSVGFIGAGQLAFALAKGFTAAGVLAAHKIMASSPDMDLATVSALRKMGVKLTPHNKETVQHSDVLFLAVKPHIIPFILDEIGADIEDRHIVVSCAAGVTISSIEKKLSAFRPAPRVIRCMTNTPVVVREGATVYATGTHAQVEDGRLMEQLLSSVGFCTEVEEDLIDAVTGLSGSGPAYAFTALDALADGGVKMGLPRRLAVRLGAQALLGAAKMLLHSEQHPG

SEQ ID NO: 8885 - protein, 217 aa, Homo sapiens
MSVGFIGAGQLAFALAKGFTAAGVLAAHKIMASSPDMDLATVSALRKMGVKLTPHNKETVQHSDVLFLAVKPHIIPFILDEIGADIEDRHIVVSCAAGVTISSIEKKLSAFRPAPRVIRCMTNTPVVVREGATVYATGTHAQVEDGRLMEQLLSSVGFCTEVEEDLIDAVTGLSGSGPAYAFTALDALADGGVKMGLPRRLAVRLGAQALLGAAVHG

SEQ ID NO: 8886 - protein, 87 aa, Homo sapiens
MSPVLHFYVRPSGHEGAAPGHTRRKLQGKLPELQGVETELCYNVNWTAEALPSAEETKKLMWLFGCPLLLDDVARESWLLPGSNDLL

SEQ ID NO: 8887 - protein, 271 aa, Homo sapiens
MSASQDSRSRDNGPDGMEPEGVIESNWNEIVDSFDDMNLSESLLRGIYAYGFEKPSAIQQRAILPCIKGYDVIAQAQSGTGKTATFAISILQQIELDLKATQALVLAPTRELAQQIQKVVMALGDYMGASCHACIGGTNVRAEVQKLQMEAPHIIVGTPGRVFDMLNRRYLSPKYIKMFVLDEADEMLSRGFKDQIYDIFQKLNSNTQEELTLEGIRQFYINVEREEWKLDTLCDLYETLTITQAVIFINTRRKVDWLTEKMHARDFTVSA

SEQ ID NO: 8888 - protein, 494 aa, Homo sapiens
MTIRHQGQQYRPRMAFLQKIEALVKDMQNPETGVRMQNQRVLVTSVPHAMTGSDVLQWIVQRLWISSLEAQNLGNFIVRYGYIYPLQDPKNLILKPDGSLYRFQTPYFWPTQQWPAEDTDYAIYLAKRNIKKKGILEEYEKENYNFLNQKMNYKWDFVIMQAKEQYRAGKERNKADRYALDCQEKAYWLVHRCPPGMDNVLDYGLDRVTNPNEVKVNQKQTVVAVKKEIMYYQQALMRSTVKSSVSLGGIVKYSEQFSSNDAIMSGCLPSNPWITDDTQFWDLNAKLVEIPTKMRVERWAFNFSELIRDPKGRQSFQYFLKKEFSGENLGFWEACEDLKYGDQSKVKEKAEEIYKLFLAPGARRWINIDGKTMDITVKGLKHPHRYVLDAAQTHIYMLMKKDSYARYLKSPIYKDMLAKAIEPQETTKKRQLHPPFYAASPALQPKPCHPETAGRGSQGPRSSQHCGHHPAGPAHGSQPPSDRVHRDLHAPVSF

SEQ ID NO: 8889 - protein, 72 aa, Homo sapiens
LINNQDSDFPGLFDPPYAGSGAGGTDPASPDTSSPGSLSPPPATLSSSLEAFLSGPQAAPSPLSRVWSPSSY

SEQ ID NO: 8890 - protein, 347 aa, Homo sapiens
MSASQDSRSRDNGPDGMEPEGVIESNWNEIVDSFDDMNLSESLLRGIYAYGFEKPSAIQQRAILPCIKGYDVIAQAQSGTGKTATFAISILQQIELDLKATQALVLAPTRELAQQIQKVVMALGDYMGASCHACIGGTNVRAEVQKLQMEAPHIIVGTPGRVFDMLNRRYLSPKYIKMFVLDEADEMLSRGFKDQIYDIFQKLNSNTQVVLLSATMPSDVLEVTKKFMRDPIRILVKKEELTLEGIRQFYINVEREEWKLDTLCDLYETLTITQAVIFINTRRKVDWLTEKMHARDFTVSAMHGDMDQKERDVIMREFRSGSSRVLITTDLLGKLYPQNRSRWTVWP

SEQ ID NO: 8891 - protein, 165 aa, Homo sapiens
MSVGFIGAGQLAFALAKGFTAAGVLAAHKIMASSPDMDLATVSALRKMGVKLTPHNKETVQHSDVLFLAVKPHIIPFILDEIGADIEDRHIVVSCAAGVTISSIEKKLSAFRPAPRVIRCMTNTPVVVREGATVYATGTHAQVEDGRLMEQLLSSVGFCTEVEED

SEQ ID NO: 8892 - protein, 134 aa, Homo sapiens
MSTNENANTPAARLHRFKNKGKDSTEMRRRRIEVNVELRKAKKDDQMLKRRNVSSFPDDATSPLQENRNNQGTVNWSVDDIVKGINSSNVENQLQATQAARKLLSREKQPPIDNIIRAGLIPKFVSFLGRTDCS

SEQ ID NO: 8893 - protein, 161 aa, Homo sapiens
MKLQTLAVSVTALKFWSAYVPCQTQDRDALRLTLEQIDLIRRMCASYSELELVTSAKALNDTQKLACLIGVEGGHSLDNSLSILRTFYMLGVRYLTLTHTCNTPWAESSAKGVHSFYNNISGLTDFGEKVVAEMNRLGMMVDLSHVSDAVARRALEVSQAP

SEQ ID NO: 8894 - protein, 182 aa, Homo sapiens
MPQTRSQAQATISFPKRKLSRALNKAKNSSDAKLEPTNVQTVTCSPRVKALPLSPRKRLGDDNLCNTPHLPPCSPPKQGKKENGPPHSHTLKGRRLVFDNQLTIKSPSKRELAKVHQNKILSSVRKSQEITTNSEQRCPLKKESACVRLFKQEGTCYQQAKLVLNTAVPDRLPAREREMDVI

SEQ ID NO: 8895 - protein, 230 aa, Homo sapiens
MSRSNVQPTAAPGQKVMENSSGTPDILTRRHFTIDDFEIGRPLGKGKFGNVYLAREKKSHFIVALKVLFKSQIEKEGVEHQLRREIEIQAHLHHPNILRLYNYFYDRRRIYLILEYAPRGELYKELQKSCTFDEQRTATIMEELADALMYCHGKKVIHRDIKPENLLLGLKGELKIADFGWSVHAPSLRRKTMCGTLDYLPPEMIEGRMHNEKVDLWCIGVLCYELLVGN

SEQ ID NO: 8896 - protein, 99 aa, Homo sapiens
MKCEHCTRKECSKKTKTDDQENVSADAPSPAQENGEASRFFSFVSAQSKLLLLFFSLGAHSTVHITALKKTEVRGHGGSRLESQHFGRPRWTDHLRSGV

SEQ ID NO: 8897 - protein, 190 aa, Homo sapiens
MQLRKGKDPKIEEFVPPDENCPLKEASSRRIPRLTVKAREHCLRLLEEALSSNRQSTRTADEADLRAKAVELEHETFRNAKVANLYKASVLKKVADIHRASKDGQPYDMGGSAKSCSAQAEPPEPNEYDIPPASHVYSLKPKRVGAGFPKGSCPFQTATELMETTRIREQAPQPERGGEHEPPSRPCGLL

SEQ ID NO: 8898 - protein, 205 aa, Homo sapiens
MNISGSSCGSPNSADTSSDFKDLWTKLKECHDREVQGLQVKVTKLKQERILDAQRLEEFFTKNQQLREQQKVLHETIKVLEDRLRAGLCDRCAVTEEHMRKKQQEFENIRQQNLKLITELMNERNTLQEENKKLSEQLQQKIENDQQHQAAELECEEDVIPDSPITAFSFSGVNRLRRKENPHVRYIEQTHTKLEHSVCANEMRK

SEQ ID NO: 8899 - protein, 110 aa, Homo sapiens
MRPLTEEETRVMFEKIAKYIGENLQLLVDRPDGTYCFRLHNDRVYYVSEKIMKLAANISGDKLVSLGTCFGKFTKTHKFRLHVTALDYLAPYAKVCGAVSNSATGDEVKD

SEQ ID NO: 8900 - protein, 22 aa, Homo sapiens
MGILEKISEIEKEIARTQKNKD

SEQ ID NO: 8901 - protein, 95 aa, Homo sapiens
MSASQDSRSRDNGPDGMEPEGVIESNWNEIVDSFDDMNLSESLLRGIYAYGFEKPSAIQQRAILPCIKDTEGGHGTRRLHGRLLSRLYRGHQRAC

SEQ ID NO: 8902 - protein, 101 aa, Homo sapiens
MAPGSFAEYTVVPASIATPVPSVKPEYLTLLVSGTTAYISLKELGGLSEGKKVLVTAAAGGTGQFAMQLSKKAKCHVIGTCSSDEKSAFLKSLGCDRPINY

SEQ ID NO: 8903 - protein, 107 aa, Homo sapiens
MKFNPFVTSDRSKNRKRHFNAPSHIRRKIMSSPLSKELRQKYNVRSMPIRKDDEVQVVRGHYKGQQIGKVVQVYRKKYVIYIERVQREKANGTTVHVGIHPSKVVYI

SEQ ID NO: 8904 - protein, 52 aa, Homo sapiens
KSQMDLRKLLRKVDVERSPGGTPLTNKENMETGTGLTPVMTQALRRKFQVTL

SEQ ID NO: 8905 - protein, 171 aa, Homo sapiens
MVRYSLDPENPTKSCKSRGSNLRVHFKNTRETAQAIKGMHIRKATKYLKDVTLQKQCVPFRRYNGGVGRCAQAKQWGWTQGRWPKKSAEFLLHMLKNAESNAELKGLDVDSLVIEHIQVNKAPKMRRRTYRAHGRINPYMSSPCHIEMILTEKEQIVPKPEEEVAQKKKIS

SEQ ID NO: 8906 - protein, 20 aa, Homo sapiens
MVFKAQLFALTGVQPARQKV

SEQ ID NO: 8907 - protein, 34 aa, Homo sapiens
MVMATVKKGKPELRKKVHPAVVIRQRKSYRRKDG

SEQ ID NO: 8908 - protein, 110 aa, Homo sapiens
MKFNPFVTSDRSKNRKRHFNAPSHIRRKIMSSPLSKELRQKYNVRSMPIRKDDEVQVVRGHYKGQQIGKVVQVYRKKYVIYIERVQREKANGTTVHVGIHPSKVGVFENA

SEQ ID NO: 8909 - protein, 463 aa, Homo sapiens
MASRCWRWWGWSAWPRTRLPPAGSTPSFCHHFSTQEKTPQICVVGSGPAGFYTAQHLLKQHPQAHVDIYEKQPVPFGLVRFGVAPDHPEVKNVINTFTQTAHSGRCAFWGNVEVGRDVTVPELQEAYHAVVLSYGAEDHRALEIPGEELPGVCSARAFVGWYNGLPENQELEPDLSCDTAVILGQGNVALDVARILLTPPEHLERTDITKAALGVLRQSRVKTVWLVGRRGPLQVAFTIKVPRPRKRLTELLLRTATEKPGPAEAARQASASRAWGLRFFRSPQQVLPSPDGRRAAGVRLAVTRLEGVDEATRAVPTGDMEDLPCGLVLSSIGYKSRPVDPSVPFDSKLGVIPNVEGRVMDVPGLYCSGWVKRGPTGVIATTMTDSFLTGQMLLQDLKAGLLPSGPRPGYAAIQALLSSRGVRPVSFSDWEKLDAEEVARGQGTGKPREKLVDPQEMLRLLGH

SEQ ID NO: 8910 - protein, 461 aa, Homo sapiens
MTMRSAVFKAAAAPAGGNPEQRLDYERAAALGGPEDEPGAAEAHFLPRHRKLKEPGPPLASSQGGSPAPSPAGCGGKGRGLLLPAGAAPGQQEESWGGSVPLPCPPPATKQAGIGGEPAAAGAGCSPRPKYQAVLPIQTGSLVAAAKEPTPWAGDKGGAASPAATASDPAGPPPLPLPGPPPLAPTATAGTLAASEGRWKSMRKSPLGGGGGSGASSQAACLKQILLLQLDLIEQQQQQLQAKEKEIEELKSERDTLLARIERMERRMQLVKKDNEKERHKLFQGYETEEREETELSEKIKLECQPELSETSQTLPPKPFSCGRSGKGHKRKSPFGSTERKTPVKKLAPEFSKVKTKTPKHSPIKEEPCGSLSETVCKRELRSQETPEKPRSSVDTPPRLSTPQKGPSTHPKEKAFSSEIEDLPYLSTTEMYLCRWHQPPPSPLPLRESSPKKEETVASKA

SEQ ID NO: 8911 - protein, 75 aa, Homo sapiens
EGAGAGSGFRKELVSRLLHLHFKDDKTKVSGDALQLMVELLKVFVVEAAVRGVRQAQAEDALRVDVDQLEKLLDF

SEQ ID NO: 8912 - protein, 193 aa, Homo sapiens
MRLQKRLASSVLRCGKKKVWLDPNETNEIANANSRQQIRKLIKDGLIIRKPVTVHSRARCRKNTLARRKGRHMGIGKRKGTANARMPEKVTWMRRMRILRRLLRRYRESKKIDRHMYHSLYLKVKGNVFKNKRILMEHIHKLKADKARKKLLADQAEARRSKTKEARKRREERLQAKKEEIIKTLSKEEETKK

SEQ ID NO: 8913 - protein, 344 aa, Homo sapiens
MAQKENSYPWPYGRQTAPSGLSTLPQRVLRKEPVTPSALVLMSRSNVQPTAAPGQKVMENSSGTPDILTRHFTIDDFEIGRPLGKGKFGNVYLAREKKSHFIVALKVLFKSQIEKEGVEHQLRREIEIQAHLHHPNILRLYNYFYDRRRIYLILEYAPRGELYKELQKSCTFDEQRTATIMEELADALMYCHGKKVIHRDIKPENLLLGLKGELKIADFGWSVHAPSLRRKTMCGTLDYLPPEMIEGRMHNEKVDLWCIGVLCYELLVGNPPFESASHNETYRRIVKVDLKFPASVPMGAQDLISKLLRHNPSERLPLAQVSAHPWVRANSRRVLPPSALQSVA

SEQ ID NO: 8914 - protein, 172 aa, Homo sapiens
MSRSNVQPTAAPGQKVMENSSGTPDILTRHFTIDDFEIGRPLGKGKFGNVYLAREKKSHFIVALKVLFKSQIEKEGVEHQLRREIEIQAHLHHPNILRLYNYFYDRRRIYLILEYAPRGELYKELQKSCTFDEQRTATIMEELADALMYCHGKKVIHRDIKPENLLLGLKGE

SEQ ID NO: 8915 - protein, 91 aa, Homo sapiens
MAMLVLVPGRVMRPLGGQLWRFLPRGLEFWGPAEGTARVLLRQFCARQAEAWRASGRPGYCLGTRPLSTARPPPPWSQKGPGDSTRPSKPG

SEQ ID NO: 8916 - protein, 118 aa, Homo sapiens
MPQTRSQAQATISFPKRKLSRALNKAKNSSDAKLEPTNVQTVTCSPRVKALPLSPRKRLGDDNLCNTPHLPPCSPPKQGKKENGPPHSHTLKGRRLVFDNQLTIKSPSKRELAKVHQN

SEQ ID NO: 8917 - protein, 199 aa, Homo sapiens
MPKFKQRRRKLKAKAERLFKKKEASHFQSKLITPPPPPPSPERVGISSIDISQSRSWLTSSWNFNFPNIRDAIKLWTNRVWSIYSWCQNCITQSLEVLKDTIFPSRICHRELYSVKQQFCILESKLCKLQEALKTISESSSCPSCGQTCHMSGKLTNVPACVLITPGDSKAVLPPTLPQPASHFPPPPPPPPLPPPPPP

SEQ ID NO: 8918 - protein, 27 aa, Homo sapiens
AVAPRAKSVRAKKPIKYLEESDEDDLF

SEQ ID NO: 8919 - protein, 213 aa, Homo sapiens
AWAHCARGRHRPRPPTSGSRDNGPDGMEPEGVIESNWNEIVDSFDDMNLSESLLRGIYAYGFEKPSAIQQRAILPCIKGYDVIAQAQSGTGKTATFAISILQQIELDLKATQALVLAPTRELAQQIQKVVMALGDYMGASCHACIGGTNVRAEVQKLQMEAPHIIVGTPGRVFDMLNRRYLSPKYIKMFVLDEADEMLSRGFKDQIYDIFQKL

SEQ ID NO: 8920 - protein, 74 aa, Homo sapiens
MSASQDSRTEPNPEERPREAPGAHPAPGGRVHFAAQAGLLANCGWAGPPSFGGERPEIQRQWPRWDGARRRHRE

SEQ ID NO: 8921 - protein, 132 aa, Homo sapiens
MSVGFIGAGQLAFALAKGFTAAGVLAAHKIMASSPDMDLATVSALRLSAFRPAPRVIRCMTNTPVVVREGATVYATGTHAQVEDGRLMEQLLSSVGFCTEVEEDLIDAVTGLSGSGPAYAFTALDALADGGV

SEQ ID NO: 8922 - protein, 247 aa, Homo sapiens
MASFPPRVNEKEIVRLRTIGELLAPAAPFDKKCGRENWTVAFAPDGSYFAWSQGHRTVKLVPWSQCLQNFLLHGTKNVTNSSSLRLPRQNSDGGQKNKPREHIIDCGDIVWSLAFGSSVPEKQSRCVNIEWHRFRFGQDQLLLATGLNNGRIKIWDVYTGKLLLNLVDHTEVVRDLTFAPDGSLILVSASRDKTLRVWDLKDDGNMMKVLRGHQNWVYSCAFSPDSSMLCSVGASKAVRVKVLVHSL

SEQ ID NO: 8923 - protein, 134 aa, Homo sapiens
KFNPFVTSDRSKNRKRHFNAPSHIRRKIMSSPLSKELRQKYNVRSMPIRKDDEVQVVRGHYKGQQIGKVVQVYRKKYVIYIERVQREKANGTTVHVGIHPSKAKTGQRPQKDPRTESQISPSRKGKGQIQGRNH

SEQ ID NO: 8924 - protein, 76 aa, Homo sapiens
MDGEDIPDFSSLKEETAYWKELSLKYKQSRRGHLWPVLHALILPHHFGHLEILISCLGLHRTDFTFSSASRKLGMS

SEQ ID NO: 8925 - protein, 70 aa, Homo sapiens
THKFRLHVTALDYLAPYAKYKVWIKPGAEQSFLYGNHVLKSGLGRITENTSQYQGVVVYSMADIPLCLFF

SEQ ID NO: 8926 - protein, 107 aa, Homo sapiens
MKFNPFVTSDRSKNRKRHFNAPSHIRRKIMSSPLSKELRQKYNVRSMPIRKDDEVQVVRGHYKGQQIGKVVQVYRKKYVIYIERVQREKANGTTVHVGIHPSKVVIT

SEQ ID NO: 8927 - protein, 57 aa, Homo sapiens
QEQDLEKTRQYSQKLGLLTEQLQSLTLFLQTKLKEKTMFQESRNIAFFGLPAVCTKQ

SEQ ID NO: 8928 - protein, 169 aa, Homo sapiens
MRAAAISTPKLDKMPGMFFSANPKELKGTTHSLLDDKMQKRRPKTFGMDMKAYLRSMIPHLESGMKSSKSKDVLSAAEVMQWSQSLEKLLANQTGQNVFGSFLKSEFSEENIEFWLACEDYKKTESDLLPCKAEEIYKAFVHSDAAKQVSIKLIIISFSIKDPICRNNI

SEQ ID NO: 8929 - protein, 78 aa, Homo sapiens
KTHKFRLHVTALDYLAPYAKYKVWIKPGAEQSFLYGNHVLKSGLGRITENTSQYQGVVVYSMADIPLTLGNMCGMKRR

SEQ ID NO: 8930 - protein, 151 aa, Homo sapiens
MLDVLQELRGTVAQQVTGSSGTVKVVVVDSVTAVVSPLLGGQQREGLALMMQLARELKTLARDLGMAVVVTNHITRDRDSGRLKPALGRSWSFVPSTRILLDTIEGAGASGGRRMACLAKSSRQPTGFQEMVDIGTWGTSEQSATLQGDQT

SEQ ID NO: 8931 - protein, 131 aa, Homo sapiens
MEGAGAGSGFRKELVSRLLHLHFKDDKTKVSGDALQLMVELLKVFVVGEPRAHAPSGHSIRNFAFFQRENQDVFSRFPQGPKLGSPEPVCQKQQSAACGRPRQKTRSVWTWTSWRRCFRSCSWTSRDLSRG

SEQ ID NO: 8932 - protein, 22 aa, Homo sapiens
MPKFKQRRRKLKAKAERLFKKK

SEQ ID NO: 8933 - protein, 73 aa, Homo sapiens
MWRVKKLSLSLSPSPQTGKPSMRTPLRELTLQPGALTNSGKRSPACSSLTPSLCKLGLQQISVSIMWTQRRKL

SEQ ID NO: 8934 - protein, 103 aa, Homo sapiens
MDRLARGTQSIPNDSPARGEGTHSEEEGFAMDEEDSDGELNTWELSEGTNCPPKEQPGDLFNEDWDSELKADQGNPYDADDIQESISQELKPWVCCAPQGDMI

SEQ ID NO: 8935 - protein, 187 aa, Homo sapiens
MAAAAVVEFQRAQSLLSTDREASIDILHSIVKRDIQENDEEAVQVKEQSILELGSLLAKTGQAAELGGLLKYVRPFLNSISKAKAARLVRSLLDLFLDMEAATGQEFLFVTGHLILWVCSMLCFVSGDCQWSLESSLHQGHKLILVFEVELCLECIEWAKSEKRTFLRQALEARLVSLYFDTKRYQE

SEQ ID NO: 8936 - protein, 115 aa, Homo sapiens
MSVGFIGAGQLAFALAKGFTAAGVLAAHKIMASSPDMDLATVSALRKMGVKLTPHNKETVQHSDVLFLAVKPHIIPFILDEIGADIEDRHIVVSCAAGVTISSIEKKLSAFRPAP

SEQ ID NO: 8937 - protein, 158 aa, Homo sapiens
MTHLLLTATVTPSEQNSSREPGWETAMAKDILGEAGLHFDELNKLRVLDPEVTQQTIELKEECKDFVDKIGQFQKIVGGLIELVDQLAKEAENEKMKAIGARNLLKSIAKQREAQQQQLQALIAEKKMQLERYRVEYEALCKVEAEQNEFIDQFIFQK

SEQ ID NO: 8938 - protein, 129 aa, Homo sapiens
SRRAETLVCCCFDLLKKLRAKLQSLKAEREEARHREEMALRGKDAVGLHAKQEELVQQTVSLTSTLQQDWRSMQLDYTTWTALLSRSRQLTEKLTVKSQQALQERDVAIEEKQEISGLSCRFWPTWTAS

SEQ ID NO: 8939 - protein, 89 aa, Homo sapiens
KTYHALSNLPKARAALTSARTTANAIYCPPKLQATLDMQSGIIHAAEEKDWKTAYSYFYEAFEGYDSIDSPKAITSLKYMLLCKIMLNT

SEQ ID NO: 8940 - protein, 21 aa, Homo sapiens
MFFSAALRARAAGLTAHWRRI

SEQ ID NO: 8941 - protein, 300 aa, Homo sapiens
MSASQDSRSRDNGPDGMEPEGVIESNWNEIVDSFDDMNLSESLLRGIYAYGFEKPSAIQQRAILPCIKGYDVIAQAQSGTGKTATFAISILQQIELDLKATQALVLAPTRELAQQKVVMALGDYMGASCHACIGGTNVRAEVQKLQMEAPHIIVGTPGRVFDMLNRRYLSPKYIKMFVLDEADEMLSRGFKDQIYDIFQKLNSNTQVVLLSATMPSDVLEVTKKFMRDPIRILVKKEELTLEGIRQFYINVEREEWKLDTLCDLYETLTITQAVIFINTRRKVDWLTEKMHARDFTVSAM

SEQ ID NO: 8942 - protein, 125 aa, Homo sapiens
PVQPAFSTVPFSQPVCFPPRPRGRRQKTQTVIHTVQSAPGQMFSTPAIPPMMYPHPAYPMPFITTILGGLYPSKSILLSGTVLPSAQRFHINLCSGNHIAFHLNPRFDENAVVRNTQIDNSWGSE

SEQ ID NO: 8943 - protein, 138 aa, Homo sapiens
MVRYSLDPENPTKSCKSRGSNLRVHFKNTRETAQAIKGMHIRKATKYLKDVTLQKQCVPFRRYNGGVGRCAQAKQWGWTQGRWPKKSAEFLLHMLKNAESNAELKGLDVDSLVIEHIQVNKAPKMRRRTYRAHGRINP

SEQ ID NO: 8944 - protein, 126 aa, Homo sapiens
MAPSRNGMVLKPHFHKDWQRRVATWFNQPARKIRRRKARQAKARRIAPRPASGPIRPIVRCPTVRYHTKVRAGRGFSLEELRVAGIHKKVARTIGISVDPRRRNKSTESLQANVQRLKEYRSKLIL

SEQ ID NO: 8945 - protein, 94 aa, Homo sapiens
MALRYPMAVGLNKGHKVTKNVSKPRHSRRRGRLTKHTKFVRDMIREVCGFAPYERRAMELLKVSKDKRALKFIKKRVGGRCRPRGGVGWESGPG

SEQ ID NO: 8946 - protein, 994 aa, Homo sapiens
MSSMWSEYTIGGVKIYFPYKAYPSQLAMMNSILRGLNSKQHCLLESPTGSGKSLALLCSALAWQQSLSGKPADEGVSEKAEVQLSCCCACHSKDFTNNDMNQGTSRHFNYPSTPPSERNGTSSTCQDSPEKTTLAAKLSAKKQASIYRDENDDFQVEKKRIRPLETTQQIRKRHCFGTEVHNLDAKVDSGKTVKLNSPLEKINSFSPQKPPGHCSRCCCSTKQGNSQESSNTIKKDHTGKSKIPKIYFGTRTHKQIAQITRELRRTAYSGVPMTILSSRDHTCVHPEVVGNFNRNEKCMELLDGKNGKSCYFYHGVHKISDQHTLQTFQGMCKAWDIEELVSLGKKLKACPYYTARELIQDADIIFCPYNYLLDAQIRESMDLNLKEQVVILDEAHNIEDCARESASYSVTEVQLRFARDELDSMVNNNIRKKDHEPLRAVCCSLINWLEANAEYLVERDYESACKIWSGNEMLLTLHKMGITTATFPILQGHFSAVLQKEEKISPIYGKEEAREVPVISASTQIMLKGLFMVLDYLFRQNSRFADDYKIAIQQTYSWTNQIDISDKNGLLVLPKNKKRSRQKTAVHVLNFWCLNPAVAFSDINGKVQTIVLTSGTLSPMKSFSSELGVTFTIQLEANHIIKNSQVWVGTIGSGPKGRNLCATFQNTETFEFQDEVGALLLSVCQTVSQGILCFLPSYKLLEKLKERWLSTGLWHNLELVKTVIVEPQGGEKTNFDELLQVYYDAIKYKGEKDGALLVAVCRGKVSEGLDFSDDNARAVITIGIPFPNVKDLQVELKRQYNDHHSKLRGLLPGRQWYEIQAYRALNQALGRCIRHRNDWGALILVDDRFRNNPSRYISGLSKWVRQQIQHHSTFESALESLAEFSKKHQKVLNVSIKDRTNIQDNESTLEVTSLKYSTSPYLLEAASHLSPENFVEDEAKICVQELQCPKIITKNSPLPSSIISRKEKSMKSSSHLPLIEKSFIIFSEMIFIWV

SEQ ID NO: 8947 - protein, 135 aa, Homo sapiens
MSPVLHFYVRPSGHEGAAPGHTRRKLQGKLPELQGVETELCYNVNWTAEALPSAEETKKLMWLFGCPLLLDDVARESWLLPGSNDLLLEVGPRLNFSTPTSTNIVSVCRATGLGPVDRVETTRRYRLSFAHPPSA

SEQ ID NO: 8948 - protein, 324 aa, Homo sapiens
PCSQECIILQPLNKCSPDNKPSLQIKEENAVFKIPLRPRESLETENVLDDIKSAGSHEPIKIQTRSDHGGCELASVLQLNPCRTGKIKSLQNNQDVSFENIQWSIDPGADLSQYKMDVTVIDTKDGSQSKLGGETVDMDCTLVSETVLLKMKKQEQKGEKSSNEERKMNDSLEDMFDRTTHEEYESCLADSFSQAADEEEELSTATKKLHKRLACKIFLILRWFGKKRREENCLGTRVRNVKFIMQICQQKKEKRNWLPAQDTDSATFHPTHQRIFGKLVFLPLRLVWKEVILRKILILVLVQKDVSLTTQYFLQKARSRRHRR

SEQ ID NO: 8949 - protein, 235 aa, Homo sapiens
MDLSTFDFRTGKMLMSKMNKSRQRVRYDSSNQVKGKPDLNTALPVRQTASIFKQPVTKITNHPSNKVKSDPQKAVDQPRQLFWEKKLSGLNAFDIAEELVKTMDLPKGLQGVGPGCTDETLLSAIASALHTSTMPITGQLSAAVEKNPGVWLNTTQPLCKAFMVTDEDIRKQEELVQQVRKRLEEALMADMLAHVEELARDGEAPLDKACAEDDDEEDEEEEEEEPDPDPEMEHV

SEQ ID NO: 8950 - protein, 74 aa, Homo sapiens
MSLPPEKASELKQLIHQQLSKMDVHGRIREILAETIREELAPDQQHLSTEDLIKALRRRGIIDDVMKELNFVTC

SEQ ID NO: 8951 - protein, 184 aa, Homo sapiens
GMPCGIMDQFISLMGQKGHALLIDCSEYPVRRRQCEEVARALGKESLREVQLEELEAARDLVSKEGFRRARHVVGEIRRTAQAAAALRRGDYRAFGRLMVESHRSLRDDYEVSCPELDQLVEAALAVPGVYGSRMTGGGFGGCTVTLLEASAAPHAMRHIQEHYGGTATFYLSQAADGAKVLCL

SEQ ID NO: 8952 - protein, 99 aa, Homo sapiens
MERLLHAKAHGVRVIGSSTLALCHLASGAADAYYQFGLHCWDLAAATVIIREAGGIVIDTSGGPLDLMACRVVAASTREMAMLIAQALQTINYGRDDEK

SEQ ID NO: 8953 - protein, 116 aa, Homo sapiens
MVALCSLQHLGSSDPRALPTLPTATSGQRPAKRRRKSPAMAALTRDPQFQKLQQWYREHRSELNLRRLFDANKDRFNHFSLTLNTNHGHILVDYSKNLVTEDVMRMLVDLAKSRGV

SEQ ID NO: 8954 - protein, 125 aa, Homo sapiens
MAEQDVENDLLDYDEEEEPQAPQESTPAPPKKDIKGSYVSIHSSGFRDFLLKPELLRAIVDCGFEHPSEVQHECIPQAILGMDVLCQAKSGMGKTAVFVLATLQQIEPVNGQVTVLVMCHTRELA

SEQ ID NO: 8955 - protein, 81 aa, Homo sapiens
MAKVSVLNVAVLENPSPFHSPFRFEISFECSEALADDLEWKIIYVGSAESEEFDQILDSVLVGPVPAGRHMFVFQRLMPWV

SEQ ID NO: 8956 - protein, 409 aa, Homo sapiens
MAAPMEVAVCTDSAAPMWSCIVWELHSGANLLTYRGGQAGPRGLALLNGEYLLAAQLGKNYISAWELQRKDQLQQKIMCPGPVTCLTASPNGLYVLAGVAESIHLWEVSTGNLLVILSRHYQDVSCLQFTGDSSHFISGGKDCLVLVWSLCSVLQADPSRIPAPRHVWSHHALPITDLHCGFGGPLARVATSSLDQTVKLWEVSSGELLLSVLFDVSIMAVTMDLAEHHMFCGGSEGSIFQVDLFTWPGQRERSFHPEQDAGKVFKGHRNQVTCLSVSTDGSVLLSGSHDETVRLWDVQSKQCIRTVALKGPVTNAAILLAPVSMLSSDFRPSLPLPHFNKHLLGAEHGDEPRHGGLTLRLGLHQQSVLGGQDQLRVRVTELEDEVRNLRKINRDLFDFSTRFITRPAK

SEQ ID NO: 8957 - protein, 265 aa, Homo sapiens
MPREIITLQLGQCGNQIGFEFWKQLCAEHGISPEGIVEEFATEGTDRKDVFFYQADDEHYIPRAVLLDLEPRVIHSILNSPYAKLYNPENIYLSEHGGGAGNNWASGFSQVVSYSLAGPTTRWGEKIHEDIFDIIDREADGSDSLEGFVLCHSIAGGTGSGLGSYLLERLNDRYPKKLVQTYSVFPNQDEMSDVVVQPYNSLLTLKRLTQNADCVVVLDNTALNRIATDRLHIQNPSFSQINQLVSTIMSASTTTLRYPGYMNND

SEQ ID NO: 8958 - protein, 150 aa, Homo sapiens
MRYNEKELQALSRQPAEMAAELGMRGPKKGSVLKRRLVKLVVNFLFYFRTDEAEVGASRARGRVPGWAPRRPGAHCPVPAPVSPPARRSPAAGALQSRPGRARHLLHHYEFMRRSLIFYRNEIRKVTGKDPLEQFGISEEARFQLSGLQA

SEQ ID NO: 8959 - protein, 82 aa, Homo sapiens
MVDHLANTEINSQRIAAVESCFGASGQPLALPGRVLLGEGVLTKECRKKAKPRIFFLFNDILVYGSIVLNKRKYRSQHIIPL

SEQ ID NO: 8960 - protein, 93 aa, Homo sapiens
MMDVSGVGFPSKVPWKKMSAEELENQYCPSRWVVRLGAEEALRTYSQIGIEALPFFLFFHGGYWQSGRPCVKESGKPHLKSSTMWTTLKLLRI

SEQ ID NO: 8961 - protein, 109 aa, Homo sapiens
MFKGPEKDIEFIYTAPSSAVCGVSLDVGGKKEYLIAGKAEGDGKMHITLCDFIVPWDTLSTTQKKSLNHRYQMGCECKVSRSCLCWSIASSQCLQMDGRDFDPWLSRTR

SEQ ID NO: 8962 - protein, 338 aa, Homo sapiens
EDEEGLGPPGPASLGTTALFPRKAQPPQAFRGDGVPRVLGGQERPGPGPAHPGGAAHVAPQLQPPDHGDWTYEEQFKQLYELDGDPKRKEFLDDLFSFMQKRGTPVNRIPIMAKQVLDLFMLYVLVTEKGGLVEVINKKLWREITKGLNLPTSITSAAFTLRTQYMKYLYPYECEKRGLSNPNELQAAIDSNRREGRRQSFGGSLFAYSPGGAHGMLSSPKLPVSSLGLAASTNGSSITPAPKIKKASESRQDSAVNLTGTNGSNSISMSVEINGIMYTGVLFAQPPAPTPTSAPNKGGGGGGGSSSNAGGRGGNTGTSGGQAGPAGLSTPSTSTSNN

SEQ ID NO: 8963 - protein, 75 aa, Homo sapiens
SSTSNAECDCTPGFHCLGAGCSMCEQDCKQGQELTKKGCKDCCFGTFNDQKRGICRPWTNIRVADEWNHDSQEKY

SEQ ID NO: 8964 - protein, 68 aa, Homo sapiens
MGNCHTVGPNEALVVSGGCCGSDYKQYVFGGWAWAWWCISDTQRDPDSGADLSGPGPVCQAGAGGGSP

SEQ ID NO: 8965 - protein, 134 aa, Homo sapiens
MKDFGSRQEFDSVENAGAIGPSRFGLKRAEVLGHKTPEPAPRRTEITIVKPQESAHRRMEPPASKVPEVPTAPATDAAPKRVEIQMPKPAEAPTAPSPAQTLENSEPAPVSQLQSRLEPKPQPPVAEATPRSQE

SEQ ID NO: 8966 - protein, 214 aa, Homo sapiens
MGNVLAASSPPAGPPPPPAPALVGLPPPPPSPPGFTLPPLGGSLGAGTSTSRSSERTPGAATASASGAAEDGACGCLPNPGTFEECHRKCKELFPIQMEGVKLTVNKGLSNHFQVNHTVALSTIGESNYHFGVTYVGTKQLSPTEAFPVLVGDMDNSGSLNAQVIHQLGPGLRSKMAIQTQQSKFVNWQVDGEYRGSDFTAAVTLGNPDVLVGS

SEQ ID NO: 8967 - protein, 78 aa, Homo sapiens
MALSEPILPSFSTFASPCRERGLQEVRSPTTATGTAAAGSLRAQTSSRATTESTRATGHSSAICAIVPSRAPITWRCT

SEQ ID NO: 8968 - protein, 129 aa, Homo sapiens
MAEVEQKKKRTFRKFTYRGVDLDQLLDMSYEQLMQLYSARQRRRLNRGLRRKQHSLLKRLRKAKKEAPPMEKPEVVKTHLRDMIILPEMVGSMVGVYNGKTFNQVEIKVCAAVPAGWGGLGSPDAGGIS

SEQ ID NO: 8969 - protein, 177 aa, Homo sapiens
MFQAFPGDYDSGSRCSSSPSAESQYLSSVDSFGSPPTAAASQECAGLGEMPGSFVPTVTAITTSQDLQWLVQPTLISSMAQSQGQPLASQPPVVDPYDMPGTSYSTPGMSGYSSGGASGSGGPSTSGTTSGPGPARPARARPRRPREETVSKGHQNLAWVGGSKRGRKFLMNGGGLH

SEQ ID NO: 8970 - protein, 197 aa, Homo sapiens
MAAFRDIEEVSQGLLSLLGANRAEAQQRRLLGRHEQVVERLLETQDGAEKQLREILTMEKEVAQSLLNAKEQVHQGGVELQQLEAGLQEAGEEDTRLKASLLQLTRELEELKEIEADLERQEKEVDEDTTVTIPSAVYVAQLYHQVSKIEWDYECEPGMVKGIHHGPSVAQPIHLDSTQLSRKFISDYLWSLVDTEW

SEQ ID NO: 8971 - protein, 43 aa, Homo sapiens
MEEEASSPGLGCSKPHLEKLTLGITRILEKPPAERHMISSWEQ

SEQ ID NO: 8972 - protein, 183 aa, Homo sapiens
MGATEPGGDTSSVCVWTATLSVRVCDEFHPFIEALLPHVRAFSYTWFNLQARKRKYFKKHEKRMSKDEERAVKDELLGEKPEIKQKWASRLLAKLRKDIRPEFREDFVLTITGKKPPCCVLSNPDQKGKIRRIDCLRQADKVWRLDLVMVILFKGIPLESTDGERLYKSPQCSNPGLCVQPHH

SEQ ID NO: 8973 - protein, 512 aa, Homo sapiens
MEEPQAGGEDAARFSCPPNFTAKPPASESPRFSLEALTGPDTELWLIQAPADFAPECFNGRHVPLSGSQIVKGKLAGKRHRYRVLSSCPQAGEATLLAPSTEAGGGLTCASAPQGTLRILEGPQQSLSGSPLQPIPASPPPQIPPGLRPRFCAFGGNPPVTGPRSALAPNLLTSGKKKKEMQVTEAPVTQEAVNGHGALEVDMALGSPEMDVRKKKKKKNQQLKEPEAAGPVGTEPTVETLEPLGVLFPSTTKKRKKPKGKETFEPEDKTVKQEQINTEPLEDTVLSPTKKRKRQKGTEGMEPEEGVTVESQPQVKVEPLEEAIPLPPTKKRKKEKGQMAMMEPGTEAMEPVEPEMKPLESPGGTMAPQQPEGAKPQAQAALAAPKKKTKKEKQQDATVEPETEVVGPELPDDLEPQAAPTSTKKKKKKKERGHTVTEPIQPLEPELPGEGQPEARATPGSTKKRKKQSQESRMPETVPQEEMPGPPLNSESGEEAPTGRDKKRKQQQQQPV

SEQ ID NO: 8974 - protein, 35 aa, Homo sapiens
MSADGAEADGSTQVTVEEPVQQPSVVDRVASMPLI

SEQ ID NO: 8975 - protein, 212 aa, Homo sapiens
DLSSASEDDFDSEDSEQELKGYACRHCFTTTSKDWHHGGRENILLCTDCRIHFKKYGELPPIEKPVDPPPFMFKPVKEEDDGLSGKHSMRTRRSRGSVSPLGPWGSWQLLQFPGMCGGLSLPGGGSESLVYQTKSWRGAALPEAVACLWAGKSSLFSPSRGPRVASCSGFCSKLLASGSVQALQGPSCSPRLLLVVSLPLYQISAILNLQAL

SEQ ID NO: 8976 - protein, 151 aa, Homo sapiens
MLEELECGAPGARGAATARLPFKRLNLVPKGKADDMSDDQGTSVQSKSPDLEASLDTLENNCHVGSDIDFRPKLVNGKGPLDNFLRNRIETSIGQSTVIIDLTEDSNEQPDSLVDHNKLNSEASPSREAINGQREDTGDQQGLLKAIQNDK

SEQ ID NO: 8977 - protein, 167 aa, Homo sapiens
FRDIEEVSQGLLSLLGANRAEAQQRRLLGRHEQVVERLLETQDGAEKQLREILTMEKEVAQSLLNAKEQVHQGGVELQQLEAGLQEAGEEDTRLKASLLQLTRELEELKEIEADLERQEKEVDEDTTVTIPSAVYVAQLYHQVSKIEWDYECEPGMVKGSILFGEPF

SEQ ID NO: 8978 - protein, 178 aa, Homo sapiens
MNPIALGSRWLAYAENKLIRCHQSRGGACGDNIQSYTATVISAAKTLKSGLTMVGKVVTQLTGTLPSGVTEDDVAIHSNSRRSPLVPGIITVIDTETVGEGQVLVSEDSDSDGIVAHFPAHEKPVCCMAFNTSGMLLVTTDTLGHDFHVFQILTHPWSSSQCAVHHLYTLHRGETEAK

SEQ ID NO: 8979 - protein, 125 aa, Homo sapiens
MIICPTRPFTALKRSFEVEEVETPNSTPPRRVQTPLLRATVASSTQKFQDLGVKNSEPSARHVDSLSQRSPKASLRRVELSGPKAAEPVSRRTELSIDISSKQVENAGAIGPSRFGLKRAEVLGH

SEQ ID NO: 8980 - protein, 171 aa, Homo sapiens
RDIEEVSQGLLSLLGANRAEAQQRRLLGRHEQVVERLLETQDGAEKQLREILTMEKEVAQSLLNAKEQVHQGGVELQQLEAGLQEAGEEDTRLKASLLQLTRELEELKEIEADLERQEKEVDEDTTVTIPSAVYVAQLYHQLLEWPQLGNQRESTYLCQACSFTSVTGWDK

SEQ ID NO: 8981 - protein, 191 aa, Homo sapiens
MLMYQHQRVSERFDVIDLDPYGSPATFLDAAVQAVSEGGLLCVTCTDMAVLAGNSGETCYSKYGAMALKSRACHEMALRIVLHSLDLRANCYQRFVVPLLSISADFYVRVFVRVFTGQAKVKASASKQALVFQCVGCGAFHLQRLGKASGVPSGRAKFSAACGPPVTPECEHCGQRHQLGGPMWAEPIHDL

SEQ ID NO: 8982 - protein, 833 aa, Homo sapiens
MAVEDSTLQVVVRVRPPTPRELDSQRRPVVQVVDERVLVFNPEEPDGGFPGLKWGGTHDGPKKKGKDLTFVFDRVFGEAATQQDVFQHTTHSVLDSFLQGYNCSVFAYGATGAGKTHTMLGREGDPGIMYLTTVELYRRLEARQQEKHFEVLISYQEVYNEQIHDLLEPKGPLAIREDPDKGVVVQGLSFHQPASAEQLLEILTRGNRNRTQHPTDANATSSRSHAIFQIFVKQQDRVPGLTQAVQVAKMSLIDLAGSERASSTHAKGERLREGANINRSLLALINVLNALADAKGRKTHVPYRDSKLTRLLKDSLGGNCRTVMIAAISPSSLTYEDTYNTLKYADRAKEIRLSLKSNVTSLDCHISQYATICQQLQAEVAALRKKLQVYEGGGQPPPQDLPGSPKSGPPPEHLPSSPLPPHPPSQPCTPELPAGPRALQEESLGMEAQVERAMEGNSSDQEQSPEDEDEGPAEEVPTQMPEQNPTHALPESPRLTLQPKPVVGHFSARELDGDRSKQLALKVLCVAQRQYSLLQAANLLTPDMITEFETLQQLVQEEKIEPGAEALRTSGLARGAPLAQELCSESIPVPSPLCPEPPGYTGPVTRTMARRLSGPLHTLGIPPGPNCTPAQGSRWPMEKKRRRPSALEADSPMAPKRGTKRQRQSFLPCLRRGSLPDTQPSQGPSTPKGERASSPCHSPRVCPATVIKSRVPLGPSAMQNCSTPLALPTRDLNATFDLSEEPPSKPSFHECIGWDKIPQELSRLDQPFIPRAPVPLFTMKGPKPTSSLPGTSACKKKRVASSSVSHGRSRIARLPSSTLKRPAGPLVLPGDWH

SEQ ID NO: 8983 - protein, 168 aa, Homo sapiens
MADGQVAELLLRRLEASDGGLDSAELAAELGMEHQAVVGAVKSLQALGEVIEAELRSTKHWELTAEGEEIAREGSHEARVFRSIPPEGLAQSELMRLPSGKVGFSKAMSNKWIRVDKSAADGPRVFRVVRSCGLVRGQVDGHMGPWPSYPSHSLSWQVDSMEDEVQRR

SEQ ID NO: 8984 - protein, 99 aa, Homo sapiens
MAQGQRKFQAHKPAKSKTAAAASEKNRGPRKGGRVIAPKKARVVQQQKLKKNLEVGIRKKIEHDVVMKASSSLPKKLALLKAPAKKKGAAAATSSKTPS

SEQ ID NO: 8985 - protein, 75 aa, Homo sapiens
MEEEASSPGLGCSKPHLEKLTLGITRILESSPGVTEVTIIEKPPAERHMISSWEQMKKQRLKEFKEFGRHSGSCL

SEQ ID NO: 8986 - protein, 42 aa, Homo sapiens
MKSVIYHALSQKEANDSDVQVSSWQGVQEQQSLQEHSGPRPS

SEQ ID NO: 8987 - protein, 210 aa, Homo sapiens
MTHMITHIGEKTSEDNQSGKALRKNFPHSFYKKSHAEGKMPKCVKHEKAFNQFPNLTRQNKTHTQEKLCECKDCWRTFLNQSSLKLHIRSHNGDKHYVCKECGKAFSNSSHLIGHGRIHSGEKPYVCKECGKAFTQSTGLKLHIRTHSGEKPYKCKECGKAFTHSSYLTDHTRIHSGKKPYVCMECGKAFTRSTGLILHMRIHTGEKPYE

SEQ ID NO: 8988 - protein, 842 aa, Homo sapiens
MSHPGVTTVMAVEDSTLQVVVRVRPPTPRELDSQRRPVVQVVDERVLVFNPEEPDGGFPGLKWGGTHDGPKKKGKDLTFVFDRVFGEAATQQDVFQHTTHSVLDSFLQGYNCSVFAYGATGAGKTHTMLGREGDPGIMYLTTVELYRRLEARQQEKHFEVLISYQEVYNEQIHDLLEPKGPLAIREDPDKGVVVQGLSFHQPASAEQLLEILTRGNRNRTQHPTDANATSSRSHAIFQIFVKQQDRVPGLTQAVQVAKMSLIDLAGSERASSTHAKGERLREGANINRSLLALINVLNALADAKGRKTHVPYRDSKLTRLLKDSLGGNCRTVMIAAISPSSLTYEDTYNTLKYADRAKEIRLSLKSNVTSLDCHISQYATICQQLQAEVAALRKKLQVYEGGGQPPPQDLPGSPKSGPPPEHLPSSPLPPHPPSQPCTPELPAGPRALQEESLGMEAQVERAMEGNSSDQEQSPEDEDEGPAEEVPTQMPEQNPTHALPESPRLTLQPKPVVGHFSARELDGDRSKQLALKVLCVAQRQYSLLQAANLLTPDMITEFETLQQLVQEEKIEPGAEALRTSGLARGAPLAQELCSESIPVPSPLCPEPPGYTGPVTRTMARRLSGPLHTLGIPPGPNCTPAQGSRWPMEKKRRRPSALEADSPMAPKRGTKRQRQSFLPCLRRGSLPDTQPSQGPSTPKGERASSPCHSPRVCPATVIKSRVPLGPSAMQNCSTPLALPTRDLNATFDLSEEPPSKPSFHECIGWDKIPQELSRLDQPFIPRAPVPLFTMKGPKPTSSLPGTSACKKKRVASSSVSHGRSRIARLPSSTLKRPAGPLVLPGDWH

SEQ ID NO: 8989 - protein, 483 aa, Homo sapiens
MAAVGSGGYARNDAGEKLPSVMAGVPARRGQSSPPPAPPICLRRRTRLSTASEETVQNRVSLEKVLGITAQNSSGLTCDPGTGHVAYLAGCVVVILDPKENKQQHIFNTARKSLSALAFSPDGKYIVTGENGHRPAVRIWDVEEKNQVAEMLGHKYGVACVAFSPNMKHIVSMGYQHDMVLNVWDWKKDIVVASNKVSCRVIALSFSEDSSYFVTVGNRHVRFWFLEVSTETKVTSTVPLVGRSGILGELHNNIFCGVACGRGRMAGSTFCVSYSGLLCQFNEKRVLEKWINLKVSLSSCLCVSQELIFCGCTDGIVRIFQAHSLHYLANLPKPHYLGVDVAQGLEPSFLFHRKAEAVYPDTVALTFDPIHQWLSCVYKDHSIYIWDVKDINRVGKVWSELFHSSYVWNVEVYPEFEDQRACLPSGSFLTCSSDNTIRFWNLDSSPDSHWQKNIFSNLAPALQMCGRGHSRQPNTPSPGEIAS

SEQ ID NO: 8990 - protein, 248 aa, Homo sapiens
MEEEASSPGLGCSKPHLEKLTLGITRILESSPGVTEVTIIEKPPAERHMISSWEQKNNCVMPEDVKNFYLMTNGFHMTWSVKLDEHIIPLGSMAINSISKLTQLTQSSMYSLPNAPTLADLEDDTHEASDDQPEKPHFDSRSVIFELDSCNGSGKVCLVYKSGKPALAEDTEIWFLDRALYWHFLTDTFTAYYRLLITHLGLPQWQYAFTSYGISPQAKALLGLFDGSSPPVDLNNPRGRTGIRSRRF

SEQ ID NO: 8991 - protein, 237 aa, Homo sapiens
MFQAFPGDYDSGSRCSSSPSAESQYLSSVDSFGSPPTAAASQECAGLGEMPGSFVPTVTAITTSQDLQWLVQPTLISSMAQSQGQPLASQPPVVDPYDMPGTSYSTPGMSGYSSGGASGSGGPSTSGTTSGPGPARPARARPRRPREETLTPEEEEKRRVRRERNKLAAAKCRNRRRELTDRLQAETDQLEEEKAELESEIAELQKEKERLEFVLVAHKPGCKIPYEEGPGPGPLAE

SEQ ID NO: 8992 - protein, 53 aa, Homo sapiens
VARPSASSASTVPGYSEDGGALRGEVIPEHEFATGPVCLDDENEFPPVSIRNP

SEQ ID NO: 8993 - protein, 433 aa, Homo sapiens
MSADGAEADGSTQVTVEEPVQQPSVVDRVASMPLISSTCDMVSAAYASTKESYPHIKTVCDAAEKGVRTLTAAAVSGAQPILSKLEPQIASASEYAHRGLDKLEENLPILQQPTEKVLADTKELVSSKVSGAQEMVSSAKDTVATQLSEAVDATRGAVQSGVDKTKSVVTGGVQSVMGSRLGQMVLSGVDTVLGKSEEWADNHLPLTDAELARIATSLDGFDVASVQQQRQEQSYFVRLGSLSERLRQHAYEHSLGKLRATKQRAQEALLQLSQVLSLMETVKQGVDQKLVEGQEKLHQMWLSWNQKQLQGPEKEPPKPEVESRALTMFRDIAQQLQATCTSLGSSIQGLPTNVKDQVQQARRQVEDLQATFSSIHSFQDLSSSILAQSRERVASAREALDHMVEYVAQNTPVTWLVGPFAPGITEKAPEEKK

SEQ ID NO: 8994 - protein, 167 aa, Homo sapiens
QVIHQLGPGLRSKMAIQTQQSKFVNWQVDGEYRGSDFTAAVTLGNPDVLVGSGILVAHYLQSITPCLALGGELVYHRRPGEEGTVMSLAGKYTLNNWLATVTLGQAGMHATYYHKASDQLQVGVEFEASTRMQDTSVSFGYQLDLPKANLLFKGKGLGSPTRETGRR

SEQ ID NO: 8995 - protein, 36 aa, Homo sapiens
MGNVLAASSPPAGPPPPPAPALVGLPPPPPSPPGFT

SEQ ID NO: 8996 - protein, 135 aa, Homo sapiens
MAKRLSQIGVENTEENRRLYRQVLFSADDRVKKCIGGVIFFHETLYQKDDNGVPFVRTIQDKGIVVGIKVDKGVVPLAGTDGETTTQGLDGLSERCAQYKKDGADFAKWRCVLKISERTPSALAILENANVLARY

SEQ ID NO: 8997 - protein, 158 aa, Homo sapiens
MAPEVVEAFSEEASIYDKRCDLWSLGVILYILLSGYPPFVGRCGSDCGWDRGEACPACQNMLFESIQEGKYEFPDKDWAHISCAAKDLISKLLVRDAKQRLSAAQVLQHPWVQGCAPENTLPTPMVLQRWDSHFLLPPHPCRIHVRPGGLVRTVTVNE

SEQ ID NO: 8998 - protein, 292 aa, Homo sapiens
LAQRRGRGPGGPQSTPRNPRVSRGERSHCPTQTVKKLLEEQRRRQQQQPDAGGVQGQFLPPPEQPLTPSVNEAVTGHPPFPAHSETVGSGPSSLGFPDWDPNTHAAYTDSPYSCPASAAENFLPPDFYPPSDPGQPCPFPQGMEDPPDTQFYVGSSLPQAGPWRVSAPPSGPPQFPAVVPGPSLEVARAHMLALGPQQLLAQDEEGDTLLHLFAARGLRWAAYAAAEVLQVYRRLDIREHKGKTPLLVAAAANQPLIVEDLLNLGAEPNAADHQGRSVLHVAATYGLPGVLL

SEQ ID NO: 8999 - protein, 93 aa, Homo sapiens
MEPGPDGPAASGPAAIREGWFRETCSLWPGQALSLQVEQLLHHRRSRYQDILVFRREPRSPTVTPPAVRPMATCWCWTVSSSARRETSSPTRR

SEQ ID NO: 9000 - protein, 81 aa, Homo sapiens
EENKENDLRPSLPQSYAATVARPSASSASTVPGYSEDGGALRGEVIPEHEFATGPVCLDDENEFPPIILCRGNQKGKTKQS

SEQ ID NO: 9001 - protein, 279 aa, Homo sapiens
MRPDDANVAGNVHGGTILKMIEEAGAIISTRHCNSQNGERCVAALARVERTDFLSPMCIGEVAHVSAEITYTSKHSVEVQVNVMSENILTGAKKLTNKATLWYVPLSLKNVDKVLEVPPVVYSRQEQEEEGRKRYEAQKLERMETKWRNGDIVQPVLNPEPNTVSYSQSSLIHLVGPSDCTLHGFVHGGVTMKLMDEVAGIVAARHCKTNIVTASVDAINFHDKIRKGCVITISGRMTFTSNKSMEIEVLVDADPVVDSSQKRYRAASAFFTYVSLSQE

SEQ ID NO: 9002 - protein, 44 aa, Homo sapiens
MLSVRVAAAVVRALPRRAGLNTFALGLQKCFGFIFHCCKELPCL

SEQ ID NO: 9003 - protein, 181 aa, Homo sapiens
MSLASPQPCGLASHEEHRGAAEELASTPNDKASSPGHPAFLEDGSPSPVLAFAASPRPNHSYIFKREPPEGCEKVRVFEEATSPGPDLAFLTSCPDKNKVHFNPTGSAFCPVNLMKPLFPGMGFIFRNCPSNPGSPLPPASPRPPPRKDPEASKASPLPFEPWQRTPPSEEPVLFQSSLMV

SEQ ID NO: 9004 - protein, 152 aa, Homo sapiens
MAAPMEVAVCTDSAAPMWSCIVWELHSGANLLTYRGGQAGPRGLALLNGEYLLAAQLGKNYISAWELQRKDQLQQKIMCPGPVTCLTASPNGLYVLAGVAESIHLWEVSTGNLLVILSRHYQDVSCLQFTGDSSHFISGGKDCLVLVWSLCR

SEQ ID NO: 9005 - protein, 184 aa, Homo sapiens
MENLTKHSIECSSFRGDWECKNQFERKQGSQEGHFSEMIFTPEDMPTFSIQHQRIHTDEKLLECKECGKDFSFVSVLVRHQRIHTGEKPYECKECGKAFGSGANLAYHQRIHTGEKPFECKECGKAFGSGSNLTHHQRIHTGEKPYECKECGKAFSFGSGLIRHQIIHSGEKPYECKECGKSFS

SEQ ID NO: 9006 - protein, 259 aa, Homo sapiens
EGKYGHAACFGLQPGCLRQDGSRQIAIAAMVANFTKPTADAPSLLQHDEVETYFHEFGHVMHQLCSQAEFAMFSGTHVERDFVEAPSQMLENWVWEQEPLLRMSRHYRTGSAVPRELLEKLIESRQANTGLFNLRQIVLAKVDQALHTQTDADPAEEYARLCQEILGVPATPGGYDAQYYGYLWSEVYSMDMFHTRFKQEGVLNSKVGMDYRSCILRPGGSEDASAMLRRFLGRDPKQDAFLLSKGLQVGGCEPEPQVC

SEQ ID NO: 9007 - protein, 74 aa, Homo sapiens
MGAPTLPPAWQPFLKDHRISTFKNWPFLEGCACTPERMAEAGFIHCPTENEPDLAQCFFCFKELEGWEPDDDPM

SEQ ID NO: 9008 - protein, 108 aa, Homo sapiens
MAEQDVENDLLDYDEEEEPQAPQESTPAPPKKDIKGSYVSIHSSGFRDFLLKPELLRAIVDCGFEHPSEVQHECIPQAILGMDVLCQAKSGMGKTAVFVLATLQQIEP

SEQ ID NO: 9009 - protein, 116 aa, Homo sapiens
MKPSGEDQAALAAGPWEECFQAAVQLALRAGQIIRKALTEEKRVSTKTSAADLVTETDHLVEDLIISELRERFPSHRFIAEEAAASGAKCVLTHSPTWIIDPIDGTCNFVHSLNSE

SEQ ID NO: 9010 - protein, 82 aa, Homo sapiens
SGQIGFMLCSKNPSTNFQEPVQPLTQQQVAQMQLKYYNSDVHRAAFVLPEFARKVGGLRGWVVGPRDPERPPDWPHVPPGPE

SEQ ID NO: 9011 - protein, 172 aa, Homo sapiens
MPLISSTCDMVSAAYASTKESYPHIKTVCDAAEKGVRTLTAAAVSGAQPILSKLEPQIASASEYAHRGLDKLEENLPILQQPTEKVLADTKELVSSKVSGAQEMVSSAKDTVATQLSEAVDATRGAVQSGVDKTKSVVTGGVQSVMGSRLGQMVLSGVDTVLGKSEEWADNH

SEQ ID NO: 9012 - protein, 49 aa, Homo sapiens
MEEEASSPGLGCSKPHLEKLTLGITRILGQGTHRPTPNSRSWRNRLTSQ

SEQ ID NO: 9013 - protein, 852 aa, Homo sapiens
MAVEDSTLQVVVRVRPPTPRELDSQRRPVVQVVDERVLVFNPEEPDGGFPGLKWGGTHDGPKKKGKDLTFVFDRVFGEAATQQDVFQHTTHSVLDSFLQGYNCSVFAYGATGAGKTHTMLGREGDPGIMYLTTVELYRRLEARQQEKHFEVLISYQEVYNEQIHDLLEPKGPLAIREDPDKGVVVQGLSFHQPASAEQLLEILTRGNRNRTQHPTDANATSSRSHAIFQIFVKQQDRVPGLTQAVQVAKMSLIDLAGSERASSTHAKGERLREGANINRSLLALINVLNALADAKGRKTHVPYRDSKLTRLLKDSLGGNCRTVMIAAISPSSLTYEDTYNTLKYADRAKEIRLSLKSNVTSLDCHISQYATICQQLQAEVAALRKKLQVYEGGGQPPPQDLPGSPKSGPPPEHQPCTPELPAGPRALQEESLGMEAQVERAMEGNSSDQEQSPEDEDEGPAEEVPTQMPEQNPTHALPESPRLTLQPKPVVGHFSARELDGDRSKQLALKVLCVAQRQYSLLQAANLLTPDMITEFETLQQLVQEEKIEPGAEALRTSGLARGAPLAQELCSESIPVPSPLCPEPPGYTGPVTRTMARRLSGPLHTLGIPPGPNCTPAQGSRWPMEKKRRRPSALEADSPMAPKRGTKRQRQSFLPCLRRGSLPDTQPSQGPSTPKGERASSPCHSPRVCPATVIKSRVPLGPSAMQNCSTPLALPTRDLNATFDLSEEPPSKPSFHECIGWDKIPQELSRLDQPFIPRAPVPLFTMKGPKPTSSLPGTSACKKKRVASSSVSHGRSRIARLPSSTLKRPAGPLVLPELPLSPLCPSNRRNGKDLIRVGRALSAGNGVTKVS

SEQ ID NO: 9014 - protein, 128 aa, Homo sapiens
MVDHLANTEINSQRIAAVESCFGASGQPLALPGRVLLGEGVLTKECRKKAKPRIFFLFNDILVYGSIVLNKRKYRSQHIIPLEEVTLELLPETLQAKNRWMIKTAKKSFVVSAASATERQEWISHIEE

SEQ ID NO: 9015 - protein, 118 aa, Homo sapiens
WVVSQPPDMHLKPLMTELLKRILDGNKRVQEAACSAFATLEEEACTELVPYLSYILDTLVFAFGKYQHKNLLILYDAIGTLADSVGHHLNQPVPESQSATPTQGAPISCSLSRNTSRS

SEQ ID NO: 9016 - protein, 143 aa, Homo sapiens
RKAVIVKVSASRDSASLHAGTRLAAAGRAGLEFKNIDDGTSDRPYSHALVAGIDRYPRKVTAAMGKKKIAKRSKIKSFVKVYNYNHLMPTRYSVDIPLDKTVVNKDVFRDPALKRKARREAKVKFEERYKTGKNKWFFQKLRF

SEQ ID NO: 9017 - protein, 185 aa, Homo sapiens
LATDLRAQLQILANMDSQLKELQSQHTHCAQDLAMKDELLCQLTQSNEEQAAQWQKEEMALKHMQAELQQQQAVLAKEVRDLKETLEFADQENQVAHLELGQVECQLKTTLEVLRERSLQCENLKDTVENLTAKLASTIADNQEQDLEKTRQYSQKLGLLTEQLQSLTLFLQTKLKEKLFFLLCP

SEQ ID NO: 9018 - protein, 12 aa, Homo sapiens
EEDVPGQAKDEL

SEQ ID NO: 9019 - protein, 552 aa, Homo sapiens
MARVPLTFSDVAIDFSQEEWEYLNSDQRDLYRDVMLENYTNLVSLDFNFTTESNKLSSEKRNYEVNAYHQETWKRNKTFNLMRFIFRTDPQYTIEFGRQQRPKVGCFSQMIFKKHKSLPLHKRNNTREKSYECKEYKKGFRKYLHLTEHLRDHTGVIPYECNECGKAFVVFQHFIRHRKIHTDLKPYECNGCEKAFRFYSQLIQHQIIHTGMKPYECKQCGKAFRRHSHLTEHQKIHVGLKPFECKECGETFRLYRHMCLHQKIHHGVKPYKCKECGKAFGHRSSLYQHKKIHSGEKPYKCEQCEKAFVRSYLLVEHQRSHTGEKPHECMECGKAFGKGSSLLKHKRIHSSEKLYDCKDCGKAFCRGSQLTQHQRIHTGEKPHECKECGKTFKLHSYLIQHQIIHTDLKPYECKQCGKAFSRVGDLKTHQSIHAGEKPYECKECGKTFRLNSQLIYHQTIHTGLKPYVCKECKKAFRSISGLSQHKRIHTGEKPYECKECDKAFNRSDRLTQHETIHTGVKPQKCKECGKAFSHCYQLSQHQRFHHGERLLM

SEQ ID NO: 9020 - protein, 163 aa, Homo sapiens
MKPSGEDQAALAAGPWEECFQAAVQLALRAGQIIRKALTEEKRVSTKTSAADLVTETDHLVEDLIISELRERFPSHRFIAEEAAASGAKCVLTHSPTWIIDPIDGTCNFVHRFPTVAVSIGFAVRQEVRVWPRSPGPLPGLPLAILPFWLQPLCAWFAVCPVP

SEQ ID NO: 9021 - protein, 184 aa, Homo sapiens
ESKEEAIRTLQRKICELQARLQAQEEQHQEVQKAKEADIEKLNQALCLRYKNEKELQEVIQQQNEKILEQIDKSGELISLREEVTHLTRSLRRAETETKVLQEALAGQLDSNCQPMATNWIQEKVWLSQEVDKLRVMFLEMKNEKEKLMIKFQSHRNILEENLRRSDKELEKLDDIVQHIYKRW

SEQ ID NO: 9022 - protein, 82 aa, Homo sapiens
NWPFLEGCACTPERMAEAGFIHCPTENEPDLAQCFFCFKELEGWEPDDDPIGPGTVAYACNTSTLGGRGGRITRSGDRDHLG

SEQ ID NO: 9023 - protein, 42 aa, Homo sapiens
MEPQVTLNVTFKNEIQSFLVSDPENTTWADIEAMVKVSFDLN

SEQ ID NO: 9024 - protein, 329 aa, Homo sapiens
MGNVLAASSPPAGPPPPPAPALVGLPPPPPSPPGFTLPPLGGSLGAGTSTSRSSERTPGAATASASGAAEDGACGCLPNPGTFEECHRKCKELFPIQMEGVKLTVNKGLSNHFQVNHTVALSTIGESNYHFGVTYVGTKQLSPTEAFPVLVGDMDNSGSLNAQVIHQLGPGLRSKMAIQTQQSKFVNWQVDGEYRGSDFTAAVTLGNPDVLVGSGILVAHYLQSITPCLALGGELVYHRRPGEEGTVMSLAGKYTLNNWLATVTLGQAGMHATYYHKASDQLQVGVEFEASTRMQDTSVSFGYQLDLPKANLLFKGKGLGSPTRETGRR

SEQ ID NO: 9025 - protein, 68 aa, Homo sapiens
MAGPAAAFRRLGALSGAAALGFASYGAHGAQFPDAYGKELFDKANKHHFLHSLALLGVPHCRKPLWAA

SEQ ID NO: 9026 - protein, 72 aa, Homo sapiens
LKEEGTEAMGGTGSSPGVGATEAPETTIAAGVRVVATVTGARAGPTETVMTVTPMEAAALGGQKCCAPNRTL

SEQ ID NO: 9027 - protein, 146 aa, Homo sapiens
MVALCSLQHLGSSDPRALPTLPTATSGQRPAKRRRKSPAMAALTRDPQFQKLQQWYREHRSELNLRRLFDANKDRFNHFSLTLNTNHGHILVDYSKNLVTEDVMRMLVDLAKSRGVEAARERMFNGEKINYTEGRAVLHVALRNRS

SEQ ID NO: 9028 - protein, 165 aa, Homo sapiens
MAKVSVLNVAVLENPSPFHSPFRFEISFECSEALADDLEWKIIYVGSAESEEFDQILDSVLVGPVPAGRHMFVFQADAPNPSLIPETDAVGVTVVLITCTYHGQEFIRVGYYVNNEYLNPELRENPPMKPDFSQVGPVSTSCFPQGRSLYLGGVQPFKLRVKVTS

SEQ ID NO: 9029 - protein, 205 aa, Homo sapiens
VTISSLVFSMDSQFLCASSNTETVHIFKLEQVTNSRPEEPSTWSGYMGKMFMAATNYLPTQVSDMMHQDRAFATARLNFSGQRNICTLSTIQKLPRLLVASSSGHLYMYNLDPQDGGECVLIKTHSLLGSGTTEENKENDLRPSLPQSYAATVARPSASSASTVPGYSEDGGALRGEVIPEHEFATGPVCLDDENEFPPVSIRNP

SEQ ID NO: 9030 - protein, 90 aa, Homo sapiens
MLSVRVAAAVVRALPRRAGLVSTEGRHDAGGRVGLQGGGAPARALSAGGRGAVANAAILHPWLLRLDRAGDTGALLLVTCAEAEWYRADS

SEQ ID NO: 9031 - protein, 172 aa, Homo sapiens
MLVLNSWPQVILPPWPPKALKLQMERAFQTALWLLQPEVVFILGDIFDEGKWSTPEAWADDVERFQKMFRHPSHVQLKVVAGNHDIGFHYEMNTYKVERFEKVFSSERLFSWKGINFVMVNSVALNGDGCGICSETEAELIEVSHRLNCSREQARGSSRCGPGPLLPTSAPV

SEQ ID NO: 9032 - protein, 139 aa, Homo sapiens
MLVLPSPCPQPLAFSSVETMEGPPRRTCRSPEPGPSSSIGSPQASSPPRPNHYLLIDTQGVPYTVLVDEESQREPGASGAPGQKKCYSCPVCSRVFEYMSYLQRHSITHSEVKPFECDICGKAFKRASHLARHHSIHLA

SEQ ID NO: 9033 - protein, 168 aa, Homo sapiens
KEQRHWDISSSERLDILRDFTNYGLEHWGSDTQGVEKTRRFLLEWLSFLCRYVPVGLLERLPQRINERPPYYLGRDYLETLMASQKAADWIRIRCLGGLELGSCSRGPGVTEGTLQVLGLTSLSTCSPTARCSLGQCPPASPSCRSTRPTRTSSLRLSQGHPGARRVQ

SEQ ID NO: 9034 - protein, 60 aa, Homo sapiens
MFSRKKRELMKTPSISKKNRAGSPSPQPSGTSLRPAARGPTSAWVRLCVSCIRSSPSTRC

SEQ ID NO: 9035 - protein, 92 aa, Homo sapiens
MQKEIQELKKECAGYRERLKNIKAATNHVTPEEKEQVYRERQKYCKEWRKRKRMATELSDAILEGYPKSKKQFFEEVGIETDEDYNVTLPDP

SEQ ID NO: 9036 - protein, 79 aa, Homo sapiens
MNSNVENLPPHIIRLVYKEVTTLTADPPDGIKVFPNEEDLTDLQVTIEGPGLLPDQDLPPERGRQWRDLRQRAQEGLDG

SEQ ID NO: 9037 - protein, 433 aa, Homo sapiens
MDEFHPFIEALLPHVRAFSYTWFNLQARKRKYFKKHEKRMSKDEERAVKDELLGEKPEIKQKWASRLLAKLRKDIRPEFREDFVLTITGKKPPCCVLSNPDQKGKIRRIDCLRQADKVWRLDLVMVILFKGIPLESTDGERLYKSPQCSNPGLCVQPHHIGVTIKELDLYLAYFVHTPESGQSDSSNQQGDADIKPLPNGHLSFQDCFVTSGVWNVTELVRVSQTPVATASGPNFSLADLESPSYYNINQVTLGRRSITSPPSTSTTKRPKSIDDSEMESPVDDVFYPGTGRSPAAGSSQSSGWPNDVDAGPASLKKSGKLDFCSALSSQGSSPRMAFTHHPLPVLAGVRPGSPRATASALHFPSTSIIQQSSPYFTHPTIRYHHHHGQDSLKEFVQFVCSDGSGQATGQHSQRQAPPLPTGLSASDPGTATF

SEQ ID NO: 9038 - protein, 348 aa, Homo sapiens
MGVLRVGLCPGLTEEMIQLLRSHRIKTVVDLVSADLEEVAQKCGLSYKTWRAHSSGNLGGLQLPQVPAGRSWSGVRNALKKAGLGHGGTDGLSLNAFDERGTAVSTSRLDKLLDAGLYTGEVTEIVGGPGSGKTQVCLCMAANVAHGLQQNVLYVDSNGGLTASRLLQLLQAKTQDEEEQAEALRRIQVVHAFDIFQMLDVLQELRGTVAQQVTGSSGTVKVVVVDSVTAVVSPLLGGQQREGLALMMQLARELKTLARDLGMAVVVTNHITRDRDSGRLKPALGRSWSFVPSTRILLDTIEGAGASGGRRMACLAKSSRQPTGFQEMVDIGTWGTSEQSATLQGDQT

SEQ ID NO: 9039 - protein, 195 aa, Homo sapiens
MSILKIHAREIFDSRGNPTVEVDLFTSKGLFRAAVPSGASTGIYEALELRDNDKTRYMGKGVSKAVEHINKTIAPALVSKKLNVTEQEKIDKLMIEMDGTENKSKFGANAILGVSLAVCKAGAVEKGVPLYRHIADLAGNSEVILPVPAFNVINGGSHAGNKLAMQEFMILPVGAANFREAMRIGAEVYHNLKNV

SEQ ID NO: 9040 - protein, 48 aa, Homo sapiens
MAKVSVLNVAVLENPSPFHSPFRFEISFECSEALADGRRPQPIPHPRD

SEQ ID NO: 9041 - protein, 60 aa, Homo sapiens
MTLEELVACDNAAQKMQTVTAAVEELLVAAQRQDRLTVGVYESAKLMNGPRQRGPLPLGH

SEQ ID NO: 9042 - protein, 77 aa, Homo sapiens
LSFLCRYVPVGLLERLPQRINERPPYYLGRDYLETLMASQKAADWIRIRLLEPVSSPRPRERGVSSPTSRYRPPLSP

SEQ ID NO: 9043 - protein, 71 aa, Homo sapiens
MEESDQGHTGALATCAGHEDKAGCPPRPHPPPAPPARSRPYACSVCGKRFSLKHQMETHYRVHTGEKPFSC

SEQ ID NO: 9044 - protein, 299 aa, Homo sapiens
MFQAFPGDYDSGSRCSSSPSAESQYLSSVDSFGSPPTAAASQSQGQPLASQPPVVDPYDMPGTSYSTPGMSGYSSGGASGSGGPSTSGTTSGPGPARPARARPRRPREETLTPEEEEKRRVRRERNKLAAAKCRNRRRELTDRLQAETDQLEEEKAELESEIAELQKEKERLEFVLVAHKPGCKIPYEEGPGPGPLAEVRDLPGSAPAKEDGFSWLLPPPPPPPLPFQTSQDAPPNLTASLFTHSEVQVLGDPFPVVNPSYTSSFVLTCPEVSAFAGAQRTSGSDQPSDPLNSPSLLAL

SEQ ID NO: 9045 - protein, 71 aa, Homo sapiens
MPPSTTWPQRGDMSQHQQACGICRQEDPPEDMKQDRDIQAVATSLLPLTEANLRMFQRAQDDLIPAVDRQF

SEQ ID NO: 9046 - protein, 267 aa, Homo sapiens
APMEVAVCTDSAAPMWSCIVWELHSGANLLTYRGGQAGPRGLALLNGEYLLAAQLGKNYISAWELQRKDQLQQKIMCPGPVTCLTASPNGLYVLAGVAESIHLWEVSTGNLLVILSRHYQDVSCLQFTGDSSHFISGGKDCLVLVWSLCSVLQADPSRIPAPRHVWSHHALPITDLHCGFGGPLARVATSSLDQTVKLWEVSSGELLLSVLFDVSIMAVTMDLAEHHMFCGGSEGSIFQVDLFTWPGQRERSFHPEQDAGKVFKGHR

SEQ ID NO: 9047 - protein, 184 aa, Homo sapiens
MNPIALGSRWLAYAENKLIRCHQSRGGACGDNIQSYTATVISAAKTLKSGLTMVGKVVTQLTGTLPSGVTEDDVAIHSNSRRSPLVPGIITVIDTETVGEGQVLVSEDSDSDGIVAHFPAHEKPVCCMAFNTSGMLLVTTDTLGHDFHVFQILTHPWSSSQCAVHHLYTLHRGETEAKVQDICF

SEQ ID NO: 9048 - protein, 193 aa, Homo sapiens
MALSTDYALRTGAFEPAEASVNPQDLQGSLQELKERALSRYNLVRGQGPERLVSGSDDFTLFLWSPAEDKKPLTRMTGHQALINQVLFSPDSRIVASASFDKSIKLWDGRTGKYLASLRGHVAAVYQIAWSADSRLLVSGSSDSTLKVWDVKAQKLAMDLPGHADEVYAVDWSPDGQRVASGGKDKCLRIWRR

SEQ ID NO: 9049 - protein, 78 aa, Homo sapiens
MGAPTLPPAWQPFLKDHRISTFKNWPFLEGCACTPERMAEAGFIHCPTENEPDLAQCFFCFKELEGWEPDDDPMRELC

SEQ ID NO: 9050 - protein, 185 aa, Homo sapiens
MDLSTFDFRTGKMLMSKMNKSRQRVRYDSSNQVKGKPDLNTALPVRQTASIFKQPVTKITNHPSNKVKSDPQKAVDQPRQLFWEKKLSGLNAFDIAEELVKTMDLPKGLQGVGPGCTDETLLSAIASALHTSTMPITGQLSAAVEKNPGVWLNTTQPLCKAFMVTDEDISRKSWCSRCGSGWRRR

SEQ ID NO: 9051 - protein, 120 aa, Homo sapiens
NWPFLEGCACTPERMAEAGFIHCPTENEPDLAQCFFCFKELEGWEPDDDPIGPGTVAYACNTSTLGGRGGRITREEHKKHSSGCAFLSVKKQFEELTLGEFLKLDRERAKNKIERALLAE

SEQ ID NO: 9052 - protein, 171 aa, Homo sapiens
RDIEEVSQGLLSLLGANRAEAQQRRLLGRHEQVVERLLETQDGAEKQLREILTMEKEVAQSLLNAKEQVHQGGVELQQLEAGLQEAGEEDTRLKASLLQLTRELEELKEIEADLERQEKEVDEDTTVTIPSAVYVAQLYHQVSKIEWDYECEPGMVKGRGMFECHGVPRLC

SEQ ID NO: 9053 - protein, 101 aa, Homo sapiens
RIQLGAKGIQIKVPGEKDTQKVVVDLSEQEEEKVELKESENLASGDQPRTAAVGEICERCLGSDLWLQTMPPPGLWISYAGMSSSMTWPTWYSRAKQMPGC

SEQ ID NO: 9054 - protein, 455 aa, Homo sapiens
MSKDEERAVKDELLGEKPEIKQKWASRLLAKLRKDIRPEFREDFVLTITGKKPPCCVLSNPDQKGKIRRIDCLRQADKVWRLDLVMVILFKGIPLESTDGERLYKSPQCSNPGLCVQPHHIGVTIKELDLYLAYFVHTPESGQSDSSNQQGDADIKPLPNGHLSFQDCFVTSGVWNVTELVRVSQTPVATASGPNFSLADLESPSYYNINQVTLGRRSITSPPSTSTTKRPKSIDDSEMESPVDDVFYPGTGRSPAAGSSQSSGWPNDVDAGPASLKKSGKLDFCSALSSQGSSPRMAFTHHPLPVLAGVRPGSPRATASALHFPSTSIIQQSSPYFTHPTIRYHHHHGQDSLKEFVQFVCSDGSGQATGQPNGSGQGKVPGSFLLPPPPPVARPVPLPMPDSKSTSTAPDGAALTPPSPSFATTGASSANRFVSIGPRDGNFLNIPQQSQSWFL

SEQ ID NO: 9055 - protein, 303 aa, Homo sapiens
SSKDGSVRIWDTTAGRCERILTGHTQSVTCLRWGGDGLLYSASQDRTIKVWRAHDGVLCRTLQGHGHWVNTMALSTDYALRTGAFEPAEASVNPQDLQGSLQELKERALSRYNLVRGQGPERLVSGSDDFTLFLWSPAEDKKPLTRMTGHQALINQVLFSPDSRIVASASFDKSIKLWDGRTGKDDFHSVTWCSSGSSAAARSWLITTSASWVQVILLPQPPRYLASLRGHVAAVYQIAWSADSRLLVSGSSDSTLKVWDVKAQKLAMDLPGHADEVYAVDWSPDGQRVASGGKDKCLRIWRR

SEQ ID NO: 9056 - protein, 119 aa, Homo sapiens
MEEEASSPGLGCSKPHLEKLTLGITRILESSPGVTEVTIIEKPPAERHMISSWEQKNNCVMPEDVKNFYLMTNGFHMTWSVKLDVFSANKENMELPSLYLHPNHRRLEPSKKTAKFSSL

SEQ ID NO: 9057 - protein, 130 aa, Homo sapiens
MAEQDVENDLLDYDEEEEPQAPQESTPAPPKKDIKGSYVSIHSSGFRDFLLKPELLRAIVDCGFEHPSEVQHECIPQAILGMDVLCQAKSGMGKTAVFVLATLQQIEPVNGQVTVLVMCHTRELAFQISK

SEQ ID NO: 9058 - protein, 153 aa, Homo sapiens
MAQPLAFILDVPETPGDQGQGPSPYDESEVHDSFQQLIQEQSQCTAQEGLELQQREREVTGSSQQTLWRPEGTQSTATLRILASMPSRTIGRSRGAIISQYYNRTVQLRCRSSRPLLGNFVRSAWPSLRLYDLELDPTALEEEEKQSLLVKEL

SEQ ID NO: 9059 - protein, 211 aa, Homo sapiens
MDFLKPTADCPDAVPSSAETGGTNYLAPGGLSDSQLLLEPGDRSHWCVVAYWEEKTRVGRLYCVQEPSLDIFYDLPQGNGFCLGQLNSDNKSQLVQKVRSKIGCGIQLTREVDGVWVYNRSSYPIFIKSATLDNPDSRTLLVHKVFPGFSIKAFDYEKAYSLQRPNDHEFMQQPWTGFTVQISFVKGWGQCYTRQFISSCPCWLEVIFNSR

SEQ ID NO: 9060 - protein, 146 aa, Homo sapiens
FFEGEIISKKHPFLTRKWDADEDVDRKHWNIGRYLDLQTLLDWTETFWGKFLAFYQYAKSFNSDDFDYEELKNGDYVFMRWKEQFLVPDHTIKDISGASFAGFYYICFQKSAASIEGYYYHRSSEWYQSLNLTHVPEHSAPIYEFR

SEQ ID NO: 9061 - protein, 52 aa, Homo sapiens
MPTGDFDSKPSWADQVEEEGEDDKCVTSELLKGIPLATGDTSPEPELLPGGE

SEQ ID NO: 9062 - protein, 93 aa, Homo sapiens
MSSSGLNSEKVAALIQKLNSDPQFVLAQNVGTTHDLLDICLKRATVQRAQHVFQHAVPQEGKPITNQKSSGVGFHFSHTFLDLPDSVPFWCLI

SEQ ID NO: 9063 - protein, 41 aa, Homo sapiens
MAGPAAAFRRLGALSGAAALGFASYGAHGAQFPDAYGKEAA

SEQ ID NO: 9064 - protein, 227 aa, Homo sapiens
MEEEASSPGLGCSKPHLEKLTLGITRILESSPGVTEVTIIEKPPAERHMISSWEQKNNCVMPEDVKNFYLMTNGFHMTWSVKLDEHIIPLGSMAINSISKLTQLTQSSMYSLPNAPTLADLEDDTHEASDDQPEKPHFDSRSVIFELDSCNGSGKVCLVYKSGKPALAEDTEIWFLDRALYWHFLTDTFTAYYRLLITHLGLPQWQYAFTSYGISPQAKVREEHLPL

SEQ ID NO: 9065 - protein, 338 aa, Homo sapiens
MSLRIDVDTNFPECVVDAGKVTLGTQQRQEMDPRLREKQNEIILRAVCALLNSGGGIIKAEIENKGYNYERHGVGLDVPPIFRSHLDKMQKENHFLIFVKSWNTEAGVPLATLCSNLYHRERTSTDVMDSQEALAFLKCRTQTPTNINVSNSLGPQAAQGSVQYEGNINVSAAALFDRKRLQYLEKLNLPESTHVEFVMFSTDVSHCVKDRLPKCVSAFANTEGGYVFFGVHDETCQVIGCEKEKIDLTSLRASIDGCIKKLPVHHFCTQRPEIKYVLNFLEVHDKGALRGYVCAIKVEKFCCAVFAKVPSSWQVKDNRVRQLPTREWTAWMMEADPG

SEQ ID NO: 9066 - protein, 152 aa, Homo sapiens
MTSMSAGTINTLKRSFEVEEVETPNSTPPRRVQTPLLRATVASSTQKFQDLGVKNSEPSARHVDSLSQRSPKASLRRVELSGPKAAEPVSRRTELSIDISSKQVENAGAIGPSRFGLKRAEVLGHKTPEPAPRRTEITIVKPQESAHRRMEP

SEQ ID NO: 9067 - protein, 143 aa, Homo sapiens
MAQPLAFILDVPETPGDQGQGPSPYDESEVHDSFQQLIQEQSQCTAQEGLELQQREREVTGSSQQTLWRPEGTQSTATLRILASMPSRTIGRSRGAIISQYYNRTVQLRCRSSRPLLGNFVRSAWPSLRLYDLELDPTALEEE

SEQ ID NO: 9068 - protein, 92 aa, Homo sapiens
MAEQDVENDLLDYDEEEEPQAPQESTPAPPKKDIKGSYVSIHSSGFRDFLLKPELLRAIVDCGFEHPSEVQHECIPQAILGMDVLCQAKSGM

SEQ ID NO: 9069 - protein, 189 aa, Homo sapiens
MPKPAEAPTAPSPAQTLENSEPAPVSQLQSRLEPKPQPPVAEATPRSQEATEAAPSCVGDMADTPRDAGLKQAPASRNEKAPVDFGYVGIDSILEQMRRKAMKQGFEFNIMVVGESSPCMPLNQCRKPASAPRAAHKPLGLVFPSVKWGSNPDLKDGLPVTLRVHACAWEEPTASSGSSEGPVLHIQGP

SEQ ID NO: 9070 - protein, 245 aa, Homo sapiens
MSSMPATKFSFPFHIFLSCHLSARRIEGWNSNEAPPPRPTLAEGDVAALNRRIQLVEEELDRAQERLATALQKLEEAEKAADESERGMKVIENRAMKDEEKMEIQEMQLKEAKHIAEEADRKYEEVARKLVILEGELERAEERAEVSELKCGDLEEELKNVTNNLKSLEAASEKYSEKEDKYEEEIKLLSDKLKEAETRAEFAERTVAKLEKTIDDLEEKLAQAKEENVGLHQTLDQTLNELNCI

SEQ ID NO: 9071 - protein, 58 aa, Homo sapiens
MRAHAGHKRSECGGEWRETPRKQKQHGKASISPSSGARRTVTPTRKRPYECKVCGKAF

SEQ ID NO: 9072 - protein, 87 aa, Homo sapiens
MSCINLPTVLPGSPSKTRGQIQVILGPMFSGKSTELMRRVRRFQIAQYKCLVIKYAKDTRYSSSFCTHDRSLTSWSSARPWPTPGRP

SEQ ID NO: 9073 - protein, 64 aa, Homo sapiens
SGVQVDLEARDFEGLTPLHTAILALNVAMRPSDLCPRVLSTQARDRLDCVHMLLQMGANHTSQR

SEQ ID NO: 9074 - protein, 30 aa, Homo sapiens
MEEEASSPGLGCSKPHLEKLTLGITRILGL

SEQ ID NO: 9075 - protein, 120 aa, Homo sapiens
MEADSGEEECRSQPRSISESFLTVKGAALFLPRGNGSSTPRISHRRNKHAGDLQQHLQAMFILLRPEDNIRLAVRLESTYQNRTRYMVVVSTNGRQDTEESIVLGMDFSSNDSSTCTMGL

SEQ ID NO: 9076 - protein, 173 aa, Homo sapiens
MTEAGKLPLPLPPRLDWDAENLLESQPLGSFLIRVSHSHVGYTLSYKAQSSCCHFMVKLLDDGTFMIPGEKVAHTSLDALVTFHQQKPIEPRRELLTQPCRQKDPANVDYEDLFLYSNAVAEEAACPVSAPEEASPKPVLCHQSKERKPSAEMNRITTKEATSSCPPKSPLGE

SEQ ID NO: 9077 - protein, 207 aa, Homo sapiens
KPHLEKLTLGITRILESSPGVTEVTIIEKPPAERHMISSWEQKNNCVMPEDVKNFYLMTNGFHMTWSVKLDEHIIPLGSMAINSISKLTQLTQSSMYSLPNAPTLADLEDDTHEASDDQPEKPHFDSRSVIFELDSCNGSGKVCLVYKSGKPALAEDTEIWFLDRALYWHFLTDTFTAYYRLLITHLGLPQWQYAFTSYGISPQAKV

SEQ ID NO: 9078 - protein, 278 aa, Homo sapiens
MELGRGAYGVVEKMRHVPSGQIMAVKRIRATVNSQEQKRLLMDLDISMRTVDCPFTVTFYGALFREGDVWICMELMDTSLDKFYKQVIDKGQTIPEDILGKIAVSIVKALEHLHSKLSVIHRDVKPSNVLINALGQVKMCDFGISGYLVDSVAKTIDAGCKPYMAPERINPELNQKGYSVKSDIWSLGITMIELAILRFPYDSWGTPFQQLKQVVEEPSPQLPADKFSAEFVDFTSQCLKKNSKERPTYPELMQHPFFTLHESKGTDVASFVKLILGD

SEQ ID NO: 9079 - protein, 104 aa, Homo sapiens
MKSRLTYNQINDVIKEINKAVISKYKILHQPKKSMNSVTRNLYHRFIDEETKDTKGRYFIVEADIKEFTTLKADKKFHVLLNILRHCRRLSEVRGGGLTRYVIT

SEQ ID NO: 9080 - protein, 51 aa, Homo sapiens
NWPFLEGCACTPERMAEAGFIHCPTENEPDLAQCFFCFKELEGWEPDDDPM

SEQ ID NO: 9081 - protein, 34 aa, Homo sapiens
ITYSNSCYYIGKERRTWEERVCWPVLRRTLICFL

SEQ ID NO: 9082 - protein, 109 aa, Homo sapiens
LERAEERAEVSELKCGDLEEELKNVTNNLKSLEAASEKYSEKEDKYEEEIKLLSDKLKEAETRAEFAERTVAKLEKTIDDLEEKLAQAKEENVGLHQTLDQTLNELNCI

SEQ ID NO: 9083 - protein, 120 aa, Homo sapiens
MGAPTLPPAWQPFLKDHRISTFKNWPFLEGCACTPERMAEAGFIHCPTENEPDLAQCFFCFKELEGWEPDDDPIEEHKKHSSGCAFLSVKKQFEELTLGEFLKLDRERAKNKIERALLAE

SEQ ID NO: 9084 - protein, 377 aa, Homo sapiens
AELLLRRLEASDGGLDSAELAAELGMEHQAVVGAVKSLQALGEVDSMEDEVQRRLQLVRGGQAEKLGEKERSELRKRKLLAEVTLKTYWVSKGSAFSTSISKQETELSPEMISSGSWRDRPFKPYNFLAHGVLPDSGHLHPLLKVRSQFRQIFLEMGFTEMPTDNFIESSFWNFDALFQPQQHPARDQHDTFFLRDPAEALQLPMDYVQRVKRTHSQGGYGSQGYKYNWKLDEARKNLLRTHTTSASARALYRLAQKKPFTPVKYFSIDRVFRNETLDATHLAEFHQIEGVVADHGLTLGHLMGVLREFFTKLGITQLRFKPAYNPYTEPSMEVFSYHQGLKKWVEVGNSGVFRPEMLLPMGLPENVSVIAWGLSLE

SEQ ID NO: 9085 - protein, 123 aa, Homo sapiens
DIIMQLDDVVSSTVTGPRVEEAMYRSIRWLDRCIAAHQRPDKQNLFAIIQGGLDADLRATCLEGPQSESLKSRTLAGYHSSHLNPSTLGGQEMTKRDVPGFAIGGLSGGESKSQFWRMVALST

SEQ ID NO: 9086 - protein, 204 aa, Homo sapiens
MNSNVENLPPHIIRLVYKEVTTLTADPPDGIKVFPNEEDLTDLQVTIEGPEGTPYAGGLFRMKLLLGKDFPASPPKGYFLTKIFHPNVGANGEICVNVLKRDWTAELGIRHVLLLSWKDKQCQTQDTQVLLRSAQEHLTMQRVTIKCLLIHPNPESALNEEAGRLLLENYEEYAARARLLTEIHGGAGGPSGRAEAGRALASGT

SEQ ID NO: 9087 - protein, 188 aa, Homo sapiens
DEEEEPQAPQESTPAPPKKDIKGSYVSIHSSGFRDFLLKPELLRAIVDCGFEHPSEVQHECIPQAILGMDVLCQAKSGMGKTAVFVLATLQQIEPVNGQVTVLVMCHTRELAFQISKEYERFSKYMPSVKDEEVLKKNCPHVVVGTPGRILALVRNRSFSLKNVKHFVLDECDKMLEQLDMRRDVQEI

SEQ ID NO: 9088 - protein, 176 aa, Homo sapiens
MTLEELVACDNAAQKMQTVTAAVEELLVAAQRQDRLTVGVYESAKLMNVDPDSVVLCLLAIDEEEEDDIALQIHFTLIQSFCCDNDINIVRVSGMQRLAQLLGEPAETQGTTEARDLHCLLVTVSRASALPRHARAPGPVFVNKVGLTGPAQLSAQPRLACPVGSRAGASSPRKLF

SEQ ID NO: 9089 - protein, 263 aa, Homo sapiens
MFQAFPGDYDSGSRCSSSPSAESQYLSSVDSFGSPPTAAASQSQGQPLASQPPVVDPYDMPGTSYSTPGMSGYSSGGASGSGGPSTSGTTSGPGPARPARARPRRPREETETDQLEEEKAELESEIAELQKEKERLEFVLVAHKPGCKIPYEEGPGPGPLAEVRDLPGSAPAKEDGFSWLLPPPPPPPLPFQTSQDAPPNLTASLFTHSEVQVLGDPFPVVNPSYTSSFVLTCPEVSAFAGAQRTSGSDQPSDPLNSPSLLAL

SEQ ID NO: 9090 - protein, 502 aa, Homo sapiens
MYSPYCLTQDEFHPFIEALLPHVRAFSYTWFNLQARKRKYFKKHEKRMSKDEERAVKDELLGEKPEIKQKWASRLLAKLRKDIRPEFREDFVLTITGKKPPCCVLSNPDQKGKIRRIDCLRQADKVWRLDLVMVILFKGIPLESTDGERLYKSPQCSNPGLCVQPHHIGVTIKELDLYLAYFVHTPESGQSDSSNQQGDADIKPLPNGHLSFQDCFVTSGVWNVTELVRVSQTPVATASGPNFSLADLESPSYYNINQVTLGRRSITSPPSTSTTKRPKSIDDSEMESPVDDVFYPGTGRSPAAGSSQSSGWPNDVDAGPASLKKSGKLDFCSALSSQGSSPRMAFTHHPLPVLAGVRPGSPRATASALHFPSTSIIQQSSPYFTHPTIRYHHHHGQDSLKEFVQFVCSDGSGQATGQPNGSGQGKVPGSFLLPPPPPVARPVPLPMPDSKSTSTAPDGAALTPPSPSFATTGASSANRFVSIGPRDGNFLNIPQQSQSWFL

SEQ ID NO: 9091 - protein, 146 aa, Homo sapiens
MGDERPHYYGKHGTPQKYDPTFKGPIYNRNKPYLFYFNIVKCASPLVLLEFQCPTPQICVEKCPDRYLTYLNARSSRDFEYYKQFCVPGFKNNKGVAEVLQDGDCPAVLIPSKPLARRCFPAIHAYKGVLMVGNETTYEDGHGSRK

SEQ ID NO: 9092 - protein, 91 aa, Homo sapiens
MPFITCDEFNGVPSYMKSRLTYNQINDVIKEINKAVISKYKILHQPKKSMNSVTRNLYHRFIDEETKDTKGRYFIVEADIKEFTTLKADKK

SEQ ID NO: 9093 - protein, 166 aa, Homo sapiens
MAALTRDPQFQKLQQWYREHRSELNLRRLFDANKDRFNHFSLTLNTNHGHILVDYSKNLVTEDVMRMLVDLAKSRGVEAARERMFNGEKINYTEGRAVLHVALRNRSNTPILVDGKDVMPEVNKVLDKMKSFCQGPLMVTEALKPYSSGGPRVWYVSNIDGTHIAK

SEQ ID NO: 9094 - protein, 57 aa, Homo sapiens
MADTPRDAGLKQAPASRNEKAPVDFGYVGIDSILEQMRRKAMKQGFEFNIMVVERLG

SEQ ID NO: 9095 - protein, 425 aa, Homo sapiens
MFRTKRSALVRRLWRSRAPGGEDEEEGAGGGGGGGELRGEGATDSRAHGAGGGGPGRAGCCLGKAVRGAKGHHHPHPPAAGAGAAGGAEADLKALTHSVLKKLKERQLELLLQAVESRGGTRTACLLLPGRLDCRLGPGAPAGAQPAQPPSSYSLPLLLCKVFRWPDLRHSSEVKRLCCCESYGKINPELVCCNPHHLSRLCELESPPPPYSRYPMDFLKPTDCPDAVPSSAETGGTNYLAPGGLSDSQLLLEPGDRSHWCVVAYWEEKTRVGRLYCVQEPSLDIFYDLPQGNGFCLGQLNSDNKSQLVQKVRSKIGCGIQLTREVDGVWVYNRSSYPIFIKSATLDNPDSRTLLVHKVFPGFSIKAFDYEKAYSLQRPNDHEFMQQPWTGFTVQISFVKGWGQCYTRQFISSCPCWLEVIFNSR

SEQ ID NO: 9096 - protein, 133 aa, Homo sapiens
DGGVLREVVKHPSVESVVQCEIDEVSAGVEPGLSPGSPSGQLCPEMAAHPRARQDVIQVSKKFLPGMAIGYSSSKLTLHVGDGFEFMKQNQDAFDVIITDSSDPMGPAESLFKESYYQLMKTALKEDGVLCCQ

SEQ ID NO: 9097 - protein, 101 aa, Homo sapiens
GLHACLQLGRLKDQDKAAPEMVSLLKRNNCGKALDIARQARDMLGGNGISDEYHVIRHAMNLEAVNTYEGELIHSTAAAETMTPTEPSPDPHPTPSSGSES

SEQ ID NO: 9098 - protein, 176 aa, Homo sapiens
LAFWFDVAFIGSIQSYDISIVAQVDQTGSKSSNLLDLKNPFFRYTGTTPSPPPGSHYTSPSENMWNTGSTYNLSSGMAVAGMPTAYDLSSVIASGSSVGHNNLIPLANTGIVNHTHSRMGSIMSTGIVQGSSGAQGSGGGSTSAHYAVNSQFTMGGPAISMASPMSIPTNTMHYGS

SEQ ID NO: 9099 - protein, 39 aa, Homo sapiens
MQVTEAPVTQEAVNGHGALEVDMALGSPEMDVRKKKKKK

SEQ ID NO: 9100 - protein, 440 aa, Homo sapiens
MLPACRLQDEFHPFIEALLPHVRAFSYTWFNLQARKRKYFKKHEKRMSKDEERAVKDELLGEKPEIKQKWASRLLAKLRKDIRPEFREDFVLTITGKKPPCCVLSNPDQKGKIRRIDCLRQADKVWRLDLVMVILFKGIPLESTDGERLYKSPQCSNPGLCVQPHHIGVTIKELDLYLAYFVHTPESGQSDSSNQQGDADIKPLPNGHLSFQDCFVTSGVWNVTELVRVSQTPVATASGPNFSLADLESPSYYNINQVTLGRRSITSPPSTSTTKRPKSIDDSEMESPVDDVFYPGTGRSPAAGSSQSSGWPNDVDAGPASLKKSGKLDFCSALSSQGSSPRMAFTHHPLPVLAGVRPGSPRATASALHFPSTSIIQQSSPYFTHPTIRYHHHHGQDSLKEFVQFVCSDGSGQATGQHSQRQAPPLPTGLSASDPGTATF

SEQ ID NO: 9101 - protein, 422 aa, Homo sapiens
MSADGAEADGSTQVTVEEPVQQPSVVDRVASMPLISSTCDMVSAAYASTKESYPHIKTVCDAAEKGVRTLTAAAVSGAQPILSKLEPQIASASEYAHRGLDKLEENLPILQQPTEKVSGAQEMVSSAKDTVATQLSEAVDATRGAVQSGVDKTKSVVTGGVQSVMGSRLGQMVLSGVDTVLGKSEEWADNHLPLTDAELARIATSLDGFDVASVQQQRQEQSYFVRLGSLSERLRQHAYEHSLGKLRATKQRAQEALLQLSQVLSLMETVKQGVDQKLVEGQEKLHQMWLSWNQKQLQGPEKEPPKPEQVESRALTMFRDIAQQLQATCTSLGSSIQGLPTNVKDQVQQARRQVEDLQATFSSIHSFQDLSSSILAQSRERVASAREALDHMVEYVAQNTPVTWLVGPFAPGITEKAPEEKK

SEQ ID NO: 9102 - protein, 705 aa, Homo sapiens
MPLPGGLWWLLCCRRGFTLLHRDYGDGELSGDGDEDEDEETFELRTPSPAGGGRGPLEVTLTQPVRSGPVSNRLQSWEETWSLIPEKGLPEDDPDIVVKGWLYREPRGGGARPWLPPRRAWFVLTRDSLDQFSSSGKGARRLGSLVLTSLCSVTGPERRRKETGLWSVTVSGRKHSVRLCSPRQAEAERWGVALREVIASKAPLETPTQLLLRDIQESCGDPEAVALIYLRNPILRHTSGALYAPLLPLPYGVSAPGPGYAPLREEAVRLFLALQALEGARRPGPLMQGVLQTCRDLPALRDELFLQLAKQTSGPAGPPGLPATQDPAALRYWQLLTCMSCTFRPGGAVRGHLLGHLERTEQALPDSELAEYARFIRKALGRTRGRELVPSLAEISALSQRQELLCTVHCPGAGACAVAIDSHTTAGEVARELVGRLGLARSRNAFALYEQRGAQERALAGGTLVADVLTRFENLAAEEAGLEDSPDSGWRLCLRLHGPLHPEGLSPDGHELPFLFEQAHALLLRGRPPPPDDTLRALAALRLQSLQRDFSPRVPLPRLDRLLPPPAPPREDPPRPTPRPPPSAALLAGALWSPGLAKRRAERARRGGAGRTAGSIAREGGGGAGTAAAVLGGWKRLRGMGRAEAMAAYLALAAQCPGFGAARSLVGVLHRSCAWAWEPRPCPSPGQGRRSPSTVSAMAMWPPAS

SEQ ID NO: 9103 - protein, 627 aa, Homo sapiens
MDSVVFEDVAVDFTLEEWALLDSAQRDLYRDVMLETFQNLASVDDETQFKASGSVSQQDIYGEKIPKESKIATFTRNVSWASVLGKIWDSLSIEDQTTNQGRNLRNHGLERLCESNDQCGEALSQIPHLNLYKKIPPGVKQYEYNTYGKVFMHRRTSLKSPITVHTGHKPYQCQECGQAYSCRSHLRMHVRTHNGERPYVCKLCGKTFPRTSSLNRHVRIHTAEKTYECKQCGKAFIDFSSLTSHLRSHTGEKPYKCKECGKAFSYSSTFRRHTITHTGEKPYKCKECAEAFSYSSTFRRHMISHTGEKPHKCKECGEAFSYSSAFRRHMITHTGEKPYECKQCGKTFIYLQSFRRHERIHTGEKPYECKQCGKTFIYPQSFRRHERTHGGEKPYECNQCGKAFSHPSSFRGHMRVHTGEKPYECKQCGKTFNWPISLRKHMRTHTREKPYECKQCGKAFSLSACFREHVRMHPEDKSYECKLCGKAFYCHISLQKHMRRHTAEKLYKCKQCGKAFSWPELLQQHVRTHTVEKPYECKECGKVFKWPSSLPIHMRLHTGEKPYQCKHCGKAFNCSSSLRRHVRIHTTEKQYKCNVGHPPANEFMCSASEKSHQERDLIKVVNMVLPL

SEQ ID NO: 9104 - protein, 255 aa, Homo sapiens
MAEQDVENDLLDYDEEEEPQAPQESTPAPPKKDIKGSYVSIHSSGFRDFLLKPELLRAIVDCGFEHPSEGSRPSRSASPAVQHECIPQAILGMDVLCQAKSGMGKTAVFVLATLQQIEPVNGQVTVLVMCHTRELAFQISKEYERFSKYMPSVKVSVFFGGLSIKKDEEVLKKNCPHVVVGTPGRILALVRNRSFSLKNVKHFVLDECDKMLEQLDMRRDVQEIFRLTPHEKQCMMFSATLSKDIRPVCRKFMQD

SEQ ID NO: 9105 - protein, 31 aa, Homo sapiens
MSDEGSRGSRLPLALPPASQGCSSGGGGGGS

SEQ ID NO: 9106 - protein, 297 aa, Homo sapiens
MQGSSLWLSLTFRSARVLSRARFFEWQSPGLPNTAAMENGTGPYGEERPREVQETTVTEGAAKIAFPSANEVFYNPVQEFNRDLTCAVITEFARIQLGAKGIQIKVPGEKDTQKVVVDLSEQEEEKVELKESENLASGDQPRTAAVGEICEEGLHVLEGLAASGLRSIRFALEVPGLRSVVANDASTRAVDLIRRNVQLNDVAHLVQPSQADARMLMYQHQRVSERFDVIDLDPYGSPATFLDAAVQAALRIVLHSLDLRANCYQRFVVPLLSISADFYVRVFVRVFTGQAKVKASA

SEQ ID NO: 9107 - protein, 38 aa, Homo sapiens
MGKFMKPGKVVLVLAGRYSGRKAVIVKTGSLSRLSAVA

SEQ ID NO: 9108 - protein, 145 aa, Homo sapiens
MQGSSLWLSLTFRSARVLSRARFFEWQSPGLPNTAAMENGTGPYGEERPREVQETTVTEGAAKIAFPSANEVFYNPVQEFNRDLTCAVITEFARIQLGAKGIQSEWRSRLLVGGGHTSLSPCLGSSAAQIQRGFSHIAGPGFCSF

SEQ ID NO: 9109 - protein, 150 aa, Homo sapiens
MGPGYLLLRSPNRTATGMGPPYLRKTEGWSTGVIYHALSQKEANDSDVQPSGAQRAEAFVRAFLKRSTPRMSPQAREDQLQRKAVVLEYFTRHKRKEKKKKAKGLSARQRRELRLFDIKPEQQRYSLFLPLHELWKQYIRDLCSGLKPDT

SEQ ID NO: 9110 - protein, 506 aa, Homo sapiens
MAGRGSLVSWRAFHGCDSAEELPRVSPRFLRAWHPPPVSARMPTRRWAPGTQCITKCEHTRPKPGELAFRKGDVVTILEACENKSWYRVKHHTSGQEGLLAAGALREREALSADPKLSLMPWFHGKISGQEAVQQLQPPEDGLFLVRESARHPGDYVLCVSFGRDVIHYRVLHRDGHLTIDEAVFFCNLMDMVEHYSKDKGAICTKLVRPKRKHGTKSAEEELARAGWLLNLQHLTLGAQIGEGEFGAVLQGEYLGQKVAVKNIKCDVTAQAFLDETAVMTKMQHENLVRLLGVILHQGLYIVMEHVSKGNLVNFLRTRGRALVNTAQLLQFSLHVAEGMEYLESKKLVHRDLAARNILVSEDLVAKVSDFGLAKAERKGLDSSRLPVKWTAPEALKHGFTSKSDVWSFGVLLWEVFSYGRAPYPKMSLKEVSEAVEKGYRMEPPEGCPGPVHVLMSSCWEAEPARRPPFRKLAEKLARELRSAGAPASVSGQDADGSTSPRSQEP

SEQ ID NO: 9111 - protein, 152 aa, Homo sapiens
SDMFNYEEYCTANAVTGPCRASFPRWYFDVERNSCNNFIYGGCRGNKNSYRSEEACMLRCFRQQENPPLPLGSKALEPTSQKPGVGAGHGGDPKLSPHKVQGRSEAGAGPGPKASNFRGLGKGRRLTAAPPSSKDTTALPTPAAAPAIRTRM

SEQ ID NO: 9112 - protein, 548 aa, Homo sapiens
MEPGWRWELSPMHLLRLRRHTQDDDTLSPVLQLDTFKMAVHTPVPVAELLLRRLEASDGGLDSAELAAELGMEHQAVVGAVKSLQALGEVIEAELRSTKHWELTAEGEEIAREGSHEARVFRSIPPEGLAQSELMRLPSGKVGFSKAMSNKWIRVDKSAADGPRVFRVVDSMEDEVQRRLQLVRGGQAEKLGEKERSELRKRKLLAEVTLKTYWVSKGSAFSTSISKQETELSPEMISSGSWRDRPFKPYNFLAHGVLPDSGHLHPLLKVRSQFRQIFLEMGFTEMPTDNFIESSFWNFDALFQPQQHPARDQHDTFFLRDPAEALQLPMDYVQRVKRTHSQGGYGSQGYKYNWKLDEARKNLLRTHTTSASARALYRLAQKKPFTPVKYFSIDRVFRNETLDATHLAEFHQIEGVVADHGLTLGHLMGVLREFFTKLGITQLRFKPAYNPYTEPSMEVFSYHQGLKKWVEVGNSGVFRPEMLLPMGLPENVSVIAWGLSLERPTMIKYGINNIRELVGHKVNLQMVYDSPLCRLDAEPRPPPTQEAA

SEQ ID NO: 9113 - protein, 235 aa, Homo sapiens
MADGQVAELLLRRLEASDGGLDSAELAAELGMEHQAVVGAVKSLQALGEVIEAELRSTKHWELTAEGEEIAREGSHEARVFRSIPPEGLAQSELMRLPSGKVGFSKAMSNKWIRVDKSAADGPRVFRVVDSMEDEVQRRLQLVRGGQAEKLGEKERSELRKRKLLAEVTLKTYWVSKGSAFSTSISKQETELSPEMISSGSWRDRPFKPYNFLAHGVLPDSGHLHPLLKVHRDAD

SEQ ID NO: 9114 - protein, 90 aa, Homo sapiens
MKDFGSRQEFDSVENAGAIGPSRFGLKRAEVLGHKTPEPAPRRTEITIVKPQESAHRRMEPPASKPEVGAAHLRGAHPQDHRDQVHHARY

SEQ ID NO: 9115 - protein, 168 aa, Homo sapiens
MAGSGLELPFWSQRQASAAETMSADGAEADGSTQVTVEEPVQQPSVVDRVASMPLISSTCDMVSAAYASTKESYPHIKTVCDAAEKGVRTLTAAAVSGAQPILSKLEPQIASASEYAHRGLDKLEENLPILQQPTEKVLADTKELVSSKVSGAQEMVSSAKDTVATQL

SEQ ID NO: 9116 - protein, 160 aa, Homo sapiens
SCTGTPLSSTISSPEGPASSSLAQSVMSMASSQISTDTVSSMSGSYIAPGTEEEGEALSSPQPASRAPSEEGEGLPAESPDSNFAGLPAGEQDAEGNDVIEEEDGSPTQEGQRTCAFLGMECDNNNDFDIASVKALDNKLCSEVCLPAAAPESCPINIEE

SEQ ID NO: 9117 - protein, 72 aa, Homo sapiens
MGNVLQSSSDAIYLARHVGLRVGIPKETPALTINRLCGSGFQSIVNGCQEICVKEAEVVLCGGTESMSQAPY

SEQ ID NO: 9118 - protein, 154 aa, Homo sapiens
MYGKQKIYFADQDQFDMVSDADLQVLDGKIVALTAKVQSLQQSCRYMEAELKELSSALTTPEMQKEIQELKKECAGYRERLKNIKAATNHVTPEEKEQVYRERQKYCKEWRKRKRMATELSDAILEGYPKSKKQFFEEVGIETDEDYNVTLPDP

SEQ ID NO: 9119 - protein, 170 aa, Homo sapiens
MAALTRDPQFQKLQQWYREHRSELNLRRLFDANKDRFNHFSLTLNTNHGHILVDYSKNLVTEDVMRMLVDLAKSRGVEAARERMFNGEKINYTEGRAVLHVALRNRSNTPILVDGKDVMPEVNKVLDKMKSFCQTFTTQETITNAETAKEWFLQAAKDPSAVAKHFVALS

SEQ ID NO: 9120 - protein, 289 aa, Homo sapiens
MPGSFVPTVTAITTSQDLQWLVQPTLISSMAQSQGQPLASQPPVVDPYDMPGTSYSTPGMSGYSSGGASGSGGPSTSGTTSGPGPARPARARPRRPREETLTPEEEEKRRVRRERNKLAAAKCRNRRRELTDRLQAETDQLEEEKAELESEIAELQKEKERLEFVLVAHKPGCKIPYEEGPGPGPLAEVRDLPGSAPAKEDGFSWLLPPPPPPPLPFQTSQDAPPNLTASLFTHSEVQVLGDPFPVVNPSYTSSFVLTCPEVSAFAGAQRTSGSDQPSDPLNSPSLLAL

SEQ ID NO: 9121 - protein, 35 aa, Homo sapiens
MEPPASKVPEVPTAPATDAAPKRVEIQMPKPAEAP

SEQ ID NO: 9122 - protein, 187 aa, Homo sapiens
MSCINLPTVLPGSPSKTRGQIQVILGPMFSGKSTELMRRVRRFQIAQYKCLVIKYAKDTRYSSSFCTHDRTRSRIIARNTMEALPACLLRDVAQEALGVAVIGIDEGQFFPDIVEFCEAMANAGKTVIVAALDGTFQRKPFGAILNLVPLAESVVKLTAVCMECFREAAYTKRLGTEKEVEVIGGAD

SEQ ID NO: 9123 - protein, 120 aa, Homo sapiens
MAALRQPQVAELLAEARRAFREEFGAEPELAVSAPGRVNLIGEHTDYNQGLVLPMALELMTVLVGSPRKDGLVSLLTTSEGADEPQRLQFPLPTAQRSLEPGTPRWANYVKGVIQYYPEP

SEQ ID NO: 9124 - protein, 334 aa, Homo sapiens
MNSVSPAAAQYRSSSPEDARRRPEARRPRGPRGPDPNGLGPSGASGPALGSPGAGPSEPDEVDKFKAKFLTAWNNVKYGWVVKSRTSFSKISSIHLCGRRYRFEGEGDIQRFQRDFVSRLWLTYRRDFPPLPGGCLTSDCGWGCMLRSGQMMLAQGLLLHFLPRDWTWAEGMGLGPPELSGSASPSRYHGPARWMPPRWAQGAPELEQERRHRQIVSWFADHPRAPFGLHRLVELGQSSGKKESRGELLRRHPPGGVRFSGLHSVQGGCGTPGGQARPHSRVEVCGHPGARATGWRDSQPRVCALREGTPALRAVPGHHGWETATLTVLHWLPR

SEQ ID NO: 9125 - protein, 187 aa, Homo sapiens
AERHMISSWEQKNNCVMPEDVKNFYLMTNGFHMTWSVKLDEHIIPLGSMAINSISKLTQLTQSSMYSLPNAPTLADLEDDTHEASDDQPEKPHFDSRSVIFELDSCNGSGKVCLVYKSGKPALAEDTEIWFLDRALYWHFLTDTFTAYYRLLITHLGLPQWQYAFTSYGISPQAKAWGLATSKESAA

SEQ ID NO: 9126 - protein, 139 aa, Homo sapiens
MVALCSLQHLGSSDPRALPTLPTATSGQRPAKRRRKSPAMAALTRDPQFQKLQQWYREHRSELNLRRLFDANKDRFNHFSLTLNTNHGHILVDYSKNLVTEDVMRMLVDLAKSRGVEAARERMFNGEKINYTEGRAVLH

SEQ ID NO: 9127 - protein, 40 aa, Homo sapiens
MPTGDFDSKPSWADQVEEEGEDGVIPKALPSQLGSSCPWS

SEQ ID NO: 9128 - protein, 26 aa, Homo sapiens
GAAALGFASYGAHGAQFPDAYGKEVK

SEQ ID NO: 9129 - protein, 127 aa, Homo sapiens
MAAAVPDEAVARDVQRLLVQFQDEGGQLLGSPFDVPVDITPDRLQLVCNALLAQEDPLPLAFFVHDAEIVSSLGKTLESQAVETEKVLDIIYQPQAIFRVRAVTRCTSSLEGHSEAVISVAFSPTGK

SEQ ID NO: 9130 - protein, 334 aa, Homo sapiens
MSQSKGKKRNPGLKIPKEAFEQPQTSSTPPRDLDSKACISIGNQNFEVKADDLEPIMELGRGAYGVVEKMRHVPSGQIMAVKRIRATVNSQEQKRLLMDLDISMRTVDCPFTVTFYGALFREGDVWICMELMDTSLDKFYKQVIDKGQTIPEDILGKIAVSIVKALEHLHSKLSVIHRDVKPSNVLINALGQVKMCDFGISGYLVDSVAKTIDAGCKPYMAPERINPELNQKGYSVKSDIWSLGITMIELAILRFPYDSWGTPFQQLKQVVEEPSPQLPADKFSAEFVDFTSQCLKKNSKERPTYPELMQHPFFTLHESKGTDVASFVKLILGD

SEQ ID NO: 9131 - protein, 126 aa, Homo sapiens
DIEEVSQGLLSLLGANRAEAQQRRLLGRHEQVVERLLETQDGAEKQLRGTWLNFTTKLVKLSGIMSVSQGWSKASIMAPVWPSPSTWTAPSSPGNSSATTSGVWWTPSGSQEPRGCVLHPAGICRG

SEQ ID NO: 9132 - protein, 66 aa, Homo sapiens
MQTVTAAVEELLVAAQRQDRLTVGVYESAKLMNVDPDSVVLCLLAIDEEEEDDIALQIHFTLIQSF

SEQ ID NO: 9133 - protein, 158 aa, Homo sapiens
DNFIESSFWNFDALFQPQQHPARDQHDTFFLRDPAEALQLPMDYVQRVKRTHSQGGYGSQGYKYNWKLDEARKNLLRTHTTSASARALYRLAQKKPFTPVKYFSIDRVFRNETLDATHLAEFHQIEGVVADHGLTLGQPPPSSFPPVPGPESQGQRTG

SEQ ID NO: 9134 - protein, 83 aa, Homo sapiens
MSILKIHAREIFDSRGNPTVEVDLFTSKGLFRAAVPSGASTGIYEALELRDNDKTRYMGKGVSKAVEHINKTIAPALVSKKLN

SEQ ID NO: 9135 - protein, 267 aa, Homo sapiens
MSCINLPTVLPGSPSKTRGQIQVILGPMFSGKSTELMRRVRRFQIAQYKCLVIKYAKDTRYSSSFCTHDRNTMEALPACLLRDVAQEALGVAVIGIDEGQFFPDIVEFCEAMANAGKTVIVAALDGTFQRKPFGAILNLVPLAESVVKLTAVCMECFREAAYTKRLGTEKEVAPPAFPAGRRGGGMALPPSCPGPSPIPCPCGQVEVIGGADKYHSVCRLCYFKKASGQPAGPDNKENCPVPGKPGEAVAARKLFAPQQILQCSPAN

SEQ ID NO: 9136 - protein, 141 aa, Homo sapiens
SEPLPFTYLPRDHGPFLPPSALLPDPDFFSGTVSLPGLEPPGGPDLLDDGFAYDPTAPTLFTMLDLLPPAPPHASAVVCSGGAGAVVGETPGPEPLTLDSYQAPGPGDGGTASLVGSNMFPNHYREAAFGGGLLSPGPEAT

SEQ ID NO: 9137 - protein, 40 aa, Homo sapiens
MGKFMKPGKVVLVLAGRYSGRKAVIVKVLCGYPLGQNCRQ

SEQ ID NO: 9138 - protein, 72 aa, Homo sapiens
MTEAGKLPLPLPPRLDWFVHTQMGQLAQDGVPEWFHGAISREDAENLLESQPLGSFLIRVSHSHVGYTLSYK

SEQ ID NO: 9139 - protein, 151 aa, Homo sapiens
MLWPEEEPWGGRCACVTEACPADAGPLTSRRGSLKRSFEVEEVETPNSTPPRRVQTPLLRATVASSTQKFQDLGVKNSEPSARHVDSLSQRSPKASLRRVELSGPKAAEPVSRRTELSIDISSKQVENAGAIGPSRFGLKRAEVLGHKTPE

SEQ ID NO: 9140 - protein, 143 aa, Homo sapiens
MAKVSVLNVAVLENPSPFHSPFRFEISFECSEALADDLEWKIIYVGSAESEEFDQILDSVLVGPVPAGRHMFVFQLQRNILASNPRVTRFHINWDNNMDRLEAIETQDPSLGCGLPLNCTPIKGLGLPGCIPGLLPENSMDCI

SEQ ID NO: 9141 - protein, 180 aa, Homo sapiens
MSCINLPTVLPGSPSKTRGQIQVILGPMFSGKSTELMRRVRRFQIAQYKCLVIKYAKDTRYSSSFCTHDRNTMEALPACLLRDVAQEALGVAVIGIDEGQFFPDIVEFCEAMANAGKTVIVAALDGTFQRKPFGAILNLVPLAESVVKLTAVCMECFREAAYTKRLGTEKEQILQCSPAN

SEQ ID NO: 9142 - protein, 267 aa, Homo sapiens
SADPKLSLMPWFHGKISGQEAVQQLQPPEDGLFLVRESARHPGDYVLCVSFGRDVIHYRVLHRDGHLTIDEAVFFCNLMDMVERPPGNGTGCWGSPPWGWAHGCPTILQHYSKDKGAICTKLVRPKRKHGTKSAEEELARAGWLLNLQHLTLGAQIGEGEFGAVLQGEYLGQKVAVKNIKCDVTAQAFLDETAVMTKMQHENLVRLLGVILHQGLYIVMEHVSKGNLVNFLRTRGRALVNTAQLLQFSLHVAEGMEYLESKKLVHRD

SEQ ID NO: 9143 - protein, 148 aa, Homo sapiens
MSSTQFNKGPSYGLSAEVKNRLLSKYDPQKEAELRTWIEGLTGLSIGPDFQKGLKDGTILCTLMNKLQPGSVPKINRSMQNWHQLENLSNFIKAMVSYGMNPVDLFEANDLFESGNMTQVQVSLLALAGKVRPREGQPPAQSHTARWM

SEQ ID NO: 9144 - protein, 269 aa, Homo sapiens
MAPEENAGTELLLQSFERRFLAARTLRSFPWQSLEAKLRDSSDSELLRDILHKPSGGSVTLSESTAIISYGTTGLVTWDAALYLAEWAIENPAVFTNRTVLELGSGAGLTGLAICKMCRPRAYIFSDCHSRVLEQLRGNVLLNGLSLEADITAKLDSPRVTVAQLDWDVATVHQLSAFQPDVVIAADVLYCPEAIMSLVGVLRRLAACREHQRAPEVYVAFTVRNPETCQLFTTELGRAGIRWEVEPRHEQKLFPYEEHLEMAMLNLTL

SEQ ID NO: 9145 - protein, 52 aa, Homo sapiens
GGGVLTLLVEVSNIFLTIRMMMKISNAQDHLLYRVNKGPWAPSCWVSCSCWT

SEQ ID NO: 9146 - protein, 56 aa, Homo sapiens
MEPGAQRGNLEVGIRKKIEHDVVMKASSSLPKKLALLKAPAKKKGAAAATSSKTPS

SEQ ID NO: 9147 - protein, 793 aa, Homo sapiens
MPLPGGLWWLLCCRRGFTLLHRDYGDGELSGDGDEDEDEETFELRTPSPAGGGRGPLEVTLTQPVRSGPVSNRLQSWEETWSLIPEKGLPEDDPDIVVKGWLYREPRGGGARPWLPPRRAWFVLTRDSLDQFSSSGKGARRLGSLVLTSLCSVTGPERRRKETGLWSVTVSGRKHSVRLCSPRQAEAERWGVALREVIASKAPLETPTQLLLRDIQESCGDPEAVALIYLRNPILRHTSGALYAPLLPLPYGVSAPGPGYAPLREEAVRLFLALQALEGARRPGPLMQGVLQTCRDLPALRDELFLQLAKQTSGPAGPPGLPATQDPAALRYWQLLTCMSCTFRPGGAVRGHLLGHLERTEQALPDSELAEYARFIRKALGRTRGRELVPSLAEISALSQRQELLCTVHCPGAGACAVAIDSHTTAGEVARELVGRLGLARSRNAFALYEQRGAQERALAGGTLVADVLTRFENLAAEEAGLEDSPDSGWRLCLRLHGPLHPEGLSPDGHELPFLFEQAHALLLRGRPPPPDDTLRALAALRLQSLQRDFSPRVPLPRLDRLLPPPAPPREDPPRPTPRPPPSAALLAGALWSPGLAKRRAERARRGGAGRTAGSIAREGGGGAGTAAAVLGGWKRLRGMGRAEAMAAYLALAAQCPGFGAARYDVLELSTEPGRGAPQKLCLGLGAKAMSLSRPGETEPIHSVSYGHVAACQLMGPHTLALRVGESQLLLQSPQVEEIMQLVNAYLANPSPERPCSSSSPPCQDLPDTSPPSQRPGLDEPQGQSGCLGQLQD

SEQ ID NO: 9148 - protein, 170 aa, Homo sapiens
MEDERKNGAYGTPQKYDPTFKGPIYNRNKPYLFYFNIVKCASPLVLLEFQCPTPQICVEKCPDRYLTYLNARSSRDFEYYKQFCVPGFKNNKGVAEVLQDGDCPAVLIPSKPLARRCFPAIHAYKGVLMVGNETTYEDGHGSRKNITDLVEGAKKANGVLEARQLAMRIF

SEQ ID NO: 9149 - protein, 40 aa, Homo sapiens
MKSVIYHALSQKEANDSDVQPSGAQRAEAFVRAFLKRSHR

SEQ ID NO: 9150 - protein, 119 aa, Homo sapiens
MGRPSSPRAAWGTFSPPQRTQVPDCHSARSKTYGNVLVLDGVIQCTERDEFSYQEMIANLPLCSHPNPRKVLIIGGGDGGVLREVVKHPSVESVVQCEIDEDVIQVSKKFLPGMAIGYS

SEQ ID NO: 9151 - protein, 494 aa, Homo sapiens
MDEFHPFIEALLPHVRAFSYTWFNLQARKRKYFKKHEKRMSKDEERAVKDELLGEKPEIKQKWASRLLAKLRKDIRPEFREDFVLTITGKKPPCCVLSNPDQKGKIRRIDCLRQADKVWRLDLVMVILFKGIPLESTDGERLYKSPQCSNPGLCVQPHHIGVTIKELDLYLAYFVHTPESGQSDSSNQQGDADIKPLPNGHLSFQDCFVTSGVWNVTELVRVSQTPVATASGPNFSLADLESPSYYNINQVTLGRRSITSPPSTSTTKRPKSIDDSEMESPVDDVFYPGTGRSPAAGSSQSSGWPNDVDAGPASLKKSGKLDFCSALSSQGSSPRMAFTHHPLPVLAGVRPGSPRATASALHFPSTSIIQQSSPYFTHPTIRYHHHHGQDSLKEFVQFVCSDGSGQATGQPNGSGQGKVPGSFLLPPPPPVARPVPLPMPDSKSTSTAPDGAALTPPSPSFATTGASSANRFVSIGPRDGNFLNIPQQSQSWFL

SEQ ID NO: 9152 - protein, 209 aa, Homo sapiens
MAAFRDIEEVSQGLLSLLGANRAEAQQRRLLGRHEQVVERLLETQDGAEKQLREILTMEKEVAQSLLNAKEQVHQGGVELQQLEAGLQEAGEEDTRLKASLLQLTRELEELKEIEADLERQEKEVDEDTTVTIPSAVYVAQLYHQVIRPPWPPKVLDSRDLPTSASKYLGLQVCAIASGWIVSRWRETQNFLERNGGVILVPPGLFLLS

SEQ ID NO: 9153 - protein, 589 aa, Homo sapiens
MCSEARLARRLRDALREEEPWAVEELLRCGADPNLVLEDGAAAVHLAAGARHPRGLRCLGALLRQGGDPNARSVEALTPLHVAAAWGCRRGLELLLSQGADPALRDQDGLRPLDLALQQGHLECARVLQDLDTRTRTRTRIGAETQEPEPAPGTPGLSGPTDETLDSIALQKQPCRGDNRDIGLEADPGPPSLPVPLETVDKHGSSASPPGHWDYSSDASFVTAVEVSGAEDPASDTPPWAGSLPPTRQGLLHVVHANQRVPRSQGTEAELNARLQALTLTPPNAAGFQSSPSSMPLLDRSPAHSPPRTPTPGASDCHCLWEHQTSIDSDMATLWLTEDEASSTGGREPVGPCRHLPVSTVSDLELLKGLRALGPEFSGHSLELAAALRTGCIPDVQADEDALAQQFEQPDPARRWREGVVKSSFTYLLLDPRETQDLPARAFSLTPAERLQTFIRAIFYVGKGTRARPYVHLWEALGHHGRSRKQPHQACPKVRQILDIWASGCGVVSLHCFQHVVAVEAYTREACIVEALGIQTLTNQKQGHCYGVVAGWPPARRRRLGVHLLHRALLVFLAEGERQLHPQDIQARG

SEQ ID NO: 9154 - protein, 258 aa, Homo sapiens
MPGGPGVLQALPATIFLLFLLSAVYLGPGCQALWMHKVPASLMVSLGEDAHFQCPHNSSNNANVTWWRVLHGNYTWPPEFLGPGEDPNGTLIIQNVNKSHGGIYVCRVQEGNESYQQSCGTYLRVRREWPSPGPYSHCPAGDTRFIFEVGIEPVPSMWVSNRLGQRDGHSPLQSGVSGGSGALQEVGGARRLGRARGARALSHTTSLQSRPPGPSWTWGRAPRTESSQPRGSSSCSARWCLGRCCCSGNDGRTRSSGW

SEQ ID NO: 9155 - protein, 120 aa, Homo sapiens
MSESGHSQPGLYGIERRRRWKEPGSGGPQNLSGPGGRERDYIAPWERERRDASEETSTSVMQKTPIILSKPPAERSKQPPPPTAPAAPPAPAPLEKPIVLMKPREEGKGPVAVTGASTPE

SEQ ID NO: 9156 - protein, 50 aa, Homo sapiens
LLEPVLLLGKERFAGVDIRVRVKGGGHVAQIYAIRQSISKALVAYYQKCE

SEQ ID NO: 9157 - protein, 69 aa, Homo sapiens
MLPLSLLKTAQNHPMLVELKNGETYNGHLVSCDNWMNINLREVICTSRVKNPNQREPHPRLEGAPVSHS

SEQ ID NO: 9158 - protein, 40 aa, Homo sapiens
MKPGGGFHSGGNRGRGRGGKRGNQSGKNVMVEPHRHEGRR

SEQ ID NO: 9159 - protein, 288 aa, Homo sapiens
YSTSAKVVYGDTDSVMCRFGVSSVAEAMALGREAADWVSGHFPSPIRLEFEKVYFPYLLISKKRYAGLLFSSRPDAHDRMDCKGLEAVRRDNCPLVANLVTASLRRLLIDRDPEGAVAHAQDVISDLLCNRIDISQLVITKELTRAASDYAGKQAHVELAERSCAGMRKRDPGSAPSLGDRVPYVIISAAKGVAAYMKSEDPLFVLEHSLPIDTQYYLEQQLAKPLLRIFEPILGEGRAEAVLLRGDHTRCKTVLTGKVGGLLAFAKRRNCCIGCRTVLSHQGAVCEF

SEQ ID NO: 9160 - protein, 64 aa, Homo sapiens
MVAKQHGKVVMAKVDIDDHTDLAIEYEVSAVPTVLAMKNGDVVDKFVGIKDEDQLEAFLKKLIG

SEQ ID NO: 9161 - protein, 109 aa, Homo sapiens
MVGQLAARRAAGVVLEMIREGKIAGRAVLIAGQPGTGKTAIAMGMAQALGPDTPFTAIAGSEIFSLEMSKTEALTQAFRRSIGVRIKEETEIIEGEVVEIQIDRPATGT

SEQ ID NO: 9162 - protein, 92 aa, Homo sapiens
MAGSEELGLREDTLRVLAAFLRRGEAAGSPVPTPPRPSYSRLLCFGGPAAGTAGPRAAEISAQPRITGSPIDREGSHTAEAGGPAGGGGRSH

SEQ ID NO: 9163 - protein, 95 aa, Homo sapiens
MAEAVLRVARRQLSQRGGSGAPILLRQMFEPVSCTFTYLLGDRESREAVLIDPVLETAPRDAQLIKELGLRLLYAGVGDQGQPWPHPRLCHLRPE

SEQ ID NO: 9164 - protein, 162 aa, Homo sapiens
MLMCLKGSGPSGGSGGGANGTSFSYTFHGDPHAMFAEFFGGRNPFDTFFGQRNGEEGMDIDDPFSGFPMGMGGFTNVNFGRSRSAQEPARKKQDPPVTHDLRVSLEEIYSGCTKKMKISHKRLNPDGKSIRNEDKILTIEVKKGWKEGTKITFPKEGDQTSN

SEQ ID NO: 9165 - protein, 145 aa, Homo sapiens [sequence omitted]

SEQ ID NO: 9166 - protein, 257 aa, Homo sapiens
DSGSDEEEGEAEASSSTPATGVFLKSWVYQPGEDTEEEEDEDSDTGSAEDEREAETSASTPPASAFLKAWVYRPGEDTEEEEDEDVDSEDKEDDSEAALGEAESDPHPSHPDQRAHFRGWGYRPGKETEEEEAAEDWGEAEPCPFRVAIYVPGEKPPPPWAPPRLPLRLQRRLKRPETPTHDPDPETPLKARKVGAESPDSIFFFFLIELESWAVTQAGVQRHDLGSLPTSAAQVQAILVPQPPEYLGLQAHDTTPS

SEQ ID NO: 9167 - protein, 244 aa, Homo sapiens
GRGGFGGGRGRGGGFRGNQSGKNVMVEPHRHEGVFICRGKEDALVTKNLVPGESVYGEKRVSISEGDDKIEYRAWNPFRSKLAAAILGGVDQIHIKPGAKVLYLGAASGTTVSHVSDIVGPDGLVYAVEFSHRSGRDLINLAKKRTNIIPVIEDARHPHKYRMLIAMVDVIFADVAQPDQTRIVALNAHTFLRNGGHFVISIKANCIDSTASAEAVFASEVKKMQQENMKPQEQLTLEPYERDH

SEQ ID NO: 9168 - protein, 133 aa, Homo sapiens
LFSKTEMSEVLTEILRVDPAFDKDRFLKQCENDIIPNVLEAMISGELDILKDWCYEALAMGKMMEQGPVLIITFQAQLVMVVRNPKGEVVEGDPDKVLRMLYVWALCRDQDELNPYAAWRLLDISASSTEQIL

SEQ ID NO: 9169 - protein, 290 aa, Homo sapiens
EFEKVYFPYLLISKKRYAGLLFSSRPDAHDRMDCKGLEAVRRDNCPLVANLVTASLRRLLIDRDPEGAVAHAQDVISDLLCNRIDISQLVITKELTRAASDYAGKQAHVELAERMRKRDPGSAPSLGDRVPYVIISAAKGVAAYMKSEDPLFVLEHSLPIDTQYYLEQQLAKPLLRIFEPILGEGRAEAVLLRGDHTRCKTVLTGKVGGLLAFAKRRNCCIGCRTVLSHQGIPSECPGGALLAPLDAVPALPGQPARGRHLHQPGLPHLLHAQEGAEGPGRPGAAPAALR

SEQ ID NO: 9170 - protein, 51 aa, Homo sapiens
MDVEKLEKMRDHERKEETFTPMPSPYYMELTKLLLNHASDNIPKADEIRTL

SEQ ID NO: 9171 - protein, 95 aa, Homo sapiens
MSGEENPASKPTPVQDVQGDGRWMSLHHRFVADSKDKEPEVVFIGDSLVQLMHQCEIWRELFSPLHALNFGIGGDGTQHVLWRLENGELEHIRPK

SEQ ID NO: 9172 - protein, 593 aa, Homo sapiens
MDWGTELWDQFEVLERHTQWGLDLLDRYVKFVKERTEVEQAYAKQLRSLVKKYLPKRPAKDDPESKFSQQQSFVQILQEVNDFAGQRELVAENLSVRVCLELTKYSQEMKQERKMHFQEGRRAQQQLENGFKQLENSKRKFERDCREAEKAAQTAERLDQDINATKADVEKAKQQAHLRSHMAEESKNEYAAQLQRFNRDQAHFYFSQMPQIFDKLQDMDERRATRLGAGYGLLSEAELEVVPIIAKCLEGMKVAANAVDPKNDSHVLIELHKSGFARPGDVEFEDFSQPMNRAPSDSSLGTPSDGRPELRGPGRSRTKRWPFGKKNKTVVTEDFSHLPPEQQRKRLQQQLEERSRELQKEVDQREALKKMKDVYEKTPQMGDPASLEPQIAETLSNIERLKLEVQKYEAWLAEAESRVLSNRGDSLSRHARPPDPPASAPPDSSSNSASQDTKESSEEPPSEESQDTPIYTEFDEDFEEEPTSPIGHCVAIYHFEDLGPPPPPSQGPARALSLWPRVKTSVLWKKTKGTAGPGSGGKREARATCPPPTSESRSIEPCQRREEGGCRLLLLGHGEPQDLCTLFLTPWLRLRPV

SEQ ID NO: 9173 - protein, 95 aa, Homo sapiens
MPGPPESLDMGPLTFRDVAIEFSLEEWQCLDTAQQDLYRKVMLENYRNLVFLAGIAVSKPDLVTCLEQGKDPWNMKGHSTVVKPPGFLPPSVTAS

SEQ ID NO: 9174 - protein, 116 aa, Homo sapiens
EQEEYVQEGIRWTPIQYFNNKVVCDLIENKLSPPGIMSVLDDVCATMHATGGGADQTLLQKLQAAVGTHEHFNSWSAGFVIHHYAGKVSYDVSGFCERNRDVLFSDLIELMQTSEQ

SEQ ID NO: 9175 - protein, 76 aa, Homo sapiens
MGSKERFHWQSHNVKQSGVDDMVLLPQITEDAIAANLRKRFMDDYIFVPWAKAGDLHRLCAHLCKPLQADALLHRP

SEQ ID NO: 9176 - protein, 67 aa, Homo sapiens
VHVLLLDDLLLLLQRQDERLLLKSHSRTLTPTPDGKTMLRPVLRLTSAMTREVATAGVLSSLRLPDP

SEQ ID NO: 9177 - protein, 82 aa, Homo sapiens
MPNDDFCPGLTIKAMGAERAPQRQPCNTISHRESWPHWPCTSSSSSPSSSAWWPPRTGRLNAAKTPSRNACRILTMSSCSRW

SEQ ID NO: 9178 - protein, 139 aa, Homo sapiens
MLPLSLLKTAQNHPMLVELKNGETYNGHLVSCDNWMNINLREVICTSRDGDKFWRMPECYIRGSTIKYLRIPDEIIDMVKEEVVAKGRGRGGLQQQKQQKGRGMGGAGRGVFGGRGRGGIPGTGRGQPEKKPGRQAGKQ

SEQ ID NO: 9179 - protein, 135 aa, Homo sapiens
MSLVLNDLLICCRQLEHDRATERKKEVEKFKRLIRDPETIKHLDRHSDSKQGKYLNWDAVFRFLQKYIQKETECLRIAKPNVSASTQASRQKKMQEISSLVKYFIKCANRRAPRLKCQELLNYIMDTVKDSSNGA

SEQ ID NO: 9180 - protein, 541 aa, Homo sapiens
MGSSEVSIIPGLQKEEKAAVERRRLHVLKALKKLRIEADEAPVVAVLGSGGGLRAHIACLGVLSEMKEQGLLDAVTYLAGVSGSTWAISSLYTNDGDMEALEADLKHRFTRQEWDLAKSLQKTIQAARSENYSLTDFWAYMVISKQTRELPESHLSNMKKPVEEGTLPYPIFAAIDNDLQPSWQEARAPETWFEFTPHHAGFSALGAFVSITHFGSKFKKGRLVRTHPERDLTFLRGLWGSALGNTEVIREYIFDQLRNLTLKGLWRRAVANAKSIGHLIFARLLRLQESSQGEHPPPEDEGGEPEHTWLTEMLENWTRTSLEKQEQPHEDPERKGSLSNLMDFVKKTGICASKWEWGTTHNFLYKHGGIRDKIMSSRKHLHLVDAGLAINTPFPLVLPPTREVHLILSFDFSAGDPFETIRATTDYCRRHKIPFPQVEEAELDLWSKAPASCYILKGETGPVVMHFPLFNIDACGGDIEAWSDTYDTFKLADTYTLDVVVLLLALAKKNVRENKKKILRELMNVAGLYYPKDSARSCCLA

SEQ ID NO: 9181 - protein, 39 aa, Homo sapiens
MATVTATTKVPEIRDVTRIERIEMEFPRVSQDGLDLLTS

SEQ ID NO: 9182 - protein, 129 aa, Homo sapiens
MLENWTRTSLEKQEQPHEDPERKGSLSNLMDFVKKTGICASKWEWGTTHNFLYKHGGIRDKIMSSRKHLHLVDAGLAINTPFPLVLPPTREVHLILSFDFSAGDPFEHPRSATSNELLCMSVSSAVKLG

SEQ ID NO: 9183 - protein, 60 aa, Homo sapiens
MVKKIEISQHAKYTCSFCGKTKMKRRAVGIWHCGSCMKTVAGGAWTYKDAKMEPNLHELC

SEQ ID NO: 9184 - protein, 117 aa, Homo sapiens
MAEIGEDLDKSDVSSLIFLMKDYMGRGKISKEKSFLDLVVELEKLNLVAPDQLDLLEKCLKNIHRIDLKTKIQKYKQSVQGAGTSYRNVLQAAIQKSLKDPSNNFRVSLEKTYGIPA

SEQ ID NO: 9185 - protein, 145 aa, Homo sapiens
MQRSIMSFFHPKKEGKAKKPEKEASNSSRETEPPPKAALKEWNGVVSESDSPVKRPGRKAARVLGSEGEEEDEALSPAKGQKPALDCSQVSPPRPATSPENNASLSDTSPMDSSPSGIPKRRTARKQLPKRTIQEVLEEQSEDED

SEQ ID NO: 9186 - protein, 326 aa, Homo sapiens
MDLTAIYESLLSLSPDVPVPSDHGGTESSPGWGSSGPWSLSPSDSSPSGVTSRLPGRSTSLVEGRSCGWVPPPPGFAPLAPRLGPELSPSPTSPTATSTTPSRYKTELCRTFSESGRCRYGAKCQFAHGLGELRQANRHPKYKTELCHKFYLQGRCPYGSRCHFIHNPSEDLAAPGHPPVLRQSISFSGLPSGRRTSPPPPGLAGPSLSSSSFSPSSSPPPPGDLPLSPSAFSAAPGTPLARRDPTPVCCPSCRRATPISVWGPLGGLVRTPSVQSLGSDPDEYASSGSSLGGSDSPVFEAGVFAPPQPVAAPRRLPIFNRISVSE

SEQ ID NO: 9187 - protein, 134 aa, Homo sapiens
MGSKERFHWQSHNVKQSGVDDMVLLPQITEDAIAANLRKRFMDDYIFVPWAKAGGGQQMPYFTDREIDLYQGAAQYENPPHIYALTDNMYRNMLIDCENQCVIISGESGAGKTVAAKYIMGYISKVSGGGEKVQ

SEQ ID NO: 9188 - protein, 94 aa, Homo sapiens
MPGPPESLDMGPLTFRDVAIEFSLEEWQCLDTAQQDLYRKVMLENYRNLVFLGIAVSKPDLVTCLEQGKDPWNMKGHSTVVKPPGFLPPSVTAS

SEQ ID NO: 9189 - protein, 100 aa, Homo sapiens
MPGVTVKDVNQQEFVRALAAFLKKSGKLKVPEWVDTVKLAKHKELAPYDENWFYTRAGEELSFHSAAPVPPGWRWGWLHDQDLWGTSEKRRHAQPLQPRL

SEQ ID NO: 9190 - protein, 57 aa, Homo sapiens
MAGTLLSPPSGVPLERLIRVATERGYTAQGEMFSAPATTRTSTMSRVRGRATRHTGR

SEQ ID NO: 9191 - protein, 206 aa, Homo sapiens
MARGGWRRLRRLLSAGQLLFQGRALLVTNTLGCGALMAAGDGVRQSWEIRARPGQVFDPRRSASMFAVGCSMGPFLHYWYLSLDRLFPASGLRGFPNVLKKVLVDQLVASPLLGVWYFLGLGCLEGQTVGESCQELREKFWEFYKADWCVWPAAQFVNFLFVPPQFRVTYINGLTLGWDTYLSYLKYRSPVPLTPPGCVALDTRAD

SEQ ID NO: 9192 - protein, 168 aa, Homo sapiens
MAEIGEDLDKSDVSSLIFLMKDYMGRGKISKEKSFLDLVVELEKLNLVAPDQLDLLEKCLKNIHRIDLKTKIQKYKQSVQGAGTSYRNVLQAAIQKSLKDPSNNFRLHNGRSKEQRLKEQLGAQQEPVKKSIQESEAFLPQSIPEERYKMKSKPLGICLIIDCIGNET

SEQ ID NO: 9193 - protein, 148 aa, Homo sapiens
MSESGHSQPGLYGIERRRRWKEPGSGGPQNLSGPGGRERDYIAPWERERRDASEETSTSVMQKTPIILSKPPAERSKQPPPPTAPAAPPAPAPLEKPIVLMKPREEGKGPVAVTGASTPEGTAPPPPAAPAPPKGEKEGQRPTQPVYQ

SEQ ID NO: 9194 - protein, 209 aa, Homo sapiens
EVQVLVLDGRGHLLGRLAAIVAKQVLLGRKVVVVRCEGINISGNFYRNKLKYLAFLRKRMNTNPSRGPYHFRAPSRIFWRTVRGEQSVGTAGMLPHKTKRGQAALDRLKVFDGIPPPYDKKKRMVVPAALKVVRLKPTRKFAYLGRLAHEVGWKYQAVTATLEEKRKEKAKIHYRKKKQLMRLRKQAEKNVEKKIDKYTEVLKTHGLLV

SEQ ID NO: 9195 - protein, 116 aa, Homo sapiens
MFAEFFGGRNPFDTFFGQRNGEEGMDIDDPFSGFPMGMGGFTNVNFGRSRSAQEPARKKQDPPVTHDLRVSLEEIYSGCTKKMKISHKRLNPDGKSIRNEDKILTIEVKKGWKEGT

SEQ ID NO: 9196 - protein, 162 aa, Homo sapiens
MSYTGFVQGSETTLQSTYSDTSAQPTCDYGYEGYGYGYGYGQDNTTNYGYGMATSHSWEMPSSDTNANTSASGSASADSVLSRINQRLDMVPHLETDMMQGGVYGSGGERYDSYESCDSRAVLSERDLYRSGYDYSELDPEMEMAYEGQYDAYRDQFRMRGN

SEQ ID NO: 9197 - protein, 72 aa, Homo sapiens
MAKRTKKVGIVGKYGTRYGASLRKMVKKIEISQHAKYTCSFCGKTKMKRRAVGIWHCGSCMKTVAGGAWTYK

SEQ ID NO: 9198 - protein, 82 aa, Homo sapiens
IQVRTRGWMPGLSVPTKSSRPSFKTRRGSCWEKLARRSSRGTTRTSVWASRHPRRLLRAPTLTRNAPSLVMCPFEGGSSLAW

SEQ ID NO: 9199 - protein, 522 aa, Homo sapiens
MALPQGLLTFRDVAIEFSQEEWKCLDPAQRTLYRDVMLENYRNLVSLDISSKCMLKTLSSTGQGNTEVIHTGTLHRQASHHIGEFCFHEIEKDIHGFEFQWKEDETNGHAAPMTEIKELAGSTGQHDQRHAGNKRIKDQLGSSFHLHLPEPHIFQSEGKIGNQVEKSINNASSVSTSQRICCRPKTHISNKYGNNSLHSSLLTQKWEVHMREKSFECIQSFKSFNCSSLLKKHQIIHLEEKQCKCDVCGKVFNQKRYLACHRRCHTGEKPYKCNECGKTFGHNSSLFIHKALHTGEKPYECEECDKVFSRKSHLERHKRIHTGEKPYKCKVCDEAFAYNSYLAKHTILHTGEKPYTCNECGKVFNRLSTLARHHRLHTGEKPYKCEECDKVFSRKSHLERHRRIHSGEKPYKCEECCKVFSRKSNLERHRRIHTGEKPYKCKVCDKAFQRDSHLAQHQRVHTGEKPYKCNECGKTFGQTSSLIIHRRLHTGEKPYKCNECGKTFSQMSSLVYHHRLHSGEKP

SEQ ID NO: 9200 - protein, 213 aa, Homo sapiens
GSALGNTEVIREYIFGLWRRAVANAKSIGHLIFARLLRLQESSQGEHPPPEDEGGEPEHTWLTEMLENWTRTSLEKQEQPHEDPERKGSLSNLMDFVKKTGICASKWEWGTTHNFLYKHGGIRDKIMSSRKHLHLVDAGLAINTPFPLVLPPTREVHLILSFDFSAGDPFETIRATTDYCRRHKIPFPQVEEAELDLWSKAPASCYILKGETG

SEQ ID NO: 9201 - protein, 118 aa, Homo sapiens
MAGFAELGLSSWLVEQCRQLGLKQPTPVQLGCIPAILEGRDCLGCAKTGSGKTAAFVLPILQKLSEDPYGIFCLVLTPTRIKQDGPGAVAHTCNPSTLGAPGSWPTRSQSSSGSWGSL

SEQ ID NO: 9202 - protein, 118 aa, Homo sapiens
MADIQTERAYQKQPTIFQNKKRVLLGETGKEKLPRYYKNIGLGFKTPKEAIEGTYIDKKCPFTGNVSIRGRILSGVVTKMKMQRTIVIRRDYLHYIRKYNRFEKRHKNMSVHLSPCFR

SEQ ID NO: 9203 - protein, 183 aa, Homo sapiens
MSESGHSQPGLYGIERRRRWKEPGSGGPQNLSGPGGRERDYIAPWERERRDASEETSTSVMQKTPIILSKPPAERSKQPPPPTAPAAPPAPAPLEKPIVLMKPREEGKGPVAVTGASTPEGTAPPPPAAPAPPKGEKEGQRPTQPVYQIQNRGMGTAAPAAMDPVVGQAKLLPPERMKHSIKL

SEQ ID NO: 9204 - protein, 107 aa, Homo sapiens
MFAEFFGGRNPFDTFFGQRNGEEGMDIDDPFSGFPMGMGGFTNVNFGRSRSAQEPARKKQDPPVTHDLRVSLEEIYSGCTKKMKISHKRLNPDGKSIRNEDKILTIE

SEQ ID NO: 9205 - protein, 115 aa, Homo sapiens
MSESGHSQPGLYGIERRRRWKEPGSGGPQNLSGPGGRERDYIAPWERERRDASEETSTSVMQKTPIILSKPPAERSKQPPPPTAPAAPPAPAPLEKPIVLMKPREEGKGPVAVTG

SEQ ID NO: 9206 - protein, 134 aa, Homo sapiens
MTEWETAAPAVAETPDIKLFGKWSTDDVQINDISLQNPLQVLVNAIINSGPREDSTRIGRAGTVRRQAVDVSPLRRVNQAIWLLCTGAREAAFRNIKTIAECLADELINAAKGSSNSYAIKKKDELERVAKSNR

SEQ ID NO: 9207 - protein, 811 aa, Homo sapiens
RMKEKYGVFCSGHNEAVSHYKLLLQQNKKFQNLIKKIGNFSIVRRLGVQECILLVTQRITKYPVLVERIIQNTEAGTEDYEDLTQALNLIKDIISQVDAKVSECEKGQRLREIAGKMDLKSSSKLKNGLTFRKEDMLQRQLHLEGMLCWKTTSGRLKDILAILLTDVLLLLQEKDQKYVFASVDSKPPVISLQKLIVREVANEEKAMFLISASLQGPEMYEIYTSSKEDRNAWMAHIQRAVESCPDEEEGPFSLPEEERKVVEARATRLRDFQERLSMKDQLIAQSLLEKQQIYLEMAEMGGLEDLPQPRGLFRGGDPSETLQGELILKSAMSEIEGIQSLICRQLGSANGQAEDGGSSTGPPRRAETFAGYDCTNSPTKNGSFKKKVSSTDPRPRDWRGPPNSPDLKLSDSDIPGSSEESPQVVEAPGTESDPRLPTVLESELVQRIQTLSQLLLNLQDSYVETQRAAIQEREKQFRLQSTRGNLLLEQERQRNFEKQREERAALEKLQSQLRHEQQRWERERQWQHQELERAGARLQEREGEARQLRERLEQERAELERQRQAYQHDLERLREAQRAVERERERLELLRRLKKQNTAPGALPPDTLAEAQPPSHPPSFNGEGLEGPRVSMLPSGVGPEYAERPEVARRDSAPTENRLAKSDVPIQLLSATNQFQRQAAVQQQIPTKLAASTKGGKDKGGKSRGSQRWESSASFDLKQQLLLNKLMGKDESTSRNRRSLSPILPGRHSPAPPPDPGFPAPSPPPADSPSEGFSLKAGGTALLPGPPAPSPLPATPLSAKEDASKEDVIFF

SEQ ID NO: 9208 - protein, 139 aa, Homo sapiens
MSGEENPASKPTPVQDVQGDGRWMSLHHRFVADSKDKEPEVVFIGDSLVQLMHQCEIWRELFSPLHALNFGIGGDGTQHVLWRLENGELEHIRPKIVVVWVGTNNHGHTAEQVTGGIKAIVQLGLLPRGQHPNPLREKN

SEQ ID NO: 9209 - protein, 22 aa, Homo sapiens
MESCYNPGLDGIIEYDDFKLNS

SEQ ID NO: 9210 - protein, 161 aa, Homo sapiens
MSYTGFVQGSETTLQSTYSDTSAQPTCDYDTLVSVFVSVSVCLPSACPHHLSVSVSLTAGYEGYGYGYGYGQDNTTNYGYGMATSHSWEMPSSDTNANTSASGSASADSVLSRINQRLDMVPHLETDMMQGGVYGSGGERYDSYESCDSRAVLSERDLYRS

SEQ ID NO: 9211 - protein, 69 aa, Homo sapiens
MDVEKLEKMRDHERKEETFTPMPSPYYMELTKLLLNHASDNIPKADEIRTLVKDMWDTRIAKLRVSADS

SEQ ID NO: 9212 - protein, 138 aa, Homo sapiens
MGVDIRHNKDRKVRRKEPKSQDIYLRLLVKLYRFLARRTNSTFNQVVLKRLFMSRTNRPPLSLSRMIRKMKLPGRENKTAVVVGTITDDVRVQEVPKLKTLRPLQGPEVRACQRPTGQPRLQKLTLDPTLLLKRFLLT

SEQ ID NO: 9213 - protein, 403 aa, Homo sapiens
MASALRPPRVPKPKGVLPSHYYESFLEKKGPCDRDYKKFWAGLQGLTIYFYNSNRDFQHVEKLNLGAFEKLTDEIPWGSSRDPGTHFSLILRDQEIKFKVETLECREMWKGFILTVVELRVPTDLTLLPGHLYMMSEVLAKEEARRALETPSCFLKVSRLEAQLLLERYPECGNLLLRPSGDGADGVSVTTRQMHNGTHVVRHYKVKREGPKYVIDVEQPFSCTSLDAVVNYFVSHTKKALVPFLLDEDYEKVLGYVEADKENGENVWVAPSAPGPGPAPCTGGPKPLSPASSQDKLPPLPPLPNQEENYVTPIGDGPAVDYENQDVASSSWPVILKPKKLPKPPAKLPKPPVGPKPEPKVFNGGLGRKLPVSSAQPLFPTAGLADMTAELQKKLEKRRALEH

SEQ ID NO: 9214 - protein, 183 aa, Homo sapiens
MFAEFFGGRNPFDTFFGQRNGEEGMDIDDPFSGFPMGMGGFTNVNFGRSRSAQEPARKKQDPPVTHDLRVSLEEIYSGCTKKMKISHKRLNPDGKSIRNEDKILTIEVKKGWKEGTKITFPKEGDQTSNNIPADIVFVLKDKPHNIFKRDGSDVIYPARISLREALCGCTVNVPTLDGRTIPV

SEQ ID NO: 9215 - protein, 200 aa, Homo sapiens
MTEWETAAPAVAETPDIKLFGKWSTDDVQINDISLQDYIAVKEKYAKYLPHSAGRYAAKRFRKAQCPIVERLTNSMMMHGRNNGKKLMTVRIVKHAFEIIHLLTGENPLQVLVNAIINSGPREDSTRIGRAGTVRRQAVDVSPLRRVNQAIWLLCTGAREAAFRNIKTIAECLADELINAAKGSSNSYAIKKKDELERVA

SEQ ID NO: 9216 - protein, 437 aa, Homo sapiens
MKQERKMHFQEGRRAQQQLENGFKQLENSKRKFERDCREAEKAAQTAERLDQDINATKADVEKAKQQAHLRSHMAEESKNEYAAQLQRFNRDQAHFYFSQMPQIFDKLQDMDERRATRLGAGYGLLSEAELEVVPIIAKCLEGMKVAANAVDPKNDSHVLIELHKSGFARPGDVEFEDFSQPMNRAPSDSSLGTPSDGRPELRGPGRSRTKRWPFGKKNKTVVTEDFSHLPPEQQRKRLQQQLEERSRELQKEVDQREALKKMKDVYEKTPQMGDPASLEPQIAETLSNIERLKLEVQKYEAWLAEAESRVLSNRGDSLSRHARPPDPPASAPPDSSSNSASQDTKESSEEPPSEESQDTPIYTEFDEDFEEEPTSPIGHCVAIYHFEGSSEGTISMAEGEDLSLMEEDKGDGWTRVRRKEGGEGYVPTSYLRVTLN

SEQ ID NO: 9217 - protein, 332 aa, Homo sapiens
MANRYTMDLTAIYESLLSLSPDVPVPSDHGGTESSPGWGSSGPWSLSPSDSSPSGVTSRLPGRSTSLVEGRSCGWVPPPPGFAPLAPRLGPELSPSPTSPTATSTTPSRYKTELCRTFSESGRCRYGAKCQFAHGLGELRQANRHPKYKTELCHKFYLQGRCPYGSRCHFIHNPSEDLAAPGHPPVLRQSISFSGLPSGRRTSPPPPGLAGPSLSSSSFSPSSSPPPPGDLPLSPSAFSAAPGTPLARRDPTPVCCPSCRRATPISVWGPLGGLVRTPSVQSLGSDPDEYASSGSSLGGSDSPVFEAGVFAPPQPVAAPRRLPIFNRISVSE

SEQ ID NO: 9218 - protein, 84 aa, Homo sapiens
EESNVLCLSKSPNKHNRLYMKARPFPDGLAEDIDKGGMGHPTLFPFLQRETQMSKLILTNALRGLFGYMARSGFCPRKGKGTRG

SEQ ID NO: 9219 - protein, 166 aa, Homo sapiens
MAGFAELGLSSWLVEQCRQLGLKQPTPVQLGCIPAILEGRDCLGCAKTGSGKTAAFVLPILQKLSEDPYGIFCLVLTPTRGPAELNKMAPVQWLTPVIPALWELQGAGLPDRRAVPGPGEASRAERLHHRRWHGHGGPGAGALSETTRGHRHAGAPGRSPAQLQHF

SEQ ID NO: 9220 - protein, 228 aa, Homo sapiens
MKPGFSPRGGGFGGRGGFGDRGGRGGFHSGGNRGRGRGGKRGNQSGKNVMVEPHRHEGVFICRGKEDALVTKNLVPGESVYGEKRVSISEGDDKIEYRAWNPFRSKLAAAILGGVDQIHIKPGAKVLYLGAASGTTVSHVSDIVGPDGLVYAVEFSHRSGRDLINLAKKRTNIIPVIEDARHPHKYRMLIAMVDVIFADVAQPDQTRIVALNAHTFLRNGGHFVISIK

SEQ ID NO: 9221 - protein, 225 aa, Homo sapiens
MTEWETAAPAVAETPDIKLFGKWSTDDVQINDISLQMTTTSVMRGLLHQKEHHISHMDYIAVKEKYAKYLPHSAGRYAAKRFRKAQCPIVERLTNSMMMHGRNNGKKLMTVRIVKHAFEIIHLLTGENPLQVLVNAIINSGPREDSTRIGRAGTVRRQAVDVSPLRRVNQAIWLLCTGAREAAFRNIKTIAECLADELINAAKGSSNSYAIKKKDELERVAKSNR

SEQ ID NO: 9222 - protein, 354 aa, Homo sapiens
MVGQLAARRAAGVVLEMIREGKIAGRAVLIAGQPGTGKTAIAMGMAQALGPDTPFTAIAGSEIFSLEMSKTEALTQAFRRSIGVRIKEETEIIEGEVVEIQIDRPATGTGSKVGKLTLKTTEMETIYDLGTKMIESLTKDKVQAGDVITIDKATGKISKLGRSFTRARDYDAMGSQTKFVQCPDGELQKRKEVVHTVSLHEIDVINSRTQGFLALFSGDTGEIKSEVREQINAKVAEWREEGKAEIIPGVLFIDEVHMLDIESFSFLNRALESDMAPVLIMATNRGITRIRGTSYQSPHGIPIDLLDRLLIVSTTPYSEKDTKQILRIRVQKCRWMTSSGSTHSSWTSPAPRST

SEQ ID NO: 9223 - protein, 50 aa, Homo sapiens
MATVTATTKVPEIRDVTRIERIGAHSHIRGLGLDDALEPRQLPDVVEMPW

SEQ ID NO: 9224 - protein, 86 aa, Homo sapiens
MTVSQKGGPQPTPSPAGPGTQLGPITGEMDEADSAFLKFKQTADDSLSLTSPNTESIFVEDPYTASLRSEIESDGHEFEAESWSLA

SEQ ID NO: 9225 - protein, 79 aa, Homo sapiens
MFAEFFGGRNPFDTFFGQRNGEEGMDIDDPFSGFPMGMGGFTNVNFGRSRSAQEPARKKQDPPVTHDLRVSLEEIYSGC

SEQ ID NO: 9226 - protein, 102 aa, Homo sapiens
MPGVTVKDVNQQEFVRALAAFLKKSGKLKVPEWVDTVKLAKHKELAPYDENWFYTRAGGLILSIYTEADSLGLDPSFTSGCVSSASTARHLYLRGGAGVGSM

SEQ ID NO: 9227 - protein, 77 aa, Homo sapiens
MRKVKKLRLDKENTGSWRSFSLNSEGAERMATTGTPTADRGDAAATDDPAARFQVQKHSWDGLRSIIHGSRKYSGLI

SEQ ID NO: 9228 - protein, 117 aa, Homo sapiens
MAEIGEDLDKSDVSSLIFLMKDYMGRGKISKEKSFLDLVVELEKLNLVAPDQLDLLEKCLKNIHRIDLKTKIQKYKQSVQGAGTSYRNVLQAAIQKSLKDPSNNFRMITPYAHCPDL

SEQ ID NO: 9229 - protein, 91 aa, Homo sapiens
MFAEFFGGRNPFDTFFGQRNGEEGMDIDDPFSGFPMGMGGFTNVNFGRSRSAQEPARKKQDPPVTHDLRVSLEEIYSGCTKKMKISHKRLN

SEQ ID NO: 9230 - protein, 366 aa, Homo sapiens
MAEIGEDLDKSDVSSLIFLMKDYMGRGKISKEKSFLDLVVELEKLNLVAPDQLDLLEKCLKNIHRIDLKTKIQKYKQSVQGAGTSYRNVLQAAIQKSLKDPSNNFRLHNGRSKEQRLKEQLGAQQEPVKKSIQESEAFLPQSIPEERYKMKSKPLGICLIIDCIGNETELLRDTFTSLGYEVQKFLHLSMHGISQILGQFACMPEHRDYDSFVCVLVSRGGSQSVYGVDQTHSGLPLHHIRRMFMGDSCPYLAGKPKMFFIQNYVVSEGQLEDSSLLEVDGPAMKNVEFKAQKRGLCTVHREADFFWSLCTADMSLLEQSHSSPSLYLQCLSQKLRQERGTIPGSGITESKDMHFSSLGCILLDVL

SEQ ID NO: 9231 - protein, 110 aa, Homo sapiens
MGSPGMVLGLLVQIWGNAFYSNVLYRPRGAPKKSEDCSGEGKDQRGQSIYSTSFPQPAPRQPHLASRPCPSPRPCPSPRPGHPVSMVRVSPRPSPTQQPRPKGFPKVGEE

SEQ ID NO: 9232 - protein, 149 aa, Homo sapiens
MQRSIMSFFHPKKEGKAKKPEKEASNSSRETEPPPKAALKEWNGVVSESDSPVKRPGRKAARVLGSEGEEEDEALSPAKGQKPALDCSQVSPPRPATSPENNASLSDTSPMDSSPSGIPKRRTEAETPTESVSEPEVATKQELQEEEEQ

SEQ ID NO: 9233 - protein, 178 aa, Homo sapiens
MKPGFSPRGGGFGGRGGFGDRGGRGGFRGRGRGGGGGGGGGGGGGRGGGGFHSGGNRGRGRGGKRGNQSGKNVMVEPHRHEGVFICRGKEDALVTKNLVPGESVYGEKRVSISEGDDKIEYRAWNPFRSKLAAAILGGVDQIHIKPGAKVLYLGAASGTTVSHVSDIVGPDGLVYAVE

SEQ ID NO: 9234 - protein, 79 aa, Homo sapiens
MKMQRTIVIRRDYLHYIRKYNRFEKRHKNMSVHLSPCFRDVQIGDIVTVGECRPLSKTVRFNVLKVTKAAGTKKQFQKF

SEQ ID NO: 9235 - protein, 88 aa, Homo sapiens
MADIQTERAYQKQPTIFQNKKRVLLGETGKEKLPRADPLWRGDQDEDAEDHCHPPRLSALHPQVQPLREAPQEHVCTPVPLLQGRPDR

SEQ ID NO: 9236 - protein, 194 aa, Homo sapiens
MQETIRNLDCIRMIWEEQNTEDQYKNPRRNLSHIRVDSGHKPHEYQEYGEKPHTHKQRGKAFSYHHSFQSRGRPHTGKKRYECKECGKTFSSRRNLRRHMVVQGGNRPYKCKLCGKAFFWPSLLRMHERTHTGEKPYECKQCSKAFPFYSSYRRHERMHTGEKPYECKQCSKALPDSSSYIRHERTHTGEKPYT

SEQ ID NO: 9237 - protein, 85 aa, Homo sapiens
TATAVAHCKRGNGLIKVNGRPLEMIEPRTLQYKLLEPVLLLGKERFAGVDIRVRVKGGGHVAQIYAIRQSISKALVAYYQKCECG

SEQ ID NO: 9238 - protein, 114 aa, Homo sapiens
VKAKIQDKEGIPPDQQRLIFAGKQLEDGRTLSDYNIQKESTLHLVLRLRGGIIEPSLRQLAQKYNCDKMICRKSVVTPTTCVPRRRSNKVVLSLKGSLLPRPRGPGASIKCPFH

SEQ ID NO: 9239 - protein, 148 aa, Homo sapiens
MGLCREEDGFVRHALGEGGLQIGEGALPGRGWVVGARGSPAVDLWEPCVLNSAAAQSVSRLFAGHLLRPSLAGLGDSSEKSRPVSLANYALEPRRRTLLDRKMSPKRIAKRRSPPADAIPKSKKVKDTRAAASRRVPGARSCQVSHRS

SEQ ID NO: 9240 - protein, 112 aa, Homo sapiens
MAGFAELGLSSWLVEQCRQLGLKQPTPVQLGCIPAILEGRDCLGCAKTGSGKTAAFVLPILQKLSEDPYGIFCLVLTPTRHGGPGAGALSETTRGHRHAGAPGRSPAQLQHF

SEQ ID NO: 9241 - protein, 63 aa, Homo sapiens
MQIFVKTLTGKTITLEVEPSDTIENVKAKIQDKEGIPPDQQRLIFAGKQLEDGRTLSDYNIQK

SEQ ID NO: 9242 - protein, 109 aa, Homo sapiens
MATSHSWEMPSSDTNANTSASGSASADSVLSRINQRLDMVPHLETDMMQGGVYGSGGERYDSYESCDSRAVLSERDLYRSGYDYSELDPEMEMAYEGQYDAYRDQFRMR

SEQ ID NO: 9243 - protein, 129 aa, Homo sapiens
MPSKGPLQSVQVFGRKKTATAVAHCKRGNGLIKLLEPVLLLGKERFAGVDIRVRVKGGGHVAQIYAIRQSISKALVAYYQKYVDEASKKEIKDILIQYDRTLLVADPRRCESKKFGGPGARARYQKSYR

SEQ ID NO: 9244 - protein, 65 aa, Homo sapiens
MDLTAIYEVSPRRTASPVPACLSPSPHLSSAANSSPGRLPPFSNWGSLAPRPPAWGPCLPLRPAW

SEQ ID NO: 9245 - protein, 35 aa, Homo sapiens
WLEEQGMILKQTFWDSPETNVGPSHPGHQRGPETL

SEQ ID NO: 9246 - protein, 229 aa, Homo sapiens
VMVEPHRHEGVFICRGKEDALVTKNLVPGESVYGEKRVSISEGDDKIEYRAWNPFRSKLAAAILGGVDQIHIKPGAKVLYLGAASGTTVSHVSDIVGPDGLVYAVEFSHRSGRDLINLAKKRTNIIPVIEDARHPHKYRMLIAMVDVIFADVAQPDQTRIVALNAHTFLRNGGHFVISIKANCIDSTASAEAVFASEVKKMQQENMKPQEQLTLEPYERDHAVVVGVYR

SEQ ID NO: 9247 - protein, 182 aa, Homo sapiens
MKPGFSPRGGGFGGRGGFGDRGGRGGRGGFGGGRGRGGGFRGRGRGGGGGGGGGGGGGRGGGFHSGGNRGRGRGGKRGNQSGKNVMVEPHRHEGVFICRGKEDALVTKNLVPGESVYGEKRVSISEGDDKIEYRAWNPFRSKLAAAILGGVDQIHIKPGAKVLYLGAASGTTVSHVSDIVGP

SEQ ID NO: 9248 - protein, 56 aa, Homo sapiens
PAVSKGDGMRGLAVFISDIRNCKSKEAEIKRINKELANIRSKFKGDKALDGYKEPR

SEQ ID NO: 9249 - protein, 136 aa, Homo sapiens
MPKKFQGENTKSAAARARRAEAKAAADAKKQKELEDAYWKDDDKHVMRKEQRKEEKEKRRLDQLERKKETQRLLEEEDSKLKGGKAPRVATSSKVTRAQIEDTLRRDHQLREAPDTAEKAKSHLEVPLEENVNRRV

SEQ ID NO: 9250 - protein, 551 aa, Homo sapiens
MRTRPRPRLRRTENFLTAVHHGKKEEKAAVERRRLHVLKALKKLRIEADEAPVVAVLGSGGGLRAHIACLGVLSEMKEQGLLDAVTYLAGVSGSTWAISSLYTNDGDMEALEADLKHRFTRQEWDLAKSLQKTIQAARSENYSLTDFWAYMVISKQTRELPESHLSNMKKPVEEGTLPYPIFAAIDNDLQPSWQEARAPETWFEFTPHHAGFSALGAFVSITHFGSKFKKGRLVRTHPERDLTFLRGLWGSALGNTEVIREYIFDQLRNLTLKGLWRRAVANAKSIGHLIFARLLRLQESSQGEHPPPEDEGGEPEHTWLTEMLENWTRTSLEKQEQPHEDPERKGSLSNLMDFVKKTGICASKWEWGTTHNFLYKHGGIRDKIMSSRKHLHLVDAGLAINTPFPLVLPPTREVHLILSFDFSAGDPFETIRATTDYCRRHKIPFPQVEEAELDLWSKAPASCYILKGETGPVVMHFPLFNIDACGGDIEAWSDTYDTFKLADTYTLDVVVLLLALAKKNVRENKKKILRELMNVAGLYYPKDSARSCCLA

SEQ ID NO: 9251 - protein, 343 aa, Homo sapiens
MDWGTELWDQFEVLERHTQWGLDLLDRYVKFVKERTEVEQAYAKQLRSLVKKYLPKRPAKDDPESKFSQQQSFVQILQEVNDFAGQRELVAENLSVRVCLELTKYSQEMKQERKMHFQEGRRAQQQLENGFKQLENSKRKFERDCREAEKAAQTAERLDQDINATKADVEKAKQQAHLRSHMAEESKNEYAAQLQRFNRDQAHFYFSQMPQIFDKLQDMDERRATRLGAGYGLLSEAELEVVPIIAKCLEGMKVAANAVDPKNDSHVLIELHKSGFARPGDVEFEDFSQPMNRAPSDSSLGTPSDGRPELRGPGRSRTKRWPFGKKNKPSRQPWALYPPCRQW

SEQ ID NO: 9252 - protein, 88 aa, Homo sapiens
MVKKIEISQHAKYTCSFCGKTKMKRRAVGIWHCGSCMKTVAGGAWTYKKMSAENGQQREPLMSFDHQEMPKWNQISMNSANGRRGKGR

SEQ ID NO: 9253 - protein, 71 aa, Homo sapiens
PGVTVKDVNQQEFVRALAAFLKKSGKLKVPEWVDTVKLAKHKELAPYDENWFYTRAELHCHQAGVHWCRLG

SEQ ID NO: 9254 - protein, 156 aa, Homo sapiens
MSESGHSQPGLYGIERRRRWKEPGSGGPQNLSGPGGRERDYIAPWERERRDASEETSTSVMQKTPIILSKPPAERSKQPPPPTAPAAPPAPAPLEKPIVLMKPREEGKGPVAVTGASTPEGTAPPPPAAPAPPKGEKEGQRPTQPVYQIQNRGMGT

SEQ ID NO: 9255 - protein, 273 aa, Homo sapiens
MKPGFSPRGGGFGGRGGFGDRGGRGGRGGFGGGRGRGGGFHSGGNRGRGRGGKRGNQSGKNVMVEPHRHEGVFICRGKEDALVTKNLVPGESVYGEKRVSISEGDDKIEYRAWNPFRSKLAAAILGGVDQIHIKPGAKVLYLGAASGTTVSHVSDIVGPDGLVYAVEFSHRSGRDLINLAKKRTNIIPVIEDARHPHKYRMLIAMVDVIFADVAQPDQTRIVALNAHTFLRNGGHFVISIKANCIDSTASAEAVFASEVKKMQQENMKPQEQL

SEQ ID NO: 9256 - protein, 138 aa, Homo sapiens
PSDTIENVKAKIQDKEGIPPDQQRLIFAGKQLEDGRTLSDYNIQKESTLHLVLRLRGGIIEPSLRQLAQKYNCDKMICRKYVCSDAWGAVGAAGVGVCPHPPLLSLCRCYARLHPRAVNCRKKKCGHTNNLRPKKKVK

SEQ ID NO: 9257 - protein, 157 aa, Homo sapiens
MKPGFSPRGGGFGGRGGFGDRGGRGGRGGFGGGRGRGGGFRGRGRGGGGGFHSGGNRGRGRGGKRGNQSGKNVMVEPHRHEGVFICRGKEDALVTKNLVPGESVYGEKRVSISEGDDKIEYRAWNPFRSKLAAAILGGVDQIHIKPGAKVLYLGAAS

SEQ ID NO: 9258 - protein, 80 aa, Homo sapiens
MFAEFFGGRNPFDTFFGQRNGEEGMDIDDPFSGFPMGMGGFTNVNFGRSRSAQEPARKKQDPPVTHDLRVSLEEIYSGCT

SEQ ID NO: 9259 - protein, 96 aa, Homo sapiens
MSGEENPASKPTPVQDVQGDGRWMSLHHRFVADSKDKEPEVVFIGDSLVQLMHQCEIWRELFSPLHALNFGIGGDGTQHVLWRLENGELEHIRPKI

SEQ ID NO: 9260 - protein, 1253 aa, Homo sapiens
MLSWRLQTGPEKAELQELNARLYDYVCRVRELERENLLLEEELRGRRGREGLWAEGQARCAEEARSLRQQLDELSWATALAEGERDALRRELRELQRLDAEERAARGRLDAELGAQQRELQEALGARAALEALLGRLQAERRGLDAAHERDVRELRARAASLTMHFRARATGPAAPPPRLREVHDSYALLVAESWRETVQLYEDEVRELEEALRRGQESRLQAEEETRLCAQEAEALRREALGLEQLRARLEDALLRMREEYGIQAEERQRVIDCLEDEKATLTLAMADWLRDYQDLLQVKTGLSLEVATYRALLEGESNPEIVIWAEHVENMPSEFRNKSYHYTDSLLQRENERNLFSRQKAPLASFNHSSALYSNLSGHRGSQTGTSIGGDARRGFLGSGYSSSATTQQENSYGKAVSSQTNVRTFSPTYGLLRNTEAQVKTFPDRPKAGDTREVPVYIGEDSTIARESYRDRRDKVAAGASESTRSNERTVILGKKTEVKATREQERNRPETIRTKPEEKMFDSKEKASEERNLRWEELTKLDKEARQRESQQMKEKAKEKDSPKEKSVREREVPISLEVSQDRRAEVSPKGLQTPVKDAGGGTGREAEARELRFRLGTSDATGSLQGDSMTETVAENIVTSILKQFTQSPETEASADSFPDTKVTYVDRKELPGERKTKTEIVVESKLTEDVDVSDEAGLDYLLSKDIKEVGLKGKSAEQMIGDIINLGLKGREGRAKVVNVEIVEEPVSYVSGEKPEEFSVPFKVEEVEDVSPGPWGLVKEEEGYGESDVTFSVNQHRRTKQPQENTTHVEEVTEAGDSEGEQSYFVSTPDEHPGGHDRDDGSVYGQIHIEEESTIRYSWQDEIVQGTRRRTQKDGAVGEKVVKPLDVPAPSLEGDLGSTHWKEQARSGEFHAEPTVIEKEIKIPHEFHTSMKGISSKEPRQQLVEVIGQLEETLPERMREELSALTREGQGGPGSVSVDVKKVQGAGGSSVTLVAEVNVSQTVDADRLDLEELSKDEASEMEKAVESVVRESLSRQRSPAPGSPDEEGGAEAPAAGIRFRRWATRELYIPSGESEVAGGASHSSGQRTPQGPVSATVEVSSPTGFAQSQVLEDVSQAARHIKLGPSEVWRTERMSYEGPTAEVVEMDVSNVEAIRSRTQEAGALGVSDRGSWRDADSRNDQAVGVSFKASAGEGDQAHREQGKEQAMFDKKVQLQRMVDQRSVISDEKKVALLYLDNEEEENDGHWF

SEQ ID NO: 9261 - protein, 193 aa, Homo sapiens
LPYPIFAAIDNDLQPSWQEARAPETWFEFTPHHAGFSALGAFVSITHFGSKFKKGRLVRTHPERDLTFLRDQLRNLTLKGLWRRAVANAKSIGHLIFARLLRLQESSQGEHPPPEDEGGEPEHTWLTEMLENWTRTSLEKQEQPHEDPERKGSLSNLMDFVKKTGICASKWEWGTTHNFLYKHGGIRDKIMSS

SEQ ID NO: 9262 - protein, 50 aa, Homo sapiens
MVEKEEAGGGISEEEAAQYDRQIRLWGLEAQKRSGPARLEAARVWRGRLF

SEQ ID NO: 9263 - protein, 91 aa, Homo sapiens
MADSSGRGAGKPATGPTNSSSAKKKDKRVQGGRVIESRYLQYEKKTTQKQIAVGSERVTCSPRCWKGMAQLHLTWISLLLMTKASSKRRHS

SEQ ID NO: 9264 - protein, 463 aa, Homo sapiens
MATVTATTKVPEIRDVTRIERIGAHSHIRGLGLDDALEPRQASQGMVGQLAARRAAGVVLEMIREGKIAGRAVLIAGQPGTGKTAIAMGMAQALGPDTPFTAIAGSEIFSLEMSKTEALTQAFRRSIGVRIKEETEIIEGEVVEIQIDRPATGTGSKVGKLTLKTTEMETIYDLGTKMIESLTKDKVQAGDVITIDKATGKISKLGRSFTRARDYDAMGSQTKFVQCPDGELQKRKEVVHTVSLHEIDVINSRTQGFLALFSGDTGEIKSEVREQINAKVAEWREEGKAEIIPGVLFIDEVHMLDIESFSFLNRALESDMAPVLIMATNRGITRIRGTSYQSPHGIPIDLLDRLLIVSTTPYSEKDTKQILRIRCEEEDVEMSEDAYTVLTRIGLETSLRYAIQLITAASLVCRKRKGTEVQVDDIKRVYSLFLDESRSTQYMKEYQDAFLFNELKGETMDTS

SEQ ID NO: 9265 - protein, 100 aa, Homo sapiens
MPSKGPLQSVQVFGRKKTATAVAHCKRGNGLIKVNGRPLEMIEPRTLQYKLLEPVLLLGKERFAGVDIRVRVKGGGHVAQIYAIRQSISKALVAYYQKCE

SEQ ID NO: 9266 - protein, 356 aa, Homo sapiens
MPGGGPQGAPAAAGGGGVSHRAGSRDCLPPAACFRRRRLARRPGYMRSSTGPGIGFLSPAVGTLFRFPGGVSGEESHHSESRARQCGLDSRGLLVRSPVSKSAAAPTVTSVRGTSAHFGIQLRGGTRLPDRLSWPCGPGSAGWQQEFAAMDSSETLDASWEAACSDGARRVRAAGSLPSAELSSNSCSPGCGPEVPPTPPGSHSAFTSSFSFIRLSLGSAGERGEAEGCPPSREAESHCQSPQEMGAKAASLDGPHEDPRCLSRPFSLLATRVSADLAQAARNSSRPERDMHSLPDMDPGSSSSLDPSLAGCGGDGSSGSGDAHSWDTLLRKWEPVLRDCLLRNRRQMELRRYNKD

SEQ ID NO: 9267 - protein, 42 aa, Homo sapiens
TELPHHGKHRPEEGPPGPLGRTAMQVRCATRGFVCICVCVHA

SEQ ID NO: 9268 - protein, 40 aa, Homo sapiens
MSRYLRPPNTSLFVRNVADDTSTKSDESQGREECVQFFTL

SEQ ID NO: 9269 - protein, 299 aa, Homo sapiens
TEAQSEGEVPARESGRSDAICSFVICNDSSLRGQPIIFNPDFFVEKLRHEKPEIFTELVVSNITRLIDLPGTELAQLMGEVDLKLPGGAGPASGFFRSLMSLKRKEKGVIFGSPLTEEGIAQIYQLIEYLHKNLRVEGLFRVPGNSVRQQILRDALNNGTDIDLESGEFHSNDVATLLKMFLGELPEPLLTHKHFNAHLKIADLMQFDDKGNKTNIPDKDRQIEALQLLFLILPPPNRNLLKLLLDLLYQTAKKQDKNKMSAYNLALMFAPHVLWPKNGLVLLPTLEESNTITTHCSLI

SEQ ID NO: 9270 - protein, 48 aa, Homo sapiens
MEAAETEAEAAALEVLAEVAGILEPVGLQEEAELPAKILVEFVVVCTR

SEQ ID NO: 9271 - protein, 71 aa, Homo sapiens
MAAERQEALREFVAVTGAEEDRARFFLESAGWDLQIALASFYEDGGDEDIVTISQATPSSVSRGTAPREKR

SEQ ID NO: 9272 - protein, 65 aa, Homo sapiens
MDGEEKTYGGCEGPDAMYVKLISSDGHEFIVKREHALTSGTIKAMLSGPDMVSTMLPRLKCSGCS

SEQ ID NO: 9273 - protein, 133 aa, Homo sapiens
MPYVDRQNRICGFLDIEENENSGKFLRRYFILDTREDSFVWYMDNPQNLPSGSSRVGAIKLTYISKVSDATKLRPKAEFCFVMNAGMRKYFLQANDQQDLVEWVNVLNKAIKITVPKQSDSQPNSDNLSRHGE

SEQ ID NO: 9274 - protein, 662 aa, Homo sapiens
MPGGGPQGAPAAAGGGGVSHRAGSRDCLPPAACFRRRRLARRPGYMRSSTGPGIGFLSPAVGTLFRFPGGVSGEESHHSESRARQCGLDSRGLLVRSPVSKSAAAPTVTSVRGTSAHFGIQLRGGTRLPDRLSWPCGPGSAGWQQEFAAMDSSETLDASWEAACSDGARRVRAAGSLPSAELSSNSCSPGCGPEVPPTPPGSHSAFTSSFSFIRLSLGSAGERGEAEGCPPSREAESHCQSPQEMGAKAASLDGPHEDPRCLSRPFSLLATRVSADLAQAARNSSRPERDMHSLPDMDPGSSSSLDPSLAGCGGDGSSGSGDAHSWDTLLRKWEPVLRDCLLRNRRQMEVISLRLKLQKLQEDAVENDDYDKAETLQQRLEDLEQEKISLHFQLPSRQPALSSFLGHLAAQVQAALRRGATQQASGDDTHTPLRMEPRLLEPTAQDSLHVSITRRDWLLQEKQQLQKEIEALQARMFVLEAKDQQLRREIEEQEQQLQWQGCDLTPLVGQLSLGQLQEVSKALQDTLASAGQIPFHAEPPETIRSLQERIKSLNLSLKEITTKVCMSEKFCSTLRKKVNDIETQLPALLEAKMHAISGNHFWTAKDLTEEIRSLTSEREGLEGLLSKLLVLSSRNVKKLGSVKEDYNRLRREVEHQETAYGR

SEQ ID NO: 9275 - protein, 47 aa, Homo sapiens
ESVQKGFQMLADPRSFDSNAFTLLLRAAFQSLLDAQADEAVLGITGS

SEQ ID NO: 9276 - protein, 131 aa, Homo sapiens
DDRFIVKLAYESDGIVVSNDTYRDLQGERQEWKRFIEERLLMYSFVNDKLAIGPFSAIRSPCMAPTSREFFAPSAGLCPLMTHWAGTGPAWTTSCVRSHSLWSTGSSRVPMVWNPACPPRPSSLLPFLSPV

SEQ ID NO: 9277 - protein, 173 aa, Homo sapiens
LLSHDYGDIVAQELLYRYKQNRSGRLTIKSLCLSNGGIFPETHRPLLLQKLLKDGGVLSPILTRLMNFFLWDMWAGIRNNDGNLVIDSLLQYINQRKKFRRRWVGALASVTIPIHFIYGPLDPVNPYPEFLELYRKTLPRSTVSILDDHISHYPQLEDPMGFLNAYMGFINSF

SEQ ID NO: 9278 - protein, 115 aa, Homo sapiens
MSVVGLDVGSQSCYIAVARAGGIETIANEFSDRCTPSVISFGSKNRTIGVAAKNQQITHANNTVSNFKRFHGRAFNDPFIQKEKENLSYDLVPLKNGGVGIKSPPSLQMLRGDLC

SEQ ID NO: 9279 - protein, 64 aa, Homo sapiens
MCVSSSSSSHDEAPVLNDKHLDVPDIIITPPTPTGMMLPRDLGSTVWLDETGSCPDDGEIDPEA

SEQ ID NO: 9280 - protein, 145 aa, Homo sapiens
MLALRCGSRWLGLLSVPRSVPLRLPAARACSKGSGDPSSSSSSGNPLVYLDVDANGKPLGRVVLELKADVVPKTAENFRALCTGEKGFGYKGSTFHRVIPSFMCQAGDFTNHNGTGGKSIYGSRFPDENFTLKHVGPGEWGPPLG

SEQ ID NO: 9281 - protein, 32 aa, Homo sapiens
ALTGVQPARQKVMVKGGTLKDFHEITFFKNRE

SEQ ID NO: 9282 - protein, 517 aa, Homo sapiens
MATEAQSEGEVPARESGRSDAICSFVICNDSSLRGQPIIFNPDFFVEKLRHEKPEIFTELVVSNITRLIDLPGTELAQLMGEVDLKLPGGAGPASGFFRSLMSLKRKEKGVIFGSPLTEEGIAQIYQLIEYLHKNLRVEGLFRVPGNSVRQQILRDALNNGTDIDLESGEFHSNDVATLLKMFLGELPEPLLTHKHFNAHLKIADLMQFDDKGNKTNIPDKDRQIEALQLLFLILPPPNRNLLKLLLDLLYQTAKKQDKNKMSAYNLALMFAPHVLWPKNVTANDLQENITKLNSGMAFMIKHSQKLFKAPAYIRECARLHYLGSRTQASKDDLDLIASCHTKSFQLAKSQKRNRVDSCPHQEETQHHTEEALRELFQHVHDMPESAKKKQLIRQFNKQSLTQTPGREPSTSQVQKRARSRSFSGLIKRKVLGNQMMSEKKKKNPTPESVAIGELKGTSKENRNLLFSGSPAVTMTPTRLKWSEGKKEGKKGNSMATTSLGSIRMTLRGSSSCGCCS

SEQ ID NO: 9283 - protein, 260 aa, Homo sapiens
MLESSGCKALKEGVLEKRSDGLLQLWKKKCCILTEEGLLLIPPKQLQHQQQQQQQQQQQQQQQPGQGPAEPSQPSGPAVASLEPPVKLKELHFSNMKTVDCVERKGKYMYFTVVMAEGKEIDFRCPQDQGWNAEITLQMVQYKNRQAILAVKSTRQKQQHLVQQQPPSQPQPQPQLQPQPQPQPQPQPQPQSQPQPQPQPKPQPQQLHPYPHPHPHPHSHPHSHPHPHPHPHPHQIPHPHPQPHSQPHGHRLLRSTSNSA

SEQ ID NO: 9284 - protein, 51 aa, Homo sapiens
MPSVTFGSVHPSDVLDMPVDPNEPTYCLCHQVSYGEMIGCDNPDCSIEWFH

SEQ ID NO: 9285 - protein, 423 aa, Homo sapiens
MATVWDEAEQDGIGEEVLKMSTEEIIQRTRLLDSEIKIMKSEVLRVTHELQAMKDKIKENSEKIKVNKTLPYLVSNVIELLDVDPNDQEEDGANIDLDSQRKGKCAVIKTSTRQTYFLPVIGLVDAEKLKPGDLVGVNKDSYLILETLPTEYDSRVKAMEVDERPTEQYSDIGGLDKQIQELVEAIVLPMNHKEKFENLGIQPPKGVLMYGPPGTGKTLLARACAAQTKATFLKLAGPQLVQMFIGDGAKLVRDAFALAKEKAPSIIFIDELDAIGTKRFDSEKAGDREVQRTMLELLNQLDGFQPNTQVKVIAATNRVDILDPALLRSGRLDRKIEFPMPNEEARARIMQIHSRKMNVSPDVNYEELARCTDDFNGAQCKAVCVEAGMIALRRGATELTHEDYMEGILEVQAKKKANLQYYA

SEQ ID NO: 9286 - protein, 118 aa, Homo sapiens
MPITRMRMRPWLEMQINSNQIPGLIWINKEEMIFQIPWKHAAKHGWDINKDACLFRSWAIHTGRYKAGEKEPDPKTWKANFRCAMNSLPDIEEVKDQSRNKGSSAVRVYRMLPPLTKN

SEQ ID NO: 9287 - protein, 197 aa, Homo sapiens
MATEAQSEGEVPARESGRSDAICSFVICNDSSLREKGVIFGSPLTEEGIAQIYQLIEYLHKNLRVEGLFRVPGNSVRQQILRDALNNGTDIDLESGEFHSNDVATLLKMFLGELPEPLLTHKHFNAHLKIADLMQFDDKGNKTNIPDKDRQIEALQLLFLILPPPNRNLLKLLLDLLYQTAKKQDKNKMSAYNLALM

SEQ ID NO: 9288 - protein, 317 aa, Homo sapiens
MRWQLSEQLRCLELQGELRRELLQELAEFMRRRAEVELEYSRGLEKLAERFSSRGGRLGSSREHQSFRKEPSLLSPLHCWAVLLQHTRQQSRESAALSEVLAGPLAQRLSHIAEDVGRLVKKSRDLEQQLQDELLEVVSELQTAKKTYQAYHMESVNAEAKLREAERQEEKRAGRSVPTTTAGATEAGPLRKSSLKKGGRLVEKRQAKFMEHKLKCTKARNEYLLSLASVNAAVSNYYLHDVLDLMDCCDTGFHLALGQVLRSYTAAESRTQASQVQGLGSLEEAVEALDPPGDKAKVLEVHATVFCPPLRFDYHPH

SEQ ID NO: 9289 - protein, 454 aa, Homo sapiens
MPALSTGSGSDTGLYELLAALPAQLQPHVDSQEDLTFLWDMFGEKSLHSLVKIHEKLHYYEKQSPVPILHGAAALADDLAEELQNKPLNSEIRELLKLLSKPNVKALLSVHDTVAQKNYDPVLPPMPEDIDDEEDSVKIIRLVKNREPLGATIKKDEQTGAIIVARIMRGGAADRSGLIHVGDELREVNGIPVEDKRPEEIIQILAQSQGAITFKIIPGSKEETPSKEGKMFIKALFDYNPNEDKAIPCKEAGLSFKKGDILQIMSQDDATWWQAKHEADANPRAGLIPSKHFQERRLALRRPEILVQPLKVSNRKSSGFRKSFRLSRKDKKTNKSMYECKKSDQYDTADVPTYEEVTPYRRQTNEKYRLVVLVGPVGVGLNELKRKLLISDTQHYGVTVPHTTRARRSQESDGVEYIFISKHLFETDVQNNKYVDIFENFHVTVFYKHMPVPF

SEQ ID NO: 9290 - protein, 73 aa, Homo sapiens
MADAGIRRVVPSDLYPLVLGFLRDNQLSEVANKFAKATGATQQDANASSLLDIYSFWLNRSASWEGCSQSIRE

SEQ ID NO: 9291 - protein, 277 aa, Homo sapiens
MRWQLSEQLRCLELQGELRRELLQELAEFMRRRAEVELEYSRGLEKLAERFSSRGGRLGSSREHQSFRKEPSLLSPLHCWAVLLQHTRQQSRESAALSEVLAGPLAQRLSHIAEDVGRLVKKSRDLEQQLQDELLEVVSELQTAKKTYQAYHMESVNAEAKLREAERQEEKRAGRSVPTTTAGATEAGPLRKSSLKKGGRLVEKRQAKFMEHKLKCTKARNEYLLSLASVNAAVSNYYLHDVLDLMDCCDTGFHLALGQVLRSYTAAESRTQASQVQ

SEQ ID NO: 9292 - protein, 789 aa, Homo sapiens
MTSPAKFKKDKEIIAEYDTQVKEIRAQLTEQMKCLDQQCELRVQLLQDLQDFFRKKAEIEMDYSRNLEKLAERFLAKTRSTKDQQFKKDQNVLSPVNCWNLLLNQVKRESRDHTTLSDIYLNNIIPRFVQVSEDSGRLFKKSKEVGQQLQDDLMKVLNELYSVMKTYHMYNADSISAQSKLKEAEKQEEKQIGKSVKQEDRQTPRSPDSTANVRIEEKHVRRSSVKKIEKMKEKRQAKYTENKLKAIKARNEYLLALEATNASVFKYYIHDLSDLIDCCDLGYHASLNRALRTFLSAELNLEQSKHEGLDAIENAVENLDATSDKQRLMEMYNNVFCPPMKFEFQPHMGDMASQLCAQQPVQSELVQRCQQLQSRLSTLKIENEEVKKTMEATLQTIQDIVTVEDFDVSDCFQYSNSMESVKSTVSETFMSKPSIAKRRANQQETEQFYFTKMKEYLEGRNLITKLQAKHDLLQKTLGESQRTDCSLARRSSTVRKQDSSQAIPLVVESCIRFISRHGLQHEGIFRVSGSQVEVNDIKNAFERGEDPLAGDQNDHDMDSIAGVLKLYFRGLEHPLFPKDIFHDLMACVTMDNLQERALHIRKVLLVLPKTTLIIMRYLFAFLNHLSQFSEENMMDPYNLAICFGPSLMSVPEGHDQVSCQAHVNELIKTIIIQHENIFPSPRELEGPVYSRGGSMEDYCDSPHGETTSVEDSTQDVTAEHHTSDDECEPIEAIAKFDYVGRTARELSFKKGASLLLYQRASDDWWEGRHNGIDGLIPHQYIVVQDTLIS

SEQ ID NO: 9293 - protein, 348 aa, Homo sapiens
MKLKELERPAVQAWSPASQYPLYLATGTSAQQLDSSFSTNGTLEIFEVDFRDPSLDLKHRGVLSALSRFHKLVWGSFGSGLLESSGVIVGGGDNGMLILYNVTHILSSGKEPVIAQKQKHTGAVRALDLNPFQGNLLASGASDSEIFIWDLNNLNVPMTLGSKSQPPEDIKALSWNRQAQHILSSAHPSGKAVVWDLRKNEPIIKVSDHSNRMHCSGLAWHPDIATQLVLCSEDDRLPVIQLWDLRFASSPLKVLESHSRGILSVSWSQADAELLLTSAKDSQILCRNLGSSEVVYKLPTQSSWCFDVQWCPRDPSVFSAASFNGWISLYSVMGRSWEVQHMRQADKV

SEQ ID NO: 9294 - protein, 219 aa, Homo sapiens
RAAVAASGLNTMLEGNGQYTLLAPTNEAFEKIPSETLNRILGDPEALRDLLNNHILKSAMCAEAIVAGLSVETLEGTTLEVGCSGDMLTINGKAIISNKDILATNGVIHYIDELLIPDSAKTLFELAAESDVSTAIDLFRQAGLGNHLSGSERLTLLAPLNSVFKDGTPPIDAHTRNLLRNHIIKDQLASKYLYHGQTLETLGGKKLRVFVYRNVSSGS

SEQ ID NO: 9295 - protein, 228 aa, Homo sapiens
MDAILNYRSEDTEDYYTLLGCDELSSVEQILAEFKVRALECHPDKHPENPKADPGVKSECLARLPASFAPISLQNEISLPRTVETFQKLQKAKEILTNEESRARYDHWRRSQMSMPFQQWEALNDSVKTSMHWVVRGKKDLMLEESDKTHTTKMENEECNEQRERKKEELASTAEKTEQKEPKPLEKSVSPQNSDSSGFADVNGWHLRFRWSKDAPSELLRKFRNYEI

SEQ ID NO: 9296 - protein, 147 aa, Homo sapiens
MERNHFGEELFDFNQCEKALSEHSCLKTHRRTYFRKKTCECNQCEKAFRKPSIFTLHKKTDIGEELPNCNQCETAFSQHLHLVCKKTSQNLHLVCKKTHTQEKPYKCSDCEKGLPSSSHLRECVRIYGGERPYTHKEYVETFSHSTA

SEQ ID NO: 9297 - protein, 450 aa, Homo sapiens
VKKTMEATLQTIQDIVTVEDFDVSDCFQYSNSMESVKSTVSETFMSKPSIAKRRANQQETEQFYFTKMKEYLEGRNLITKLQAKHDLLQKTLGESQRTDCSLARRSSTVRKQDSSQAIPLVVESCIRFISRHGLQHEGIFRVSGSQVEVNDIKNAFERGEDPLAGDQNDHDMDSIAGVLKLYFRGLEHPLFPKDIFHDLMACVTMDNLQERALHIRKVLLVLPKTTLIIMRYLFAFLNHLSQFSEENMMDPYNLAICFGPSLMSVPEGHDQVSCQAHVNELIKTIIIQHENIFPSPRELEGPVYSRGGSMEDYCDSPHGETTSVEDSTQDVTAEHHTSDDECEPIEAIAKFDYVGRTARELSFKKGASLLLYQRASDDWWEGRHNGIDGLIPHQYIVVQDTEDGVVERSSPKSEIEVISEPPEEKVTARAGASCPSGGHVADIYLANINK

SEQ ID NO: 9298 - protein, 72 aa, Homo sapiens
ARGQGGGPQGVGRMAEGKAGGAAGLFAKQVQKKFSRAQEKVLQKLGKAVETKDERFEQSASNFYQQQFVCLF

SEQ ID NO: 9299 - protein, 363 aa, Homo sapiens
MEDLEEDVRFIVDETLDFGGLSPSDSREEEDITVLVTPEKPLRRGLSHRSDPNAVAPAPQGVRLSLGPLSPEKLEEILDEANRLAAQLEQCALQDRESAGEGLGPRRVKPSPRRETFVLKDSPVRDLLPTVNSLTRSTPSPSSLTPRLRSNDRKGSVRALRATSGKRPSNMKRESPTCNLFPASKSPASSPLTRSTPPVRGRAGPSGRAAASEETRAAKLRVSGSGEFVGLTLKFLHPSPPGPPTPIRSVLAPQPSTSNSQRLPRPQGAAAKSSSQLPIPSAIPRPASRMPLTSRSVPPGRGALPPDSLSTRKGLPRPSTAGHRVRESGHKVPVSQRLNLPVMGATRSNLQPPRKVAVPGPTR

SEQ ID NO: 9300 - protein, 121 aa, Homo sapiens
KGSVRALRATSGKRPSNMKRESPTCNLFPASKSPASSPLTRSTPPVRGRAGPSGRAAASEETRAAKLRGAAAKSSSQLPIPSAIPRPASRMPLTSRSVPPGRGALPPDSLSTRKGLPRPST

SEQ ID NO: 9301 - protein, 223 aa, Homo sapiens
LFAFLNHLSQFSEENMMDPYNLAICFGPSLMSVPEGHDQVSCQAHVNELIKTIIIQHENIFPSPRELEGPVYSRGGSMEDYCDSPHGETTSVEDSTQDVTAEHHTSDDECEPIEAIAKFDYVGRTARELSFKKGASLLLYQRASDDWWEGRHNGIDGLIPHQYIVVQDTEDGVVERSSPKSEIEVISEPPEEKVTARAGASCPSGGHVADIYLANINNFHCGC

SEQ ID NO: 9302 - protein, 699 aa, Homo sapiens
MADAGIRRVVPSDLYPLVLGFLRDNQLSEVANKFAKATGATQQDANASSLLDIYSFWLKSAKVPERKLQANGPVAKKAKKKASSSDSEDSSEEEEEVQGPPAKKAAVPAKRVGLPPGKAAAKASESSSSEESSDDDDEEDQKKQPVQKGVKPQAKAAKAPPKKAKSSDSDSDSSSEDEPPKNQKPKITPVTVKAQTKAPPKPARAAPKIANGKAASSSSSSSSSSSSDDSEEEKAAATPKKTVPKKQVVAKAPVKAATTPTRKSSSSEDSSSDEEEEQKKPMKNKPGPYSSVPPPSAPPPKKSLGTQPPKKAVEKQQPVESSEDSSDESDSSSEEEKKPPTKAVVSKATTKPPPAKKAAESSSDSSDSDSSEDDEAPSKPAGTTKNSSNKPAVTTKSPAVKPAAAPKQPVGGGQKLLTRKADSSSSEEESSSSEEEKTKKMVATTKPKATAKAALSLPAKQAPQGSRDSSSDSDSSSSEEEEEKTSKSAVKKKPQKVAGGAAPSKPASAKKGKAESSNSSSSDDSSEEEEEKLKGKGSPRPQAPKANGTSALTAQNGKAAKNSEEEEEEKKKAAVVVSKSGSLKKRKQNEAAKEAETPQAKKIKLQTPNTFPKRKKGEKRASSPFRRVREEEIEVDSRVADNSFDAKRGAAGDWGERANQVLKFTKGKSFRHEKTKKKRGSYRGGSISVQVNSIKFDSE

SEQ ID NO: 9303 - protein, 59 aa, Homo sapiens
GRLEYWNPDNKCCSSCLQRFGPPPCPGENPRPSLAWAELAEAGPCQGALPPHTWKPRRP

SEQ ID NO: 9304 - protein, 46 aa, Homo sapiens
MADAGIRRVVPSDLYPLVLGFLRDNQLSEVANKFAKATGALEQHLK

SEQ ID NO: 9305 - protein, 531 aa, Homo sapiens
MAEGKAGGAAGLFAKQVQKKFSRAQEKAEGHKLYKDLKNFLSAVKVMHESSKRVSETLQEIYSSEWDGHEELKAIVWNNDLLWEDYEEKLADQAVRTMEIYVAQFSEIKERIAKRGRKLVDYDSARHHLEAVQNAKKKDEAKTAKAEEEFNKAQTVFEDLNQELLEELPILYNSRIGCYVTIFQNISNLRDVFYREMSKLNHNLYEVMSKLEKQHSNKVFVVKGLSSSSRRSLVISPPVRTATVSSPLTSPTSPSTLSLKSESESVSATEDLAPDAAQGEDNSEIKELLEEEEIEKEGSEASSSEEDEPLPACNGPAQAQPSPTTERAKSQEEVLPSSTTPSPGGALSPSGQPSSSATEVVLRTRTASEGSEQPKKRASIQRTSAPPSRPPPPRATASPRPSSGNIPSSPTASGGGSPTSPRASLGTGTASPRTSLEVSPNPEPPEKPVRTPEAKENENIHNQNPEELCTSPTLMTSQTSFKSPWYQKTTTSQHLNLKKRYPQVKIHNSEEKLPRLLLPQTSPEKLFNQRV

SEQ ID NO: 9306 - protein, 700 aa, Homo sapiens
MADAGIRRVVPSDLYPLVLGFLRDNQLSEVANKFAKATGATQQDANASSLLDIYSFWLNRSAKVPERKLQANGPVAKKAKKKASSSDSEDSSEEEEEVQGPPAKKAAVPAKRVGLPPGKAAAKASESSSSEESSDDDDEEDQKKQPVQKGVKPQAKAAKAPPKKAKSSDSDSDSSSEDEPPKNQKPKITPVTVKAQTKAPPKPARAAPKIANGKAASSSSSSSSSSSSDDSEEEKAAATPKKTVPKKQVVAKAPVKAATTPTRKSSSSEDSSSDEEEEQKKPMKNKPGPYSSVPPPSAPPPKKSLGTQPPKKAVEKQQPVESSEDSSDESDSSSEEEKKPPTKAVVSKATTKPPPAKKAAESSSDSSDSDSSEDDEAPSKPAGTTKNSSNKPAVTTKSPAVKPAAAPKQPVGGGQKLLTRKADSSSSEEESSSSEEEKTKKMVATTKPKATAKAALSLPAKQAPQGSRDSSSDSDSSSSEEEEEKTSKSAVKKKPQKVAGGAAPSKPASAKKGKAESSNSSSSDDSSEEEEEKLKGKGSPRPQAPKANGTSALTAQNGKAAKNSEEEEEEKKKAAVVVSKSGSLKKRKQNEAAKEAETPQAKKIKLQTPNTFPKRKKGEKRASSPFRRVREEEIEVDSRVADNSFDAKRGAAGDWGERANQVLKFTKGKSFRHEKTKKKRGSYRGGSISVQVNSIKFDSE

SEQ ID NO: 9307 - protein, 42 aa, Homo sapiens
SEFRDEVEEIILILVKIKALNQAESFIGEHHLDHLKSLIKED

SEQ ID NO: 9308 - protein, 166 aa, Homo sapiens
AAAPEAPVYANLSSYAGGAGGAGGAATVAFAAEPVPFPPPPPPGALGPPRLAALKDEPQTVPDVPSFGESPPLSPIDMDTQERIKAERKRLRNRIAASKCRKRKLERISRLEEKVKTLKSQNTELASTASLLREQVAQLKQKVLSHVNSGCQLLPQHQREEQSVRF

SEQ ID NO: 9309 - protein, 102 aa, Homo sapiens
SYGLSAEVKNRMGTNKCASQSGMTAYGTRRHLYDPKNHILPPMDHSTISLQMGTNKCASQVGLARVPPTPLPAPLHPVVSAPPWGHLQLLSPLSVSAPSLDH

SEQ ID NO: 9310 - protein, 38 aa, Homo sapiens
MIKDCGATWVVLGHSERRHVFGESDELIGQKVAHALAE

SEQ ID NO: 9311 - protein, 44 aa, Homo sapiens
MRLRNGTVATALAFITSFLTLSWYTTWQNGKGKENDSENVHEMY

SEQ ID NO: 9312 - protein, 20 aa, Homo sapiens
DIFERIAGGVAETSQQAHLH

SEQ ID NO: 9313 - protein, 158 aa, Homo sapiens
RPPRPPPRGTPPRRHSFRKHLYLLRGLPGSGKTTLARQLQHDFPRALIFSTDDFFFREDGAYEFNPDFLEEAHEWNQKRARKAMRNGISPIIIDNTNLHAWEMKPYAVMALENNYEVIFREPDTRWKFNVQELARRNIHGVSREKIHRMKERLESDLM

SEQ ID NO: 9314 - protein, 184 aa, Homo sapiens
MKQPIMADGPRCKRRKQANPRRKNVVNYDNVVDTGSETDEEDKLHIAEDDGIANPLDQETSPASVPNHESSPHVSQALLPREEEEDEIREGGVEHPWHNNEILQASVDGPVKNANCTSDFEEYFAKRKLEERDGHAVSIEEYLQRSDTAIIYPEAPEELSRLGTPEANGQEENDLPPGTPDAFA

SEQ ID NO: 9315 - protein, 113 aa, Homo sapiens
MIKDCGATWVVLGHSERRHVFGESDELIGQKVAHALAEGLGVIACIGEKLDEREAGITEKVVFEQTKVIADNVKDWSKVVLAYEPVWAIGTGKTATPQQAQEVHEKLRGWLKS

SEQ ID NO: 9316 - protein, 96 aa, Homo sapiens
MAPERLRSRALSAFKLRGLLLRGEAIKYLTEALQSISELELEDKLEKIINAVEKQPLSSNMIERSVVEAAVQECSQSVDETMYVGTVNFFPPWRCY

SEQ ID NO: 9317 - protein, 46 aa, Homo sapiens
MDPNCSCSPVGSCACAGSCKCKECKCTSCKKSECRAFPANLGDGPS

SEQ ID NO: 9318 - protein, 423 aa, Homo sapiens
MADGPRCKRRKQANPRRKNVVNYDNVVDTGSETDEEDKLHIAEDDGIANPLDQETSPASVPNHESSPHVSQALLPREEEEDEIREGGVEHPWHNNEILQASVDGPEEMKEDYDTMGPEATIQTAINNGTVKNANCTSDFEEYFAKRKLEERDGHAVSIEEYLQRSDTAIIYPEAPEELSRLGTPEANGQEENDLPPGTPDAFAQLLTCPYCDRGYKRLTSLKEHIKYRHEKNEENFSCPLCSYTFAYRTQLERHMVTHKPGTDQHQMLTQGAGNRKFKCTECGKAFKYKHHLKEHLRIHSGEKPYECPNCKKRFSHSGSYSSHISSKKCIGLISVNGRMRNNIKTGSSPNSVSSSPTNSAITQLRNKLENGKPLSMSEQTGLLKNSRRQWLMPVIPALWEANEGGSGQEFETSLANMVKHHLS

SEQ ID NO: 9319 - protein, 144 aa, Homo sapiens
MVYNNEVVGKGRNEVNQTKNATRHAEMVAIDQVLDWCRQSGKSPSEVFEHTVLYVTVEPCIMCAAALRLMKIPLVVYGCQNERFGGCGSVLNIASADLPNTGRPFQCIPGYRAEEAVEMLKTFYKQENPNAPKSKVRKKECQKS

SEQ ID NO: 9320 - protein, 261 aa, Homo sapiens
APEIRMSKPLEAEKQGLDSPSEHTDTERNGPDTNHQNPQNKTSPFSVSPTGPSTKIKAEDPSGDSAPAAPLPPQPAQPHLPQAQLMLTGSQLAGDIQQLLQLQQLVLVPGHHLQPPAQFLLPQAQQSQPGLLPTPNLFQLPQQTQGALLTSQPRAGLPTQAVTRPTLPDPHLSHPQPPKCLEPPSHPEEPSDLEELEQFARTFKQRRIKLGFTQGDVGLAMGKLYGNDFSQTTISRFEALNLSFKNMCKLKPLLEKWLNDA

SEQ ID NO: 9321 - protein, 132 aa, Homo sapiens
MVLKTALRLCLFRVNSWTRPRMTAISWQDAQDALPTVAAPRPVCQRCGQPLALVVQVYCPLEGSPFHRLLHVFACACPGCSTGGARSWKVFRSQCLQVPEREAQDAQKQGNSLAAEDWCEGADDWGSDTEEG

SEQ ID NO: 9322 - protein, 247 aa, Homo sapiens
EFTHLEFPRRVLPKELGQRMLYRDQNMTGWAYKKIELEDLRFPLVCGEGKKARVMATIGVTRGLGDHSLKVCSSTLPIKPFLSCFPEVRVYDLTQYEHCPDDVLVLGTDGLWDVTTDCEVAATVDRVLSAYEPNDHSSPTMAAIRKKLVIVGDGACGKTCLLIVFSKDQFPEVYVPTVFENYIADIEVDGKQVELALWDTAGQEDYDRLRPLSYPDTDVILMCFSIDSPDSLENIPEKWTPEVKHFC

SEQ ID NO: 9323 - protein, 465 aa, Homo sapiens
MWVCLRGILDSQAFWHETLRRWECLLAEMKVSRGERSHCPTQTVKKLLEEQRRRQQQQPDAGGVQGQFLPPPEQPLTPSVNEAVTGHPPFPAHSETVGSGPSSLGFPDWDPNTHAAYTDSPYSCPASAAENFLPPDFYPPSDPGQPCPFPQGMEAGPWRVSAPPSGPPQFPAVVPGPSLEVARAHMLALGPQQLLAQDEEGDTLLHLFAARGLRWAAYAAAEVLQVYRRLDIREHKGKTPLLVAAAANQPLIVEDLLNLGAEPNAADHQGRSVLHVAATYGLPGVLLAVLNSGVQVDLEARDFEGLTPLHTAILALNVAMRPSDLCPRVLSTQARDRLDCVHMLLQMGANHTSQEIKSNKTVLHLAVQAANPTLVQLLLELPRGDLRTFVNMKAHGNTALHMAAALPPGPAQEAIVRHLLAAGADPTLRNLENEQPVHLLRPGPGPEGLRQLLKRSRVAPPGLSS

SEQ ID NO: 9324 - protein, 393 aa, Homo sapiens
APMEVAVCTDSAAPMWSCIVWELHSGANLLTYRGGQAGPRGLALLNGEYLLAAQLGKNYISAWELQRKVSTGNLLVILSRHYQDVSCLQFTGDSSHFISGGKDCLVLVWSLCSVLQADPSRIPAPRHVWSHHALPITDLHCGFGGPLARVATSSLDQTVKLWEVSSGELLLSVLFDVSIMAVTMDLAEHHMFCGGSEGSIFQVDLFTWPGQRERSFHPEQDAGKVFKGHRNQVTCLSVSTDGSVLLSGSHDETVRLWDVQSKQCIRTVALKGPVTNAAILLAPVSMLSSDFRPSLPLPHFNKHLLGAEHGDEPRHGGLTLRLGLHQQGSEPSYLDRTEQLQAVLCSTMEKSVLGGQDQLRVRVTELEDEVRNLRKINRDLFDFSTRFITRPAK

SEQ ID NO: 9325 - protein, 98 aa, Homo sapiens
MIKDCGATWVVLGHSERRHVFGESDELIGQKVAHALAEGLGVIACIGEKLDEREAGITEKVVFEQTKVIADNVKDWSKVVLAYEPVWAIGTGKTATPQ

SEQ ID NO: 9326 - protein, 202 aa, Homo sapiens
MKVQVVTQDEREQLYTPASLKCSLQNAQEALIVTWQKKKAVSPENMVTFSENHGVVIQPAYKDKINITQLGLQNSTITFWNITLEDEGCYMCLFNTFGFGKISGTACLTVYVQPIVSLHYKFSEDHLNITCSATARPAPMVFWKVPRSGIENSTVTLSHPNGTTSVTSILHIKDPKNQVGKEVICQVLHLGTVTDFKQTVNK

SEQ ID NO: 9327 - protein, 166 aa, Homo sapiens
MPEPSKSAPAPKKGSKKAVTKAQKKDGKKRKRSRKESYSVYVYKVLKQVHPDTGISSKAMGIMNSFVNDIFERIAGEASRLAHYNKRSTITSREIQTAVRLLLPGELAKHAVSEGTKAVTKYTSSKKRKRRFTESIKKAHGFRKLKIWLKLRVSNQSPDDIYIARD

SEQ ID NO: 9328 - protein, 125 aa, Homo sapiens
MLVELKNGETYNGHLVSCDNWMNINLREVICTSRDGDKFWRMPECYIRGSTIKYLRIPDEIIDMVKEEVVAKGRGRGGLQQQKQQKGRGMGGAGRGVFGGRGRGGIPGTGRGQPEKKPGRQAGKQ

SEQ ID NO: 9329 - protein, 73 aa, Homo sapiens
NCGLNDHGDFVTPPFRKCSSGQCNPDGAELCSPCGGGAVTPTPAAGGGRTPWRCREAPWRQGTHGRRPHYFHS

SEQ ID NO: 9330 - protein, 320 aa, Homo sapiens
VGILSGLHLTFWGPGPCLSPPQIKAEDPSGDSAPAAPLPPQPAQPHLPQAQLMLTGSQLAGLTALMPAQQQLLLQQAQAQLLAAAVQQSSAAAAANAAAAAAAASASSSTSSSSSSSASSSTSQPPASSGGGDLPPPQPASQPPGTPQLTLSQPIQLTAQDIQQLLQLQQLVLVPGHHLQPPAQFLLPQAQQSQPGLLPTPNLFQLPQQTQGALLTSQPRAGLPTQAVTRPTLPDPHLSHPQPPKCLEPPSHPEEPSDLEELEQFARTFKQRRIKLGFTQGDVGLAMGKLYGNDFSQTTISRFEALNLSFKNMCKLKPLL

SEQ ID NO: 9331 - protein, 59 aa, Homo sapiens
MDTLDRVVKPKTKRAKRFLEKREPKLNENIKNAMLIKGGNANATVTKVLKDVEKYYKTF

SEQ ID NO: 9332 - protein, 432 aa, Homo sapiens
MAAPMEVAVCTDSAAPMWSCIVWELHSGANLLTYRGGQAGPRGLALLNGEYLLAAQLGKNYISAWELQRKDQLQQKIMCPGPVTCLTASPNGLYVLAGVAESIHLWEVSTGNLLVILSRHYQDVSCLQFTGDSSHFISGGKDCLVLVWSLCSVLQADPSRIPAPRHVWSHHALPITDLHCGFGGPLARVATSSLDQTVKLWEVSSGELLLSVLFDVSIMAVTMDLAEHHMFCGGSEGSIFQVDLFTWPGQRERSFHPEQDAGKVFKGHRNQVTCLSVSTDGSVLLSGSHDETVRLWDVQSKQCIRTVALKGPVTNAAILLAPVSMLSSDFRPSLPLPHFNKHLLGAEHGDEPRHGGLTLRLGLHQQGSEPSYLDRTEQLQAVLCSTMEKSVLGGQDQLRVRVTELEDEVRNLRKINRDLFDFSTRFITRPAK

SEQ ID NO: 9333 - protein, 160 aa, Homo sapiens
MAGEKVEKPDTKEKKPEAKKVDAGGKVKKGNLKAKKPKKGKPHCSRNPVLVRGIGRYSRSAMYSRKAMYKRKYSAAKSKVEKKKKEKVLATVTKPVGGDKNGGTRVVKLRKMPRYYPTEDVPRKLLSHGKKPFSQHVRKLRASITPGTILIILTGRHRGK

SEQ ID NO: 9334 - protein, 270 aa, Homo sapiens
EFTHLEFPRRVLPKELGQRMLYRDQNMTGWAYKKIELEDLRFPLVCGEGKKARVMATIGVTRGLGDHSLKVCSSTLPIKPFLSCFPEVRVYDLTQYEHCPDDVLVLGTDGLWDVTTDCEVAATVDRVLSAYEPNDHSSLDFISAPEPALSSCSLGTSAGWSPTMAAIRKKLVIVGDGACGKTCLLIVFSKDQFPEVYVPTVFENYIADIEVDGKQVELALWDTAGQEDYDRLRPLSYPDTDVILMCFSIDSPDSLENIPEKWTPEVKHFC

SEQ ID NO: 9335 - protein, 65 aa, Homo sapiens
MYAVDLMLKWDNGPDGRRVMQPQILEVNFNPDCERACRYHPTFFNDVFSTLFLDQPGGCHVTCLV

SEQ ID NO: 9336 - protein, 111 aa, Homo sapiens
MKLFVDTDADTRLSRRVLRDISERGRDLEQILSQYITFVKPAFEEFCLPTKKYADVIIPRGADNLVAINLIVQHIQDILNGGPSKRQTNGCLNGYTPSRKRQASESSSRPH

SEQ ID NO: 9337 - protein, 465 aa, Homo sapiens
MSHLTQHTGIHAGEKPYKCEKCGKAFNRSTSLSKHKRIHTGEKPYTCEECGKAFRRSTVLNEHKKIHTGEKPYKCEECGKAFTRSTTLNEHKKIHTGEKPYKCKECGKAFRWSTSLNEHKNIHTGEKPYKCKECGKAFRQSRSLNEHKNIHTGEKPYTCEKCGKAFNQSSSLIIHRSIHSEQKLYKCEECGKAFTWSSSLNKHKRIHTGEKPYTCEECGKAFYRSSHLAKHKRIHTGEKPYTCEECGKAFNQSSTLILHKRIHSGQKPYKCEECGKAFTRSTTLNEHKKIHTGEKPYKCEECGKAFIWSASLNEHKNIHTGEKPYKCKECGKAFNQSSGLIIHRSIHSEQKLYKCEECGKAFTRSTALNEHKKIHSGEKPYKCKECGKAYNLSSTLTKHKRIHTGEKPFTCEECGKAFNWSSSLTKHKIIHTGEKSYKCEECGKAFNRPSTLTVHKRIHTGKEHS

SEQ ID NO: 9338 - protein, 219 aa, Homo sapiens
LQYNRLQLSRIYPKGQRLDSSNYDPLPMWICGSQLVALNFQTPDKPMQMNQALFMTGRHCGYVLQPSTMRDEAFDPFDKSSLRGLEPCAISIEVLGARHLPKNGRGIVCPFVEIEVAGAEYDSTKQKTEFVVDNGLNPVWPAKPFHFQISNPEFAFLRFVVYEEDMFSDQNFLAQATFPVKGLKTGYRAVPLKNNYSEDLELASLLIKIDIFPAKKLLC

SEQ ID NO: 9339 - protein, 162 aa, Homo sapiens
AAFLGSGTPGSGSGSRGRLNSFTQGILPIAFSRPTSQNYCSLEQPGQGGSTSAFEQLQRSRRRLISQRSSLETLEDIEENAPLRRCRTLSGSPRPKNFKKIHFIKNMRQHDTRNGRIVLISGRRSFCSIFSVLPYRDSTQVGYVYACMLCSSLGEKISHQCT

SEQ ID NO: 9340 - protein, 338 aa, Homo sapiens
MSGPDVETPSAIQICRIMRPDDANVAGNVHGGTILKMIEEAGAIISTRHCNSQNGERCVAALARVERTDFLSPMCIGEVAHVSAEITYTSKHSVEVQVNVMSENILTGAKKLTNKATLWYVPLSLKNVDKVLEVPPVVYSRQEQEEEGRKRYEAQKLERMETKWRNGDIVQPVLNPEPNTVSYSQSSLIHLVGPSDCTLHGFVHGGVTMKLMDEVAGIVAARHCKTNIVTASVDAINFHDKIRKGCVITISGRMTFTSNKSMEIEVLVDADPVVDSSQKRYRAASAFFTYVSLSQEGRSLPVPQLVPETEDEKKRFEEGKGRYLQMKAKRQGHAEPQP

SEQ ID NO: 9341 - protein, 320 aa, Homo sapiens
CLIRRTSDILSKYLPVKIEQVVCCRLTPLQTELYKRFLRQAKPAEELLEGKMSVSSLSSITSLKKLCNRKMLVLDYILAVTRSRSSDKVVLVSNYTQTLDLFEKLCRARRYLYVRLDGTMSIKKRAKVVERFNSPSSPDFVFMLSSKAGGCGLNLIGANRLVMFDPDWNPANDEQAMARVWRDGQKKTCYIYRLLSAGTIEEKIFQRQSHKKALSSCVVDEEQDVERHFSLGELKELFILDEASLSDTHDRLHCRRCVNSRQIRPPPDGSDCTSDLAGWNHCTDKWGLRDEVLQAAWDAASTAITFVFHQRSHEEQRGLR

SEQ ID NO: 9342 - protein, 183 aa, Homo sapiens
NNFLHFTNEETEAGTGEGDAGSRTCPSWGQKLTQLTKITRTGPSAWETKKILAVSFAPLIQPCHSESGKSRLVQLPPVAVRSLQDLARIAIRGTIKKIIHQETVSKNGNGLKNTPRFKRRRVRRRRMETIVFLDKEVFASRISNPSDDNSCEDLEEERREEEEKTPPETKPDPPVNFLRQKVL

SEQ ID NO: 9343 - protein, 131 aa, Homo sapiens
MGLPVSWAPPALWVLGCCALLLSLWALCTACRRPEDAVAPRKRARRQRARLQGSATAAEAQVGHQTARAAPGPAQQQGPAACQHGSPAPTLAGGVQGHHRTAGSPLCLPTPGAAPGSAGSCSHRRVRWPRG

SEQ ID NO: 9344 - protein, 168 aa, Homo sapiens
CIRQLCEFLTENGYAHNVSMKSLQAPSVKDFLKIFTFLYGFLCPSYELPDTKFEEEVPRIFKDLGYPFALSKSSMYTVGAPHTWPHIVAALVWLIDCIKSLALLPRLECSGMISAHYNLHLPGSSNSHASASQVARITGAHHHAQLIFVFSVETACHHVGQADLELLT

SEQ ID NO: 9345 - protein, 39 aa, Homo sapiens
LGLSRVDDAVAAKHPAPAWPLACRCSFRGSFHTLCSGAS

SEQ ID NO: 9346 - protein, 222 aa, Homo sapiens
MEGSFHQKTPRHKQPTLLMVRASRRSGKTSAVLKAGRQSVSGRKNSTSKDLVTLGASSLREERGHPLHPRHRKAVHLRTRGRTRGWVQTLARMSRRTRGPVERAAAAAAAAAGGDAGHAPFPPPPAADGARAPRSPGQVTPRGLRLRLPRRESLLRGLCRPLRPLLGFRESDSAKPASLRLLQHTPSARRNYRIAGARLMRSNYPPPLSSAALRGAGPTRRN

SEQ ID NO: 9347 - protein, 83 aa, Homo sapiens
FPHQELPRALPAAAATAGCAGLEATYSNVGLAALPGVSLAASPVVAEYARVQKRKGTHRSPQEPQQGKTEVTPAAQGSSVGGG

SEQ ID NO: 9348 - protein, 113 aa, Homo sapiens
MNAAVRAVVRMGIYVGAKVYFIYEGYQGMVDGGSNIAEADWESVSSILQVGGTIIGSARCQAFRTREGRLKAACNLLQRGITNLCVIGGDGSLTGANLFRKEWSGLLEELARN

SEQ ID NO: 9349 - protein, 155 aa, Homo sapiens [sequence omitted]

SEQ ID NO: 9350 - protein, 77 aa, Homo sapiens
MTEEACRTRSQKRALERDPTEDDVESKKIKMERGLLASDLNTDGDMRVTPEPGAGPTQGLLRATEATAMAMGRGEGL

SEQ ID NO: 9351 - protein, 210 aa, Homo sapiens
MRRSLAPSQLAKRKPEGRSCDDEDWQPGLVTPRKRKSSSETQIQECFLSPFRKPLSQLTNQPPCLDSSQHEAFIRSILSKPFKVPIPNYQGPLGSRALGLKRAGVRRALHDPLEKDALVLYEPPPLSAHDQLKLDKEKLPVHVVVDPILSKVLRPHQREGVKFLWECVTSRRIPGSHGCIMADEMGLGKTLQCITLMWTLLRQSPECKPE

SEQ ID NO: 9352 - protein, 23 aa, Homo sapiens
MASCAEPSEPSAPLPAGVPPLED

SEQ ID NO: 9353 - protein, 238 aa, Homo sapiens
MLPLSLLKTAQNHPMLVELKNGETYNGHLVSCDNWMNINLREVICTSRDGDKFWRMPECYIRGSTIKYLRIPDEIIDMVKEEVVAKGRGRGGLQQQKQQKGRGMGGAGRGGSPLSSGRTWGGKTATRGIPPSWGCPCSAASEPPNPPGPPSWSLAMSRGPGRGAPRPGTQPSSHCASWRSSGHIKSPPQASVSPLRGYGGAHLSRPLATPLGTWRGSIQSQGRPPPPEMMNWHKIPFV

SEQ ID NO: 9354 - protein, 126 aa, Homo sapiens
MPDPAKSAPAPKKGSKKAVTKAQKKDGKKRKRSRKESYSIYVYKVLKQVHPDTGISSKAMGIMNSFVNDIFERIAGEASRLAHYNKRSTITSREIQTAVRLLLPGELAKHAVSEGTKAVTKYTSSK

SEQ ID NO: 9355 - protein, 211 aa, Homo sapiens
MEVHGKPKASPSCSSPTRDSSGVPVSKELLTAGSDGRGGIWDRLLINSQPKSRKTSTLQTVRIERSPLLDQVQTFLPQMARANEKLRKEMAAAPPGRFNIENIDGPHSKVIQMDVALFEMNQSDSKEVDSSEESSQDSSENSSESEDEDDSIPSEVTIDNIKLPNSEGGKVETGFHRVSQDGLNLLTSCSTLLDLPKCWDYRHEPPCPAGN

SEQ ID NO: 9356 - protein, 130 aa, Homo sapiens
MDLSTFDFRTGKMLMSKMNKSRQRVRYDSSNQVKGKPDLNTALPVRQTASIFKQPVTKITNHPSNKVKSDPQKAVDQPRQLFWEKKLSGLNAFDIAEELVKTMDLPKGLQGVGPGCTDETLLSAIASALH

SEQ ID NO: 9357 - protein, 153 aa, Homo sapiens
MRSSPGNMERIVICLMVIFLGTLVHKSSSQGQDRHMIRMRQLIDIVDQLKNYVNDLVPEFLPAPEDVETNCEWSAFSCFQKAQLKSANTGNNERIINVSIKKLKRKPPSTNAGRRQKHRLTCPSCDSYEKKPPKEFLERFKSLLQKVSTLSFI

SEQ ID NO: 9358 - protein, 176 aa, Homo sapiens
MGLPVSWAPPALWVLGCCALLLSLWALCTACRRPEDAVAPRKRARRQRARLQGSATAAEAQVGHQTARAAPGPAQQQGPAACQHGSPAPTLAGGVQGHHRTAGSPLCLPTPGAAPGSAGSCSHRRVRWPRGHLFQRGAGGPSRGQPGGQPCGGRVCPRPEAQRDPSQSPRATAGED

SEQ ID NO: 9359 - protein, 110 aa, Homo sapiens
MKRAVDCPENIKKEICINKMLNHENVVKFYGHRREGNIQYLFLEYCSGGELFDRIEPDIGMPEPDAQRFFHQLMAGVVYLHGIGITHRDIKPENLLLDERDNLKISDFGL

SEQ ID NO: 9360 - protein, 168 aa, Homo sapiens
RALSLRLFQTEEKIERTQRDIRSIQEALARNAGRKRARRQRARLQGSATAAEASLLRRTHLCSLSKSDTRLHELHRGPRSSRALRPASMDLLRPHWLEVSRDITGPQAAPSAFPHQELPRALPAAAATAGCAGLEATYSNVGLAALPGVSLAASPVVAEYARVQKRKG

SEQ ID NO: 9361 - protein, 69 aa, Homo sapiens
MTEAGKLPLPLPPRLDWFVHTQMGQLAQDGVPEWFHGAISRDSLGSGVYSPLEEAEGQKGRDDCLRSHS

SEQ ID NO: 9362 - protein, 255 aa, Homo sapiens
PLGSRALGLKRAGVRRALHDPLEKDALVLYEPPPLSAHDQLKLDKEKLPVHVVVDPILSKVLRPHQREGVKFLWECVTSRRIPGSHGCIMADEMGLGKTLQCITLMWTLLRQSPECKPEIDKAVVVSPSSLVKNWYNEVGKWLGGRIQPLAIDGGSKDEIDQKLGFMNQRGARVSSPILIISYETFRLHVGVLQKGSVGLVICDEGHRLKNSENQTYQALDSLNTSRRVLISGTPIQNDLLEYFSLVHFVNSGIL

SEQ ID NO: 9363 - protein, 165 aa, Homo sapiens
MKEDQVVAEEPGFQDEEESLFQDIDLLQKHGINVADIKKLKSVGICTIKGIQMTTRRALCNVKGLSEAKVDKIKEAANKLIEPGFLTAFEYSEKRKMVFHITTGSQEFDKLLGGGIESMAITEAFGEFRTGKTQLSHTLCVTAQLPGAGGYPGGKIIFIDTENTL

SEQ ID NO: 9364 - protein, 142 aa, Homo sapiens
MNTNPSRGPYHFRAPSRIFWRTVRGMLPHKTKRGQAALDRLKVFDGIPPPYDKKKRMVVPAALKVVRLKPTRKFAYLGRLAHEVGWKYQAVTATLEEKRKEKAKIHYRKKKQLMRLRKQAEKNVEKKIDKYTEVLKTHGLLV

SEQ ID NO: 9365 - protein, 122 aa, Homo sapiens
MSKKKGLSAEEKRTRMMEIFSETKDVFQLKDLEKIAPKEKGITAMSVKEVLQSLVDDGMVDCERIGTSNYYWAFPSKALHARKHKLEVLESQLSEGSQKHASLQKSIEKAKIGRCETAKQIK

SEQ ID NO: 9366 - protein, 101 aa, Homo sapiens
MDVHDLFRRLGAGAKFDTRRFSADAARFQIGKRKYDFDSSEVLQGLDFFGNKKSVPGVCGASQTHQKPQNGEKKEESLTERKREQSKKKRKTMTSDKLLAE

SEQ ID NO: 9367 - protein, 197 aa, Homo sapiens
MIIYRDLISHDEMFSDIYKIREIADGLCLEVEGKMVSRTEGNIDDSLIGGNASAEGPEGEGTESTVITGVDIVMNHHLQETSFTKEAYKKYIKDYMKSIKGKLEEQRPERVKPFMTGAAEQIKHILANFKNYQFFIGENMNPDGMVALLDYREDGVTPYMIFFKDGLEMEKCDAKERNPCAFCLSLWRPRLNWGIHL

SEQ ID NO: 9368 - protein, 190 aa, Homo sapiens
MDAELAEVRALQAEIAALRRACEDPPAPWEEKSRVQKSFQAIHQFNLEGWKSSKDLKNQLGHLESELSFLSTLTGINIRNHSKQTEDLTSTEMTEKSIRKVLQRHRLSGNCHMVTFQLEFQILEIQNKERLSSAVTDLNIIMEPTECSELSEFVSRAEERKDLFMFFRSLHFFVEWFEYRKRTFKHLKVK

SEQ ID NO: 9369 - protein, 1642 aa, Homo sapiens
FLVSFMVDARGGSMRGSRHHGMRIIIPPRKCTAPTRITCRLVKRHKLANPPPMVEGEGLASRLVEMGPAGAQFLGPVIVEIPHFGSMRGKERELIVLRSENGETWKEHQFDSKNEDLTELLNGMDEELDSPEELGKKRICRIITKDFPQYFAVVSRIKQESNQIGPEGGILSSTTVPLVQASFPEGALTKRIRVGLQAQPVPDEIVKKILGNKATFSPIVTVEPRRRKFHKPITMTIPVPPPSGEGVSNGYKGDTTPNLRLLCSITGGTSPAQWEDITGTTPLTFIKDCVSFTTNVSARFWLADCHQVLETVGLATQLYRELICVPYMAKFVVFAKMNDPVESSLRCFCMTDDKVDKTLEQQENFEEVARSKDIEVLEGKPIYVDCYGNLAPLTKGGQQLVFNFYSFKENRLPFSIKIRDTSQEPCGRLSFLKEPKTTKGLPQTAVCNLNITLPAHKKIEKTDRRQSFASLALRKRYSYLTEPGMKTVERSTGATRSLPTTYSYKPFFSTRPYQSWTTAPITVPGPAKSGFTSLSSSSSNTPSASPLKSIWSVSTPSPIKSTLGASTTSSVKSISDVASPIRSFRTMSSPIKTVVSQSPYNIQVSSGTLARAPAVTEATPLKGLASNSTFSSRTSPVTTAGSLLERSSITMTPPASPKSNINMYSSSLPFKSIITSAAPLISSPLKSVVSPVKSAVDVISSAKITMASSLSSPVKQMPGHAEVALVNGSISPLKYPSSSTLINGCKATATLQEKISSATNSVSSVVSAATDTVEKVFSTTTAMPFSPLRSYVSAAPSAFQSLRTPSASALYTSLGSSISATTSSVTSSIITVPVYSVVNVLPEPALKKLPDSNSFTKSAAALLSPIKTLTTETHPQPHFSRTSSPVKSSLFLAPSALKLSTPSSLSSSQEILKDVAEMKEDLMRMTAILQTDVPEEKPFQPELPKEGRIDDEEPFKIVEKVKEDLVKVSEILKKDVCVDNKGSPKSPKSDKGHSPEDDWIEFSSEEIREARQQAAASQSPSLPERVQVKAKAASEKDYNLTKVIDYLTNDIGSSSLTNLKYKFEDAKKDGEERQKRVLKPAIALQEHKLKMPPASMRTSTSEKELCKMADSFFGTDTILESPDDFSQHDQDKSPLSDSGFETRSEKTPSAPQSAESTGPKPLFHEVPIPPVITETRTEVVHVIRSYDPSAGDVPQTQPEEPVSPKPSPTFMELEPKPTTSSIKEKVKAFQMKASSEEDDHNRVLSKGMRVKEETHITTTTRMVYHSPPGGEGASERIEETMSVHDIMKAFQSGRDPSKELAGLFEHKSAVSPDVHKSAAETSAQHAEKDNQMKPKLERIIEVHIEKGPQSPCERTDIRMAIVADHLGLSWTELARELNFSVDEINQIRVENPNSLISQSFMLLKKWVTRDGKNATTDALTSVLTKINRIDIVTLLEGPIFDYGNISGTRSFADENNVFHDPVDGWQNETSSGNLESCAQARRVTGGLLDRLDDSPDQCRDSITSYLKGEAGKFEANGSHTEITPEAKTKSYFPESQNDVGKQSTKETLKPKIHGSGHVEEPASPLAAYQKSLEETSKLIIEETKPCVPVSMKKMSRTSPADGKPRLSLHEEEGSSGSEQKQGEGFKVKTKKEIRHVEKKSHS

SEQ ID NO: 9370 - protein, 555 aa, Homo sapiens
MNVMLENYKNLVFLAGIAVSKQDPITSLEQEKEPWNMKICEMVDESPAMCSSFTRDLWPEQDIKDSFQQVILRRHGKCEHENLQLRKGSANVVECKVYKKGYNELNQCLTTTQSKIFPCDKYIKVFHKIFNSNRHKTRHTGEKPFKCKKCDESFCMLLHLHQHKRIHIRENSYQCEECDKVFKRFSTLTRHKRVHTGEKPFKCEECGKAFKHSSTLTTHKMIHTGEKPYRCEECGKAFYHSSHLTTHKVIHTGEKPFKCEECGKAFNHPSALTTHKFIHVKEKPYKCEECDKAFNRFSYLTKHKIIHSGEKSYKCEQCGKGFNWSSTLTKHKRIHTGEKPYKCEECGKAFNVSSHLTTHKMIHTGEKPYKCEECGKAFNHSSKLTIHKIIHTGEKPYKCEECGKAFNQSSNLTKHKIIHTGEKLYKCEECGKAFNRSSNLTTHKRIHTGEKPYKCEECGKAFNRSSNLTKHNIIHTGEKSYKCEECGKAFNQSSTLTKHRKIQQGMVAHACNPNTLRGLGEQIARSGVQDQPGQHGKTPSLLKIQKFAGCGGRRL

SEQ ID NO: 9371 - protein, 137 aa, Homo sapiens
MAELVPFAVPIESDKTLLVWELSSGPTAEALHHSLFTAFSQFGLLYSVRVFPNAAVAHPGFYAVIKFYSARAAHRAQKACDRKQLFQKSPVKVRLGTRHKAVQHQALALNSSKCQELANYYFGFNGCSKRIIKKVVK

SEQ ID NO: 9372 - protein, 1235 aa, Homo sapiens
MALRPGAGSGGGGAAGAGAGSAGGGGFMFPVAGGIRPPQGLMPMQQQGFPMVSVMQPNMQGIMGMNYSSQMSQGPIAMQAGIPMGPMPAAGMPYLGQAPFLGMRPPGPQYTPDMQKQFAEEQQKRFEQQQKLLEEERKRRQFEEQKQKLRLLSSVKPKTGEKSRDDALEAIKGNLDGFSRDAKMHPTPASHPKKPGVGVFPSQDPAQPRMPPWIYNESLVPDAYKKILETTMTPTGIDTAKLYPILMSSGLPRETLGQIWALANRTTPGKLTKEELYTVLAMIAVTQRGVPAMSPDALNQFPAAPIPTLSGFSMTLPTPVSQPTVIPSGPAGSMPLSLGQPVMGINLVGPVGGAAAQASSGFIPTYPANQVVKPEEDDFQDFQDASKSGSLDDSFSDFQELPASSKTSNSQHGNSAPSLLMPLPGTKALPSMDKYAVFKGIAADKSSENTVPPGDPGDKYSAFRELEQTAENKPLGESFAEFRSAGTDDGFTDFKTADSVSPLEPPTKDKTFPPSFPSGTIQQKQQTQVKNPLNLADLDMFSSVNCSSEKPLSFSAVFSTSKSVSTPQSTGSAATMTALAATKTSSLADDFGEFSLFGEYSGLAPVGEQDDFADFMAFSNSSISSEQKPDDKYDALKEEASPVPLTSNVGSTVKGGQNSTAASTKYDVFRQLSLEGSGLGVEDLKDNTPSGKSDDDFADFHSSKFSSINSDKSLGEKAVAFRHTKEDSASVKSLDLPSIGGSSVGKEDSEDALSVQFDMKLADVGGDLKHVMSDSSLDLPTVSGQHPPAADIEDLKYAAFGSYSSNFAVSTLTSYDWSDRDDATQGRKLSPFVLSAGSGSPSATSILQKKETSFGSSENITMTSLSKVTTFVSEDALPETTFPALASFKDTIPQTSEQKEYENRDYKDFTKQDLPTAERSQEATCPSPASSGASQETPNECSDDFGEFQSEKPKISKFDFLVATSQSKMKSSEEMIKSELATFDLSVQGSHKRSLSLGDKEISRSSPSPALEQPFRDRSNTLNEKPALPVIRDKYKDLTGEVEENERYAYEWQRCLGSALNVIKKANDTLNGISSSSVCTEVIQSAQGMEYLLGVVEVYRVTKRVELGIKATAVCSEKLQQLLKDIDKVWNNLIGFMSLATLTPDENSLDFSSCMLRPGIKNAQELACGVCLLNVDSRSRKEEKPAEEHPKKAFNSETDSFKLAYGGHQYHASCANFWINCVEPKPPGLVLPDLL

SEQ ID NO: 9373 - protein, 660 aa, Homo sapiens
MARRPRHSIYSSDEDDEDFEMCDHDYDGLLPKSGKRHLGKTRWTREEDEKLKKLVEQNGTDDWKVIANYLPNRTDVQCQHRWQKVLNPELIKGPWTKEEDQRVIELVQKYGPKRWSVIAKHLKGRIGKQCRERWHNHLNPEVKKTSWTEEEDRIIYQAHKRLGNRWAEIAKLLPGRTDNAIKNHWNSTMRRKVEQEGYLQESSKASQPAVATSFQKNSHLMGFAQAPPTAQLPATGQPTVNNDYSYYHISEAQNVSSHVPYPVALHVNIVNVPQPAAAAIQRHYNDEDPEKEKRIKELELLLMSTENELKGQQVLPTQNHTCSYPGWHSTTIADHTRPHGDSAPVSCLGEHHSTPSLPADPGSLPEESASPARCMIVHQGTILDNVKNLLEFAETLQFIDSFLNTSSNHENSDLEMPSLTSTPLIGHKLTVTTPFHRDQTVKTQKENTVFRTPAIKRSILESSPRTPTPFKHALAAQEIKYGPLKMLPQTPSHLVEDLQDVIKQESDESGIVAEFQENGPPLLKKIKQEVESPTDKSGNFFCSHHWEGDSLNTQLFTQTSPVADAPTGVQWHDFGSLQPLPPGFKRFSCLSLPRSWDYRHPPPRPANFEFLVETGFLHVGQAGLELLTSGDLPASASQSARITGVSHRARPGGIFLQAPF

SEQ ID NO: 9374 - protein, 126 aa, Homo sapiens
MPEPVKSAPVPKKGSKKAINKAQKKDGKKRKRSRKESYSVYVYKVLKQVHPDTGISSKAMGIMNSFVNDIFERIAGEASRLAHYNKRSTITSREIQTAVRLLLPGELAKHAVSEGTKAVTKYTSSK

SEQ ID NO: 9375 - protein, 114 aa, Homo sapiens
MHLLVPPPQHSLFTAFSQFGLLYSVRVFPNAAVAHPGFYAVIKFYSARAAHRAQKACDRKQLFQKSPVKVRLGTRHKAVQHQALALNSSKCQELANYYFGFNGCSKRIIKKVVK

SEQ ID NO: 9376 - protein, 279 aa, Homo sapiens
MVLASLELLREQWIRAKYERQEFIYPEKQEPYSAGYREGFLWKRGRDNGQFLSRKFVLTEREGALKYFNRNDAKEPKAVMKIEHLNATFQPAKIGHPHGLQVTYLKDNSTRNIFIYHEDGKEIVDWFNALRAARFHYLQVAFPGAGDADLVPKLSRNYLKEGYMEKTGPKQTEGFRKRWFTMDDRRLMYFKDPLDAFARGEVFIGSKESGYTVLHGFPPSTQGHHWPHGITIVTPDRKFLFACETESDQREWVAAFQKAVDRPMLPQEYAVEAHFKHKP

SEQ ID NO: 9377 - protein, 80 aa, Homo sapiens
MNGDQNSDVYAQEKQDFVQHFSQIVRVLTEDEMGHPEIGDAIARLKESLALSPGLECDGVISACCNLHLLGSSDSPASAF

SEQ ID NO: 9378 - protein, 91 aa, Homo sapiens
MAPKKRPETQKTSEIVLRPRNKRSRSPLELEPEAKKLCAKGSDHTDMERPQEVMRQRLTVPNETRLPFGEFSRKTFREIGEENMSVLLGRS

SEQ ID NO: 9379 - protein, 97 aa, Homo sapiens
MGVQVETISPGDGRTFPKRGQTCVVHYTDECGSESQTDYISRLCLWCHWAPRHHPTTCHSRLRCGASKTGMTGMASSLSSLFLDLPWRDLVPPDMCT

SEQ ID NO: 9380 - protein, 23 aa, Homo sapiens
MDLSALRVEEVQNVINAMQKILE

SEQ ID NO: 9381 - protein, 53 aa, Homo sapiens
MAVFDLAIPAEQIIFHGGRVCSNRHGLIRKYGLNMCRQCFRQYAKDIGFIKLD

SEQ ID NO: 9382 - protein, 79 aa, Homo sapiens
MAELVPFAVPIESDKTLLVWELSSGPTAEALHVRLGTRHKAVQHQALALNSSKCQELANYYFGFNGCSKRIIKDHYHSL

SEQ ID NO: 9383 - protein, 849 aa, Homo sapiens
MSEERSLSLLAKAVDPRHPNMMTDVVKLLSAVCIVGEESILEEVLEALTSAGEEKKIDRFFCIVEGLRHNSVQLQVACMQLINALVTSPDDLDFRLHIRNEFMRCGLKEILPNLKCIKNDGLDIQLKVFDEHKEEDLFELSHRLEDIRAELDEAYDVYNMVWSTVKETRAEGYFISILQHLLLIRNDYFIRQQYFKLIDECVSQIVLHRDGMDPDFTYRKRLDLDLTQFVDICIDQAKLEEFEEKASELYKKFEKEFTDHQETQAELQKKEAKINELQAELQAFKSQFGALPADCNIPLPPSKEGGTGHSALPPPPPLPSGGGVPPPPPPPPPPPLPGMRMPFSGPVPPPPPLGFLGGQNSPPLPILPFGLKPKKEFKPEISMRRLNWLKIRPHEMTENCFWIKVNENKYENVDLLCKLENTFCCQQKERREEEDIEEKKSIKKKIKELKFLDSKIAQNLSIFLSSFRVPYEEIRMMILEVDETRLAESMIQNLIKHLPDQEQLNSLSQFKSEYSNLCEPEQFVVVMSNVKRLRPRLSAILFKLQFEEQVNNIKPDIMAVSTACEEIKKSKSFSKLLELVLLMGNYMNAGSRNAQTFGFNLSSLCKLKDTKSADQKTTLLHFLVEICEEKYPDILNFVDDLEPLDKASKVSVETLEKNLRQMGRQLQQLEKELETFPPPEDLHDKFVTKMSRFVISAKEQYETLSKLHENMEKLYQSIIGYYAIDVKKVSVEDFLTDLNNFRTTFMQAIKENIKKREAEEKEKRVRIAKELAERERLERQQKKKRLLEMKTEGDETGVMDNLLEALQSGAAFRDRRKRTPMPKDVRQSLSPMSQRPVLKVCNHGNKPYL

SEQ ID NO: 9384 - protein, 857 aa, Homo sapiens
MPSFRGKKIRAAGSAAGSVCRAGAPGRTQVRAGSGPRTRFHRHPQPGHARRQTSCSRRPESADTMWIQVRTMDGRQTHTVDSLSRLTKVEELRRKIQELFHVEPGLQRLFYRGKQMEDGHTLFDYEVRLNDTIQLLVRQSLVLPHSTKERDSELSDTDSGCCLGQSESDKSSTHGEAAAETDSRPADEDMWDETELGLYKVNEYVDARDTNMGAWFEAQVVRVTRKAPSRDEPCSSTSRPALEEDVIYHVKYDDYPENGVVQMNSRDVRARARTIIKWQDLEVGQVVMLNYNPDNPKERGFWYDAEISRKRETRTARELYANVVLGDDSLNDCRIIFVDEVFKIERPGEGSPMVDNPMRRKSGPSCKHCKDDVNRLCRVCACHLCGGRQDPDKQLMCDECDMAFHIYCLDPPLSSVPSEDEWYCPECRNDASEVVLAGERLRESKKKAKMASATSSSQRDWGKGMACVGRTKECTIVPSNHYGPIPGIPVGTMWRFRVQVSESGVHRPHVAGIHGRSNDGAYSLVLAGGYEDDVDHGNFFTYTGSGGRDLSGNKRTAEQSCDQKLTNTNRALALNCFAPINDQEGAEAKDWRSGKPVRVVRNVKGGKNSKYAPAEGNRYDGIYKVVKYWPEKGKSGFLVWRYLLRRDDDEPGPWTKEGKDRIKKLGLTMQYPEGYLEALANREREKENSKREEEEQQEGGFASPRTGKGKWKRKSAGGGPSRAGSPRRTSKKTKVEPYSLTAQQSSLIREDKSNAKLWNEVLASLKDRPASGSPFQLFLSKVEETFQCICCQELVFRPITTVCQHNVCKDCLDRSFRAQVFSCPACRYDLGRSYAMQVNQPLQTVLNQLFPGYGNGR

SEQ ID NO: 9385 - protein, 175 aa, Homo sapiens
LMIKGRKGKVNKMTAKETELQREMHEMAQKTAELQEELSGEKNRLAGELQLLLEEIKSSKDQLKELTLENSELKKSLDCMHKDQVEKEGKVREEIAEYQLRLHEAEKKHQALLLDTNKQYEVEIQTYREKLTSKEECLSSQKLEIDLLKSSKEELNNSLKATTQILEELKKTKEQ

SEQ ID NO: 9386 - protein, 238 aa, Homo sapiens
MAELTALESLIEMGFPRGRAEKALALTGNQGIEAAMDWMLELVAQKQREREEREEREALERERQRRRQGQELSAARQRLQEDEMRRAAEERRREKAEELAARQRVREKIERDKAERAKKYGGSVGSQPPPVAPEPGPVPSSPSQEPPTKREYDQCRIQVRLPDGTSLTQTFRAREQLAAVRLYVELHRGEELGGGQDPVQLLSGFPRRAFSEADMERPLQELGLVPSAVLIVAKKCPS

SEQ ID NO: 9387 - protein, 979 aa, Homo sapiens
MGTRLPLVLRQLRRPPQPPGPPRRLRVPCRASSGGGGGGGGGREGLLGQRRPQDGQARSSCSPGGRTPAARDSIVREVIQNSKEVLSLLQEKNPAFKPVLAIIQAGDDNLMQEINQNLAEEAGLNITHICLPPDSSEAEIIDEILKINEDTRVHGLALQISENLFSNKVLNALKPEKDVDGVTDINLGKLVRGDAHECFVSPVAKAVIELLEKSVGVNLDGKKILVVGAHGSLEAALQCLFQRKGSMTMSIQWKTRQLQSKLHEADIVVLGSPKPEEIPLTWIQPGTTVLNCSHDFLSGKVGCGSPRIHFGGLIEEDDVILLAAALRIQNMVSSGRRWLREQQHRRWRLHCLKLQPLSPVPSDIEISRGQTPKAVDVLAKEIGLLADEIEIYGKSKAKVRLSVLERLKDQADGKYVLVAGITPTPLGEGKSTVTIGLVQALTAHLNVNSFACLRQPSQGPTFGVKGGAAGGGYAQVIPMEEFNLHLTGDIHAITAANNLLAAAIDTRILHENTQTDKALYNRLVPLVNGVREFSEIQLARLKKLGINKTDPSTLTEEEVSKFARLDIDPSTITWQRVLDTNDRFLRKITIGQGNTEKGHYRQAQFDIAVASEIMAVLALTDSLADMKARLGRMVVASDKSGQPVTADDLGVTGALTVLMKDAIKPNLMQTLEGTPVFVHAGPFANIAHGNSSVLADKIALKLVGEEGFVVTEAGFGADIGMEKFFNIKCRASGLVPNVVVLVATVRALKMHGGGPSVTAGVPLKKEYTEENIQLVADGCCNLQKQIQITQLFGVPVVVALNVFKTDTRAEIDLVCELAKRAGAFDAVPCYHWSVGGKGSVDLARAVREAASKRSRFQFLYDVQVPIVDKIRTIAQAVYGAKDIELSPEAQAKIDRYTQQGFGNLPICMAKTHLSLSHQPDKKGVPRDFILPISDVRASIGAGFIYPLVGTMSTMPGLPTRPCFYDIDLDTETEQVKGLF

SEQ ID NO: 9388 - protein, 70 aa, Homo sapiens
MPKAKGKTRRQKFGYSVNRKRLNRNARRKAAPRIECRVARLPRFFAEEEDGGGVTGLHHSCPRLRRPPDQ

SEQ ID NO: 9389 - protein, 681 aa, Homo sapiens
MADPVAGIAGSAAKSVRPFRSSEAYVEAMKEDLAEWLNALYGLGLPGGGDGFLTGLATGTTLCQHANAVTEAARALAAARPARGVAFQAHSVVPGSFMARDNVATFIGWCRVELGVPEVLMFETEDLVLRKNEKSVVLCLLEVARRGARLGLLAPRLVQFEQEIERELRAAPPAPNAPAAGEDTTETAPAPGTPARGPRMTPSDLRNLDELVREILGRCTCPDQFPMIKVSEGKYRVGDSSLLIFVRVLRSHVMVRVGGGWDTLEHYLDKHDPCRCSSTAHRPPQPRVCTFSPQRVSPTTSPRPASPVPGSERRGSRPEMTPVSLRSTKEGPETPPRPRDQLPPHPRSRRYSGDSDSSASSAQSGPLGTRSDDTGTGPRRERPSRRLTTGTPASPRRPPALRSQSRDRLDRGRPRGAPGGRGAQLSVPSPARRARSQSREEQAVLLVRRDRDGQHSWVPRGRGSGGSGRSTPQTPRARSPAAPRLSRVSSPSPELGTTPASIFRTPLQLDPQQEQQLFRRLEEEFLANARALEAVASVTPTGPAPDPARAPDPPAPDSAYCSSSSSSSSLSVLGGKCGQPGDSGRTANGLPGPRSQALSSSSDEGSPCPGMGGPLDAPGSPLACTEPSRTWARGRMDTQPDRKPSRIPTPRGPRRPSGPAELGTWHALHSVTPRAEPDSWM

SEQ ID NO: 9390 - protein, 793 aa, Homo sapiens
MWIQVRTMDGRQTHTVDSLSRLTKVEELRRKIQELFHVEPGLQRLFYRGKQMEDGHTLFDYEVRLNDTIQLLVRQSLVLPHSTKERDSELSDTDSGCCLGQSESDKSSTHGEAAAETDSRPADEDMWDETELGLYKVNEYVDARDTNMGAWFEAQVVRVTRKAPSRDEPCSSTSRPALEEDVIYHVKYDDYPENGVVQMNSRDVRARARTIIKWQDLEVGQVVMLNYNPDNPKERGFWYDAEISRKRETRTARELYANVVLGDDSLNDCRIIFVDEVFKIERPGEGSPMVDNPMRRKSGPSCKHCKDDVNRLCRVCACHLCGGRQDPDKQLMCDECDMAFHIYCLDPPLSSVPSEDEWYCPECRNDASEVVLAGERLRESKKKAKMASATSSSQRDWGKGMACVGRTKECTIVPSNHYGPIPGIPVGTMWRFRVQVSESGVHRPHVAGIHGRSNDGAYSLVLAGGYEDDVDHGNFFTYTGSGGRDLSGNKRTAEQSCDQKLTNTNRALALNCFAPINDQEGAEAKDWRSGKPVRVVRNVKGGKNSKYAPAEGNRYDGIYKVVKYWPEKGKSGFLVWRYLLRRDDDEPGPWTKEGKDRIKKLGLTMQYPEGYLEALANREREKENSKREEEEQQEGGFASPRTGKGKWKRKSAGGGPSRAGSPRRTSKKTKVEPYSLTAQQSSLIREDKSNAKLWNEVLASLKDRPASGSPFQLFLSKVEETFQCICCQELVFRPITTVCQHNVCKDCLDRSFRAQVFSCPACRYDLGRSYAMQVNQPLQTVLNQLFPGYGNGR

SEQ ID NO: 9391 - protein, 156 aa, Homo sapiens
MAPKKRPETQKTSEIVLRPRNKRSRSPLELEPEAKKLCAKGSGPSRRCDSDCLWVGLAGPQILPPCRSIVRTLHQHKLGRASWPSVQQGLQQSFLHTLDSYRILQKAAPFDRRATSLAWHPTHPSTVAVGSKGGDIMLWNFGIKDKPTFIKGHLVL

SEQ ID NO: 9392 - protein, 1447 aa, Homo sapiens
MPKNAAVSNLDIESKLSVYYRAPWHQQRNIFLPATRPPCVEELHRHARQSLQALRREHRSRSDRREQRAAAPLSIAAPPLPAYPPAHSQRRREFKDRHFLTSHPPEDEDTDVMLGQRPKNPIHNIPSTLDKQTNWSKALPLPTPEEKMKQDAQVISSCIIPINVTGVGFDREASIRCSLVHSQSVLQRRRKLRRRKTISGIPRRVQQEIDSDESPVARERNVIVHTNPDPSNTVNRISGTRDSECQTEDILIAAPSRRRIRAQRGQSIAASLSHSAGNISALADKGDTMFTPAVSSRTRSRSLPREGNRGGDAEPKVGAKPSAYEEGESFVGDHERTPNDFSEAPSSPSAQDHQPTLGLACSQHLHSPQHKLSERGRSRLSRMAADSGSCDISSNSDTFGSPIHCISTAGVLLSSHMDQKDDHQSSSGNWSGSSSTCPSQTSETIPPAASPPLTGSSHCDSELSLNTAPHANEDASVFVTEQYNDHLDKVRGHRANSFTSTVADLLDDPNNSNTSDSEWNYLHHHHDASCRQDFSPERPKADSLGCPSFTSMATYDSFLEKSPSDKADTSSHFSVDTEGYYTSMHFDCGLKGNKSYVCHYAALGPENGQGVGASPGLPDCAWQDYLDHKRQGRPSISFRKPKAKPTPPKRSSSLRKSDGNADISEKKEPKISSGQHLPHSSREMKLPLDFANTPSRMENANLPTKQEPSWINQSEQGIKEPQLDASDIPPFKDEVAESTHYADLWLLNDLKTNDPYRSLSNSSTATGTTVIECIKSPESSESQTSQSESRATTPSLPSVDNEFKLASPEKLAGLASPSSGYSSQSETPTSSFPTAFFSGPLSPGGSKRKPKVPERKSSLQQPSLKDGTISLSKDLELPIIPPTHLDLSALHNVLNKPFHHRHPLHVFTHNKQNTVGETLRSNPPPSLAITPTILKSVNLRSINKSEEVKQKEENNTDLPYLEESTLTTAALSPSKIRPHTANKSVSRQYSTEDTILSFLDSSAVEMGPDKLHLEKNSTFDVKNRCDPETITSAGSSLLDSNVTKDQVRTETEPIPENTPTKNCAFPTEGFQRVSAARPNDLDGKIIQYGPGPDETLEQVQKAPSAGLEEVAQPESVDVITSQSDSPTRATDVSNQFKHQFVMSRHHDKVPGTISYESEITSVNSFPEKCSKQENIASGISAKSASDNSKAEETQGNVDEASLKESSPSDDSIISPLSEDSQAEAEGVFVSPNKPRTTEDLFAVIHRSKRKVLGRKDSGDMSVRSKSRAPLSSSSSSASSITSPSSNVTTPNSQRSPGLIYRNAKKSNTSNEEFKLLLLKKGSRSDSSYRMSATEILKSPILPKPPGELTAESPQSTDDAHQGSQGAEALSPLSPCSPRVNAEGFSSKSFATSASARVGRSRAPPAASSSRYSVRCRLYNTPMQAISEGETENSDGSPHDDRSSQSST

SEQ ID NO: 9393 - protein, 770 aa, Homo sapiens
MLQQVNGHNPGSDGQAREYLREDLQEFLGGEVLLYKLDDLTRVNPVTLETVLRCLQARYMADTFYTNAGCTLVALNPFKPVPQLYSPELMREYHAAPQPQKLKPHVFTVGEQTYRNVKSLIEPVNQSIVVSGESGAGKTWTSRCLMKFYAVVATSPASWESHKIAERIEQRILNSNPVMEAFGNACTLRNNNSSRFGKFIQLQLNRAQQMTGAAVQTYLLEKTRVACQASSERNFHIFYQICKGASEDERLQWHLPEGAAFSWLPNPERSLEEDCFEVTREAMLHLGIDTPTQNNIFKVLAGLLHLGNIQFAASEDEAQPCQPMDDAKYSVRTAASLLGLPEDVLLEMVQIRTIRAGRQQQVFRKPCARAECDTRRDCLAKLIYARLFDWLVSVINSSICADTDSWTTFIGLLDVYGFESFPDNSLEQLCINYANEKLQLEACGLVETIHISAAGFPIRVSHRNFVERYKLLRRLHPCTSSGPDSPYPAKGLPEWCPHSEEATLEPLIQDILHTLPVLTQAAAITGDSAEAMPAPMHCGRTKVFMTDSMLELLECGRARVLEQCARCIQGGWRRHRHREQERQWRAVMLIQAAIRSWLTRKHIQRLHAAATVIKRAWQKWRIRMACLAAKELDGVEEKHFSQAPCSLSTSPLQTRLLEAIIRLWPLGLVLANTAMGVGSFQRKLVVWACLQLPRGSPSSYTVQTAQDQAGVTSIRALPQGSIKFHCRKSPLRYADICPEPSPYSITGFNQILLERHRLIHVTSSAFTGLG

SEQ ID NO: 9394 - protein, 749 aa, Homo sapiens
MAEQVLPQALYLSNMRKAVKIRERTPEDIFKPTNGIIHHFKTMHRYTLEMFRTCQFCPQFREIIHKALIDRNIQATLESQKKLNWCREVRKLVALKTNGDGNCLMHATSQYMWGVQDTDLVLRKALFSTLKETDTRNFKFRWQLESLKSQEFVETGLCYDTRNWNDEWDNLIKMASTDTPMARSGLQYNSLEEIHIFVLCNILRRPIIVISDKMLRSLESGSNFAPLKVGGIYLPLHWPAQECYRYPIVLGYDSHHFVPLVTLKDSGPEIRAVPLVNRDRGRFEDLKVHFLTDPENEMKEKLLKEYLMVIEIPVQGWDHGTTHLINAAKLDEANLPKEINLVDDYFELVQHEYKKWQENSEQGRREGHAQNPMEPSVPQLSLMDVKCETPNCPFFMSVNTQPLCHECSERRQKNQNKLPKLNSKPGPEGLPGMALGASRGEAYEPLAWNPEESTGGPHSAPPTAPSPFLFSETTAMKCRSPGCPFTLNVQHNGFCERCHNARQLHASHAPDHTRHLDPGKCQACLQDVTRTFNGICSTCFKRTTAEASSSLSTSLPPSCHQRSKSDPSRLVRSPSPHSCHRAGNDAPAGCLSQAARTPGDRTGTSKCRKAGCVYFGTPENKGFCTLCFIEYRENKHFAAASGKVSPTASRFQNTIPCLGRECGTLGSTMFEGYCQKCFIEAQNQRFHEAKRTEEQLRSSQRRDVPRTTQSTSRPKCARASCKNILACRSEELCMECQHQPEDGPWGPPG

SEQ ID NO: 9395 - protein, 232 aa, Homo sapiens
MEEEASSPGLGCSKPHLEKLTLGITRILESSPGVTEVTIIEKPPAERHMISSWEQKNNCVMPEDVKNFYLMTNGFHMTWSVKLDEHIIPLGSMAINSISKLTQLTQSSMYSLPNAPTLADLEDDTHEASDDQPEKPHFDSRSVIFELDSCNGSGKVCLVYKSGKPALAEDTEIWFLDRALYWHFLTDTFTAYYRLLITHLGLPQWQYAFTSYGISPQAKPKGSEGRSKRGCF

SEQ ID NO: 9396 - protein, 145 aa, Homo sapiens
MSLQVLNDKNVSNEKNTENCDFLFSPPEVTGRSSVLRVSQKENVPPKNLAKAMKVTFQTPLRDPQTHRILSPSMASKLEAPFTQDDTLGLENSHPVWTQKEKAAAFSLSGGHACGAVGSRDPNSREQGESLELCQHLASHKLSRQ

SEQ ID NO: 9397 - protein, 164 aa, Homo sapiens
MNPIVVVHGGGAGPISKDRKERVHQGMVRAATVGYGILREGGSAVDAVEGAVVALEDDPEFNAGCGSVLNTNGEVEMDASIMDGKDLSAGAVSAVQCIANPIKLARLVMEKTPHCFLTDQGAAQFAAAMGVPEIPGEKLVTERNKKRLEKEKHEKGAQKTDCQK

SEQ ID NO: 9398 - protein, 252 aa, Homo sapiens
MGLPVSWAPPALWVLGCCALLLSLWALCTACRRKRARRQRARLQGSATAAEASLLRRTHLCSLSKSDTRLHELHRGPRSSRALRPASMDLLRPHWLEVSRDITGPQAAPSAFPHQELPRALPAAAATAGCAGLEATYSNVGLAALPGVSLAASPVVAEYARVQKRKGTHRSPQEPQQGKTEVTPAAQVDVLYSRVCKPKRRDPGPTTDPLDPKGQGAILALAGDLAYQTLPLRALDVDSGPLENVYESIREL

SEQ ID NO: 9399 - protein, 516 aa, Homo sapiens
CFSEEVTSTELSSGDQSHKMGDNASERDTGESKAGIAASVSILENSSRETSRRQEQHRFSMDLKMPAFHPKQEVPVPGDGVEFPSSTGAEGQTGHPAEKLSDLHNKEHSGGGKRALAPDLMPLDLSARSTRDDPSNKETASSLQAALVVHPCPYCSHKTYYPEVLWMHKRIWHRVSCNSVAPPWIQPNGYKSIRSNLVFLSRSGRTGPPPALGGKECQPLLLARFTRTQVPGGMPGSKSGSSPLGVVTKAASMPKNKESHSGGPCALWAPGPDGYRQTKPCHGQEPHGAATQGPLAKPRQEASSKPVPAPGGGGFSRSATPTPTVIARAGAQPSANSKPVEKFGVPPAGAGFAPTNKHSAPDSLKAKFSAQPQGPPPAKGEGGAPPLPPREPPSKAAQELRTLATCAAGSRGDAALQAQPGVAGAPPVLHSIKQEPVAEGHEKRLDILNIFKTYIPKDFATLYQGWGVSGPGLEHRGTLRTQARPGEFVCIECGKSFHQPGHLRAHMRAHSGERPF

SEQ ID NO: 9400 - protein, 403 aa, Homo sapiens
MSGRVGDLSPRQKEALAKFRENVQDVLPALPNPDDYFLLRWLRARSFDLQKSEAMLRKHVEFRKQKDIDNIISWQPPEVIQQYLSGGMCGYDLDGCPVWYDIIGPLDAKGLLFSASKQDLLRTKMRECELLLQECAHQTTKLGRKVETITIIYDCEGLGLKHLWKPAVEAYGEFLCMFEENYPETLKRLFVVKAPKLFPVAYNLIKPFLSEDTRKKIMVLGANWKEVLLKHISPDQVPVEYGGTMTDPDGNPKCKSKINYGGDIPRKYYVRDQVKQQYEHSVQISRGSSHQVEYEILFPGCVLRWQFMSDGADVGFGIFLKTKMGERQRAGEMTEVLPNQRYNSHLVPEDGTLTCSDPGIYVLRFDNTYSFIHAKKVNFTVEVLLPDKASEEKMKQLGAGTPK

SEQ ID NO: 9401 - protein, 549 aa, Homo sapiens
MHSMISSVDVKSEVPVGLEPISPLDLRTDLRMMMPVVDPVVREKQLQQELLLIQQQQQIQKQLLIAEFQKQHENLTRQHQAQLQEHIKLQQELLAIKQQQELLEKEQKLEQQRQEQEVERHRREQQLPPLRGKDRGRERAVASTEVKQKLQEFLLSKSATKDTPTNGKNHSVSRHPKLWYTAAHHTSLDQSSPPLSGTSPSYKYTLPGAQDAKDDFPLRKTESSVSSSSPGSGPSSPNNGPTGSVTENETSVLPPTPHAEQMVSQQRILIHEDSMNLLSLYTSPSLPNITLGLPAVPSQLNASNSLKEKQKCETQTLRQGVPLPGQYGGSIPASSSHPHVTLEGKPPNSSHQALLQHLLLKEQMRQQKLLVAGGVPLHPQSPLATKERISPGIRGTHKLPRHRPLNRTQSAPLPQSTLAQLVIQQQHQQFLEKQKQYQQQIHMNKLLSKSIEQLKQPGSHLEEAEEELQGDQAMQEDRAPSSGNSTRSDSSACVDDTLGQVGAVKVKEEPVDSDEDAQIQEMESGEQAAFMQQVIGKDLAPGFVIKVII

SEQ ID NO: 9402 - protein, 291 aa, Homo sapiens [sequence omitted]

SEQ ID NO: 9403 - protein, 293 aa, Homo sapiens; identical to SEQ ID NO: 5967

SEQ ID NO: 9404 - protein, 133 aa, Homo sapiens [sequence omitted]

SEQ ID NO: 9405 - protein, 385 aa, Homo sapiens
MARENGESSSSWKKQAEDIKKIFEFKETLGTGAFSEVVLAEEKATGKLFAVKCIPKKALKGKESSIENEIAVLRKIKHENIVALEDIYESPNHLYLVMQLVSGGELFDRIVEKGFYTEKDASTLIRQVLDAVYYLHRMGIVHRDLKPENLLYYSQDEESKIMISDFGLSKMEGKGDVMSTACGTPGYVAPEVLAQKPYSKAVDCWSIGVIAYILLCGYPPFYDENDSKLFEQILKAEYEFDSPYWDDISDSAKDFIRNLMEKDPNKRYTCEQAARHPWIAGDTALNKNIHESVSAQIRKNFAKSKWRQAFNATAVVRHMRKLHLGSSLDSSNASVSSSLSLASQKDCLAPSTLCSFISSSSGVSGVGAERRPRPTTVTAVHSGSK

SEQ ID NO: 9406 - protein, 454 aa, Homo sapiens
LDFFRVVENQQPPATMPLNVSFTNRNYDLDYDSVQPYFYCDEEENFYQQQQQSELQPPAPSEDIWKKFELLPTPPLSPSRRSGLCSPSYVAVTPFSLRGDNDGGGGSFSTADQLEMVTELLGGDMVNQSFICDPDDETFIKNIIIQDCMWSGFSAAAKLVSEKLASYQAARKDSGSPNPARGHSVCSTSSLYLQDLSAAASECIDPSVVFPYPLNDSSSPKSCASQDSSAFSPSSDSLLSSTESSPQGSPEPLVLHEETPPTTSSDSEEEQEDEEEIDVVSVEKRQAPGKRSESGSPSAGGHSKPPHSPLVLKRCHVSTHQHNYAAPPSTRKDYPAAKRVKLDSVRVLRQISNNRKCTSPRSSDTEENVKRRTHNVLERQRRNELKRSFFALRDQIPELENNEKAPKVVILKKATAYILSVQAEEQKLISEEDLLRKRREQLKHKLEQLRNSCA

SEQ ID NO: 9407 - protein, 384 aa, Homo sapiens
APTKAPDVFPIISGCRHPKDNSPVVLACLITGYHPTSVTVTWYMGTQSQPQRTFPEIQRRDSYYMTSSQLSTPLQQWRQGEYKCVVQHTASKSKKEIFRWPESPKAQASSVPTAQPQAEGSLAKATTAPATTRNTGRGGEEKKKEKEKEEQEERETKTPECPSHTQPLGVYLLTPAVQDLWLRDKATFTCFVVGSDLKDAHLTWEVAGKVPTGGVEEGLLERHSNGSQSQHSRLTLPRSLWNAGTSVTCTLNHPSLPPQRLMALREPAAQAPVKLSLNLLASSDPPEAASWLLCEVSGFSPPNILLMWLEDQREVNTSGFAPARPPPQPRSTTFWAWSVLRVPAPPSPQPATYTCVVSHEDSRTLLNASRSLEVSYVTDHGPMK

SEQ ID NO: 9408 - protein, 251 aa, Homo sapiens
MAELVPFAVPIESDKTLLVWELSSGPTAEALHHSLFTAFSQFGLLYSVRVFPNAAVAHPGFYAVIKFYSARAAHRAQKACDRKQLFQKSPVKVRLGTRHKAVQHQALALNSSKCQELANYYFGFNGCSKRIIKLQELSDLEERENEDSMVPLPKQSLKFFCALEVVLPSCDCRSPGIGLVEEPMDKVEEESGKIAVEYRPSEDIVGVRCEEELHGLIQVPCSPWKQYGQEEEGYLSDFSLEEEEFRLPELD

SEQ ID NO: 9409 - protein, 387 aa, Homo sapiens
MADLEAVLADVSYLMAMEKSKATPAARASKRIVLPEPSIRSVMQKYLAERNEITFDKIFNQKIGFLLFKDFCLNEINEAVPQVKFYEEIKEYEKLDNEEDRLCRSRQIYDAYIMKELLSCSHPFSKQAVEHVQSHLSKKQVTSTLFQPYIEEICESLRGDIFQKFMESDKFTRFCQWKNVELNIHLTMNEFSVHRIIGRGGFGEVYGCRKADTGKMYAMKCLDKKRIKMKQGETLALNERIMLSLVSTGDCPFIVCMTYAFHTPDKLCFILDLMNGGDLHYHLSQHGVFSEKEMRFYATEIILGLEHMHNRFVVYRDLKPANILLDEHGHARISDLGLACDFSKKKPHASVGTHGYMAPEVLQKGTAYDSSADWFSLGCMLFKLLRG

SEQ ID NO: 9410 - protein, 479 aa, Homo sapiens
ESDEALGPTMMSWNAVEKLCAKSANAIETKGFNKKDLELALSPIHNSSALPTTGRSCVNLAKKCFSGEVSWEAVELDVNNINMDTDTSQLGFHQSNQWAVDSGGISEEHLGKRSLKRNFELVDSSPCKKIIQNKKTCVEYKHNEMTNCYTNQNTGLTVEVQDLKLSVHKSQQNDCANKENIVNSFTDKQQTPEKLPIPMIAKNLMCELDEDCEKNSKRDYLSSSFLCSDDDRASKNISMNSDSSFPGISIMESPLESQPLDSDRSIKESSFEESNIEDPLIVTPDCQEKTSPKGVENPAVQESNQKMLGPPLEVLKTLASKRNAVAFRSFNSHINASNNSEPSRMNMTSLDAMDISCAYSGSYPMAITPTQKRRSCMPHQQTPNQIKSGTPYRTPKSVRRGVAPVDDGRILGTPDYLAPELLLGRAHELKRHPLFSDVDWENLQHQTMPFIPQPDDETDTSYFEARNTAQHLTVSGFSL

SEQ ID NO: 9411 - protein, 75 aa, Homo sapiens
FDFIHDVNKKHKEFVGNWNKNAVHVNLFETPVEAQYVRLYPTSCHTACTLRFELLGCELNARKADLRRGADDREQ

SEQ ID NO: 9412 - protein, 141 aa, Homo sapiens
MTTSGALFPSLVPGSRGASNKYLVEFRAGKMSLKGTTVTPDKRKGLVYIQQTDDSLIHFCWKDRTSGNVEDEPKTDQDEEHCRKVNEYLNNPPMPGALGASGSSGHELSALGGEGGLQSLLGNMSHSQLMQLIGPAGLGGL

SEQ ID NO: 9413 - protein, 2366 aa, Homo sapiens [sequence omitted]

SEQ ID NO: 9414 - protein, 1182 aa, Homo sapiens
MPENPATDKLQVLQVLDRLKMKLQEKGDTSQNEKLSMFYETLKSPLFNQILTLQQSIKQLKGQLNHIPSDCSANFDFSRKGLLVFTDGSITNGNVHRPSNNSTVSGLFPWTPKLGNEDFNSVIQQMAQGRQIEYIDIERPSTGGLGFSVVALRSQNLGKVDIFVKDVQPGSVADRDQRLKENDQILAINHTPLDQNISHQQAIALLQQTTGSLRLIVAREPVHTKSSTSSSLNDTTLPETVCWGHVEEVELINDGSGLGFGIVGGKTSGVVVRTIVPGGLADRDGRLQTGDHILKIGGTNVQGMTSEQVAQVLRNCGNSVRMLVARDPAGDISVTPPAPAALPVALPTVASKGPGSDSSLFETYNVELVRKDGQSLGIRIVGYVGTSHTGEASGIYVKSIIPGSAAYHNGHIQVNDKIVAVDGVNIQGFANHDVVEVLRNAGQVVHLTLVRRKTSSSTSPLEPPSDRGTVVEPLKPPALFLTGAVETETNVDGEDEEIKERIDTLKNDNIQALEKLEKVPDSPENELKSRWENLLGPDYEVMVATLDTQIADDAELQKYSKLLPIHTLRLGVEVDSFDGHHYISSIVSGGPVDTLGLLQPEDELLEVNGMQLYGKSRREAVSFLKEVPPPFTLVCCRRLFDDEASVDEPRRTETSLPETEVDHNMDVNTEEDDDGELALWSPEVKIVELVKDCKGLGFSILDYQDPLDPTRSVIVIRSLVADGVAERSGGLLPGDRLVSVNEYCLDNTSLAEAVEILKAVPPGLVHLGICKPLVEDNEEESCYILHSSSNEDKTEFSGTIHDINSSLILEAPKGFRDEPYFKEELVDEPFLDLGKSFHSQQKEIEQSKEAWEMHEFLTPRLQEMDEEREILVDEEYELYQDPSPSMELYPLSHIQEATPVPSVNELHFGTQWLHDNEPSESQEARTGRTVYSQEAQPYGYCPENVMKENFVMESLPSVPSTEGNSQQGRFDDLENLNSLAKTSLDLGMIPNDVQGPSLLIDLPVVAQRREQEDLPLYQHQATRVISKASAYTGMLSSRYATDTCELPEREEGEGEETPNFSHWGPPRIVEIFREPNVSLGISIVGGQTVIKRLKNGEELKGIFIKQVLEDSPAGKTNALKTGDKILEASGVDKELCNQFVSPAEGRKIATWEVCSEPSSCHSTPAWVTEQDSVSKKKKNHEG

SEQ ID NO: 9415 - protein, 426 aa, Homo sapiens
MGKEKTHINIVVIGHVDSGKSTTTGHLIYKCGGIDKRTIEKFEKEAAEMGKGSFKYAWVLDKLKAERERGITIDISLWKFETSKYYVTIIDAPGHRDFIKNMITGTSQADCAVLIVAAGVGEFEAGISKNGQTREHALLAYTLGVKQLIVGVNKMDSTEPPYSQKRYEEIVKEVSTYIKKIGYNPDTVAFVPISGWNGDNMLEPSANMPWFKGWKVTRKDGNASGTTLLEALDCILPPTRPTDKPLRLPLQDVYKIGGIGTVPVPSGDWCSPGMVVTFAPVNVTTEVKSVEMHHEALSEALPGDNVGFNVKNVSVKDVRRGNVAGDSKNDPPMEAAGFTAQVIILNHPGQISAGYAPVLDCHTAHIACKFAELKEKIDRRSGKKLEDGPKFLKSGDAAIVDMVPGKPMCVESFSDYPPLGKSLCCS

SEQ ID NO: 9416 - protein, 82 aa, Homo sapiens
FELDSCNGSGKVCLVYKSGKPALAEDTEIWFLDRALYWHFLTDTFTAYYRLLITHLGLPQWQYAFTSYGISPQAKVIKHNRL

SEQ ID NO: 9417 - protein, 691 aa, Homo sapiens
MSEERSLSLLAKAVDPRHPNMMTDVVKLLSAVCIVGEESILEEVLEALTSAGEEKKIDRFFCIVEGLRHNSVQLQVACMQLINALVTSPDDLDFRLHIRNEFMRCGLKEILPNLKCIKNDGLDIQLKVFDEHKEEDLFELSHRLEDIRAELDEAYDVYNMVWSTVKETRAEGYFISILQHLLLIRNDYFIRQQYFKLIDECVSQIVLHRDGMDPDFTYRKRLDLDLTQFVDICIDQAKLEEFEEKASELYKKFEKEFTDHQETQAELQKKEAKINELQAELQAFKSQFGALPADCNIPLPPSKEGGTGHSALPPPPPLPSGGGVPPPPPPPPPPPLPGMRMPFSGPVPPPPPLGFLGGQNSPPLPILPFGLKPKKEFKPEISMRRLNWLKIRPHEMTENCFWIKVNENKYENVDLLCKLENTFCCQQKERREEEDIEEKKSIKKKIKELKFLDSKIAQNLSIFLSSFRVPYEEIRMMILEVDETRLAESMIQNLIKHLPDQEQLNSLSQFKSEYSNLCEPEQFVVVMSNVKRLRPRLSAILFKLQFEEQVNNIKPDIMAVSTACEEIKKSKSFSKLLELVLLMGNYMNAGSRNAQTFGFNLSSLCKLKDTKSADQKTTLLHFLVEICEEKYPDILNFVDDLEPLDKASKGLCLFKKHFMALIFSAKRLKIIPFICMYFPLSHSVFIPNISF

SEQ ID NO: 9418 - protein, 178 aa, Homo sapiens
MGRRPARCYRYCKNKPYPKSRFCRGVPALEAARICANKYMVKSCGKDGFHIRVRLHPFHVIRINKMLSCAGADRLQTGMRGAFGKPQGTVARVHIGQVIMSIRTKLQNKEHVIEALRRAKFKFPGRQKIHISKKWGFTKFNADEFEDMVAEKRLIPDGCGVKYIPSRGPLDKWRALHS

SEQ ID NO: 9419 - protein, 103 aa, Homo sapiens [sequence omitted]

SEQ ID NO: 9420 - protein, 568 aa, Homo sapiens [sequence omitted]

SEQ ID NO: 9421 - protein, 1419 aa, Homo sapiens
MEGTHCTLQLHKPITELCYISFCLPKGEVRGFSYKGTVTLDRSNKGFHNCYQVREESDIISLSQEPDEHPGDIFFKQTPTKDILTELYKLTTERERLLTNLLSSDHILGITMGNQEGKLQELSVSLAPEDDCFQSAGDWQGELPVGPLNKRSTHGNKKPRRSSGRRESFGALPQKRTKRKGRGGRESAPLMGKDKICSSHSLPLSRTRPNLWVLEEKGNLLPNGALACSLQRRESCPPDIPKTPDTDLGFGSFETAFKDTGLGREVLPPDCSSTEAGGDGIRRPPSGLEHQQTGLSESHQDPEKHPEAEKDEMEKPAKRTCKQKPVSKVVAKVQDLSSQVQRVVKTHSKGKETIAIRPAAHAEFVPKADLLTLPGAEAGAHGSRRQGKERQGDRSSQSPAGETASISSVSASAEGAVNKVPLKVIESEKLDEAPEGKRLGFPVHTSVPHTRPETRNKRRAGLPLGGHKSLFLDLPHKVGPDSSQPRGDKKKPSPPAPAALGKVFNNSASQSSTHKQTSPVPSPLSPRLPSPQQHHRILRLPALPGEREAALNDSPCRKSRVFSGCVSADTLEPPSSAKVTETKGASPAFLRAGQPRLVPGETLEKSLGPGKTTAEPQHQSPPGISSEGFPWDGFNEQTPKDLPNRDGGAWVLGYRAGPACPFLLHEEREKSNRSELYLDLHPDHSLTEQDDRTPGRLQAVWPPPKTKDTEEKVGLKYTEAEYQAAILHLKREHKEEIENLQAQFELRAFHIRGEHAMITARLEETIENLKHELEHRWRGGCEERKDVCISTDDDCPPKTFRNVCVQTDRETFLKPCESESKTTRSNQLVPKKLNISSLSQLSPPNDHKDIHAALQPMEGMASNQQKALPPPPASIPPPPPLPSGLGSLSPAPPMPPVSAGPPLPPPPPPPPPLPPPSSAGPPPPPPPPPLPNSPAPPNPGGPPPAPPPPGLAPPPPPGLFFGLGSSSSQCPRKPAIEPSCPMKPLYWTRIQISDRSQNATPTLWDSLEEPDIRDPSEFEYLFSKDTTQQKKKPLSETYEKKNKVKKIIKLLDGKRSQTVGILISSLHLEMKDIQQAIFNVDDSVVDLETLAALYENRAQEDELVKIRKYYETSKEEELKLLDKPEQFLHELAQIPNFAERAQCIIFRSVFSEGITSLHRKVEIITRASKDLLHVKSVKDILALILAFGNYMNGGNRTRGQADGYSLEILPKLKDVKSRDNGINLVDYVVKYYLRYYDQEAGTEKSVFPLPEPQDFFLASQVKFEDLIKDLRKLKRQLEASEKQMVVVCKESPKEYLQPFKDKLEEFFQKAKKEHKMEESHLENAQKSFETTVRYFGMKPKSGEKEITPSYVFMVWYEFCSDFKTIWKRESKNISKERLKMAQESVSKLTSEKKVETKKINPTASLKERLRQKEASVTTN

SEQ ID NO: 9422 - protein, 126 aa, Homo sapiens
MPDPAKSAPAPKKGSKKAVTKAQKKDGKKRKRSRKESYSVYVYKVLKQVHPDTGISSKAMGIMNSFVNDIFERIAGEASRLAHYNKRSTITSREIQTAVRLLLPGELAKHAVSEGTKAVTKYTSSK

SEQ ID NO: 9423 - protein, 116 aa, Homo sapiens
MGVQVETISPGDGRTFPKRGQTCVVHYTGCGQFWPSCSRISSTFLFQIMETWRDPSIEGNDFHWKEEKGVLRISHVIPVPISRGPKSGPSHSGPGQSLTQDASPASPGNSHFPTTR

SEQ ID NO: 9424 - protein, 66 aa, Homo sapiens
MNKLQPGSVPKINRSMQNWHQLENLSNFIKAMVSYGMNPVDLFEANDLFESGNMTQVQVSLLALAG

SEQ ID NO: 9425 - protein, 93 aa, Homo sapiens
MAPKKRPETQKTSEIVLRPRNKRSRSPLELEPEAKKLCAKGSGPSRRCDSDCLWVGLAGPQILPPCRSIVRTLHQHKLGRASWPSVQQGLQQS

SEQ ID NO: 9426 - protein, 126 aa, Homo sapiens
MPDPSKSAPAPKKGSKKAVTKAQKKDGKKRKRGRKESYSIYVYKVLKQVHPDTGISSKAMGIMNSFVNDIFERIASEASRLAHYNKRSTITSREVQTAVRLLLPGELAKHAVSEGTKAVTKYTSSK

SEQ ID NO: 9427 - protein, 261 aa, Homo sapiens
MHLLVPPPQHSLFTAFSQFGLLYSVRVFPNAAVAHPGFYAVIKFYSARAAHRAQKACDRKQLFQKSPVKVRLGTRHKAVQHQALALNSSKCQELANYYFGFNGCSKRIIKLQELSDLEERENEDSMVPLPKQSLKFFCALEVVLPSCDCRSPGIGLVEEPMDKVEEGPLSFLMKRKTAQKLAIQKALSDAFQKLLIVVLESGKIAVEYRPSEDIVGVRCEEELHGLIQVPCSPWKQYGQEEEGYLSDFSLEEEEFRLPELD

SEQ ID NO: 9428 - protein, 845 aa, Homo sapiens; identical to SEQ ID NO: 5795

SEQ ID NO: 9429 - protein, 181 aa, Homo sapiens
MRRLLPSRCGRASCAWPGLLPNGGASERQFEEESEEEPECLEIDFKSRTLSVRRFGLQIEKPRCQKMKDWSKIRKLGLYQLAMDIIIMIRVCKMFRQGLRGFREYQIIETAHWKHPIFSFWDKKMQSRVTFDTMDFIAEEGHFPPKAIQIMQKKPSWRTEDEIQAVCNILQVLDSYRNYAE

SEQ ID NO: 9430 - protein, 54 aa, Homo sapiens
MGDVKESKMQITPETPGRIPVLNPFESPSDYSNLHEQTLASPSVFKSTKLPALT

SEQ ID NO: 9431 - protein, 338 aa, Homo sapiens
MAALRDAEIQKDVQTYYGQVLKRSADLQTNGCVTTARPVPKHIREALQNVHEEVALRYYGCGLVIPEHLENCWILDLGSGSGRDCYVLSQLVGEKGHVTGIDMTKGQVEVAEKYLDYHMEKYGFQASNVTFIHGYIEKLGEAGIKNESHDIVVSNCVINLVPDKQQVLQEAYRVLKHGGELYFSDVYTSLELPEEIRTHKVLWGECLGGALYWKELAVLAQKIGFCPPRLVTANLITIQNKELERVIGDCRFVSATFRLFKHSKTGPTKRCQVIYNGGITGHEKELMFDANFTFKEGEIVEVDEETAAILKNSRFAQDFLIRPIGEKLPTSGAVLLWS

SEQ ID NO: 9432 - protein, 109 aa, Homo sapiens
MLLPNILLTGTPGVGKTTLGKELASKSGLKYINVGDLAREEQLYDGYDEEYDCPILDEDRVVDELDNQMREGGVIVDYHGCDFFPERWFHIVFVLRTDTNVLYERLETR

SEQ ID NO: 9433 - protein, 231 aa, Homo sapiens
MPKAKGKTRRQKFGYSVNRKRLNRNARRKAAPRIECSHIRHAWDHAKSVRQNLAEMGLAVDPNRAVPLRKRKVKAMEVDIEERPKELVRKPYVLNDLEAEASLPEKKGNTLSRDLIDYVRYMVENHGEDYKSGKTSSILCRRGRWRWSDWFTSQLPQAEASPGPVKLEPGCKARRCCVAPEELARSHGIRRLHTHVHTPRSGEGTVLRGSNLYSSGGSRKSQNLLFSGWVM

SEQ ID NO: 9434 - protein, 103 aa, Homo sapiens [sequence omitted]

SEQ ID NO: 9435 - protein, 132 aa, Homo sapiens
MASQNRDPAATSVAAARKGAEPSGGAARGPVGKRLQQELMTLMAVGSIRTSSTVCLLSGPRETQDSSKPLVWGLGWDMRLLLELTLQLFLQMPEPNIDSPLNTHAAELWKNPTAFKKYLQETYSKQVTSQEP

SEQ ID NO: 9436 - protein, 970 aa, Homo sapiens
MLQQVNGHNPGSDGQAREYLREDLQEFLGGEVLLYKLDDLTRVNPVTLETVLRCLQARYMADTFYTNAGCTLVALNPFKPVPQLYSPELMREYHAAPQPQKLKPHVFTVGEQTYRNVKSLIEPVNQSIVVSGESGAGKTWTSRCLMKFYAVVATSPASWESHKIAERIEQRILNSNPVMEAFGNACTLRNNNSSRFGKFIQLQLNRAQQMTGAAVQTYLLEKTRVACQASSERNFHIFYQICKGASEDERLQWHLPEGAAFSWLPNPERSLEEDCFEVTREAMLHLGIDTPTQNNIFKVLAGLLHLGNIQFAASEDEAQPCQPMDDAKYSVRTAASLLGLPEDVLLEMVQIRTIRAGRQQQVFRKPCARAECDTRRDCLAKLIYARLFDWLVSVINSSICADTDSWTTFIGLLDVYGFESFPDNSLEQLCINYANEKLQQHFVAHYLRAQQEEYAVEGLEWSFINYQDNQPCLDLIEGSPISICSLINEECRLNRPSSAAQLQTRIETALAGSPCLGHNKLSREPSFIVVHYAGPVRYHTAGLVEKNKDPIPPELTRLLQQSQDPLLMGLFPTNPKEKTQEEPPGQSRAPVLTVVSKFKASLEQLLQVLHSTTPHYIRCIKPNSQGQAQTFLQEEVLSQLEACGLVETIHISAAGFPIRVSHRNFVERYKLLRRLHPCTSSGPDSPYPAKGLPEWCPHSEEATLEPLIQDILHTLPVLTQAAAITGDSAEAMPAPMHCGRTKVFMTDSMLELLECGRARVLEQCARCIQGGWRRHRHREQERQWRAVMLIQAAIRSWLTRKHIQRLHAAATVIKRAWQKWRIRMACLAAKELDGVEEKHFSQAPCSLSTSPLQTRLLEAIIRLWPLGLVLANTAMGVGSFQRKLVVWACLQLPRGSPSSYTVQTAQDQAGVTSIRALPQGSIKFHCRKSPLRYADICPEPSPYSITGFNQILLERHRLIHVTSSAFTGLG

SEQ ID NO: 9437 - protein, 913 aa, Homo sapiens
MQSRRARPRREVIQNSKEVLSLLQEKNPAFKPVLAIIQAGDDNLMQEINQNLAEEAGLNITHICLPPDSSEAEIIDEILKINEDTRVHGLALQISENLFSNKVLNALKPEKDVDGVTDINLGKLVRGDAHECFVSPVAKAVIELLEKSVGVNLDGKKILVVGAHGSLEAALQCLFQRKGSMTMSIQWKTRQLQSKLHEADIVVLGSPKPEEIPLTWIQPGTTVLNCSHDFLSGKVGCGSPRIHFGGLIEEDDVILLAAALRIQNMVSSGRRWLREQQHRRWRLHCLKLQPLSPVPSDIEISRGQTPKAVDVLAKEIGLLADEIEIYGKSKAKVRLSVLERLKDQADGKYVLVAGITPTPLGEGKSTVTIGLVQALTAHLNVNSFACLRQPSQGPTFGVKGGAAGGGYAQVIPMEEFNLHLTGDIHAITAANNLLAAAIDTRILHENTQTDKALYNRLVPLVNGVREFSEIQLARLKKLGINKTDPSTLTEEEVSKFARLDIDPSTITWQRVLDTNDRFLRKITIGQGNTEKGHYRQAQFDIAVASEIMAVLALTDSLADMKARLGRMVVASDKSGQPVTADDLGVTGALTVLMKDAIKPNLMQTLEGTPVFVHAGPFANIAHGNSSVLADKIALKLVGEEGFVVTEAGFGADIGMEKFFNIKCRASGLVPNVVVLVATVRALKMHGGGPSVTAGVPLKKEYTEENIQLVADGCCNLQKQIQITQLFGVPVVVALNVFKTDTRAEIDLVCELAKRAGAFDAVPCYHWSVGGKGSVDLARAVREAASKRSRFQFLYDVQVPIVDKIRTIAQAVYGAKDIELSPEAQAKIDRYTQQGFGNLPICMAKTHLSLSHQPDKKGVPRDFILPISDVRASIGAGFIYPLVGTMSTMPGLPTRPCFYDIDLDTETEQVKGLF

SEQ ID NO: 9438 - protein, 214 aa, Homo sapiens
MAEQVLPQALYLSNMRKAVKIRERTPEDIFKPTNGIIHHFKTMHRYTLEMFRTCQFCPQFREIIHKALIDRNIQATLESQKKLNWCREVRKLVALKTNGDGNCLMHATSQYMWGVQDTDLVLRKALFSTLKETDTRNFKFRWQLESLKSQEFVETGLCYDTRNWNDEWDNLIKWLPQTHPWPEVDFSTTHWKKYTYLSFATSSEGQSLSFQTKC

SEQ ID NO: 9439 - protein, 274 aa, Homo sapiens
MPLSRWLRSVGVFLLPAPYWAPRERWLGSLRRPSLVHGYPVLAWHSARCWCQAWTEEPRALCSSLRMNGDQNSDVYAQEKQDFVQHFSQIVRVLTEDEMGHPEIGDAIARLKEVLEYNAIGGKYNRGLTVVVAFRELVEPRKQDADSLQRAWTVGWCVELLQAFFLVADDIMDSSLTRRGQICWYQKPGVGLDAINDANLLEACIYRLLKLYCREQPYYLNLIELFLQSSYQTEIGQTLDLLTAPQGNVDLVRFTEKRYKSIVKYKTAFYSFYL

SEQ ID NO: 9440 - protein, 971 aa, Homo sapiens
MGGMGTPGDLHAACPSTTRRDALCLGPEFEFDLRHSAGCPGDLGFFPLDPDTEAGGSGCLPTWLPLRRLARGRLEVTADLAERRRIRSAIRELQRQELEREEEALASKRFRAERQDNKENWLHSQQREAEQRAALARLAGQLESMNDVEELTALLRSAGEYEERKLIRAAIRRVRAQEIEAATLAGRLYSGRPNSGSREDSKGLAAHRLEQCEVPEREEQEQQAEVSKPTPTPEGTSQDVTTVTLLLRAPPGSTSSSPASPSSSPTPASPEPPLEPAEAQCLTAEVPGSPEPPPSPPKTTSPEPQESPTLPSTEGQVVNKLLSGPKETPAAQSPTRGPSDTKRADVAGPRPCQRSLSVLSPRQPAQNRESTPLASGPSSFQRAGSVRDRVHKFTSDSPMAARLQDGTPQAALSPLTPARLLGPSLTSTTPASSSSGSSSRGPSDTSSRFSKEQRGVAQPLAQLRSCPQEEGPRGRGLAARPLENRAGGPVARSEEPGAPLPVAVGTAEPGGSMKTTFTIEIKDGRGQASTGRVLLPTGNQRAELTLGLRAPPTLLSTSSGGKSTITRVNSPGTLARLGSVTHVTSFSHAPPSSRGGCSIKMEAEPAEPLAAAVEAANGAEQTRVNKAPEGRSPLSAEELMTIEDEGVLDKMLDQSTDFEERKLIRAALRELRQRKRDQRDKERERRLQEARGRPGEGRGNTATETTTRHSQRAADGSAVSTVTKTERLVHSNDGTRTARTTTVESSFVRRSENGSGSTMMQTKTFSSSSSSKKMGSIFDREDQASPRAGSLAALEKRQAEKKKELMKAQSLPKTSASQARKAMIEKLEKEGAAGSPGGPRAAVQRSTSFGVPNANSIKQMLLDWCRAKTRGYEHVDIQNFSSSWSDGMAFCALVHNFFPEAFDYGQLSPQNRRQNFEVAFSSAETHADCPQLLDTEDMVRLREPDWKCVYTYIQEFYRCLVQKGLVKTKKS

SEQ ID NO: 9441 - protein, 441 aa, Homo sapiens
MGKEKTHINIVVIGHVDSGKSTTTGHLIYKCGGIDKRTIEKFEKEAAEMGKGSFKYAWVLDKLKAERERGITIDISLWKFETSKYYVTIIDAPGHRDFIKNMITGTSQADCAVLIVAAGVGEFEAGISKNGQTREHALLAYTQKRYEEIVKEVSTYIKKIGYNPDTVAFVPISGWNGDNMLEPSANMPWFKGWKVTRKDGNASGTTLLEALDCILPPTRPTDKPLRLPLQDVYKIGGIGTVPVGRVETGVLKPGMVVTFAPVNVTTEVKSVEMHHEALSEALPGDNVGFNVKNVSVKDVRRGNVAGDSKNDPPMEAAGFTAQVIILNHPGQISAGYAPVLDCHTAHIACKFAELKEKIDRRSGKKLEDGPKFLKSGDAAIVDMVPGKPMCVESFSDYPPLGRFAVRDMRQTVAVGVIKAVDKKAAGAGKVTKSAQKAQKAK

SEQ ID NO: 9442 - protein, 806 aa, Homo sapiens
MGVFAVPPLSADTMWIQVRTMDGRQTHTVDSLSRLTKVEELRRKIQELFHVEPGLQRLFYRGKQMEDGHTLFDYEVRLNDTIQLLVRQSLVLPHSTKERDSELSDTDSGCCLGQSESDKSSTHGEAAAETDSRPADEDMWDETELGLYKVNEYVDARDTNMGAWFEAQVVRVTRKAPSRDEPCSSTSRPALEEDVIYHVKYDDYPENGVVQMNSRDVRARARTIIKWQDLEVGQVVMLNYNPDNPKERGFWYDAEISRKRETRTARELYANVVLGDDSLNDCRIIFVDEVFKIERPGEGSPMVDNPMRRKSGPSCKHCKDDVNRLCRVCACHLCGGRQDPDKQLMCDECDMAFHIYCLDPPLSSVPSEDEWYCPECRNDASEVVLAGERLRESKKKAKMASATSSSQRDWGKGMACVGRTKECTIVPSNHYGPIPGIPVGTMWRFRVQVSESGVHRPHVAGIHGRSNDGAYSLVLAGGYEDDVDHGNFFTYTGSGGRDLSGNKRTAEQSCDQKLTNTNRALALNCFAPINDQEGAEAKDWRSGKPVRVVRNVKGGKNSKYAPAEGNRYDGIYKVVKYWPEKGKSGFLVWRYLLRRDDDEPGPWTKEGKDRIKKLGLTMQYPEGYLEALANREREKENSKREEEEQQEGGFASPRTGKGKWKRKSAGGGPSRAGSPRRTSKKTKVEPYSLTAQQSSLIREDKSNAKLWNEVLASLKDRPASGSPFQLFLSKVEETFQCICCQELVFRPITTVCQHNVCKDCLDRSFRAQVFSCPACRYDLGRSYAMQVNQPLQTVLNQLFPGYGNGR

SEQ ID NO: 9443 - protein, 143 aa, Homo sapiens
MHLLVPPPQHSLFTAFSQFGLLYSVRVFPNAAVAHPGFYAVIKFYSARAAHRAQKACDRKQLFQKSPVKVRLGTRHKAVQHQALALNSSKCQELANYYFGFNGCSKRIIKVPCSPWKQYGQEEEGYLSDFSLEEEEFRLPELD

SEQ ID NO: 9444 - protein, 51 aa, Homo sapiens
MGCGNSTATSAGAGQGPAGAAKDVNYGGVYVGLPSEAVNMVSSQTKTVRKN

SEQ ID NO: 9445 - protein, 361 aa, Homo sapiens
AVPSDGQAREKLALYVYEYLLHVGAQKSAQTFLSEIRWEKNITLGEPPGFLHSWWCVFWDLYCAAPERRDTCEHSSEAKAFHDYSAAAAPSPVLGNIPPNDGMPGGPIPPGFFQPFMSPRYAGGPRPPIRMGNQPPGGVPGTQPLLPNSMDPTRQQGHPNMGGSMQRMNPPRGMGPMGPGPQNYGSGMRPPPNSLGPAMPGINMGPGAGRPWPNPNSANSIPYSSSSPGTYVGPPGGGGPPGTPIMPSPADSTNSSDNIYTMINPVPPGGSRSNFPMGPGSDGPMGGMGGMEPHHMNGSLGSGDIDGLPKNSPNNISGISNPPGTPRDDGELGGNFLHSFQNDNYSPSMTMSVSPLLRDAE

SEQ ID NO: 9446 - protein, 35 aa, Homo sapiens
LKPSSIQTSEFDSSDEEPIEDEQTPIHISWLSLTN

SEQ ID NO: 9447 - protein, 172 aa, Homo sapiens
MGDQPNLPYVLAFLYEAMRFSSFVPVTIPHATTANTSVLGYHIPKDTVVFVNQWSVNHDPLKWPNPENFDPARFLDKDGLINKDLTSRVMIFSVGKRRCIGEELSKMQLFLFISILAHQCDFRANPNEPAKMNFSYGLTIKPKSFKVNVTLRESMELLDSAVQNLQAKETCQ

SEQ ID NO: 9448 - protein, 612 aa, Homo sapiens
MARRPRHSIYSSDEDDEDFEMCDHDYDGLLPKSGKRHLGKTRWTREEDEKLKKLVEQNGTDDWKVIANYLPNRTDVQCQHRWQKVLNPELIKGPWTKEEDQRVIELVQKYGPKRWSVIAKHLKGRIGKQCRERWHNHLNPEVKKTSWTEEEDRIIYQAHKRLGNRWAEIAKLLPGRTDNAIKNHWNSTMRRKVEQEGYLQESSKASQPAVATSFQKNSHLMGFAQAPPTAQLPATGQPTVNNDYSYYHISEAQNVSSHVPYPVALHVNIVNVPQPAAAAIQRHYNDEDPEKEKRIKELELLLMSTENELKGQQVLPTQNHTCSYPGWHSTTIADHTRPHGDSAPVSCLGEHHSTPSLPADPGSLPEESASPARCMIVHQGTILDNVKNLLEFAETLQFIDSFLNTSSNHENSDLEMPSLTSTPLIGHKLTVTTPFHRDQTVKTQKENTVFRTPAIKRSILESSPRTPTPFKHALAAQEIKYGPLKMLPQTPSHLVEDLQDVIKQESDESGIVAEFQENGPPLLKKIKQEVESPTDKSGNFFCSHHWEGDSLNTQLFTQTSPVADAPNILTSSVLMAPASEDEDNVLKAFTVPKNRSLASPLQATKAQRLFQF

SEQ ID NO: 9449 - protein, 147 aa, Homo sapiens
QLSLISGCPNIQEAVEGAMHIQECVPEDLELKKKIFAQLDSIIDDRVILSSSTSCLMPSKLFAGLVHVKQCIVAHPVNPPYYIPLVELVPHPETAPTTVDRTHALMKKIGQCPMRVQKEVAGFVLNRLQYAIISEAWRLVELASVLG

SEQ ID NO: 9450 - protein, 213 aa, Homo sapiens
MADHMMAMNHGRFPDGTNGLHHHPAHRMGMGQFPSPHHHQQQQPQHAFNALMGEHIHYGAGNMNATSGIRHAMGPGTVNGGHPPSALAPAARFNNSQFMGPPVASQGGSLPASMQLQKLNNQYFNHHPYPHNHYMPDLHPAAGHQMNGTNQHFRDCNPNVIDTDFIDEEVLMSLVIEMGLDRIKELPELWLGQNEFDFMTDFVCKQQPSRVSC

SEQ ID NO: 9451 - protein, 162 aa, Homo sapiens
MAPKKRPETQKTSEIVLRPRNKRSRSPLELEPEAKKLCAKGSGTACPSRRCDSDCLWVGLAGPQILPPCRSIVRTLHQHKLGRASWPSVQQGLQQSFLHTLDSYRILQKAAPFDRRATSLAWHPTHPSTVAVGSKGGDIMLWNFGIKDKPTFIKGIGAGGSI

SEQ ID NO: 9452 - protein, 122 aa, Homo sapiens
MGIILVYDITDEKSFENIQNWMKSIKENASAGVERLLLGNKCDMEAKRKVQKEQADKLAREHGIRFFETSAKSSMNVDEAFSSLARDILLKSGGRRSGNGNKPPSTDLKTCDKKNTNKCSLG

SEQ ID NO: 9453 - protein, 1471 aa, Homo sapiens
MDNALFLAAVSNLDIESKLSVYYRAPWHQQRNIFLPATRPPCVEELHRHARQSLQALRREHRSRSDRREQRAAAPLSIAAPPLPAYPPAHSQRRREFKDRHFLTFNSTRSPSPTECCHMTPWSRKSHPPEDEDTDVMLGQRPKNPIHNIPSTLDKQTNWSKALPLPTPEEKMKQDAQVISSCIIPINVTGVGFDREASIRCSLVHSQSVLQRRRKLRRRKTISGIPRRVQQEIDSDESPVARERNVIVHTNPDPSNTVNRISGTRDSECQTEDILIAAPSRRRIRAQRGQSIAASLSHSAGNISALADKGDTMFTPAVSSRTRSRSLPREGNRGGDAEPKVGAKPSAYEEGESFVGDHERTPNDFSEAPSSPSAQDHQPTLGLACSQHLHSPQHKLSERGRSRLSRMAADSGSCDISSNSDTFGSPIHCISTAGVLLSSHMDQKDDHQSSSGNWSGSSSTCPSQTSETIPPAASPPLTGSSHCDSELSLNTAPHANEDASVFVTEQYNDHLDKVRGHRANSFTSTVADLLDDPNNSNTSDSEWNYLHHHHDASCRQDFSPERPKADSLGCPSFTSMATYDSFLEKSPSDKADTSSHFSVDTEGYYTSMHFDCGLKGNKSYVCHYAALGPENGQGVGASPGLPDCAWQDYLDHKRQGRPSISFRKPKAKPTPPKRSSSLRKSDGNADISEKKEPKISSGQHLPHSSREMKLPLDFANTPSRMENANLPTKQEPSWINQSEQGIKEPQLDASDIPPFKDEVAESTHYADLWLLNDLKTNDPYRSLSNSSTATGTTVIECIKSPESSESQTSQSESRATTPSLPSVDNEFKLASPEKLAGLASPSSGYSSQSETPTSSFPTAFFSGPLSPGGSKRKPKVPERKSSLQQPSLKDGTISLSKDLELPIIPPTHLDLSALHNVLNKPFHHRHPLHVFTHNKQNTVGETLRSNPPPSLAITPTILKSVNLRSINKSEEVKQKEENNTDLPYLEESTLTTAALSPSKIRPHTANKSVSRQYSTEDTILSFLDSSAVEMGPDKLHLEKNSTFDVKNRCDPETITSAGSSLLDSNVTKDQVRTETEPIPENTPTKNCAFPTEGFQRVSAARPNDLDGKIIQYGPGPDETLEQVQKAPSAGLEEVAQPESVDVITSQSDSPTRATDVSNQFKHQFVMSRHHDKVPGTISYESEITSVNSFPEKCSKQENIASGISAKSASDNSKAEETQGNVDEASLKESSPSDDSIISPLSEDSQAEAEGVFVSPNKPRTTEDLFAVIHRSKRKVLGRKDSGDMSVRSKSRAPLSSSSSSASSITSPSSNVTTPNSQRSPGLIYRNAKKSNTSNEEFKLLLLKKGSRSDSSYRMSATEILKSPILPKPPGELTAESPQSTDDAHQGSQGAEALSPLSPCSPRVNAEGFSSKSFATSASARVGRSRAPPAASSSRYSVRCRLYNTPMQAISEGETENSDGSPHDDRSSQSST

SEQ ID NO: 9454 - protein, 47 aa, Homo sapiens
TIVPGEQGAEYQHFIQQCTGWSAVVQSQLTATSVSRVQEILLPQPPE

SEQ ID NO: 9455 - protein, 636 aa, Homo sapiens
MLQQVNGHNPGSDGQAREYLREDLQEFLGGEVLLYKLDDLTRVNPVTLETVLRCLQARYMADTFYTNAGCTLVALNPFKPVPQLYSPELMREYHAAPQPQKLKPHVFTVGEQTYRNVKSLIEPVNQSIVVSGESGAGKTWTSRCLMKFYAVVATSPASWESHKIAERIEQRILNSNPVMEAFGNACTLRNNNSSRFGKFIQLQLNRAQQMTGAAVQTYLLEKTRVACQASSERNFHIFYQICKGASEDERLQWHLPEGAAFSWLPNPERSLEEDCFEVTREAMLHLGIDTPTQNNIFKVLAGLLHLGNIQFAASEDEAQPCQPMDDAKYSVRTAASLLGLPEDVLLEMVQIRTIRAGRQQQVFRKPCARAECDTRRDCLAKLIYARLFDWLVSVINSSICADTDSWTTFIGLLDVYGFESFPDNSLEQLCINYANEKLQQHFVAHYLRAQQEEYAVEGLEWSFINYQDNQPCLDLIEGSPISICSLINEECRLNRPSSAAQLQTRIETALAGSPCLGHNKLSREPSFIVVHYAGPVRYHTAGLVEKNKDPIPPELTRLLQQSQDPLLMGLFPTNPKEKTQEEPPGQSRAPVLTVVSKFKASLEQLLQVLHSTTPHYIRCIKPNSQGQAQTFLQEEA

SEQ ID NO: 9456 - protein, 116 aa, Homo sapiens
MHLLVPPPQHSLFTAFSQFGLLYSVRVFPNAAVAHPGFYAVIKFYSARAAHRAQKACDRKQLFQKSPVKVRLGTRHKAVQHQALALNSSKCQELANYYFGFNGCSKRIIKDHYHSL

SEQ ID NO: 9457 - protein, 754 aa, Homo sapiens
MESSDVELDLQRSVQAVLRELSTQAPALQSNQGMWRWSLHKKVERDPGKSPVLVRILLRELEKAESQDLRHVIIPLLHTVMYVLTKATGITEELYQRIYAFCTRLLTLPTPYCTVALDCAIRLKTEMAVPGTLYQRMVIAEQNLTNELYPYQERVFLFVDPELVSASVCSALLLEIEAAQAQQTPETCMRHVVSHALQAALGEACHAGALHRKLQASPRRTLEHYFHAVVAALEQMASEASPSREGHVERLEEIYCSLLGPAAGRCGGDLVQERPPSIPLPSPYITFHLWTGEEQLWKELVLFLRPRSQLRLSADLEVLDLQGLRPDRELARVSVLSTDSGIERDLPTGADELPAPGSPEMERAGLQRKGGIKKRAWPLDFLMPGSWDGPPGLHRRTGRPSGDGEMLPGVSRLHTARVLVLGDDRMLGRLAQAYHRLRKRETQKFCLTPRLSLQLYYIPVLAPEKPAASRQPELGELATFLGRVDPWYQSNVNTLCPAIHKLAEMPPSLDTSRTVDPFILDVITYYIRMGTQPIYFQIYTVKIFFSDLSQDPTEDIFLIELKVKIQDSKFPKDGFSPRRRGVAEGPGAELSLCYQKALLSHRPREVTVSLRATGLILKAIPASDTEVSGSSHCPLPAAPVTDHTCLNVNVTEVVKSSNLAGKSFSTVTNTFRTNNIQIQSRDQRLLTLSLDKDDQRTFRDVVRFEVAPCPEPCSGAQKSKAPWLNLHGQQEVEAIKAKPKPLLMPINTFSGIVQ

SEQ ID NO: 9458 - protein, 504 aa, Homo sapiens
MGGAGARGLAGCGAPRVNLLGLGEAVWTKQVRSVAMFSEQAAQRAHTLLSPPSANNATFARVPVATYTNSSQPFRLGERSFSRQYAHIYATRLIQMRPFLENRAQQHWGSGVGVKKLCELQPEEKCCVVGTLFKAMPLQPSILREVSEEHNLLPQPPRSKYIHPDDELVLEDELQRIKLKGTIDVSKLVTGTVLAVFGSVRDDGKFLVEDYCFADLAPQKPAPPLDTDRFVLLVSGLGLGGGGGESLLGTQLLVDVVTGQLGDEGEQCSAAHVSRVILAGNLLSHSTQSRDSINKAKYLTKKTQAASVEAVKMLDEILLQLSASVPVDVMPGEFDPTNYTLPQQPLHPCMFPLATAYSTLQLVTNPYQATIDGVRFLGTSGQNVSDIFRYSSMEDHLEILEWTLRVRHISPTAPDTLGCYPFYKTDPFIFPECPHVYFCGNTPSFGSKIIRGPEDQTVLLVTVPDFSATQTACLVNLRSLACQPISFSGFGAEDDDLGGLGLGP

SEQ ID NO: 9459 - protein, 112 aa, Homo sapiens
MSLVLNDLLICCRQLEHDRATERKKEVEKFKRLIRDPETIKHLDRHSDSKQGKYLNWDAVFRFLQKYIQKETECLRIAKPNVSASTQASRQKKMQEISSLVKYFIKCANRSK

SEQ ID NO: 9460 - protein, 496 aa, Homo sapiens
IRAAGSAAGSVCRAGAPGRTQVRAGSGPRTRFHRHPQPGHARRQTSCSRRPESSVPSEDEWYCPECRNDASEVVLAGERLRESKKKAKMASATSSSQRDWGKGMACVGRTKECTIVPSNHYGPIPGIPVGTMWRFRVQVSESGVHRPHVAGIHGRSNDGAYSLVLAGGYEDDVDHGNFFTYTGSGGRDLSGNKRTAEQSCDQKLTNTNRALALNCFAPINDQEGAEAKDWRSGKPVRVVRNVKGGKNSKYAPAEGNRYDGIYKVVKYWPEKGKSGFLVWRYLLRRDDDEPGPWTKEGKDRIKKLGLTMQYPEGYLEALANREREKENSKREEEEQQEGGFASPRTGKGKWKRKSAGGGPSRAGSPRRTSKKTKVEPYSLTAQQSSLIREDKSNAKLWNEVLASLKDRPASGSPFQLFLSKVEETFQCICCQELVFRPITTVCQHNVCKDCLDRSFRAQVFSCPACRYDLGRSYAMQVNQPLQTVLNQLFPGYGNGR

SEQ ID NO: 9461 - protein, 131 aa, Homo sapiens
MVRYSLDPENPTKSCKSRGSNLRVHFKNTRETAQAIKGMHIRKATKYLKDVTLQKQCVPFRRYNGGVGRCAQAKQWGWTQGRWPKKSAEFLLHMLKNAESNAELKGLDVDSLVIEHIQVNKAPKMRRRTYR

SEQ ID NO: 9462 - protein, 361 aa, Homo sapiens
MSEARKGPDEAEESQYDSGIESLRSLRSLPESTSAPASGPSDGSPQPCTHPPGPVKEPQEKEDADGERADSTYGSSSLTYTLSLLGGPEAEDPAPRLPLPHVGALSPQQLEALTYISEDGDTLVHLAVIHEAPAVLLCCLALLPQEVLDIQNNLYQTALHLAVHLDQPGAVRALVLKGASRALQDRHGDTALHVACQRQHLACARCLLEGRPEPGRGTSHSLDLQLQNWQGLACLHIATLQKNQPLMELLLRNGADIDVQEGTSGKTALHLAVETQERGLVQFLLQAGAQVDARMLNGCTPLHLAAGRGLMGISSTLCKAGADSLLRNVEDETPQDLTEESLVLLPFDDLKISGKLLLCTD

SEQ ID NO: 9463 - protein, 198 aa, Homo sapiens
MPPPTSGPPSAMTPPYPQFEQSETETVHLFIPALSVGAIIGKQGQHIKQLSRFAGASIKIAPAEAPDAKVRMVIITGPPEAQFKAQGRIYGKIKEENFVSPKEEVKLEAHIRVPSFAAGRVIGKGGKTVNELQNLSSAEVVVPRDQTPDENDQVVVKITGHFYACQVAQRKIQEILTQVKQHQQQKALQSGPPQSRRK

SEQ ID NO: 9464 - protein, 207 aa, Homo sapiens [sequence omitted]

SEQ ID NO: 9465 - protein, 410 aa, Homo sapiens
MPALEPAPPLLADLGPALEPESPAALGPPGYLHSAPGPAPAPGEGPPPGTVLEPQSAPESSCPCRGSVKNQPSEELPDMTTFPPRLLAEQLTLMDAELFKKVVLHECLGCIWGQGHLKGNEHMAPTVRATIAHFNRLTNCITTSCLGDHSMRARDRARVVEHWIKVARECLSLNNFSSVHVIVSALCSNPIGQLHKTWAGVSSKSMKELKELCKKDTAVKRDLLIKAGSFKVATQERNPQRVQMRLRRQKKGVVPFLGDFLTELQRLDSAIPDDLDGNTNKRSKEVRVLQEMQLLQVAAMNYRLRPLEKFVTYFTRMEQLSDKERLHCSVTISVHCNVCLLGSSPSSASQAAGTTAVHHHVRLFCCCCSATSCPASWSPKTRRLATSCSGWEPTGMLARTPALHHPSPRP

SEQ ID NO: 9466 - protein, 715 aa, Homo sapiens
MNSPKSKKAKKKEEPSQNDISPKTKSLRKKKEPIEKKVVSSKTKKVTKNEEPSEEEIDAPKPKKMKKEKEMNGETREKSPKLKNGFPHPEPDCNPSEAASEESNSEIEQEIPVEQKEGAFSNFPISEETIKLLKGRGVTFLFPIQAKTFHHVYSGKDLIAQARTGTGKTFSFAIPLIEKLHGELQDRKRGRAPQVLVLAPTRELANQVSKDFSDITKKLSVACFYGGTPYGGQFERMRNGIDILVGTPGRIKDHIQNGKLDLTKLKHVVLDEVDQMLDMGFADQVEEILSVAYKKDSEDNPQTLLFSATCPHWVFNVAKKYMKSTYEQVDLIGKKTQKTAITVEHLAIKCHWTQRAAVIGDVIRVYSGHQGRTIIFCETKKEAQELSQNSAIKQDAQSLHGDIPQKQREITLKGFRNGSFGVLVATNVAARGLDIPEVDLVIQSSPPKDVESYIHRSGRTGRAGRTGVCICFYQHKEEYQLVQVEQKAGIKFKRIGVPSATEIIKASSKDAIRLLDSVPPTAISHFKQSAEKLIEEKGAVEALAAALAHISGATSVDQRSLINSNVGFVTMILQCSIEMPNISYAWKELKEQLGEEIDSKVKGMVFLKGKLGVCFDVPTASVTEIQEKWHDSRRWQLSVATEQPELEGPREGYGGFRGQREGSRGFRGQRDGNRRFRGQREGSRGPRGQRSGGGNKSNRSQNKGQKRSFSKAFGQ

SEQ ID NO: 9467 - protein, 151 aa, Homo sapiens
MSRRKQSNPRQIKRSLGDMEAREEVQLVGASHMEQKATAPEAPSPPSADVNSPPPLPPPTSPGGPKELEGQEPEPRPTEEEPGSPWSGPDELEPVVQDGQRRIRARLSLATGLSWGPFHGSVQTRASSPRQAEPRGAISALAPSVQTHRTR

SEQ ID NO: 9468 - protein, 758 aa, Homo sapiens
MPDNRQPRNRQPRIRSGNEPRSAPAMEPDGRGAWAHSRAALDRLEKLLRCSRCNCVSDCIGTGCPVCYTPAWIQDLKINRQLDSMIQLCSKLRNLLHDNELSDLKEDKPRKSLFNDAGNKKNSIKMWFSPRSKKVRYVVSKASVQTQPAIKKDASAQQDSYEFVSPSPPADVSERAKKASARSGKKQKKKTLAEINQKWNLEAEKEDGEFDSKEESKQKLVSFCSQPSVISSPQINGEIDLLASGSLTESECFGSLTEVSLPLAEQIESPDTKSRNEVVTPEKVCKNYLTSKKSLPLENNGKRGHHNRLSSPISKRCRTSILSTSGDFVKQTVPSENIPLPECSSPPSCKRKVGGTSGRKNSNMSDEFISLSPGTPPSTLSSSSYRRVMSSPSAMKLLPNMAVKRNHRGETLLHIASIKGDIPSVEYLLQNGSDPNVKDHAGWTPLHEACNHGHLKVVELLLQHKALVNTTGYQNDSPLHDAAKNGHVDIVKLLLSYGASRNAVNIFGLRPVDYTDDESMKSLLLLPEKNESSSASHCSVMNTGQRRDGPLVLIGSGLSSEQQKMLSELAVILKAKKYTEFDSTVTHVVVPGDAVQSTLKCMLGILNGCWILKFEWVKACLRRKVCEQEEKYEIPEGPRRSRLNREQLLPKLFDGCYFYLWGTFKHHPKDNLIKLVTAGGGQILSRKPKPDSDVTQTINTVAYHARPDSDQRFCTQYIIYEDLCNYHPERVRQGKVWKAPSSWFIDCVMSFELLPLDS

SEQ ID NO: 9469 - protein, 115 aa, Homo sapiens
MAAPAAVAGAPGAQRGERPFACDWQGCDKKFARSDELARHHRTHTGEKRFSCPLCSKRFTRSDHLAKHARRHPGFHPDLLRRPGARSTSPSDSLPCSLAGSPAPSPAPSPAPAGL

SEQ ID NO: 9470 - protein, 263 aa, Homo sapiens
MQRARPTLWAACEPCDARALAQCAPPPAVCAELVREPGCGCCLTCALSEGQPCGIYTERCGSGLRCQPSPDEARPLQALLDGRGLCVNASAVSRLRAYLLPAPPAPGNASESEEDRSAGSVESPSVSSTHRVSDPKFHPLHSKIIIIKKGHAKDSQRYKVDYESQSTDTQNFSSESKRETEYGPCRREMEDTLNHLKFLNVLSPRGVHIPNCDKKGFYKKKQCRPSKGRKRGFCWCVDKYGQPLPGYTTKGKEDVHCYSMQSK

SEQ ID NO: 9471 - protein, 374 aa, Homo sapiens
MALLRRPTVSSDLENIDTGVNSKVKSHVTIRRTVLEEIGNRVTTRAAQVAKKAQNTKVPVQPTKTTNVNKQLKPTASVKPVQMEKLAPKGPSPTPEDVSMKEENLCQAFSDALLCKIEDIDNEDWENPQLCSDYVKDIYQYLRQLEVLQSINPHFLDGRDINGRMRAILVDWLVQVHSKFRLLQETLYMCVGIMDRFLQVQPVSRKKLQLVGITALLLASKYEEMFSPNIEDFVYITDNAYTSSQIREMETLILKELKFELGRPLPLHFLRRASKAGEVDVEQHTLAKYLMELTLIDYDMVHYHPSKVAAAASCLSQKVLGQGKWNLKQQYYTGYTENEVLEVMQHMAKNVVKVNENLTKFIVSTTVFLSCGKL

SEQ ID NO: 9472 - protein, 96 aa, Homo sapiens
MKVKMLSRNPDNYVRETKLDLQRVPRNYDPALHPFEVPREYIRALNATKLERVFAKPFLASLDGHRDGVNCLAKHPEKLATVLSGACDGELVMTKL

SEQ ID NO: 9473 - protein, 136 aa, Homo sapiens; identical to SEQ ID NO: 5304

SEQ ID NO: 9474 - protein, 178 aa, Homo sapiens
MPKAKGKTRRQKFGYSVNRKRLNRNARRKAAPRIECSHIRHAWDHAKSVRQNLAEMGLAVDPNRAVPLRKRKVKAMEVDIEERPKELVRKPYVLNDLEAEASLPEKKGNTLSRDLIDYVRYMVENHGEDYKAMARDEKNYYQDTPKQIRSKINVYKRFYPAEWQDFLDSLQKRKMEVE

SEQ ID NO: 9475 - protein, 37 aa, Homo sapiens
MGVQVETISPGDGRTFPKRGQTCVVHYTGGDCILVNE

SEQ ID NO: 9476 - protein, 103 aa, Homo sapiens [sequence omitted]

SEQ ID NO: 9477 - protein, 137 aa, Homo sapiens
GQTNGDSSLEVLATRFQGSVRTYTESQSSLRSSYSSPTSLSPRAGSPFSPPPSSSSLTGEAAISRSFQSLACSPGLPAADRLSYSGRPGSRQHGLGRGKPPPGRGLGSLQDAAGKSRGTGGPPTVQLLSALAGSPGG

SEQ ID NO: 9478 - protein, 615 aa, Homo sapiens
MARACLIQRLPIKRDCTPVFVRGLSSPSAAMALLSEGLDEVPAACLSPCGPPNPTELFSESRRLALEELVAGGPEAFAAFLRRERLARFLNPDEVHAILRAAERPGEEGAAAAAAAEDSFGSSHDCSSGTYFPEQSDLEPPLLELGWPAFYQGAYRGATRVETHFQPRGAGEGGPYGCKDALRQQLRSAREVIAVVMDVFTDIDIFRDLQEICRKQGVAVYILLDQALLSQFLDMCMDLKVHPEQEKLMTVRTITGNIYYARSGTKIIGKVHEKFTLIDGIRVATGSYSFTWTDGKLNSSNLVILSGQVVEHFDLEFRILYAQSKPISPKLLSHFQSSNKFDHLTNRKPQSKELTLGNLLRMRLARLSSTPRKADLDPEMPAEGKAERKPHDCESSTVSEEDYFSSHRDELQSRKAIDAATQTEPGEEMPGLSVSEVGTQTSITTACAGTQTAVITRIASSQTTIWSRSTTTQTDMDENILFPRGTQSTEGSPVSKMSVSRSSSLKSSSSVSSQGSVASSTGSPASIRTTDFHNPGYPKYLGTPHLELYLSDSLRNLNKERQFHFAGIRSRLNHMLAMLSRRTLFTENHLGLHSGNFSRVNLLAVRDVALYPSYQ

SEQ ID NO: 9479 - protein, 2725 aa, Homo sapiens
MNGHRFTFRTRSLLPLQKGQHRCITKLLAHNDPWGIFRAPSSRRSYSVSGVCQPAIPNSSLHIPHNACWLKWKLCSEIALPYHHILGERRKLCSIRNFEDWREDVRSCCQARVLPRGRTLGLWLALIGREEFAMNLLRRSGKRRRSESGSDSFSGSGGDSSASPQFLSGSVLSPPPGLGRCLKAAAAGECKPTVPDYERDKLLLANWGLPKAVLEKYHSFGVKKMFEWQAECLLLGQVLEGKNLVYSAPTSAGKTLVAELLILKRVLEMRKKALFILPFVSVAKEKKYYLQSLFQEVGIKVDGYMGSTSPSRHFSSLDIAVCTIERANGLINRLIEENKMDLLGMVVVDELHMLGDSHRGYLLELLLTKICYITRKSASCQADLASSLSNAVQIVGMSATLPNLELVASWLNAELYHTDFRPVPLLESVKVGNSIYDSSMKLVREFEPMLQVKGDEDHVVSLCYETICDNHSVLLFCPSKKWCEKLADIIAREFYNLHHQAEGEGLVKPSECPPVILEQKELLEVMDQLRRLPSGLDSVLQKTVPWGVAFHHAGLTFEERDIIEGAFRQGLIRVLAATSTLSSGVNLPARRVIIRTPIFGGRPLDILTYKQMVGRAGRKGVDTVGESILICKNSEKSKGIALLQGSLKPVRSCLQRREGEEVTGSMIRAILEIIVGGVASTSQDMHTYAACTFLAASMKEGKQGIQRNQESVQLGAIEACVMWLLENEFIQSTEASDGTEGKVYHPTHLGSATLSSSLSPADTLDIFADLQRAMKGFVLENDLHILYLVTPMFEDWTTIDWYRFFCLWEKLPTSMKRVAELVGVEEGFLARCVKGKVVARTERQHRQMAIHKRFFTSLVLLDLISEVPLREINQKYGCNRGQIQSLQQSAAVYAGMITVFSNRLGWHNMELLLSQFQKRLTFGIQRELCDLVRVSLLNAQRARVLYASGFHTVADLARANIVEVEVILKNAVPFKSARKAVDEEEEAVEERRNMRTIWVTGRKGLTEREAAALIVEEARMILQQDLVEMGVQWNPCALLHSSTCSLTHSESEVKEHTFISQTKSSYKKLTSKNKSNTIFSDSYIKHSPNIVQDLNKSREHTSSFNCNFQNGNQEHQTCSIFRARKRASLDINKEKPGASQNEGKTSDKKVVQTFSQKTKKAPLNFNSEKMSRSFRSWKRRKHLKRSRDSSPLKDSGACRIHLQGQTLSNPSLCEDPFTLDEKKTEFRNSGPFAKNVSLSGKEKDNKTSFPLQIKQNCSWNITLTNDNFVEHIVTGSQSKNVTCQATSVVSEKGRGVAVEAEKINEVLIQNGSKNQNVYMKHHDIHPINQYLRKQSHEQTSTITKQKNIIERQMPCEAVSSYINRDSNVTINCERIKLNTEENKPSHFQALGDDISRTVIPSEVLPSAGAFSKSEGQHENFLNISRLQEKTGTYTTNKTKNNHVSDLGLVLCDFEDSFYLDTQSEKIIQQMATENAKLGAKDTNLAAGIMQKSLVQQNSMNSFQKECHIPFPAEQHPLGATKIDHLDLKTVGTMKQSSDSHGVDILTPESPIFHSPILLEENGLFLKKNEVSVTDSQLNSFLQGYQTQETVKPVILLIPQKRTPTGVEGECLPVPETSLNMSDSLLFDSFSDDYLVKEQLPDMQMKEPLPSEVTSNHFSDSLCLQEDLIKKSNVNENQDTHQQLTCSNDESIIFSEMDSVQMVEALDNVDIFPVQEKNHTVVSPRALELSDPVLDEHHQGDQDGGDQDERAEKSKLTGTRQNHSFIWSGASFDLSPGLQRILDKVSSPLENEKLKSMTINFSSLNRKNTELNEEQEVISNLETKQVQGISFSSNNEVKSKIEMLENNANHDETSSLLPRKESNIVDDNGLIPPTPIPTSASKLTFPGILETPVNPWKTNNVLQPGESYLFGSPSDIKNHDLSPGSRNGFKDNSPISDTSFSLQLSQDGLQLTPASSSSESLSIIDVASDQNLFQTFIKEWRCKKRFSISLACEKIRSLTSSKTATIGSRFKQASSPQEIPIRDDGFPIKGCDDTLVVGLAVCWGGRDAYYFSLQKEQKHSEISASLVPPSLDPSLTLKDRMWYLQSCLRKESDKECSVVIYDFIQSYKILLLSCGISLEQSYEDPKVACWLLDPDSQEPTLHSIVTSFLPHELPLLEGMETSQGIQSLGLNAGSEHSGRYRASVESILIFNSMNQLNSLLQKENLQDVFRKVEMPSQYCLALLELNGIGFSTAECESQKHIMQAKLDAIETQAYQLAGHSFSFTSSDDIAEVLFLELKLPPNREMKNQGSKKTLGSTRRGIDNGRKLRLGRQFSTSKDVLNKLKALHPLPGLILEWRRITNAITKVVFPLQREKCLNPFLGMERIYPVSQSHTATGRITFTEPNIQNVPRDFEIKMPTLVGESPPSQAVGKGLLPMGRGKYKKGFSVNPRCQAQMEERAADRGMPFSISMRHAFVPFPGGSILAADYSQLELRILAHLSHDRRLIQVLNTGADVFRSIAAEWKMIEPESVGDDLRQQAKQICYGIIYGMGAKSLGEQMGIKENDAACYIDSFKSRYTGINQFMTETVKNCKRDGFVQTILGRRRYLPGIKDNNPYRKAHAERQAINTIVQGSAADIVKIATVNIQKQLETFHSTFKSHGHREGMLQSDQTGLSRKRKLQGMFCPIRGGFFILQLHDELLYEVAEEDVVQVAQIVKNEMESAVKLSVKLKVKVKIGASWGELKDFDV

SEQ ID NO: 9480 - protein, 470 aa, Homo sapiens
MAEQVLPQALYLSNMRKAVKIRERTPEDIFKPTNGIIHHFKTMHRYTLEMFRTCQFCPQFREIIHKALIDRNIQATLESQKKLNWCREVRKLVALKTNGDGNCLMHATSQYMWGVQDTDLVLRKALFSTLKETDTRNFKFRWQLESLKSQEFVETGLCYDTRNWNDEWDNLIKMASTDTPMARSGLQYNSLEEIHIFVLCNILRRPIIVISDKMLRSLESGSNFAPLKVGGIYLPLHWPAQECYRYPIVLGYDSHHFVPLVTLKDSGPEIRAVPLVNRDRGRFEDLKVHFLTDPENEMKEKLLKEYLMVIEIPVQGWDHGTTHLINAAKLDEANLPKEINLVDDYFELVQHEYKKWQENSEQGRREGHAQNPMEPSVPQLSLMDVKCETPNCPFFMSVNTQPLCHECSERRQKNQNKLPKLNSKPGPEGLPGMALGASRGEAYEPLAWNPEESTGGSFGPTDSTQPFSVQ

SEQ ID NO: 9481 - protein, 169 aa, Homo sapiens
MVRYSLDPENPTKSCKSRGSNLRVHFKNTRETAQAIKGMHIRKATKYLKDVTLQKQCVPFRRYNGGVGRCAQAKQWGWTQGRWPKKSAEFLLHMLKNAESNAELKGLDVDSLVIEHIQVNKAPKMRRRTYRAHGRINPYMSSPCHIEMILTEKEQIVPKPEEEVAQKKK

SEQ ID NO: 9482 - protein, 197 aa, Homo sapiens
MSYSDESRLSNLLRRITREDDRDRRLATVKQLKEFIQQPENKLVLVKQLDNILAAVHDVLNESSKLLQELRQEGACCLGLLCASLSYEAEKIFKWIFSKFSSSAKDEVKLLYLCATYKALETVGEKKAFSSVMQLVMTSLQSILENVDTPELLCKCVKCILLVARCYPHIFSTNFRVSSSFRFSDHGVRGMVVCVRI

SEQ ID NO: 9483 - protein, 144 aa, Homo sapiens
MPGFDYKFLEKPKRRLLCPLCGKPMREPVQVSTCGHRFCDTCLQEFLSEGVFKWPFARRVTFSLLDQSDPGLAKPQHVTETFHPDPNWKNFQKPGTWRGSLDESSLGFGYPKFISHQDIRKRNYVRDDAVFIRAAVELPRKILS

SEQ ID NO: 9484 - protein, 522 aa, Homo sapiens
MEFPDHSRHLLQCLSEQRHQGFLCDCTVLVGDAQFRAHRAVLASCSMYFHLFYKDQLDKRDIVHLNSDIVTAPAFALLLEFMYEGKLQFKDLPIEDVLAAASYLHMYDIVKVCKKKLKEKATTEADSTKKEEDASSCSDKVESLSDGSSHIAGDLPSDEDEGEDEKLNILPSKRDLAAEPGNMWMRLPSDSAGIPQAGGEAEPHATAAGKTVASPCSSTESLSQRSVTSVRDSADVDCVLDLSVKSSLSGVENLNSSYFSSQDVLRSNLVQVKVEKEASCDESDVGTNDYDMEHSTVKESVSTNNRVQYEPAHLAPLREDSVLRELDREDKASDDEMMTPESERVQVEGGMESSLLPYVSNILSPAGQIFMCPLCNKVFPSPHILQIHLSTHFREQDGIRSKPAADVNVPTCSLCGKTFSCMYTLKRHERTHSGEKPYTCTQCGKSFQYSHNLSRHAVVHTREKPHACKWCERRFTQSGDLYRHIRKFHCELVNSLSVKSEALSLPTVRDWTLEDSSQELWK

SEQ ID NO: 9485 - protein, 669 aa, Homo sapiens
MAEQVLPQALYLSNMRKAVKIRERTPEDIFKPTNGIIHHFKTMHRYTLEMFRTCQFCPQFREIIHKALIDRNIQATLESQKKLNWCREVRKLVALKTNGDGNCLMHATSQYMWGVQDTDLVLRKALFSTLKETDTRNFKFRWQLESLKSQEFVETGLCYDTRNWNDEWDNLIKMASTDTPMARSGLQYNSLEEIHIFVLCNILRRPIIVISDKMLRSLESGSNFAPLKVGGIYLPLHWPAQECYRYPIVLGYDSHHFVPLVTLKDSGPEIRAVPLVNRDRGRFEDLKVHFLTDPENEMKEKLLKEYLMVIEIPVQGWDHGTTHLINAAKLDEANLPKEINLVDDYFELVQHEYKKWQENSEQGRREGHAQNPMEPSVPQLSLMDVKCETPNCPFFMSVNTQPLCHECSERRQKNQNKLPKLNSKPGPEGLPGMALGASRGEAYEPLAWNPEESTGGPHSAPPTAPSPFLFSETTAMKCRSPGCPFTLNVQHNGFCERCHNARQLHASHAPDHTRHLDPGKCQACLQDVTRTFNGICSTCFKRTTAEASSSLSTSLPPSCHQRSKSDPSRLVRSPSPHSCHRAGNDAPAGCLSQAARTPGDRTGTSKCRKAGCVYFGTPENKGFCTLFHRVQRKQTFCCCLRESQSHSVQVPEHHSVPGEGMRHPWKHHV

SEQ ID NO: 9486 - protein, 585 aa, Homo sapiens
MALLSEGLDEVPAACLSPCGPPNPTELFSESRRLALEELVAGGPEAFAAFLRRERLARFLNPDEVHAILRAAERPGEEGAAAAAAAEDSFGSSHDCSSGTYFPEQSDLEPPLLELGWPAFYQGAYRGATRVETHFQPRGAGEGGPYGCKDALRQQLRSAREVIAVVMDVFTDIDIFRDLQEICRKQGVAVYILLDQALLSQFLDMCMDLKVHPEQEKLMTVRTITGNIYYARSGTKIIGKVHEKFTLIDGIRVATGSYSFTWTDGKLNSSNLVILSGQVVEHFDLEFRILYAQSKPISPKLLSHFQSSNKFDHLTNRKPQSKELTLGNLLRMRLARLSSTPRKADLDPEMPAEGKAERKPHDCESSTVSEEDYFSSHRDELQSRKAIDAATQTEPGEEMPGLSVSEVGTQTSITTACAGTQTAVITRIASSQTTIWSRSTTTQTDMDENILFPRGTQSTEGSPVSKMSVSRSSSLKSSSSVSSQGSVASSTGSPASIRTTDFHNPGYPKYLGTPHLELYLSDSLRNLNKERQFHFAGIRSRLNHMLAMLSRRTLFTENHLGLHSGNFSRVNLLAVRDVALYPSYQ

SEQ ID NO: 9487 - protein, 103 aa, Homo sapiens [sequence omitted]

SEQ ID NO: 9488 - protein, 273 aa, Homo sapiens
MDYAAQKYVGTHDFRNLCKMDVANGVINFQRTILSAQVQLVGQSPGEGRWQEPFQLCQFEVTGQAFLYHQVRCMMAILFLIGQGMEKPEIIDELLNIEKNPQKPQYSMAVEFPLVLYDCKFENVKWIYDQEAQEFNITHLQQLWANHAVKTHMLYSMLQGLDTVPVPCGIGPKMDGMTEWGNVKPSVIKQTSAFVEGVKMRTYKPLMDRPKCQGLESRIQHFVRRGRIEHPHLFHEEETKAKRDCNDTLEEENTNLETPTKRVCVDTEIKSII

SEQ ID NO: 9489 - protein, 86 aa, Homo sapiens
MDLVKSHLMYAVREEVEVLKEQIKELIEKNSQLEQENNLLKTLASPEQLAQFQAQLQTGSPPATTQPQGTTQPPAQPASQGSGPTA

SEQ ID NO: 9490 - protein, 97 aa, Homo sapiens
MVRYSLDPENPTKSCKSRGSNLRVHFKNTRETAQAIKGMHIRKATKYLKDVTLQKQCVPFRRYNGGVGRCAQAKQWGWTQGRWPKKSAEFLLHMLKN

SEQ ID NO: 9491 - protein, 177 aa, Homo sapiens
WQNETSSGNLESCAQARRVTGGLLDRLDDSPDQCRDSITSYLKGEAGKFEANGSHTEITPEAKTKSYFPESQNDVGKQSTKETLKPKIHGSGHVEEPASPLAAYQKSLEETSKLIIEETKPCVPVSMKKMSRTSPADGKPRLSLHEEEGSSGSEQKGEGFKVKTKKEIRHVEKKSHS

SEQ ID NO: 9492 - protein, 47 aa, Homo sapiens
MLLPNILLTGTPGVGKTTLGKELASKSGLKYINVGDLAREGVIMRRN

SEQ ID NO: 9493 - protein, 169 aa, Homo sapiens
MAKQPSDVSSECDREGRQLQPAERPPQLRPGAPTSLQTEPQGNPEGNHGGEGDSCPHGSPQGPLAPPASPGPFATRSPLFIFMRRSSLLSRSSSGYFSFDTDRSPAPMSCDKSTQTPSPPCQAFNHYLSAMASMRQAEPADMRPEIWIAQELRRIGDEFNAYYARRLEK

SEQ ID NO: 9494 - protein, 1098 aa, Homo sapiens
MGSKERFHWQSHNVKQSGVDDMVLLPQITEDAIAANLRKRFMDDYIFTYIGSVLISVNPFKQMPYFTDREIDLYQGAAQYENPPHIYALTDNMYRNMLIDCENQCVIISGESGAGKTVAAKYIMGYISKVSGGGEKVQHVKDIILQSNPLLEAFGNAKTVRNNNSSRFGKYFEIQFSRGGEPDGGKISNFLLEKSRVVMQNENERNFHIYYQLLEGASQEQRQNLGLMTPDYYYYLNQSDTYQVDGTDDRSDFGETLSAMQVIGIPPSIQQLVLQLVAGILHLGNISFCEDGNYARVESVDLLAFPAYLLGIDSGRLQEKLTSRKMDSRWGGRSESINVTLNVEQAAYTRDALAKGLYARLFDFLVEAINRAMQKPQEEYSIGVLDIYGFEIFQKNGFEQFCINFVNEKLQQIFIELTLKAEQEEYVQEGIRWTPIQYFNNKVVCDLIENKLSPPGIMSVLDDVCATMHATGGGADQTLLQKLQAAVGTHEHFNSWSAGFVIHHYAGKVSYDVSGFCERNRDVLFSDLIELMQTSEQAFLRMLFPEKLDGDKKGRPSTAGSKIKKQANDLVATLMRCTPHYIRCIKPNETKRPRDWEENRVKHQVEYLGLKENIRVRRAGFAYRRQFAKFLQRYAILTPETWPRWRGDERQGVQHLLRAVNMEPDQYQMGSTKVFVKNPESLFLLEEVRERKFDGFARTIQKAWRRHVAVRKYEEMREEASNILLNKKERRRNSINRNFVGDYLGLEERPELRQFLGKRERVDFADSVTKYDRRFKPIKRDLILTPKCVYVIGREKVKKGPEKGQVCEVLKKKVDIQALRGVSLSTRQDDFFILQEDAADSFLESVFKTEFVSLLCKRFEEATRRPLPLTFSDTLQFRVKKEGWGGGGTRSVTFSRGFGDLAVLKVGGRTLTVSVGDGLPKSSKPTRKGMAKGKPRRSSQAPTRAAPAPPRGMDRNGVPPSARGGPLPLEIMSGGGTHRPPRGPPSTSLGASRRPRARPPSEHNTEFLNVPDQGMAGMQRKRSVGQRPVPGVGRPKPQPRTHGPRCRALYQYVGQDVDELSFNVNEVIEILMEDPSGWWKGRLHGQEGLFPGNYVEKI

SEQ ID NO: 9495 - protein, 224 aa, Homo sapiens
KAFRGVDNKIRLFQPNLNMDRMYRSAVRATLPVFDKEELLECIQQLVKLDQEWVPYSTSASLYIRPTFIGTEPSLGVKKPTKALLFVLLSPVGPYFSSGTFNPVSLWANPKYVRAWKGGTGDCKMGGNYGSSLFAQCEAVDNGCQQVLWLYGEDHQITEVGTMNLFLYWINEDGEEELATPPLDGIILPGVTRRCILDLAHQWVGAFDMNNFCKPEIKNNQNKP

SEQ ID NO: 9496 - protein, 1337 aa, Homo sapiens
MMEIQMDEGGGVVVYQDDYCSGSVMSERVSGLAGSIYREFERLIHCYDEEVVKELMPLVVNVLENLDSVLSENQEHEVELELLREDNEQLLTQYEREKALRRQAEEKFIEFEDALEQEKKELQIQVEHYEFQTRQLELKAKNYADQISRLEERESEMKKEYNALHQRHTEMIQTYVEHIERSKMQQVGGNSQTESSLPGRSRKERPTSLNVFPLADGTVRAQIGGKLVPAGDHWHLSDLGQLQSSSSYQCPQDEMSESGQSSAAATPSTTGTKSNTPTSSVPSAAVTPLNESLQPLGDYGVGSKNSKRAREKRDSRNMEVQVTQEMRNVSIGMGSSDEWSDVQDIIDSTPELDMCPETRLDRTGSSPTQGIVNKAFGINTDSLYHELSTAGSEVIGDVDEGADLLGEFSVRDDFFGMGKEVGNLLLENSQLLETKNALNVVKNDLIAKVDQLSGEQEVLRGELEAAKQAKVKLENRIKELEEELKRVKSEAIIARREPKEEAEDVSSYLCTESDKIPMAQRRRFTRVEMARVLMERNQYKERLMELQEAVRWTEMIRASREHPSVQEKKKSTIWQFFSRLFSSSSSPPPAKRPYPSVNIHYKSPTTAGFSQRRNHAMCPISAGSRPLEFFPDDDCTSSARREQKREQYRQVREHVRNDDGRLQACGWSLPAKYKQLSPNGGQEDTRMKNVPVPVYCRPLVEKDPTMKLWCAAGVNLSGWRPNEDDAGNGVKPAPGRDPLTCDREGDGEPKSAHTSPEKKKAKELPEMDATSSRVWILTSTLTTSKVVIIDANQPGTVVDQFTVCNAHVLCISSIPAASDSDYPPGEMFLDSDVNPEDPGADGVLAGITLVGCATRCNVPRSNCSSRGDTPVLDKGQGEVATIANGKVNPSQSTEEATEATEVPDPGPSEPETATLRPGPLTEHVFTDPAPTPSSGPQPGSENGPEPDSSSTRPEPEPSGDPTGAGSSAAPTMWLGAQNGWLYVHSAVANWKKCLHSIKLKDSVLSLVHVKGRVLVALADGTLAIFHRGEDGQWDLSNYHLMDLGHPHHSIRCMAVVYDRVWCGYKNKVHVIQPKTMQIEKSFDAHPRRESQVRQLAWIGDGVWVSIRLDSTLRLYHAHTHQHLQDVDIEPYVSKMLGTGKLGFSFVRITALLVAGSRLWVGTGNGVVISIPLTETVVLHRGQLLGLRANKTSPTSGEGARPGGIIHVYGDDSSDRAASSFIPYCSMAQAQLCFHGHRDAVKFFVSVPGNVLATLNGSVLDSPAEGPGPAAPASEVEGQKLRNVLVLSGGEGYIDFRIGDGEDDETEEGAGDMSQVKPVLSKAERSHIIVWQVSYTPE

SEQ ID NO: 9497 - protein, 442 aa, Homo sapiens
MPGGGPQGAPAAAGGGGVSHRAGSRDCLPPAACFRRRRLARRPGYMRSSTGPGIGFLSPAVGTLFRFPGGVSGEESHHSESRARQCGLDSRGLLVRSPVSKSAAAPTVTSVRGTSAHFGIQLRGGTRLPDRLSWPCGPGSAGWQQEFAAMDSSETLDASWEAACSDGARRVRAAGSLPSAELSSNSCSPGCGPEVPPTPPGSHSAFTSSFSFIRLSLGSAGERGEAEGCPPSREAESHCQSPQEMGAKAASLDGPHEDPRCLSRPFSLLATRVSADLAQAARNSSRPERDMHSLPDMDPGSSSSLDPSLAGCGGDGSSGSGDAHSWDTLLRKWEPVLRDCLLRNRRQMEVISLRLKLQKLQEDAVENDDYDKAETLQQRLEDLEQEKISLHFQLPSRQPALSSFLGHLAAQVQAALRRGATQQKKSKLSKQGCLCWKPKINS

SEQ ID NO: 9498 - protein, 282 aa, Homo sapiens
MHRGARVRDERTRPLHPHQGRLPAPCAQLRSGKRTGFPLSGNPGDVLYELLQYIKTQRRALVCGPFFGGIFRLKTPTQHSPVPPEEVTGPSQMDTRRGHLLQPPDPGLTSNFGHLDDPGLARWTPGKEESLNLCHCAELGCRTQGVCSFPAMPQAPIDGRIADCRLLWDYVYQLLLDTRYEPYIKWEDKDAKIFRVVDPNGLARLWGNHKNRVNMTYEKMSRALRHYYKLNIIKKEPGQKLLFRFLKTPGKMVQDKHSHLEPLESQEQDRIEFKDKRPEISP

SEQ ID NO: 9499 - protein, 127 aa, Homo sapiens
MPDNRQPRNRQPRIRSGNEPRSAPAMEPDGRGAWAHSRAALDRLEKLLRCSRCTNILREPVCLGGCEHIFCSNCVSDCIGTGCPVCYTPAWIQDLKINRQLDSMIQLCSKLRNLLHDNELSGRHTFC

SEQ ID NO: 9500 - protein, 518 aa, Homo sapiens [sequence omitted]

SEQ ID NO: 9501 - protein, 94 aa, Homo sapiens
APFDRRATSLAWHPTHPSTVAVGSKGGDIMLWNFGIKDKPTFIKGIGAGGSITGLKFNPLNTNQFYASSMEGTTRLQDFKGNILRVFASSDTIK

SEQ ID NO: 9502 - protein, 572 aa, Homo sapiens
MVIHVCDEAKNLKEDFTCPRDLLISEMKYFAEYLSMDAQRWEEVDISVHCDVHIFNWLIKYIKRNTKENKDCEMPTLEPGNVISILISSEFLKMDSLVEQCIQYCHKNMNAIVATPCNMNCINANLLTRIADLFSHNEVDDLKDKKDKFKSKLFCKKIERLFDPEYLNPDSRSNAATLYRCCLCKKLLTKETERRIPCIPGKINVDRRGNIVYIHIRDKTWDVHEYLNSLFEELKSWRDVYWRLWGTINWLTCSRCYQAFLCIEFSHCQYHSETVVYPTAASSLNTVGTGIYPCCNQKVLRFDPTQLTKGCKVRDHMVTLRDQGEGGDLPSCPTARMLDDLHKYRDVIVVPFSKDTVSDVGVGLCDEKGIECDVLLEPNTPWGPKTGELNAFLSLKNWTLQLKQQSLFSEEEEYTTGSEVTEDEVGDEEEVSKKQRKKEKPKKFTRQPKKQVSSPCAQRKEKALEKSASRDVSPFVMSMQKNKWDATRSLRFNQDAQREDDQRRMTEITGHLIKMRLGDLDRVKSKEAKEFAGGIYSRLEAQIKASVPVSARQSSSEKNTRSKSRFGQGRPA

SEQ ID NO: 9503 - protein, 32 aa, Homo sapiens
MGRSGKLPSGVSAKLKRWKKGHSSDSNPAICR

SEQ ID NO: 9504 - protein, 732 aa, Homo sapiens
MPGGGPQGAPAAAGGGGVSHRAGSRDCLPPAACFRRRRLARRPGYMRSSTGPGIGFLSPAVGTLFRFPGGVSGEESHHSESRARQCGLDSRGLLVRSPVSKSAAAPTVTSVRGTSAHFGIQLRGGTRLPDRLSWPCGPGSAGWQQEFAAMDSSETLDASWEAACSDGARRVRAAGSLPSAELSSNSCSPGCGPEVPPTPPGSHSAFTSSFSFIRLSLGSAGERGEAEGCPPSREAESHCQSPQEMGAKAASLDGPHEDPRCLSRPFSLLATRVSADLAQAARNSSRPERDMHSLPDMDPGSSSSLDPSLAGCGGDGSSGSGDAHSWDTLLRKWEPVLRDCLLRNRRQMEVISLRLKLQKLQEDAVENDDYDKAETLQQRLEDLEQEKISLHFQLPSRQPALSSFLGHLAAQVQAALRRGATQHLQERIKSLNLSLKEITTKVCMSEKFCSTLRKKVNDIETQLPALLEAKMHAISGNHFWTAKDLTEEIRSLTSEREGLEGLLSKLLVLSSRNVKKLGSVKEDYNRLRREVEHQETAYETSVKENTMKYMETLKNKLCSCKCPLLGKVWEADLEACRLLIQSLQLQEARGSLSVEDERQMDDLEGAAPPIPPRLHSEDKRKTPLKVLEEWKTHLIPSLHCAGGEQKEESYILSAELGEKCEDIGKKLLYLEDQLHTAIHSHDEDLIHSLRRELQMVKETLQAMILQLQPAKEAGEREAAASCMTAGVHEAQA

SEQ ID NO: 9505 - protein, 136 aa, Homo sapiens; identical to SEQ ID NO: 5304

SEQ ID NO: 9506 - protein, 571 aa, Homo sapiens
MNPLFGPNLFLLQQEQQGLAGPLGDSLGGDHFAGGGDLPPAPLSPAGPAAYSPPGPGPAPPAAMALRNDLGSNINVLKTLNLRFRCFLAKVHELERRNRLLEKQLQQALEEGKQGRRGLGRRDQAVQTGFVSPIRPLGLQLGARPAAVCSPSARVLGSPARSPAGPLAPSAASLSSSSTSTSTTYSSSARFMPGTIWSFSHARRLGPGLEPTLVQGPGLSWVHPDGVGVQIDTITPEIRALYNVLAKVKRERDEYKRRWEEEYTVRIQLQDRVNELQEEAQEADACQEELALKVEQLKAELVVFKGLMSNNLSELDTKIQEKAMKVDMDICRRIDITAKLCDVAQQRNCEDMIQMFQKKLSLHLSPIKVPSMGGRKRERKAAVEEDTSLSESEGPRQPDGDEEESTALSINEEMQRMLNQLREYDFEDDCDSLTWEETEETLLLWEDFSGYAMAAAEAQGEQQEDSLEKVIKDTESLFKTREKEYQETIDQIELELATAKNDMNRHLHEYMEMCSMKRGLDVQMETCRRLITQSGDRKSPAFTAVPLSDPPPPPSEAEDSDRDVSSDSSMR

SEQ ID NO: 9507 - protein, 236 aa, Homo sapiens
MAELVPFAVPIESDKTLLVWELSSGPTAEALHHSLFTAFSQFGLLYSVRVFPNAAVAHPGFYAVIKFYSARAAHRAQKACDRKQLFQKSPVKVRLGTRHKAVQHQALALNSSKCQELANYYFGFNGCSKRIIKLQELSDLEERENEDSMVPLPKQSLKFFCALEVVLPSCDCRSPGIGLVEEPMDKVEEGPLSFLMKRKTAQKLAIQKALSDAFQKLLIVVLGKTVLIILEVLQFQ

SEQ ID NO: 9508 - protein, 264 aa, Homo sapiens
MPDNRQPRNRQPRIRSGNEPRSAPAMEPDGRGAWAHSRAALDRLEKLLRCSRCTNILREPVCLGGCEHIFCSNCVSDCIGTGCPVCYTPAWIQDLKINRQLDSMIQLCSKLRNLLHDNELSGVKACLRRKVCEQEEKYEIPEGPRRSRLNREQLLPKLFDGCYFYLWGTFKHHPKDNLIKLVTAGGGQILSRKPKPDSDVTQTINTVAYHARPDSDQRFCTQYIIYEDLCNYHPERVRQGKVWKAPSSWFIDCVMSFELLPLDS

SEQ ID NO: 9509 - protein, 195 aa, Homo sapiens
LRGNSIGPQGAKALADALKINRTLTSLSLQGNTVRDDGARSMAEALASNRTLSMLHLQKNSIGPMGAQRMADALKQNRSLKELMFSSNSIGDGGAKALAEALKVNQGLESLDLQSNSISDAGVAALMGALCTNQTLLSLSLRENSISPEGAQAIAHALCANSTLKNLDLQWNFIQAGAAQALGQALQLNRSLTSL

SEQ ID NO: 9510 - protein, 1208 aa, Homo sapiens
MERLRDVRERLQAWERAFRRQRGRRPSQDDVEAAPEETRALYREYRTLKRTTGQAGGGLRSSESLPAAAEEAPEPRCWGPHLNRAATKSPQSTPGRSRQGSVPDYGQRLKANLKGTLQAGPALGRRPWPLGRASSKASTPKPPGTGPVPSFAEKVSDEPPQLPEPQPRPGRLQHLQASLSQRLGSLDPGWLQRCHSEVPDFLGAPKACRPDLGSEESQLLIPGESAVLGPGAGSQGPEASAFQEVSIRVGSPQPSSSGGEKRRWNEEPWESPAQVQQESSQAGPPSEGAGAVAVEEDPPGEPVQAQPPQPCSSPSNPRYHGLSPSSQARAGKAEGTAPLHIFPRLARHDRGNYVRLNMKQKHYVRGRALRSRLLRKQAWKQKWRKKGECFGGGGATVTTKESCFLNEQFDHWAAQCPRPASEEDTDAVGPEPLVPSPQPVPEVPSLDPTVLPLYSLGPSGQLAETPAEVFQALEQLGHQAFRPGQERAVMRILSGISTLLVLPTGAGKSLCYQLPALLYSRRSPCLTLVVSPLLSLMDDQVSGLPPCLKAACIHSGMTRKQRESVLQKIRAAQVHVLMLTPEALVGAGGLPPAAQLPPVAFACIDEAHCLSQWSHNFRPCYLRVCKVLRERMGVHCFLGLTATATRRTASDVAQHLAVAEEPDLHGPAPVPTNLHLSVSMDRDTDQALLTLLQGKRFQNLDSIIIYCNRREDTERIAALLRTCLHAAWVPGSGGRAPKTTAEAYHAGMCSRERRRVQRAFMQGQLRVVVATVAFGMGLDRPDVRAVLHLGLPPSFESYVQAVGRAGRDGQPAHCHLFLQPQGEDLRELRRHVHADSTDFLAVKRLVQRVFPACTCTCTRPPSEQEGAVGGERPVPKYPPQEAEQLSHQAAPGPRRVCMGHERALPIQLTVQALDMPEEAIETLLCYLELHPHHWLELLATTYTHCRLNCPGGPAQLQALAHRCPPLAVCLAQQLPEDPGQGSSSVEFDMVKLVDSMGWELASVRRALCQLQWDHEPRTGVRRGTGVLVEFSELAFHLRSPGDLTAEEKDQICDFLYGRVQARERQALARLRRTFQAFHSVAFPSCGPCLEQQDEERSTRLKDLLGRYFEEEEGQEPGGMEDAQGPEPGQARLQDWEDQVRCDIRQFLSLRPEEKFSSRAVARIFHGIGSPCYPAQVYGQDRRFWRKYLHLSFHALVGLATEELLQVAR

SEQ ID NO: 9511 - protein, 362 aa, Homo sapiens [sequence omitted]

SEQ ID NO: 9512 - protein, 482 aa, Homo sapiens
MLKFKYGARNPLDAGAAEPIASRASRLNLFFQGKPPFMTQQQMSPLSREGILDALFVLFEECSQPALMKIKHVSNFVRKYSDTIAELQELQPSAKDFEVRSLVGCGHFAEVQVVREKATGDIYAMKVMKKKALLAQEQVSFFEEERNILSRSTSPWIPQLQYAFQDKNHLYLVMEYQPGGDLLSLLNRYEDQLDENLIQFYLAELILAVHSVHLMGYVHRDIKPENILVDRTGHIKLVDFGSAAKMNSNKMVNAKLPIGTPDYMAPEVLTVMNGDGKGTYGLDCDWWSVGVIAYEMIYGRSPFAEGTSARTFNNIMNFQRFLKFPDDPKVSSDFLDLIQSLLCGQKERLKFEGLCCHPFFSKIDWNNIRNSPPPFVPTLKSDDDTSNFDEPEKNSWVSSSPCQLSPSGFSGEELPFVGFSYSKALGILGRSESVVSGLDSPAKTSSMEKKLLIKSKELQDSQDKCHKMEQEMTRLHRRVSGG

SEQ ID NO: 9513 - protein, 972 aa, Homo sapiens
PVIVEIPHFGSMRGKERELIVLRSENGETWKEHQFDSKNEDLTELLNGMDEELDSPEELGKKRICRIITKDFPQYFAVVSRIKQESNQIGPEGGILSSTTVPLVQASFPEGALTKRIRVGLQAQPVPDEIVKKILGNKATFSPIVTVEPRRRKFHKPITMTIPVPPPSGEGVSNGYKGDTTPNLRLLCSITGGTSPAQWEDITGTTPLTFIKDCVSFTTNVSARFWLADCHQVLETVGLATQLYRELICVPYMAKFVVFAKMNDPVESSLRCFCMTDDKVDKTLEQQENFEEVARSKDIEVLEGKPIYVDCYGNLAPLTKGGQQLVFNFYSFKENRLPFSIKIRDTSQEPCGRLSFLKEPKTTKGLPQTAVCNLNITLPAHKKETESDQDDEIEKTDRRQSFASLALRPQSPCERTDIRMAIVADHLGLSWTELARELNFSVDEINQIRVENPNSLISQSFMLLKKWVTRDGKNATTDALTSVLTKINRIDIVTLLEGPIFDYGNISGTRSFADENNVFHDPVDGYPSLQVELETPTGLHYTPPTPFQQDDYFSDISSIESPLRTPSRLSDGLVPSQGNIEHSADGPPVVTAEDASLEDSKLEDSVPLTEMPEAVDVDESQLENVCLSEYPQYLGNLAGSPKDVKPAEPRKLGVSSEQQEKGKSGPDEEMMEEKLKSLFEDIQLEEGVESEEMTEEKVQAILKRVQQAELEMSSITGWQNETSSGNLESCAQARRVTGGLLDRLDDSPDQCRDSITSYLKGEAGKFEANGSHTEITPEAKTKSYFPESQNDVGKQSTKETLKPKIHGSGHVEEPASPLAAYQKSLEETSKLIIEETKPCVPVSMKKMSRTSPADGKPRLSLHEEEGSSGSEQKDLKDSESDSSSEEERRVTTRVIRRRLIIKGEEAKNIPGESVTEEQFTDEEGNLITRKITRKVLRRIVIPQERKRDDVQGEGFKVKTKKEIRHVEKKSHS

SEQ ID NO: 9514 - protein, 230 aa, Homo sapiens
MAFPKKKLQGLVAATITPMTENGEINFSVIGQYVDYLVKEQGVKNIFVNGTTGEGLSLSVSERRQVAEEWVTKGKDKLDQVIIHVGALSLKESQELAQHAAEIGADGIAVIAPFFLKPWTKDILINFLKEVAAAAPALPFYYYHIPALTGVKIRAEELLDGILDKIPTFQGLKFSDTDLLDFGQCVDQNRQQQFAFLFGVDEQLLSALVMGATGAVGSFVSRDLSTLLSN

SEQ ID NO: 9515 - protein, 130 aa, Homo sapiens; identical to SEQ ID NO: 5294

SEQ ID NO: 9516 - protein, 329 aa, Homo sapiens
MLRKVIQQYLSGGMCGYDLDGCPVWYDIIGPLDAKGLLFSASKQDLLRTKMRECELLLQECAHQTTKLGRKVETITIIYDCEGLGLKHLWKPAVEAYGEFLCMFEENYPETLKRLFVVKAPKLFPVAYNLIKPFLSEDTRKKIMVLGANWKEVLLKHISPDQVPVEYGGTMTDPDGNPKCKSKINYGGDIPRKYYVRDQVKQQYEHSVQISRGSSHQVEYEILFPGCVLRWQFMSDGADVGFGIFLKTKMGERQRAGEMTEVLPNQRYNSHLVPEDGTLTCSDPGIYVLRFDNTYSFIHAKKVNFTVEVLLPDKASEEKMKQLGAGTPK

SEQ ID NO: 9517 - protein, 209 aa, Homo sapiens
RTRSVGECVEYYYLWKKSERYDYFAQQTRLGRRKDADQDLDGSDPDGPGRPRPEQDTLTGMRTDPLSVDGTAGGLDEPGVASDGLPSSEPGPCSFQQLDESPAVPLSHRPPALADPASYQPAVTAPEPDASPRLAVDFALPKELPLISSHVDLSGDPEETVAPAQVALSVTEFGLIGIGDVNPFLAAHPTCPAPGLHSEPLSHCNVMTC

SEQ ID NO: 9518 - protein, 130 aa, Homo sapiens; identical to SEQ ID NO: 5294

SEQ ID NO: 9519 - protein, 352 aa, Homo sapiens
MTEAGKLPLPLPPRLDWFVHTQMGQLAQDGVPEWFHGAISREDAENLLESQPLGSFLIRVSHSHVGYTLSYKAQSSCCHFMVKLLDDGTFMIPGEKVAHTSLDALVTFHQQKPIEPRRELLTQPCRQKDPANVDYEDLFLYSNAVAEEAACPVSAPEEASPKPVLCHQSKERKPSAEMNRITTKEATSSCPPKSPLGETRQKLWRSLKMLPERGQRVRQQLKSHLATVNLSSLLDVRRSTVISGPGTGKGSQDHSGDPTSGDRGYTDPCVATSLKSPSQPQAPKDRKVPTRKAERSVSCIEVTPGDRSWHQMVVRALSSQESKPEHQGLAEPENDQLPEEYQQPPPFAPGYC

SEQ ID NO: 9520 - protein, 1173 aa, Homo sapiens
MVTVGTNILPSRPAASANTAREDAALFSRRIPPRHKNGAAQPGAAPGPGAPGANMGNAHSKSGDRHSALPGRPELSFYGSFPRKWSENVFLDNELLTSKILSVLRPQSERGFRAGDLRYPTHFLSTNSVLASVTASLKEHPRGTLLSDGSPALSRNVGMTVSQKGGPQPTPSPAGPGTQLGPITGEMDEADSAFLKFKQTADDSLSLTSPNTESIFVEDPYTASLRSEIESDGHEFEAESWSLAVDAAYAKKQKREVVKRQDVLYELMQTEVHHVRTLKIMLKVYSRALQEELQFSSKAIGRLFPCADDLLETHSHFLARLKERRQESLEEGSDRNYVIQKIGDLLVQQFSGENGERMKEKYGVFCSGHNEAVSHYKLLLQQNKKFQNLIKKIGNFSIVRRLGVQECILLVTQRITKYPVLVERIIQNTEAGTEDYEDLTQALNLIKDIISQVDAKVSECEKGQRLREIAGKMDLKSSSKLKNGLTFRKEDMLQRQLHLEGMLCWKTTSGRLKDILAILLTDVLLLLQEKDQKYVFASVDSKPPVISLQKLIVREVANEEKAMFLISASLQGPEMYEIYTSSKEDRNAWMAHIQRAVESCPDEEEGPFSLPEEERKVVEARATRLRDFQERLSMKDQLIAQSLLEKQQIYLEMAEMGGLEDLPQPRGLFRGGDPSETLQGELILKSAMSEIEGIQSLICRQLGSANGQAEDGGSSTGPPRRAETFAGYDCTNSPTKNGSFKKKVSSTDPRPRDWRGPPNSPDLKLSDSDIPGSSEESPQVVEAPGTESDPRLPTVLESELVQRIQTLSQLLLNLQAVIAHQDSYVETQRAAIQEREKQFRLQSTRGNLLLEQERQRNFEKQREERAALEKLQSQLRHEQQRWERERQWQHQELERAGARLQEREGEARQLRERLEQERAELERQRQAYQHDLERLREAQRAVERERERLELLRRLKKQNTAPGALPPDTLAEAQPPSHPPSFNGEGLEGPRVSMLPSGVGPEYAERPEVARRDSAPTENRLAKSDVPIQLLSATNQFQRQAAVQQQIPTKLAASTKGGKDKGGKSRGSQRWESSASFDLKQQLLLNKLMGKDESTSRNRRSLSPILPGRHSPAPPPDPGFPAPSPPPADSPSEGFSLKAGGTALLPGPPAPSPLPATPLSAKEDASKEDVIFF

SEQ ID NO: 9521 - protein, 335 aa, Homo sapiens
MNNVIVRLSQISEDVIRLFKKSKEIGLQMHEELLKVTNELYTVMKTYHMYHAESISAESKLKEAEKQEEKQFNKSGDLSMNLLRHEDRPQRRSSVKKIEKMKEKRQAKYSENKLKCTKARNDYLLNLAATNAAISKYYIHDVSDLIDCCDLGFHASLARTFRTYLSAEYNLETSRHEGLDVIENAVDNLDSRSDKHTVMDMCNQVFCPPLKFEFQPHMGDEVCQVSAQQPVQTELLMRYHQLQSRLATLKIENEEVRKTLDATMQTLQDMLTVEDFDVSDAFQHSRSTESVKSAASETYMSKINIAKRRANQQETEMFYFTKGPDDVFPICHPRL

SEQ ID NO: 9522 - protein, 126 aa, Homo sapiens
MPEPSKSAPAPKKGSKKAITKAQKKDGKKRKRSRKESYSIYVYKVLKQVHPDTGISSKAMGIMNSFVNDIFERIAGEASRLAHYNKRSTITSREIQTAVRLLLPGELAKHAVSEGTKAVTKYTSSK

SEQ ID NO: 9523 - protein, 133 aa, Homo sapiens
MVRAATVGYGILREGGSAVDAVEGAVVALEDDPEFNAGCGSVLNTNGEVEMDASIMDGKDLSAGAVSAVQCIANPIKLARLVMEKTPHCFLTDQGAAQFAAAMGVPEIPGEKLVTERNKKRLEKEKHEKGAQK

SEQ ID NO: 9524 - protein, 618 aa, Homo sapiens
MLENYRNLAFLGIAVSKPDLITCLEQGKEPWNMKRHEMVDEPPGMCPHFAQDLWPEQGMEDSFQKAILRRYGKYGHENLQLRKGCKSVDEYKVNKEGYNGLNQCFTTAQSKVFQCDKYLKVFYKFLNSNRPKIRHTEKKSFKCKKRVKLFCMLSHKTQHKSIYHREKSYKCKECGKTFNWSSTLTNHRKIYTEEKPYKCEEYNKSPKQLSTLTTHEIIHAGEKLYKCEECGEAFNRSSNLTTHKIIHTGEKPYKCEECGKAFIWSSTLTEHKKIHTRKKPYKCEECGKAFIWSSTLTRHKRMHTGEKPYKCEECGKAFSQSSTLTTHKIIHTGEKRYKCLECGKAFKQLSTLTTHKIIHVGEKLYKCEECGKGFNRSSNLTTHKIIHTGEKPYKCEECGKAFIWSSTLTKHKRIHTREKPYKCEECGKAFIWSSTLTRHKRMHTGEKPYKCEECGKSFSQSSTLTTHKIIHTGEKPYKCEECGKAFNWSSTLTKHKIIHTEEKPYKCEKCGKAFKQSSILTNHKRIHTGEKPYKCEECGKSFNRSSTFTKHKVIHTGVKPYKCEECGKAFFWSSTLTKHKRIHTGEQPYKWEKFGKAFNRSSHLTTDKITHWREILQV

SEQ ID NO: 9525 - protein, 129 aa, Homo sapiens
MGVQVETISPGDGRTFPKRGQTCVVHYTGMLEDGKKFDSSRDRNKPFKFMLGKQEVIRGWEEGVAQVCSLICFVLLSSIYLLYFFIGGIFIRFKNKKSEKSHPHAIPSDQYPHKKLLLLMFLVLWFKHI

SEQ ID NO: 9526 - protein, 158 aa, Homo sapiens
MSRRKQSNPRQIKRSLGDMEAREEVQLVGASHMEQKATAPEAPSPPSADVNSPPPLPPPTSPGGPKELEGQEPEPRPTEEEPGSPWSGPDELEPVVQDGQRRIRARLSLATGLSWGPFHGSVQTRASSPRQAEPMRKLRLQDVKSIAQIPRIKQQREK

SEQ ID NO: 9527 - protein, 211 aa, Homo sapiens
MGLPVSWAPPALWVLGCCALLLSLWALCTACRRPEDAVAPRKRARRQRARLQGSATAAEAVSARLSRGPGWGPQGTDQPSSPPVPTEADPPLLPQQVGHQTARAAPGPAQQQGPAACQHGSPAPTLAGGVQGHHRTAGSPLCLPTPGAAPGSAGSCSHRRVRWPRGHLFQRGAGGPSRGQPGGQPCGGRVCPRPEAQRDPSQSPRATAGED

SEQ ID NO: 9528 - protein, 147 aa, Homo sapiens
MTLEEFSAGEQKTERMDKVGDALEEVLSKALSQRTITVGVYEAAKLLNVDVALQIHFTLIQAFCCENDINILRVSNPGRLAELLLLETDAGPAASEGAEQPPDLHCVLVTNPHSSQWKDPALSQLICFCRESRYMDQWVPVINLPER

SEQ ID NO: 9529 - protein, 183 aa, Homo sapiens
MDPGTVATMRKPRCSLPDVLGVAGLVRRRRRYALSGSVWKKRTLTWRVRSFPQSSQLSQETVRVLMSYALMAWGMESGLTFHEVDSPQGQEPDILIDFARAFHQDSYPFDGLGGTLAHAFFPGEHPISGDTHFDDEETWTFGSKASQQLEQELAGGSPVDEELGFSRGWRVNPLGPGSPERLS

SEQ ID NO: 9530 - protein, 236 aa, Homo sapiens
ETSFGSSENITMTSLSKVTTFVSEDALPETTFPALASFKDTIPQTSEQKEYENRDYKDFTKQDLPTAERSQEATCPSPASSGASQETPNECSDDFGEFQSEKPKISKFDFLVATSQSKMKSSEEMIKSELATFDLSVQALEQPFRDRSNTLNEKPALPVIRDKYKDLTGEVEENERYAYEWQRCLGSALNVIKKANDTLNGISSSSVCTEVIQSAQGMEYLLGVVEVYRVTKRVEL

SEQ ID NO: 9531 - protein, 1462 aa, Homo sapiens
MHPENKLTNHGKTGNGGAQSQHQNVNQGPTCNVGSKGVGAGNHGAKANQISPSNSSLKNPQAGVPPFSSLKGKVKRDRSVSVDSGEQREAGTPSLDSEAKEVAPRSKRRCVLERKQPYSGDEWCSGPDSEEDDKPIGATHNCNVADPAMAAPQLGPGQTTQLPLSESSVPGAPHGPPPGLRPDAPGGGGGGGGVPGKPPSQFVYVFTTHLANTAAEAVLQGRADSILAYHQQNVPRAKLDQAPKVPPTPEPLPLSTPSAGTPQSQPPPLPPPPPPAPGSAPPALPPEGPPEDSSQDLAPNSVGAASTGGGTGGTHPNTPTATTANNPLPPGGDPSSAPGPALLGEAAAPGNGQRSLVGSEGLSKEQLEHRERSLQTLRDIERLLLRSGETEPFLKGPPGGAGEGGPPAQAPPPPQQPPTAPPSGLKKYEEPLQSMISQTQSLGGPPLEHEVPGHPPGGDMGQQMNMMIQRLGQDSLTPEQVAWRKLQEEYYEEKRRKEEQIGLHGSRPLQDMMGMGGMMVRGPPPPYHSKPGDQWPPGMGAQLRGPMDVQDPMQLRGGPPFPGPRFPGNQIQRVPGFGGMQSMPMEVPMNAMQRPVRPGMGWTEDLPPMGGPSNFAQNTMPYPGGQGEAERFMTPRVREELLRHQLLEKRSMGMQRPLGMAGSGMGQSMEMERMMQAHRQMDPAMFPGQMAGGEGLAGTPMGMEFGGGRGLLSPPMGQSGLREVDPPMGPGNLNMNMNVNMNMNMNLNVQMTPQQQMLMSQKMRGPGDLMGPQGLSPEEMARVRAQNSSGVMGGPQKMLMPSQFPNQGQQGFSGGQGPYQAMSQDMGNTQDMFSPDQSSMPMSNVGTTRLSHMPLPPASNPPGTVHSAPNRGLGRRPSDLTISINQMGSPGMGHLKSPTLSQVHSPLVTSPSANLKSPQTPSQMVPLPSANPPGPLKSPQVLGSSLSVRSPTGSPSRLKSPSMAVPSPGWVASPKTAMPSPGVSQNKQPPLNMNSSTTLSNMEQGTLPPSGPRSSSSAPPANPPSGLMNPSLPFTSSPDPTPSQNPLSLMMTQMSKYAMPSSTPLYHNAIKTIATSDDELLPDRPLLPPPPPPQGSGPGISNSQPSQMHLNSAAAQSPMGMNLPGQQPLSHEPPPAMLPSPTPLGSNIPLHPNAQGTGGPPQNSMMMAPGGPDSLNAPCGPVPSSSQMMPFPPRLQQPHGAMAPTGGGGGGPGLQQHYPSGMALPPEDLPNQPPGPMPPQQHLMGKAMAGRMGDAYPPGVLPGVASVLNDPELSEVIRPTPTGIPEFDLSRIIPSEKPSSTLQYFPKSENQPPKAQPPNLHLMNLQNMMAEQTPSRPPNLPGQQGVQRGLNMSMCHPGQMSLLGRTGVPPQQGMVPHGLHQGVMSPPQGLMTQQNFMLMKQRGVGGEVYSQPPHMLSPQGSLMGPPPQQNLMVSHPLRQRSVSLDSQMGYLPAPGGMANLPF

SEQ ID NO: 9532 - protein, 139 aa, Homo sapiens
MAELVPFAVPIESDKTLLVWELSSGPTAEALHHSLFTAFSQFGLLYSVRVFPNAAVAHPGFYAVIKFYSARAAHRAQKACDRKQLFQKSPVKVRLGTRHKAVQHQALALNSSKCQELANYYFGFNGCSKRIIKDHYHSL

SEQ ID NO: 9533 - protein, 224 aa, Homo sapiens
MEDYTKIEKIGEGTYGVVYKGRHKTTGQVVAMKKIRLESEEEGVPSTAIREISLLKELRHPNIVSLQDVLMQDSRLYLIFEFLSMDLKKYLDSIPPGQYMDSSLVKSYLYQILQGIVFCHSRRVLHRDLKPQNLLIDDKGTIKLADFGLARAFGIPIRVYTHEVVTLWYRSPEVLLGSARYSTPVDIWSIGTIFAELATKKPLFHGDSEIDQLFRIFRNFFPVF

SEQ ID NO: 9534 - protein, 232 aa, Homo sapiens
MPKAKGKTRRQKFGYSVNRKRLNRNARRKAAPRIECSHIRHAWDHAKSVRQNLAEMGLAVDPNRAVPLRKRKVKAMEVDIEERPKELVRKPYVLNDLEAEASLPEKKGNTLSRDLIDYVRYMVENHGEDYKQSGKTSSILCRRGRWRWSDWFTSQLPQAEASPGPVKLEPGCKARRCCVAPEELARSHGIRRLHTHVHTPRSGEGTVLRGSNLYSSGGSRKSQNLLFSGWVM

SEQ ID NO: 9535 - protein, 112 aa, Homo sapiens
MDVHDLFRRLGAGAKFDTRRFSADAARFQIGKRKYDFDSSEVLQGLDFFGNKKSVPGVCGASQTHQKPQNGEKKEESLTERKREQSKKKRKTMTSETGFHHVSQYGLDLLTS

SEQ ID NO: 9536 - protein, 851 aa, Homo sapiens
MKQKHYVRGRALRSRLLRKQAWKQKWRKKGECFGGGGATVTTKESCFLNEQFDHWAAQCPRPASEEDTDAVGPEPLVPSPQPVPEVPSLDPTVLPLYSLGPSGQLAETPAEVFQALEQLGHQAFRPGQERAVMRILSGISTLLVLPTGAGKSLCYQLPALLYSRRSPCLTLVVSPLLSLMDDQVSGLPPCLKAACIHSGMTRKQRESVLQKIRAAQVHVLMLTPEALVGAGGLPPAAQLPPVAFACIDEAHCLSQWSHNFRPCYLRVCKVLRERMGVHCFLGLTATATRRTASDVAQHLAVAEEPDLHGPAPVPTNLHLSVSMDRDTDQALLTLLQGKRFQNLDSIIIYCNRREDTERIAALLRTCLHAAWVPGSGGRAPKTTAEAYHAGMCSRERRRVQRAFMQGQLRVVVATVAFGMGLDRPDVRAVLHLGLPPSFESYVQAVGRAGRDGQPAHCHLFLQPQGEDLRELRRHVHADSTDFLAVKRLVQRVFPACTCTCTRPPSEQEGAVGGERPVPKYPPQEAEQLSHQAAPGPRRVCMGHERALPIQLTVQALDMPEEAIETLLCYLELHPHHWLELLATTYTHCRLNCPGGPAQLQALAHRCPPLAVCLAQQLPEDPGQGSSSVEFDMVKLVDSMGWELASVRRALCQLQWDHEPRTGVRRGTGVLVEFSELAFHLRSPGDLTAEEKDQICDFLYGRVQARERQALARLRRTFQAFHSVAFPSCGPCLEQQDEERSTRLKDLLGRYFEEEEGQEPGGMEDAQGPEPGQARLQDWEDQVRCDIRQFLSLRPEEKFSSRAVARIFHGIGSPCYPAQVYGQDRRFWRKYLHLSFHALVGLATEELLQVAR

SEQ ID NO: 9537 - protein, 248 aa, Homo sapiens
MDSSLTRRGQICWYQKPGVGLDAINDANLLEACIYRLLKLYCREQPYYLNLIELFLQSSYQTEIGQTLDLLTAPQGNVDLVRFTEKRYKSIVKYKTAFYSFYLPIAAAMYMAGIDGEKEHANAKKILLEMGEFFQIQDDYLDLFGDPSVTGKIGTDIQDNKCSWLVVQCLQRATPEQYQILKENYGQKEAEKVARVKALYEELDLPAVFLQYEEDSYSHIMALIEQYAAPLPPAVFLGLARKIYKRRK

SEQ ID NO: 9538 - protein, 145 aa, Homo sapiens; identical to SEQ ID NO: 9396

SEQ ID NO: 9539 - protein, 586 aa, Homo sapiens
MKRHEMVDEPPGMCPHFAQDLWPEQGMEDSFQKAILRRYGKYGHENLQLRKGCKSVDEYKVNKEGYNGLNQCFTTAQSKVFQCDKYLKVFYKFLNSNRPKIRHTEKKSFKCKKRVKLFCMLSHKTQHKSIYHREKSYKCKECGKTFNWSSTLTNHRKIYTEEKPYKCEEYNKSPKQLSTLTTHEIIHAGEKLYKCEECGEAFNRSSNLTTHKIIHTGEKPYKCEECGKAFIWSSTLTEHKKIHTRKKPYKCEECGKAFIWSSTLTRHKRMHTGEKPYKCEECGKAFSQSSTLTTHKIIHTGEKRYKCLECGKAFKQLSTLTTHKIIHVGEKLYKCEECGKGFNRSSNLTTHKIIHTGEKPYKCEECGKAFIWSSTLTKHKRIHTREKPYKCEECGKAFIWSSTLTRHKRMHTGEKPYKCEECGKSFSQSSTLTTHKIIHTGEKPYKCEECGKAFNWSSTLTKHKIIHTEEKPYKCEKCGKAFKQSSILTNHKRIHTGEKPYKCEECGKSFNRSSTFTKHKVIHTGVKPYKCEECGKAFFWSSTLTKHKRIHTGEQPYKWEKFGKAFNRSSHLTTDKITHWREILQV

SEQ ID NO: 9540 - protein, 126 aa, Homo sapiens; identical to SEQ ID NO: 4956

SEQ ID NO: 9541 - protein, 63 aa, Homo sapiens
MPDNRQPRNRQPRIRSGNEPRSAPAMEPDGRGAWAHSRAALDRLEKLLRCSRWGKSMSTKKSM

SEQ ID NO: 9542 - protein, 136 aa, Homo sapiens; identical to SEQ ID NO: 5304

SEQ ID NO: 9543 - protein, 168 aa, Homo sapiens
MSLVLNDLLICCRQLEHDRATERKKEVEKFKRLIRDPETIKHLDRHSDSKQGKYLNWDAVFRFLQKYIQKETECLRIAKPNVSASTQASRQKKMQEISSLVKYFIKCANRRAPRLKCQELLNYIMDTVKDSSNGAIYGADCSNILLKDILSVRKYWCEISQQQWLGMF

SEQ ID NO: 9544 - protein, 166 aa, Homo sapiens
MAELVPFAVPIESDKTLLVWELSSGPTAEALHHSLFTAFSQFGLLYSVRVFPNAAVAHPGFYAVIKFYSARAAHRAQKACDRKQLFQKSPVKVRLGTRHKAVQHQALALNSSKCQELANYYFGFNGCSKRIIKVPCSPWKQYGQEEEGYLSDFSLEEEEFRLPELD

SEQ ID NO: 9545 - protein, 391 aa, Homo sapiens
MDWLVRNVTYRPHCHICFTPRGIMQFRFAHPTPRPSEKCSKWILLEDYRKRVQNVTEFDDSLLRNFTLVTQHPEVIYTNQNVVWSKFETIFFTISGLIHYAPVFRDYVFRSMQEFYEDNVLYMEIRARLLPVYELSGEHHDEEWSVKTYQEVAQKFVETHPEFIGIKIIYSDHRSKDVAVIAESIRMAMGLRIKFPTVVAGFDLVGHEDTGHSLHDYKEALMIPAKDGVKLPYFFHAGETDWQGTSIDRNILDALMLNTTRIGHGFALSKHPAVRTYSWKKDIPIEVCPISNQVLKLVSDLRNHPVATLMATGHPMVISSDDPAMFGAKGLSYDFYEVFMGIGGMKADLRTLKQLAMNSIKYSTLLESEKNTFMEIWKKRWDKFIADVATK

SEQ ID NO: 9546 - protein, 1314 aa, Homo sapiens
MALRPGAGSGGGGAAGAGAGSAGGGGFMFPVAGGIRPPQAGLMPMQQQGFPMVSVMQPNMQGIMGMNYSSQMSQGPIAMQAGIPMGPMPAAGMPYLGQAPFLGMRPPGPQYTPDMQKQFAEEQQKRFEQQQKLLEEERKRRQFEEQKQKLRLLSSVKPKTGEKSRDDALEAIKGNLDGFSRDAKMHPTPASHPKKPGPSLEEKFLVSCDISTSGQEQIKLNTSEVGHKALGPGSSKKYPSLMASNGVAVDGCVSGTTTAEAENTSDQNLSIEESGVGVFPSQDPAQPRMPPWIYNESLVPDAYKKILETTMTPTGIDTAKLYPILMSSGLPRETLGQIWALANRTTPGKLTKEELYTVLAMIAVTQRGVPAMSPDALNQFPAAPIPTLSGFSMTLPTPVSQPTVIPSGPAGSMPLSLGQPVMGINLVGPVGGAAAQASSGFIPTYPANQVVKPEEDDFQDFQDASKSGSLDDSFSDFQELPASSKTSNSQHGNSAPSLLMPLPGTKALPSMDKYAVFKGIAADKSSENTVPPGDPGDKYSAFRELEQTAENKPLGESFAEFRSAGTDDGFTDFKTADSVSPLEPPTKDKTFPPSFPSGTIQQKQQTQVKNPLNLADLDMFSSVNCSSEKPLSFSAVFSTSKSVSTPQSTGSAATMTALAATKTSSLADDFGEFSLFGEYSGLAPVGEQDDFADFMAFSNSSISSEQKPDDKYDALKEEASPVPLTSNVGSTVKGGQNSTAASTKYDVFRQLSLEGSGLGVEDLKDNTPSGKSDDDFADFHSSKFSSINSDKSLGEKAVAFRHTKEDSASVKSLDLPSIGGSSVGKEDSEDALSVQFDMKLADVGGDLKHVMSDSSLDLPTVSGQHPPAADIEDLKYAAFGSYSSNFAVSTLTSYDWSDRDDATQGRKLSPFVLSAGSGSPSATSILQKKETSFGSSENITMTSLSKVTTFVSEDALPETTFPALASFKDTIPQTSEQKEYENRDYKDFTKQDLPTAERSQEATCPSPASSGASQETPNECSDDFGEFQSEKPKISKFDFLVATSQSKMKSSEEMIKSELATFDLSVQGSHKRSLSLGDKEISRSSPSPALEQPFRDRSNTLNEKPALPVIRDKYKDLTGEVEENERYAYEWQRCLGSALNVIKKANDTLNGISSSSVCTEVIQSAQGMEYLLGVVEVYRVTKRVELGIKATAVCSEKLQQLLKDIDKVWNNLIGFMSLATLTPDENSLDFSSCMLRPGIKNAQELACGVCLLNVDSRSRKEEKPAEEHPKKAFNSETDSFKLAYGGHQYHASCANFWINCVEPKPPGLVLPDLL

SEQ ID NO: 9547 - protein, 260 aa, Homo sapiens
MPQNEYIELHRKRYGYRLDYHEKKRKKESREAHERSKKAKKMIGLKAKLYHKQRHAEKIQMKKTIKMHEKRNTKQKNDEKTPQGAVPAYLLDREGQSRAKVLSNMIKQKRKEKAGKWEVPLPKVRAQGETEVLKVIRTGKRKKKAWKRMVTKVCFVGDGFTRKPPKYERFIRPMGLRFKKAHVTHPELKATFCLPILGVKKNPSSPLYTTLGVITKGTVIEVNVSELGLVTQGGKVIWGKYAQVTNNPENDGCINAVLLV

SEQ ID NO: 9548 - protein, 2664 aa, Homo sapiens
MAEEGAVAVCVRVRPLNSREESLGETAQVYWKTDNNVIYQVDGSKSFNFDRVFHGNETTKNVYEEIAAPIIDSAIQGYNGTIFAYGQTASGKTYTMMGSEDHLGVIPRAIHDIFQKIKKFPDREFLLRVSYMEIYNETITDLLCGTQKMKPLIIREDVNRNVYVADLTEEVVYTSEMALKWITKGEKSRHYGETKMNQRSSRSHTIFRMILESREKGEPSNCEGSVKVSHLNLVDLAGSERAAQTGAAGVRLKEGCNINRSLFILGQVIKKLSDGQVGGFINYRDSKLTRILQNSLGGNAKTRIICTITPVSFDETLTALQFASTAKYMKNTPYVNEVSTDEALLKRYRKEIMDLKKQLEEVSLETRAQAMEKDQLAQLLEEKDLLQKVQNEKIENLTRMLVTSSSLTLQQELKAKRKRRVTWCLGKINKMKNSNYADQFNIPTNITTKTHKLSINLLREIDESVCSESDVFSNTLDTLSEIEWNPATKLLNQENIESELNSLRADYDNLVLDYEQLRTEKEEMELKLKEKNDLDEFEALERKTKKDQEMQLIHEISNLKNLVKHAEVYNQDLENELSSKVELLREKEDQIKKLQEYIDSQKLENIKMDLSYSLESIEDPKQMKQTLFDAETVALDAKRESAFLRSENLELKEKMKELATTYKQMENDIQLYQSQLEAKKKMQVDLEKELQSAFNEITKLTSLIDGKVPKDLLCNLELEGKITDLQKELNKEVEENEALREEVILLSELKSLPSEVERLRKEIQDKSEELHIITSEKDKLFSEVVHKESRVQGLLEEIGKTKDDLATTQSNYKSTDQEFQNFKTLHMDFEQKYKMVLEENERMNQEIVNLSKEAQKFDSSLGALKTELSYKTQELQEKTREVQERLNEMEQLKEQLENRDSTLQTVEREKTLITEKLQQTLEEVKTLTQEKDDLKQLQESLQIERDQLKSDIHDTVNMNIDTQEQLRNALESLKQHQETINTLKSKISEEVSRNLHMEENTGETKDEFQQKMVGIDKKQDLEAKNTQTLTADVKDNEIIEQQRKIFSLIQEKNELQQMLESVIAEKEQLKTDLKENIEMTIENQEELRLLGDELKKQQEIVAQEKNHAIKKEGELSRTCDRLAEVEEKLKEKSQQLQEKQQQLLNVQEEMSEMQKKINEIENLKNELKNKELTLEHMETERLELAQKLNENYEEVKSITKERKVLKELQKSFETERDHLRGYIREIEATGLQTKEELKIAHIHLKEHQETIDELRRSVSEKTAQIINTQDLEKSHTKLQEEIPVLHEEQELLPNVKEVSETQETMNELELLTEQSTTKDSTTLARIEMERLRLNEKFQESQEEIKSLTKERDNLKTIKEALEVKHDQLKEHIRETLAKIQESQSKQEQSLNMKEKDNETTKIVSEMEQFKPKDSALLRIEIEMLGLSKRLQESHDEMKSVAKEKDDLQRLQEVLQSESDQLKENIKEIVAKHLETEEELKVAHCCLKEQEETINELRVNLSEKETEISTIQKQLEAINDKLQNKIQEIYEKEEQFNIKQISEVQEKVNELKQFKEHRKAKDSALQSIESKMLELTNRLQESQEEIQIMIKEKEEMKRVQEALQIERDQLKENTKEIVAKMKESQEKEYQFLKMTAVNETQEKMCEIEHLKEQFETQKLNLENIETENIRLTQILHENLEEMRSVTKERDDLRSVEETLKVERDQLKENLRETITRDLEKQEELKIVHMHLKEHQETIDKLRGIVSEKTNEISNMQKDLEHSNDALKAQDLKIQEELRIAHMHLKEQQETIDKLRGIVSEKTDKLSNMQKDLENSNAKLQEKIQELKANEHQLITLKKDVNETQKKVSEMEQLKKQIKDQSLTLSKLEIENLNLAQKLHENLEEMKSVMKERDNLRRVEETLKLERDQLKESLQETKARDLEIQQELKTARMLSKEHKETVDKLREKISEKTIQISDIQKDLDKSKDELQKKIQELQKKELQLLRVKEDVNMSHKKINEMEQLKKQFEAQNYLCKCEMDNFQLTKKLHESLEEIRIVAKERDELRRIKESLKMERDQFIATLREMIARDRQNHQVKPEKRLLSDGQQHLTESLREKCSRIKELLKRYSEMDDHYECLNRLSLDLEKEMEFHRIMKKLKYVLSYVTKIKEEQHESINKFEMDFIDEVEKQKELLIKIQHLQQDCDVPSRELRDLKLNQNMDLHIEEILKDFSESEFPSIKTEFQQVLSNRKEMTQFLEEWLNTRFDIEKLKNGIQKENDRICQVNNFFNNRIIAIMNESTEFEERSATISKEWEQDLKSLKEKNEKLFKNYQTLKTSLASGAQVNPTTQDNKNPHVTSRATQLTTEKIRELENSLHEAKESAMHKESKIIKMQKELEVTNDIIAKLQAKVHESNKCLEKTKETIQVLQDKVALGAKPYKEEIEDLKMKLVKIDLEKMKNAKEFEKEISATKATVEYQKEVIRLLRENLRRSQQAQDTSVISEHTDPQPSNKPLTCGGGSGIVQNTKALILKSEHIRLEKEISKLKQQNEQLIKQKNELLSNNQHLSNEVKTWKERTLKREAHKQVTCENSPKSPKVTGTASKKKQITPSQCKERNLQDPVPKESPKSCFFDSRSKSLPSPHPVRYFDNSSLGLCPEVQNAGAESVDSQPGPWHASSGKDVPECKTQ

SEQ ID NO: 9549 - protein, 284 aa, Homo sapiens
MAELVPFAVPIESDKTLLVWELSSGPTAEALHHSLFTAFSQFGLLYSVRVFPNAAVAHPGFYAVIKFYSARAAHRAQKACDRKQLFQKSPVKVRLGTRHKAVQHQALALNSSKCQELANYYFGFNGCSKRIIKLQELSDLEERENEDSMVPLPKQSLKFFCALEVVLPSCDCRSPGIGLVEEPMDKVEEGPLSFLMKRKTAQKLAIQKALSDAFQKLLIVVLESGKIAVEYRPSEDIVGVRCEEELHGLIQVPCSPWKQYGQEEEGYLSDFSLEEEEFRLPELD

SEQ ID NO: 9550 - protein, 693 aa, Homo sapiens
MASWSIQQMVIGCPLCGRHCSGGEHTGELQKEEAMAAVILESIFLKRSQQKKKTSPLNFKKRLFLLTVHKLSYYEYDFERGRRGSKKGSIDVEKITCVETVVPEKNPPPERQIPRRGEESSEMEQISIIERFPYPFQVVYDEGPLYVFSPTEELRKRWIHQLKNVIRYNSDLVQKYHPCFWIDGQYLCCSQTAKNAMGCQILENRNGSLKPGSSHRKTKKPLPPTPEEDQILKKPLPPEPAAAPVSTSELKKVVALYDYMPMNANDLQLRKGDEYFILEESNLPWWRARDKNGQEGYIPSNYVTEAEDSIEMYEWYSKHMTRSQAEQLLKQEGKEGGFIVRDSSKAGKYTVSVFAKSTGDPQGVIRHYVVCSTPQSQYYLAEKHLFSTIPELINYHQHNSAGLISRLKYPVSQQNKNAPSTAGLGYGSWEIDPKDLTFLKELGTGQFGVVKYGKWRGQYDVAIKMIKEGSMSEDEFIEEAKVMMNLSHEKLVQLYGVCTKQRPIFIITEYMANGCLLNYLREMRHRFQTQQLLEMCKDVCEAMEYLESKQFLHRDLAARNCLVNDQGVVKVSDFGLSRYVLDDEYTSSVGSKFPVRWSPPEVLMYSKFSSKSDIWAFGVLMWEIYSLGKMPYERFTNSETAEHIAQGLRLYRPHLASEKVYTIMYSCWHEKADERPTFKILLSNILDVMDEES

SEQ ID NO: 9551 - protein, 58 aa, Homo sapiens
FLDRALYWHFLTDTFTAYYRLLITHLGLPQWQYAFTSYGISPQAKPKGSEGRSKRGCF

SEQ ID NO: 9552 - protein, 191 aa, Homo sapiens
MVSNFFHVIQVFEKSATLISKTEHIGFVIYSWRKSTTHLGSRRKFAISIYLSEVSLQKYDCPFSGTSFVVFSLFLICAMAGDVVYADIKTVRTSPLELAFPLQRSVSFNFSTVHKSCPAKDWKVHKGKCYWIAETKKSWNKSQNDCAINNSYLMVIQDITAMLITFLLYLQMAFLQCVYISDVSVYPNFFL

SEQ ID NO: 9553 - protein, 42 aa, Homo sapiens
MEEDQELERKAIEELLKEAKRGKTRAETMGPMGCLLQGQDTN

SEQ ID NO: 9554 - protein, 85 aa, Homo sapiens
MTEAGKLPLPLPPRLDWFVHTQMGQLAQDGVPEWFHGAISREDAENLLESQPLGSFLIRVSHSHVGYTLSYNVSAEPKAAAAISW

SEQ ID NO: 9555 - protein, 227 aa, Homo sapiens
MAPKKRPETQKTSEIVLRPRNKRSRSPLELEPEAKKLCAKGSGPSRRCDSDCLWVGLAGPQILPPCRSIVRTLHQHKLGRASWPSVQQGLQQSFLHTLDSYRILQKAAPFDRRATSLAWHPTHPSTVAVGSKGGDIMLWNFGIKDKPTFIKGIGAGGSITGLKFNPLNTNQFYASSMEGTTRLQDFKGNILRVFASSDTINIWFCSLDVSASSRMVVTGDNVGNVIL

SEQ ID NO: 9556 - protein, 137 aa, Homo sapiens
MERLLYGIGACGEVKLAFERKTCKKVAIKIISKRKFAIGSAREADPALNVETEIEILKKLNHPCIIKIKNFFDAEDYYIVLELMEGGELFDKVVGNKRLKEATCKLYFYQMLLAVQYLHENGIIHRDLKPENVLLSS

SEQ ID NO: 9557 - protein, 127 aa, Homo sapiens
MRGAGAILRPAARGARDLNPRRDISSWLAQWFPRTPARSVVALKTPIKVELVAGKTYRWCVCGRSKKQPFCDGSHFFQRTGLSPLKFKAQETRMVALCTCKATQRPPYCDGTHRSERVQKAEVGSPL

SEQ ID NO: 9558 - protein, 484 aa, Homo sapiens
MTCGSGFGGRAFSCISACGPRPGRCCITAAPYRGISCYRGLTGGFGSHSVCGGFRAGSCGRSFGYRSGGVCGPSPPCITTVSVNESLLTPLNLEIDPNAQCVKQEEKEQIKSLNSRFAAFIDKVRFLEQQNKLLETKLQFYQNRECCQSNLEPLFEGYIETLRREAECVEADSGRLASELNHVQEVLEGYKKKYEEEVSLRATAENEFVALKKDVDCAYLRKSDLEANVEALIQEIDFLRRLYEEEILILQSHISDTSVVVKLDNSRDLNMDCIIAEIKAQYDDIVTRSRAEAESWYRSKCEEMKATVIRHGETLRRTKEEINELNRMIQRLTAEVENAKCQNSKLEAAVAQSEQQGEAALSDARCKLAELEGALQKAKQDMACLIREYQEVMNSKLGLDIEIATYRRLLEGEEQRLCEGIGAVNVCVSSSRGGVVCGDLCVSGSRPVTGSVCSAPCNGNVAVSTGLCAPCGQVGSCGSSCRKC

SEQ ID NO: 9559 - protein, 130 aa, Homo sapiens; identical to SEQ ID NO: 4791

SEQ ID NO: 9560 - protein, 112 aa, Homo sapiens
MDEPSPLAQPLELNQHSRFIIGSVSEDNSEDEISNLVKLDLLEEKEGSLSPASVGSDTLSDLGISSLQDGLALHISSWIKRSGSVVLGSHCSSESPRGALGDKPHPQRFRFI

SEQ ID NO: 9561 - protein, 79 aa, Homo sapiens
EQSDYLELLVKESSGGPDSPDTEPGSSAGTVPGTEASGFDAPRMRRNGLPSCELQWGEIVRMSNRNALIPIHAYTDKNI

SEQ ID NO: 9562 - protein, 213 aa, Homo sapiens
MHLLVPPPQHSLFTAFSQFGLLYSVRVFPNAAVAHPGFYAVIKFYSARAAHRAQKACDRKQLFQKSPVKVRLGTRHKAVQHQALALNSSKCQELANYYFGFNGCSKRIIKLQELSDLEERENEDSMVPLPKQSLKFFCALEVVLPSCDCRSPGIGLVEEPMDKVEEGPLSFLMKRKTAQKLAIQKALSDAFQKLLIVVLGKTVLIILEVLQFQ

SEQ ID NO: 9563 - protein, 228 aa, Homo sapiens
MHLLVPPPQHSLFTAFSQFGLLYSVRVFPNAAVAHPGFYAVIKFYSARAAHRAQKACDRKQLFQKSPVKVRLGTRHKAVQHQALALNSSKCQELANYYFGFNGCSKRIIKLQELSDLEERENEDSMVPLPKQSLKFFCALEVVLPSCDCRSPGIGLVEEPMDKVEEESGKIAVEYRPSEDIVGVRCEEELHGLIQVPCSPWKQYGQEEEGYLSDFSLEEEEFRLPELD

SEQ ID NO: 9564 - protein, 125 aa, Homo sapiens
MLLEPGRGCCALAILLAIVDIQSGETGNYTVTGLKQRQHLEFSHNEGTLSSGFLQEKVWVMLVTSLVALQGMSKRAVSTPSNEGAIIFLPPWLFSRRRRLERMSRGREKCYSSPGYPQESSNQFH

SEQ ID NO: 9565 - protein, 565 aa, Homo sapiens
MAEGKAGGAAGLFAKQVQKKFSRAQEKVLQKLGKAVETKDERFEQSASNFYQQQAEGHKLYKDLKNFLSAVKVMHESSKRVSETLQEIYSSEWDGHEELKAIVWNNDLLWEDYEEKLADQAVRTMEIYVAQFSEIKERIAKRGRKLVDYDSARHHLEAVQNAKKKDEAKTAKAEEEFNKAQTVFEDLNQELLEELPILYNSRIGCYVTIFQNISNLRDVFYREMSKLNHNLYEVMSKLEKQHSNKVFVVKGLSSSSRRSLVISPPVRTATVSSPLTSPTSPSTLSLKSESESVSATEDLAPDAAQGEDNSEIKELLEEEEIEKEGSEASSSEEDEPLPACNGPAQAQPSPTTERAKSQEEVLPSSTTPSPGGALSPSGQPSSSATEVVLRTRTASEGSEQPKKRASIQRTSAPPSRPPPPRATASPRPSSGNIPSSPTASGGGSPTSPRASLGTGTASPRTSLEVSPNPEPPEKPVRTPEAKENENIHNQNPEELCTSPTLMTSQVASEPGEAKKMEDKEKDNKLISANSSEGQDQLQVSMVPENNNLTAPEPQEEVSTSENPQL

SEQ ID NO: 9566 - protein, 136 aa, Homo sapiens; identical to SEQ ID NO: 5304

SEQ ID NO: 9567 - protein, 174 aa, Homo sapiens
MPLSRWLRSVGVFLLPAPYWAPRERWLGSLRRPSLVHGYPVLAWHSARCWCQAWTEEPRALCSSLRMNGDQNSDVYAQEKQDFVQHFSQIVRVLTEDEMGHPEIGDAIARLKEVLEYNAIGGKYNRGLTVVVAFRELVEPRKQDADSLQRAWTVGWCVELLQAFFLVADDIMDS

SEQ ID NO: 9568 - protein, 147 aa, Homo sapiens
MDLSTFDFRTGKMLMSKMNKSRQRVRYDSSNQVKGKPDLNTALPVRQTASIFKQPVTKITNHPSNKVKSDPQKAVDQPRQLFWEKKLSGLNAFDIAEELVKTMDLPKGLQGVGPGCTDETLLSAIASALHTSTMPITGQLSAAVEKN

SEQ ID NO: 9569 - protein, 531 aa, Homo sapiens
MAEQVLPQALYLSNMRKAVKIRERTPEDIFKPTNGIIHHFKTMHRYTLEMFRTCQFCPQFREIIHKALIDRNIQATLESQKKLNWCREVRKLVALKTNGDGNCLMHATSQYMWGVQDTDLVLRKALFSTLKETDTRNFKFRWQLESLKSQEFVETGLCYDTRNWNDEWDNLIKMASTDTPMARSGLQYNSLEEIHIFVLCNILRRPIIVISDKMLRSLESGSNFAPLKVGGIYLPLHWPAQECYRYPIVLGYDSHHFVPLVTLKDSGPEIRAVPLVNRDRGRFEDLKVHFLTDPENEMKEKLLKEYLMVIEIPVQGWDHGTTHLINAAKLDEANLPKEINLVDDYFELVQHEYKKWQENSEQGRREGHAQNPMEPSVPQLSLMDVKCETPNCPFFMSVNTQPLCHECSERRQKNQNKLPKLNSKPGPEGLPGMALGASRGEAYEPLAWNPEESTGGPHSAPPTAPSPFLFSETTAMKCRSPGCPFTLNVQHNGFCERCHNARQLRQPRPRPHKALGSREVPSLPPGCYQDI

SEQ ID NO: 9570 - protein, 135 aa, Homo sapiens
MAKQPSDVSSECDREGRQLQPAERPPQLRPGAPTSLQTEPQGNPEGNHGGEGDSCPHGSPQGPLAPPASPGPFATRSPLFIFMRRSSLLSRSSSGYFSFDTDRSPAPMSCDKSTQTPSPPCQAFNHYLSAMGIFE

SEQ ID NO: 9571 - protein, 97 aa, Homo sapiens
MDVHDLFRRLGAGAKFDTRRFSADAARFQIGKRKYDFDSSEVLQGLDFFGNKKSVPGVCGASQTHQKPQNGEKKEESLTERKREQSKKKRKTMTSGE

SEQ ID NO: 9572 - protein, 628 aa, Homo sapiens; identical to SEQ ID NO: 7923

SEQ ID NO: 9573 - protein, 1002 aa, Homo sapiens
MRVHPRPHSRLAAKLAGLEPETPYPGFEFSELVTGATGTGDLTRKEPTELGASEMADEALAGLDEGALRKLLEVTADLAERRRIRSAIRELQRQELEREEEALASKRFRAERQDNKENWLHSQQREAEQRAALARLAGQLESMNDVEELTALLRSAGEYEERKLIRAAIRRVRAQEIEAATLAGRLYSGRPNSGSREDSKGLAAHRLEQCEVPEREEQEQQAEVSKPTPTPEGTSQDVTTVTLLLRAPPGSTSSSPASPSSSPTPASPEPPLEPAEAQCLTAEVPGSPEPPPSPPKTTSPEPQESPTLPSTEGQVVNKLLSGPKETPAAQSPTRGPSDTKRADVAGPRPCQRSLSVLSPRQPAQNRESTPLASGPSSFQRAGSVRDRVHKFTSDSPMAARLQDGTPQAALSPLTPARLLGPSLTSTTPASSSSGSSSRGPSDTSSRFSKEQRGVAQPLAQLRSCPQEEGPRGRGLAARPLENRAGGPVARSEEPGAPLPVAVGTAEPGGSMKTTFTIEIKDGRGQASTGRVLLPTGNQRAELTLGLRAPPTLLSTSSGGKSTITRVNSPGTLARLGSVTHVTSFSHAPPSSRGGCSIKAAEDAGTPVAHPPAFSTRRRSSTGTTRSTSLMEAEPAEPLAAAVEAANGAEQTRVNKAPEGRSPLSAEELMTIEDEGVLDKMLDQSTDFEERKLIRAALRELRQRKRDQRDKERERRLQEARGRPGEGRGNTATETTTRHSQRAADGSAVSTVTKTERLVHSNDGTRTARTTTVESSFVRRSENGSGSTMMQTKTFSSSSSSKKMGSIFDREDQASPRAGSLAALEKRQAEKKKELMKAQSLPKTSASQARKAMIEKLEKEGAAGSPGGPRAAVQRSTSFGVPNANSIKQMLLDWCRAKTRGYEHVDIQNFSSSWSDGMAFCALVHNFFPEAFDYGQLSPQNRRQNFEVAFSSAEMLVDCVPLVEVDDMMIMGKKPDPKCVFTYVQSLYNHLRRHELRLRGKNV

SEQ ID NO: 9574 - protein, 130 aa, Homo sapiens
MEEEASSPGLGCSKPHLEKLTLGITRILESSPGVTEVTIIEKPPAERHMISSWEQKNNCVMPEDVKNFYLMTNGFHMTWSVKLDEHIIPLGSMAINSISKLTQLTQSSMYSLPNAPTLADLEDDTHEDNL

SEQ ID NO: 9575 - protein, 5088 aa, Homo sapiens
MSGHTLPPLPVPGTNSTEQASVPRAMAATLGAGTPPRPQARSIAGVYVEASGQAQSVYAAMEQGLLPAGLGQALLEAQAATGGLVDLARGQLLPVSKALQQGLVGLELKEKLLAAERATTGYPDPYGGEKLALFQAIGKEVVDRALGQSWLEVQLATGGLVDPAQGVLVAPEPACHQGLLDRETWHKLSELEPGTGDLRFLDPNTLERLTYHQLLERCVRAPGSGLALLPLKITFRSMGGAVSAAELLEVGILDEQAVQGLREGRLAAVDVSARAEVRRYLEGTGSVAGVVLLPEGHKKSFFQAATEHLLPMGTALPLLEAQAATHTLVDPITGQRLWVDEAVRAGLVSPELHEQLLVAEQAVTGHHDPFSGSQIPLFQAMKKGLVDRPLALRLLDAQLATGGLVCPARRLRLPLEAALRCGCLDEDTQRQLSQAGSFSDGTHGGLRYEQLLALCVTDPETGLAFLPLSGGPRGGEPQGPPFIKYSTRQALSTATATVSVGKFRGRPVSLWELLFSEAISSEQRAMLAQQYQEGTLSVEKLAAKLSATLEQAAATARVTFSGLRDTVTPGELLKAEIIDQDLYERLEHGQATAKDVGSLASVQRYLQGTGCIAGLLLPGSQERLSIYEARCKGLLRPGTALILLEAQAATGFIIDPKANKGHSVEEALRAAVIGPDVFAKLLSAERAVTGYTDPYTGQQISLFQAMQKGLIVREHGIRLLEAQIATGGVIDPVHSHRVPVDVAYRRGYFDQMLNLILLDPSDDTKGFFDPNTHENLTYLQLLERCVRDPETGLYLLPLSSTQSPLVDSATQQAFQNLLLSVKYGRFQGQRVSAWELINSEYFSEGRRRQLLRRYRQREVTLGQVAKLLEAETQRQADIMLPALRSRVTVHQLLEAGIIDQQLLDQVLAGTISPEALLLMDGVRRYLCGLGAVGGVRLLPSGQRLSLYQAMRQKLLGPRVALALLEAQAATGTIMDPHSPESLSVDEAVRRGVVGPELYGRLKRAEGAIAGFRDPFSGKQVSVFQAMKKGLIPWEQAARLLEAQVATGGIIDPTSHHHLPMPVAIQRGYVDQEMETALSSSSETFPTPDGQGRTSYAQLLEECPRDETSGLHLLPLPESAPALPTEEQVQRSLQAVPGAKDGTSLWDLLSSCHFTEEQRRGLLEDVQEGRTTVPQLLASVQRWVQETKLLAQARVMVPGPRGEVPAVWLLDAGIITQETLEALAQGTQSPAQVAEQPAVKACLWGTGCVAGVLLQPSGAKASIAQAVRDGLLPTGLGQRLLEAQVASGFLVDPLNNQRLSVEDAVKVGLVGRELSEQLGQAERAAAGYPDPYSRASLSLWQAMEKGLVPQNEGLPLLQVQLATGGVVDPVHGVHLPQAAACRLGLLDTQTSQVLTAVDKDNKFFFDPSARDQVTYQQLRERCVCDSETGLLLLPLPSDTVLEVDDHTAVALRAMKVPVSTGRFKGCSVSLWDLLLSEYVGADKRRELVALCRSGRAAALRQVVSAVTTLVEAAERQPLQATFRGLRKQVSARDLFRAQLISRKTLDELSQGTTTVKEVAEMDSVKRSLEGGNFIAGVLIQGTQERMSIPEALRRHILRPGTALVLLEAQAATGFIIDPVENRKLTVEEAFKAGMFGKETYVKLLSAERAVTGYTDPYTGQQISLFQAMQKDLIVREHGIRLLEAQIATGGIIDPVHSHRVPVDVAYRCGYFDEEMNRILADPSDDTKGFFDPNTHENLTYLQLLERCVEDPETGLYLLQIIKKGENYVYINEATRHVLQSRTAKMRVGRFADQVVSFWDLLSSPYFTEDRKRELIQEYGAQSGGLEKLLEIITTTIEETETQNQGIKVAAIRGEVTAADLFNSRVIDQKTLHTLRVGRTGGQALSTLECVKPYLEGSGCIAGVTVPSTREVMSLHEASRKELIPAAFATWLLEAQAATGFLLDPCTRQKLSVDEAVDVGLVNEELRERLLKAERAATGYRDPATGDTIPLFQAMQKQLIEKAEALRLLEVQVATGGVIDPQHHHRLPLETAYRRGCLHKDIYALISDQKHMRKRFVDPNTQEKVSYRELQERCRPQEDTGWLLFPVNKAARDSEHIDDETRRALEAEQVEITVGRFRGQKPTLWALLNSEYVTEEKKLQLVRMYRTHTRRALQTVAQLILELIEKQETSNKHLWFQGIRRQITASELLSSAIITEEMLQDLETGRSTTQELMEDDRVKRYLEGTSCIAGVLVPAKDQPGRQEKMSIYQAMWKGVLRPGTALVLLEAQAATGFVIDPVRNLRLSVEEAVAAGVVGGEIQEKLLSAERAVTGYTDPYTGQQISLFQAMQKDLIVREHGIRLLEAQIATGGVIDPVHSHRVPVDVAYRRGYFDEEMNRVLADPSDDTKGFFDPNTHENLTYVQLLRRCVPDPDTGLYMLQLAGRGSAVHQLSEELRCALRDARVTPGSGALQGQSVSVWELLFYREVSEDRRQDLLSRYRAGTLTVEELGATLTSLLAQAQAQARAEAEAGSPRPDPREALRAATMEVKVGRLRGRAVPVWDVLASGYVSRAAREELLAEFGSGTLDLPALTRRLTAIIEEAEEAPGARPQLQDAWRGPREPGPAGRGDGDSGRSQREGQGEGETQEAAAAAAAAAARRQEQTLRDATMEVQRGQFQGRPVSVWDVLFSSYLSEARRDELLAQHAAGALGLPDLVAVLTRVIEETEERLSKVSFRGLRRQVSASELHTSGILGPETLRDLAQGTKTLQEVTEMDSVKRYLEGTSCIAGVLVPAKDQPGRQEKMSIYQAMWKGVLRPGTALVLLEAQAATGFVIDPVRNLRLSVEEAVAAGVVGGEIQEKLLSAERAVTGYTDPYTGQQISLFQAMQKDLIVREHGIRLLEAQIATGGVIDPVHSHRVPVDVAYQRGYFDEEMNRVLADPSDDTKGFFDPNTHENLTYVQLLRRCVPDPDTGLYMLQLAGRGSAVHQLSEELRCALRDARVTPGSGALQGQSVSVWELLFYREVSEDRRQDLLSRYRAGTLTVEELGATLTSLLAQAQAQARAEAEAGSPRPDPREALRAATMEVKVGRLRGRAVPVWDVLASGYVSRAAREELLAEFGSGTLDLPALTRRLTAIIEEAEEAPGARPQLQDAWRGPREPGPAGRGDGDSGRSQREGQGEGETQEAAAAARRQEQTLRDATMEVQRGQFQGRPVSVWDVLFSSYLSEARRDELLAQHAAGALGLPDLVAVLTRVIEETEERLSKVSFRGLRCQVSASELHTSGILGPETLRDLAQGTKTLQEVTEMDSVKRYLEGTSCIAGVLVPAKDQPGRQEKMSIYQAMWKGVLRPGTALVLLEAQAATGFVIDPVRNLRLSVEEAVAAGVVGGEIQEKLLSAERAVTGYTDPYTGQQISLFQAMQKDLIVREHGIRLLEAQIATGGVIDPVHSHRVPVDVAYRRGYFDEEMNRVLADPSDDTKGFFDPNTHENLTYVQLLRRCVPDPDTGLYMLQLAGRGSAVHQLSEELRCALRDARVTPGSGALQGQSVSVWELLFYREVSEDRRQDLLSRYRAGTLTVEELGATLTSLLAQAQAQARAEAEAGSPRPDPREALRAATMEVKVGRLRGRAVPVWDVLASGYVSRAAREELLAEFGSGTLDLPALTRRLTAIIEEAEEAPGARPQLQDAWRGPREPGPAGRGDGDSGRSQREGQGEGETQEAAAATAAARRQEQTLRDATMEVQRGQFQGRPVSVWDVLFSSYLSEARRDELLAQHAAGALGLPDLVAVLTRVIEETEERLSKVSFRGLRRQVSASELHTSGILGPETLRDLAQGTKTLQEVTEMDSVKRYLEGTSCIAGVLVPAKDQPGRQEKMSIYQAMWKGVLRPGTALVLLEAQAATGFVIDPVRNLRLSVEEAVAAGVVGGEIQEKLLSAERAVTGYTDPYTGQQISLFQAMQKDLIVREHGIRLLEAQIATGGVIDPVHSHRVPVDVAYRRGYFDEEMNRVLADPSDDTKGFFDPNTHENLTYVQLLRRCVPDPDTGLYMLQLAGRGSAVHQLSEELRCALRDARVTPGSGALQGQSVSVWELLFYREVSEDRRQDLLSRYRAGTLTVEELGATLTSLLAQAQAQARAEAEAGSPRPDPREALRAATMEVKVGRLRGRAVPVWDVLASGYVSRAAREELLAEFGSGTLDLPALTRRLTAIIEEAEEAPGARPQLQDAWRGPREPGPAGRGDGDSGRSQREGQGEGETQEAAAATAAARRQEQTLRDATMEVQRGQFQGRPVSVWDVLFSSYLSEARRDELLAQHAAGALGLPDLVAVLTRVIEETEERLSKVSFRGLRRQVSASELHTSGILGPETLRDLAQGTKTLQEVTEMDSVKRYLEGTSCIAGVLVPAKDQPGHQEKMSIYQAMWKGVLRPGTALVLLEAQAATGFVIDPVRNLRLSVEEAVAAGVVGGEIQEKLLSAERAVTGYTDPYTGQQISLFQAMQKDLIVREHGIRLLEAQIATGGVIDPVHSHRVPVDVAYRRGYFDEEMNRVLAHPSDDTKGFFDPNTHENLTYVQLLRRCVPDPDTGLYMLQLAGRGSAVHQLSEELRCALRDARVMPGSGALQGQSVSVWELLFYREVSEDRRQDLLSRYRAGTLTVEELGATLTSLLAQAQAQARAEAEAEAGSPRPDPREALRAATMEVKVGRLRGRAVPVWDVLASGYVSGAAREELLAEFGSGTLDLPALTRRLTAIIEEAEEAPGARPQLQDAWRGPREPGPAGRGDGDSGRSQREGQGEGETQEAAAAARRQEQTLRDATMEVQRGQFQGRPVSVWDVLFSSYLSEAHRDELLAQHAAGALGLPDLVAVLTRVIEETEERLSKVSFRGLRRQVSASELHTSGILGPETLRDLAQGTKTLQEVTEMDSVKRYLEGTSCIAGVLVPAKDQPGRQEKMSIYQAMWKGVLRPGTALVLLEAQAATGFVIDPVRNLRLSVEEAVAAGVVGGEIQEKLLSAERAVTGYTDPYTGQQISLFQAMQKDLIVREHGIRLLEAQIATGGVIDPVHSHRVPVDVAYRRGYFDEEMNRVLADPSDDTKGFFDPNTHENLTYLQLLQRATLDPETGLLFLSLSLQ

SEQ ID NO: 9576 - protein, 176 aa, Homo sapiens
MGRSGKLPSGVSAKLKRWKKGHSSDSNPAICRHRQAARSRFFSRPSGRSDLTVDAVKLHNELQSGSLRLGKSEAPETPMEEEAELVLTEKSSGTFLSGLSDCTNVTFSKVQRFWESNSAAHKEICAVLAAVTEVIRSQGGKETETEYFAALMTTMEAVESPESLAAVAYLLNLVLK

SEQ ID NO: 9577 - protein, 260 aa, Homo sapiens
MNGRALCILTKDDFRHRAPSSGDVLYELLQYIKTQRRALVCGPFFGGIFRLKTPTQHSPVPPEEVTGPSQMDTRRGHLLQPPDPGLTSNFGHLDDPGLARWTPGKEESLNLCHCAELGCRTQGVCSFPAMPQAPIDGRIADCRLLWDYVYQLLLDTRYEPYIKWEDKDAKIFRVVDPNGLARLWGNHKNRVNMTYEKMSRALRHYYKLNIIKKEPGQKLLFRFLKTPGKMVQDKHSHLEPLESQEQDRIEFKDKRPEISP

SEQ ID NO: 9578 - protein, 285 aa, Homo sapiens
MAAAEAANCIMEVSCGQAESSEKPNAEDMTSKDYYFDSYAHFGIHEEMLKDEVRTLTYRNSMFHNRHLFKDKVVLDVGSGTGILCMFAAKAGARKVIGIECSSISDYAVKIVKANKLDHVVTIIKGKVEEVELPVEKVDIIISEWMGYCLFYESMLNTVLYARDKWLEVDIYTVKVEDLTFTSPFCLQVKRNDYVHALVAYFNIEFTRCHKRTGFSTSPESPYTHWKQTVFYMEDYLTVKTGEEIFGTIGMRPNAKNNRDLDFTIDLDFKGQLCELSCSTDYRMR

SEQ ID NO: 9579 - protein, 153 aa, Homo sapiens
QNRAVARTAQNERSSRSHSVFQLQISGEHSSRGLQCGAPLSLVDLAGSERLDPGLALGPGERERLRETQAINSSLSTLGLVIMALSNKESHVPYRNSKLTYLLQNSLGGSAKMLMFVNISPLEENVSESLNSLRFASKVRLPPVSLVRTRGWL

SEQ ID NO: 9580 - protein, 1008 aa, Homo sapiens
MMFPNPEPPPETVSINKAINTQEVAVKEKHARTCILGTHHEKGAQTFWSVVNRLPLSSNAVLCWKFCHVFHKLLRDGHPNVLKDSLRYRNELSDMSRMWGHLSEGYGQLCSIYLKLLRTKMEYHTKNPRFPGNLQMSDRQLDEAGESDVNNFFQLTVEMFDYLECELNLFQTVFNSLDMSRSVSVTAAGQCRLAPLIQVILDCSHLYDYTVKLLFKLHSCLPADTLQGHRDRFMEQFTKLKDLFYRSSNLQYFKRLIQIPQLPENPPNFLRASALSEHISPVVVIPAEASSPDSEPVLEKDDLMDMDASQQNLFDNKFDDIFGSSFSSDPFNFNSQNGVNKDEKDHLIERLYREISGLKAQLENMKTESQRVVLQLKGHVSELEADLAEQQHLRQQAADDCEFLRAELDELRRQREDTEKAQRSLSEIERKAQANEQRYSKLKEKYSELVQNHADLLRKNAEVTKQVSMARQAQVDLEREKKELEDSLERISDQGQRKTQEQLEVLESLKQELATSQRELQVLQGSLETSAQSEANWAAEFAELEKERDSLVSGAAHREEELSALRKELQDTQLKLASTEESMCQLAKDQRKMLLVGSRKAAEQVIQDALNQLEEPPLISCAGSADHLLSTVTSISSCIEQLEKSWSQYLACPEDISGLLHSITLLAHLTSDAIAHGATTCLRAPPEPADSLTEACKQYGRETLAYLASLEEEGSLENADSTAMRNCLSKIKAIGEELLPRGLDIKQEELGDLVDKEMAATSAAIETATARIEEMLSKSRAGDTGVKLEVNERILGCCTSLMQAIQVLIVASKDLQREIVESGRGTASPKEFYAKNSRWTEGLISASKAVGWGATVMVDAADLVVQGRGKFEELMVCSHEIAASTAQLVAASKVKADKDSPNLAQLQQASRGVNQATAGVVASTISGKSQIEETDNMDFSSMTLTQIKRQEMDSQVRVLELENELQKERQKLGELRKKHYELAGVAEGWEEGTEASPPTLQEVVTEKE

SEQ ID NO: 9581 - protein, 1224 aa, Homo sapiens
MALRPGAGSGGGGAAGAGAGSAGGGGFMFPVAGGIRPPQAGLMPMQQQGFPMVSVMQPNMQGIMGMNYSSQMSQGPIAMQAGIPMGPMPAAGMPYLGQAPFLGMRPPGPQYTPDMQKQFAEEQQKRFEQQQKLLEEERKRRQFEEQKQKLRLLSSVKPKTGEKSRDDALEAIKGNLDGFSRDAKMHPTPASHPKKPGVGVFPSQDPAQPRMPPWIYNESLVPDAYKKILETTMTPTGIDTAKLYPILMSSGLPRETLGQIWALANRTTPGKLTKEELYTVLAMIAVTQRGVPAMSPDALNQFPAAPIPTLSGFSMTLPTPVSQPTVIPSGPAGSMPLSLGQPVMGINLVGPVGGAAAQASSGFIPTYPANQVVKPEEDDFQDFQDASKSGSLDDSFSDFQELPASSKTSNSQHGNSAPSLLMPLPGTKALPSMDKYAVFKGIAADKSSENTVPPGDPGDKYSAFRELEQTAENKPLGESFAEFRSAGTDDGFTDFKTADSVSPLEPPTKDKTFPPSFPSGTIQQKQQTQVKNPLNLADLDMFSSVNCSSEKPLSFSAVFSTSKSVSTPQSTGSAATMTALAATKTSSLADDFGEFSLFGEYSGLAPVGEQDDFADFMAFSNSSISSEQKPDDKYDALKEEASPVPLTSNVGSTVKGGQNSTAASTKYDVFRQLSLEGSGLGVEDLKDNTPSGKSDDDFADFHSSKFSSINSDKSLGEKAVAFRHTKEDSASVKSLDLPSIGGSSVGKEDSEDALSVQFDMKLADVGGDLKHVMSDSSLDLPTVSGQHPPAADIEDLKYAAFGSYSSNFAVSTLTSYDWSDRDDATQGRKLSPFVLSAGSGSPSATSILQKKETSFGSSENITMTSLSKVTTFVSEDALPETTFPALASFKDTIPQTSEQKEYENRDYKDFTKQDLPTAERSQEATCPSPASSGASQETPNECSDDFGEFQSEKPKISKFDFLVATSQSKMKSSEEMIKSELATFDLSVQGSHKRSLSLGDKEISRSSPSPALEQPFRDRSNTLNEKPALPVIRDKYKDLTGEVEENERYAYEWQRCLGSALNVIKKANDTLNGISSSSVCTEVIQSAQGMEYLLGVVEVYRVTKRVELGIKATAVCSEKLQQLLKDIDKVWNNLIGFMSLATLTPDENSLDFSSCMLRPGIKNAQELACGVCLLNVDSRSRAFNSETDSFKLAYGGHQYHASCANFWINCVEPKPPGLVLPDLL

SEQ ID NO: 9582 - protein, 191 aa, Homo sapiens
MNKLQPGSVPKINRSMQNWHQLENLSNFIKAMVSYGMNPVDLFEANDLFESGNMTQVQVSLLALAGKAKTKGLQSGVDIGVKYSEKQERNFDDATMKAGQCVIGLQMGTNKCASQSGMTAYGTRRHLYDPKNHILPPMDHSTISLQMGTNKCASQVGMTAPGTRRHIYDTKLGTDKCDNSSMSLQMGYTQG

SEQ ID NO: 9583 - protein, 631 aa, Homo sapiens
MRSGKASCTLETVWEDKHKYEEAERRFYEHEATQAAASAQQLPAEGPAMNGPGQDDPEDADEAEAPDGGSRRDPRKSQDSRKPLQKKRKRSPKSGLGPADLALLGLSAERVWLDKSLFDQAESSYRQKLADVAAQAAWPPALAPWGLCTHGNQVACHHVTWGIWVNKSSFDQAERAFVEWSQALLLAPDGSRRQGTPNTGQQVAVPDLAHQPSPPVNGQPPLGSLQALVREVWLEKPRYDAAERGFYEALFDGHPPGKVRLQERAGLAEGARRGRRDRRGRNILGNKRAGLRRADGEAPSALPYCYFLQKDAEAPWLSKPAYDSAECRHHAAEALRVAWCLEAASLSHRPGPRSGLSVSSLRPNRKMATNFLAHEKIWFDKFKYDDAERRFYEQMNGPVAGASRQENGASVILRDIARARENIQKSLAGSSGPGASSGTSGDHGELVVRIASLEVENQSLRGVVQELQQAISKLEARLNVLEKSSPGHRATAPQTQHVSPMRQVEPPAKKPATPAEDDEDDDIDLFGSDNEEEDKEAAQLREERLRQYAEKKAKKPALVAKSSILLDVKPWDDETDMAQLEACVRSIQLDGLVWGASKLVPVGYGIRKLQIQCVGGRQGGDRLAGGGDHQV

SEQ ID NO: 9584 - protein, 189 aa, Homo sapiens
KYGYLNEQVPKAPTSTRFSDAIRAFQWVSQLPVSGVLDRATLRQMTRPRCGVTDTNSYAAWAERISDLFARHRTKMRRKKRFAKQGGALAHAFLPRRGEAHFDQDERWSLSRRRGRNLFVVLAHEIGHTLGLTHSPAPRALMAPYYKRLGRDALLSWDDVLAVQSLYGKPLGGSVAVQLPGKLFTDFET
